United States Patent Application Publication US 2016/0230186 A1 - sequence listing, part 7

SEQ ID NO: 10157 - DNA, 746 bp, Diabrotica virgifera
  SmartBlast Evalue=3E-30; Info=E3 ubiquitin-protein ligase Smurf1 n=6 Tax=melanogaster group RepID=SMUF1_DROME
taatctgttctggccttattctgggggacactgggtctggatttgagtgatgtgaagatgactgtccgtctggttcagtggtactaacagtggctgtggctgtagtggtggtaggtgtaactgttaaacacgtacttgtgacgggctgaccaggtggattacacccattcctcctaataatgttgctcaaaatttgagaatttaatctaggatcggtaaattgagttgtacgcttgttgtgatcgacgaaatatatccgcccggaactggtttgtctcatttcccaacctggcggtaaaggtcctaaatgatccaaatcgagactaagtggtgttaaatctttgggtattcgaggatcatgccacgtggatacacccgttggtatatgaaaaaagtaaacttgtccttgttgagttgttcgtaattcataacctggaggcaaatccatctttaccccagccacagccccattttgattagtattactaggtgatgcaactacattaattgaattcctatttctaccttgtcttctcctgctgcttccgtcccttctctccccttcgttactaggccttggcctcctttccctcgttgtgaccctctgttgaggactaccaactacaccccctccattatttgtcacagttaccagcgtgttactcgttgtgacaggtactgccggtgcattacagctaatattattaggcgccggtactacagctgtagatgtaggagaaactgtt

SEQ ID NO: 10158 - DNA, 745 bp, Diabrotica virgifera
  SmartBlast Evalue=1E-20; Info=Peptide-N(4)-(N-acetyl-beta- glucosaminyl)asparagine amidase n=2 Tax=Gallus gallus RepID= NGLY1_CHICK
ggcaagaggagaaattcaagaaactgcttcttcggagtatatctggcaaataaactcagaagatattatagacgatacagtaactattagatactcaccttccataaataagtatgaatatagttcaggaagtaagttattgaactcgctgaacgattggagctctggagcatttaaacacgaaagtgtgttcaggaaagaagaaaaagattggaaaatggtgtacatagctagaatagatggtcaagaacaaggcatagtttcctggaaatttgatttgaagaactctaagaagactttggataaaatagatgtacaatttggccataaaacattcgaaaaaggagtagtcagtgttagaatatgtgctgcggacacatgtataatgttacccaaaggacacacatcaatcagtacagcagattttaaaggtgcacatgagttgaccatcactgctacattatctggaggctcttggcaacatgctcagttatttagacaaccgcttgatagtaacgaatttagcttcagtattatatttaagttcaagtgaaaatactttccgatgcccatttagttttagtttatcacacttttagttttaagaaggcaactgatattgccgtaaattaatttttatttattgtgcgcaattttaaaattgcccagacatgttgtataggtatgctgttctaaataaatggccggtttcaccaacgacaaatagtagtttattctattaata

SEQ ID NO: 10159 - DNA, 746 bp, Diabrotica virgifera
  SmartBlast Evalue=6E-26; Info=Reticulocalbin-2 n=1 Tax= Harpegnathos saltator RepID=E2BRN0_9HYME
ggccctgttagcttccttgtatactgtaggccctaaagacagcagactaccctgctataatcccaaagctgcattagcagtataaaacaggaggctattattataccttatcaggggcgtagctcaaggtatcctttaaactttgaatacctctgcaagagttacctatattatagacatgttaaaagcggctaaatgatcagaatcagaaaggttaccaacattcaagtctcaacgaaattacagaattgttattgaataattatatttctcacactttttaaaatgtagttgttttctacatgtagcttacctaaacgaacgaatgatccaggcttttaactcatgtctttcaatctgactatcattattaaggtccatctttttaagaagtattgctaaacgtcttttggcctcctctggaggtagttggtcgtacatttcagcctccttgtggcttcccaaaatggcttcatgatcgaattcattgtagtgttcaccttcttcagaaaagtgaccatggttccgggggctgtaagccccatctgattctctttctttatgaatctcgttggtatgactgtgcatgacacctgcgttgattgtatttgcaaatataagaaagaggtaaaacaatacacgaaacattttgtggttcttgtatatttcctaccatataatatttaaatattttaaactaatctatattttttataaaacaaacttcaagcagatgtcataacaaa

SEQ ID NO: 10160 - DNA, 743 bp, Diabrotica virgifera
  SmartBlast Evalue=8E-53; Info=Transmembrane protein 129 n=1 Tax= Camponotus floridanus RepID=E2A9Y5_9HYME
atatttaatattatcgttttccttggatttaacaatgtcattacagatttatctctttcgataccacttttgccaagctgtttttttacatttgcagtgattcttccgattattagtgttatggaggcatggaagtggacgacggaccgttgtgaaagacacccaatagttcttaatctgacaaaattctgcaataataacgtaaattggaagtcggtggctaccaacattgacatggaatttcgcagcattgaaaaaatttgtttgcaaaccagtgccatagtaactgttatcgtcactgaaaattggatcattaaagtgtcacctctaacaatgaatatagtccatcaaagcgacgcatccctagtagtcaaagaagcagatacttttgatttgtcaccagacaatacaactgttcagtacctaaacatagaagtaaaatctgagagacaaggagtagatccgtttataattaggataaacgcaagcgattttagagatctcaaagataaagtagcgaggagtataagaattttgcctaatgttaagtttcatcaaacagtagtagaaaaatttgtagatgtatttaatgagactattaagttgaatcccaaatatgaaaccagtgagatttcagagcaatgcaacggatgcatgcaagcacaaccaaacgtcaaacttcaaaaactttgcgaggaatctccagaagccgaaaacaagtgcacaaactgctactgcaggcc

SEQ ID NO: 10161 - DNA, 744 bp, Diabrotica virgifera
  SmartBlast Evalue=4E-58; Info=Hydroxypyruvate isomerase n=2 Tax= Bombyx mori RepID=B0FPE7_BOMMO
ggcagatactaaatactacgtaaatttctcacttataatgcttttgatggtctgtaaagctatgtgctctagaaataattctagaatagtaactcttactttgtcccaatccagaaagatgtctttttgtgccaaccttggtttcctttttaaggaagaaaacaatttaataaacagatataaacttgcaaagcaggcaggattttattcagtagaaacaccctttccttacggatatgaaaaagatgaagtagtagccgctaaaaatgcagcaaatgttaaccaagttctgataaatatatatactggagatgtttctaaaggggaattgggtttcgctgctattcctggcaaagaggaagagttcaaaaagagtatgttactcacaatagaatatgccaaagcattgggtgtcaagaaaattcacataatggcaggaaaaattattggagccgttacgcctgctcatgatactgtctacgaagataatcttcaatgggcagtgcagtcattggaaaaagaagacataatgggattaatagaacctataaacaaatattcagtcccccagtattatttaaattcgtatgaacgagctgtagcagtaatcaaaaaaattaatagcccgaaattaaaattgatgttggacatctttcatctccaaatgataaaaggatgtattactaattccattgaagaaatgatgccacacataggacatgttcaaattgcacaagcacctaa

SEQ ID NO: 10162 - DNA, 742 bp, Diabrotica virgifera
  SmartBlast Evalue=6E-61; Info=Neurochondrin homolog n=13 Tax= Drosophila RepID=NCDN_DROME
tcaaattttcttttatcttgatcggtttcgaaatcaacagcaattttatttaatagggcatgatatgcttttgggtctttatttgtccaggaggtaggatattttgcaattaatactgccataatattgagggcttcatctgactggaagctaccctgtgagtatatttcacccaatttgtcaacagcttgcgattcgataagttttttctgtcctggttcgtatgatgcaatgccctttaaacaattgtaagcctcaccaatagccataagactgtcatcattcgcatcatcatctgcagcttttacgatttcgagaaacgcaggaacaaactctaacatttcctttttggtagccaattcttcttcattgcaaaatacacttattatagataatgctactgatttgtatattgaaggtggacagtcgacaggtacatcggtagtaagcaataatctccgcaagaagtcaaatccaatggattcaaatatagctttcttggcgttgggtgttgcatgttttcctttcactaattttgtaaccataaacaaagccgcgaacttttcggtatcactggctgaattctttaatatattacaacacttcttcacggcatctgatacttcacccattttggataaacaaaaaaactacgacgtaactattagggcttcttgcggctccgagagatatcatggaaagactaacgatcgtagcgcttcggtagccttcatagttaaga

SEQ ID NO: 10163 - DNA, 744 bp, Diabrotica virgifera
ataatattatgtgttgatataaatttgacaaaatttatgtttgggtcaatggagatacaaaatactcttgtttttcggggtcgttaggataccagagcaaaagatcaatgtaaatttcagaaaactaaaattcatctgcttttatcaaatagcactgcagctgatatacgtatgtgtatcttcaatacatagaggcctacactttttttctgtttacttcatgagaagtgtgtacaataatttaaatatcaattaaactgattattattttatttcaattcaatgcaataactatcattagtaatggaagaaggcattccgaagctataaatcgtgaataagctgcaccagtactggatggcactaaagtggttgctgcaggtgtcttctcagaagatggatgtgtaggcgtatctgtgacaatgcgtgtaggactcggaatgtcggtagttctagggcttctctccgttggtttgtccgggattgttgttgttttaaaatcatctactgttgtattggaaatgtctgttattgtattggaatcatctgctgttgtattggaactgtctgcggttgtattggaatcgtcttctgtagtattggaatcatctgctgttgtattgggatcatcttcaggtgtattgaaatcatctgctgttgtattggaaatgtgtgttattgtattggaatcatctgctgttgtattggaatcgtctgctgttgtattggaatcgtctgctgttg

SEQ ID NO: 10164 - DNA, 741 bp, Diabrotica virgifera
tttcatacagaaaacgaagaccataaggtgctggaattgtggtgaaatgggacacgtacggagttcatgtaagtaccctaggtacaataacagtcaagagactcaccagcaggaaaactagaacgggtcggccttaggggggcagcttcgacccgcaacttttccaaataccctctcatactaatagcttctttgaaatgtcgtgaagatagtgtatatgtagatggagaaataaatggtaaaaagtatacattgttggtggataccggagcgaccaggaccattatacgaccgtcagttataaacagccgtaagaaactcttaccaacgaggttgcgactgcggactgccacaggtgaaaatgccaacatccacggagaaatccagatacaattagggattggagcagaaaagttcgtccatactgtcatagttgcagacatcgaagaagatgttatattaggaatggacgtaatgaatttgcatggatttcaattggattttaagaatagggtaattaaagttggcaacgaggaggtatttcttcatccacatgatgacagcactgtgctagcagccattaaagaagatacagttgtgcctgcgaggagtgaaacgatcatcgtagcgcggctacagggaattgtagaagaaggaacacctgttatgatggagccatggaaccacgacgaggaggttggccgaggaatcataattggaaaggaattggttacttctgct

SEQ ID NO: 10165 - DNA, 739 bp, Diabrotica virgifera
  SmartBlast Evalue=3E-24; Info=Putative uncharacterized transposon-derived protein F52C9.6 (Fragment) n=1 Tax= Harpegnathos saltator RepID=E2BUQ3_9HYME
ttatttatgataataaatgaagatgagaaaaaagaaaggaatactaatataatagcaaaggaacaagtaatagaacatgtatctacttttgaatatttgggaaatataataacagatgatgggaaaacggacttggcaataagtaataaactgaagaaggcaactagcgtgtattactctttaaataatacaatttttggaaagtcagaaataaacaacaaaactaaactcagagtatataacagcatagtaaatccgataatgacatatggggcggaaacatggattgtccaaaagaaacatgaatcaatgataaacgcgaccgagatgaaatacatgagaagaatagccggagttacgaagtttgatagattcagaaatgaagatataagaagagagctggaacaagaaccgataattaggaagatcgaaaacaaacaattaagctggtttggacacatacaacgaatggagcaaaatagacttacaaagaaggtacatgaagccaaaatgggaaacaaaagaaaaaagggaaggccgaggaagacatggatggaccagatccaagatataggtgaaaggagacacatcagtatgagggatatgaagaacctggccaccaatagaagcaattggaagaagtggataaaaggcggaacccgacatccgatgccctgaagggcactaaggattatgagaaagaagaagaattcggaaaggcccaaagcatggtacctgt

SEQ ID NO: 10166 - DNA, 744 bp, Diabrotica virgifera
ttaattgatatggggacgattttgcgcatttgcatttatcttgaacacaatctggtatttgatatatgaatgtttgttctaaattctctaaaagatcatgagtttcaataattatttcatattcgcagccatttactaaattatcagcagggttggccaaatttaaggatggaatgatgagagtttcactctgtttcacagagagtctatcaacgccatctataggattacatatcgattcctcagtatctataaatcttattgaaatttgatcaaccgtgtcagtgacattttcccacgtgagattaaggcgtatgttccggttgtcatcgagaaaagttgatatcgtgagattggtaagaatttctgatcctaagaaaccatcggaatcgtaagcagccgccgtttttaggcaaaaaacaattaatatagagatgaacaacatattccgaaacatcctaatattatatcttcatcttgggccgtttcattttatctcttggtaataccacagcgcctgtatatcaaacgataaaactaagcaaacaaacaaatcttatcgagtatcactcaactaatggccccaaaaactattttgcacgaaataagaatctgttcagctactaagttcgaagaaaattcctttttctttttttaaccaaaactgaaactttttttgtacgaccgcgaaaaagactgtgcgcacagcacggagagatagaatcgaatgattgtggattgtgg

SEQ ID NO: 10167 - DNA, 743 bp, Diabrotica virgifera
  misc_feature (686)..(686): n is a, c, g, or t
ggtgtgtcttcaattcccactacaacaaagaaaaaaacaaaaaatgacacatcactgagtttacacatctaacttggtcattaggaatcaatgaaatcgataacatacagtcaaaagctggttaagagggtatttttaaacctgatagagtttgttcacaattctgcaaataaccaaaataaacgaatcgcaataaacagatcatatatgtagctcaagaaacaaatatgataaggagaataacagttgtgtaatctatggaaaatagaaacgatgacagaacaacccttagacagaaaagcatcagtgtcctcaactgaaagataactaaatgctgaaacctactgatccataccagatgatcataaacatttaaatatcccttactataagataaaaaataaagtaatgtaaggtaatatacctattcaattgtttgttcttgttattcactccttttatttatatcctgagttgtcaaattattgtttatgattatgtatctcctcccaaagaagcctaaactgtgtagtatacacatgtatacacatacataaagtaatacaattatatatttaaaaaagaattatttaatcattctaaaaataactatttgtcacattataatgaggccattcaatattaaaattgagctgctataaatggattaaattagaaattttaangaacaaataacaatgaaacatgttaattaacactatgttcctctacatatttaaact

SEQ ID NO: 10168 - DNA, 744 bp, Diabrotica virgifera
  SmartBlast Evalue=1E-60; Info=Phosphatase SSU72 n=6 Tax= Culicidae RepID=B0XK05_CULQU
tttgaggatatttgtggttgtggaaataattaaaataataattattataagggctaaatctaactaaatcagttttatattgttatacaaacatcacattttaaaaccaattaatttggtgtagttgcagcttaaacaaatgtgatacaatatgtctaaagtagaatattctctatagatgctctcgtattttaggtgtagttatttccacataatttttatacaaataggacccaaatacaataaagatgtatataagtgatttacgtattgctgtaatatgttctagtaacatgaaccgtagtatggaagctcacgcttttttggccaaaaagggatttgatgtcaaatcttatggaacaggtgataaagtgaaaattccaggttcttcttttgataaacccaacgtttatgaatttggaacctcttatgaagaaatatatctagatttgcttaaaaaggacaaatctttgtatacacaaaatggactacttcatacgctagaccgtaataggaggataaaaacgcatccagagaaatttcaagaaactccagaaaaatttgaaattcttattacatgtgaagagcgagtgtacgatcaagtcttagaatatatggaaaataaaactcccactgaaaattccatagtacatgttgtcaatattgatatacaggataatttggaagaagctactattggagcctttttaattactgacctatgcctaatgatagctagagcag

SEQ ID NO: 10169 - DNA, 744 bp, Diabrotica virgifera
  SmartBlast Evalue=2E-10; Info=Protein FAM8A1 n=1 Tax=Camponotus floridanus RepID=E2ASV8_9HYME
gctgcatttgtcactgatactgtttcggttggtctgcttggtattggcgttatagtttgcactgatatcaccataagtcccatatagcgtttccctggagttgccagaaatttgccttgcataaaataagcctcgtatccacatactattaggcgatgcacaagttccaatgtaaggagttcaaatgccattggtactgtaccatccgaattttccaaatttttgtggaacaactcaagaccataatagccagtgtcaataatgtcaaaactttccaataggagaaatgtcagtgctactttcaacaacaaaaggagcaagaagtccatcaactctgctgctgctctcttccaaaggggaggtataatgaattcatagataggtgggggttgattattttgtgcaggttgtcgagctgcttgaaacaatggttgttggtaattgccatttggtgtaaaaccaactctttgccttaaaacatttggctgattttgaggttgaagattagcaaaaggatttacaaactgttgaaaagaattttctctgacattgcccagattgtaggaaaatcctgcacatacattgtaatgccataatcttgcttcatctagccacttctttagtttctcaatgtattcttctctttcttttttttctttttgcattaattgttcataatcttcctgatccttagaaattgtatttatatcatccatatttttattttcctattttcactttcat

SEQ ID NO: 10170 - DNA, 738 bp, Diabrotica virgifera
gttaagggttgtttgaacggtagtgtataactttttgtcacaagaaaaggtatgtgaatatgttgtgattcatgcaagtttgaggttataatttgtccagttaaaaaatgtaaaattaattggcttctatcctgtattaatagttcatcagaaatatgtgttcacttgaatctcttacttatgcaatgccaatttatcagggatgtctctttaggtttacatacagtcggaaaggtgaaggattgcccatgagcgatcgcatcaatcacttattttgtatttgctgtctttttctataaataacaaacgtttgttatagaaagagacagcaaatgcaggagtgggtgattgatgtgatcgttcatgggtggtctttcatttttccgactgtacaagggataaaccatggccgtcatattagatgtggcaacattgtcgagctgtcaaatagagggcctatttataaaatttaatagtggttaatagctggaagaatacaatttgagagttttatttgattaaattaacacaaaatatttattttacttagattattatagacaaaagtatacaaaatacacttataataaatgtgatatgagaaaaatattttaaaagaaatggtagatgatcgaaattaaactcatattaaagaactgtcttggaaacttttaaaaaattgtttttcaaagtatgtaattataaattagagtttgcaatgtattatgaactatggtt

SEQ ID NO: 10171 - DNA, 744 bp, Diabrotica virgifera
  SmartBlast Evalue=0.000000009; Info=Pancreatic lipase-related protein 2 n=1 Tax=Harpegnathos saltator RepID=E2C0E1_9HYME
gtaatgtcatcgacttgataaacatttaatacatattaagtgacaggcaaattgtaatattattataataaccatgctttactaatttacaagttcattaatataagtatttactgttgatttagactggctgaatgacaatagtccaagataaaaaagaaattaaaaaaactacaggaactaaattaagttgtacctatttaattgtagtggtgatcgtattcaagactgaccgcataaaatgaagattctacttattgtgtgtgttatagtgttaggaagaattaatattaattggagcttacccacagatgacaaaaagaaggcctattacagatctctaccaagagtaaattttttcaaagccgatgctaaagatagtgatgtaatatacaccctatttaaaaactcctcccctacagaaggacagattgtaaataaagacacatctaactccataatcaaggaaaaagacataccaactgtactaataatgcacggatggactacagatgatacgtcaccatggtacagaccactaagagatgaatattttaaacaaggctcccataatataatttttttaaattggagtaaagctggaaataacacttaccaagtgtcaagtgccaattgcaaacctgtaggaaaattcatcgctcagtttttgattgcttcaaaagtttaatttgagcaaagtgcatctaataggtcattcacttggatcacaattatcatgttata

SEQ ID NO: 10172 - DNA, 741 bp, Diabrotica virgifera
cgggataggttcacaatatttaattttttgcataaaattttctaaaaaagtatatttaagtagatataagactgcaaagcaaaatttaccttttaaaaaaaacatatcttcagtagtcagaaacttaaaaataggccttttttatgttttattgcaaaatgggaaataagaccttttatttaggactaggtacgtatatcagaacaaaagtcacataaaaatatgttgttcttttctgcagtatgagaaacgctttatcgctatttaaaaaattaataggccaacaaataaataggtggataaaacgggacataaaaaaactgtatcccattttatccaacttataagtgtcccgttttgtccaactcagacatttttcaaaacaaaaatggctcctgcctaaacgtgaaagtaaaattagatagactacacatgagaatattcgttaatgagtgcttaattaaatgtaatagtcaccggaattatatgtttagatatgtaggcaatataatgtagaaaacaacgcacttaaaagtacaaagtaccaaaaaatagagtcaaacaattctaaacacaacaacttttcatcaaataatggcatcgaggtaaaacgaactgagaatgttaaaatgacgactgagaacaagttttcgtcgttgtccgattgatagcagcactagttgggtctctaggctaggtatcccgttttatccgactatcccgttttatccaactctccct

SEQ ID NO: 10173 - DNA, 741 bp, Diabrotica virgifera
  SmartBlast Evalue=0.000000003; Info=Putative odorant-degrading enzyme n=1 Tax=Antheraea polyphemus RepID=Q86MC7_ANTPO
tgggattgccgtgtttgataaagttggtccagagtttaactgtgcgtgaacgtgttagataatctgctttactgccttggtgaccgaagtcaaaaagatagcccagatcttcggtatggccaacaccgcttgttgatctatcggttcggccccatagagctccttcatatccgaagtgataagcatacacattggtgtaagctgagtaaagcctaatggcctcttggattggtctttcgaattgcgagtcagaaatatacctcataagtcttgtgttagataaagcgatcggaaaaatgctaaaatattcttttttgatcttcttacccagcgctgccttatcagacttatcagcgttcaaatcatcaggaaccaataggtcgtgattagaatcaaatttcaataaccatactttcagtaaaagtggcaattcgtcaaaatatccttccaatgatgtgtaacctgccaaaataggcacatggtggaatttcccttcctttagaagttggtgcgaattttcagttataactgccctgaatgattaggtctttgactggcgtaaatactaaaccttgtagaggatttgaagctacaactttactgctcattattgaacttgcagcttcttgtaattcatcaatatcaagttctttcaaaccagctaagatagtggaagaagaatgggtactaatgtcgaatttttctgccagttccttagtaacttctggaaggcctttcgcc

SEQ ID NO: 10174 - DNA, 744 bp, Diabrotica virgifera
  SmartBlast Evalue=3E-36; Info=ATP-dependent RNA helicase DDX42 n=2 Tax=Formicidae RepID=E2BME0_9HYME
gacaccaatcaatgtcattttgacaaaccgagaaaaactattaaagtttattaaatggtaaaataaaaagtatattactattttcgttcacaaaatatttccttcattcaagtggtcagtttaaaaagaatgattaacacatgtatttatcaaataaacatgcaccgataaagtaccttagatctacaaatttcatattccagggcatttaactgatatattataagaataattatggcttttaattatgcaaatattcattcaaatcaaaaacggcacaatgcggtgcctccgccaagcagtggcgtttccaaacagggatattctaccatgaatgcaattagtcagaatgcactatctgcagcttggggaggtagcaggaagagagttgccacggaagatgaatattttgatgatgacgaagaggagaccgttccagatttggcatatattccagcaccaggtagtcctactaggctggagatgatgcaaaagaaaaatgttgaggatgatgaagatgatcccctcgatgcttacatggcaggaattgaacagcaggtccatagagaatctcttcaaaaatcggaaccaactcaaggcatccgtaatgatttagaagaagaggatgtagaagaatcgtattatcgatatatggaagaaaatcctaatgcaggagttccacaaacagatgacgaccacccggaggtagaatatgatgaggacggaaaccctatagctccagac

SEQ ID NO: 10175 - DNA, 741 bp, Diabrotica virgifera
ttacgtaactgacatatctgacccacagatacagtatatcttataaaaatatcaatattataattatttatgcagcatattcacaaaataaaatcccaaacaaaacaaatgatcagactaagattgcatcttcctatgcaaaggttggctttcaaacgtctctaaacgtagccaaaattttagtcaaatgttacattggtttccggaggtttagaccatggtctaggattacttcttcttgggtactcttctaattctcagttaacggttgaggactacataaaagacggtcactcaattcatacggacgtagaacggctactgagtgagtgtcctgaggtagacaactccgaacgttatcgcattatcattgatgctgttgcagacaaaatttcaagaagtaatgccaaaacgcgaatgacaagcccggaaatcattgtatcaaaacaaaacaccggatatgaataaacacatttcaatcgacataaacgcatgtattagttttataacgtttgtaactacatatagacggagaggcagcgttgaaaaatctctttgaacccaccaaagctaaactcttcacagttgaccactgtgactgtgcagagaaacacactgcggtcggccaagcgaaacgcagaacaggggctactgagagggcatcaaagtcgctttcccacgaaggcaattaaatccattcaccaaggccgaaaatcagcacacacactccaaaccgaatac

SEQ ID NO: 10176 - DNA, 743 bp, Diabrotica virgifera
  SmartBlast Evalue=5E-76; Info=Proteasome subunit beta type-2 n= 1 Tax=Harpegnathos saltator RepID=E2BY51_9HYME
acataacctataataaatagctgactatcattacatagcgctttttgttattgcaaattgtcggcccgagttattttgtacaatggagtgtctacttggtatcaaatttaatgactacgttcttgttgctgcagatatgactgcagcgcaaagcataattgtaatgaaaacagatgaaaacaagcttcataaactttccaataagcttgttatggctgtttctggtgagtctggggatactacacagtttgcagagtatatagcaaaaaatattcaactttacaaaatgaggaatacctatgaattgagtcccaaagaagctgcagcatttactagaagaaatttggcagatgcactcagaagcagaagtgcataccatgtaaaccttcttctagctggatatgatgacaaagaaggtcctcagctatattacatggactacctagcatccatagcaagcgttgattatgctgctcatggttatggaggattcttttcactgtcaattatggatcgtaattatcggcagaaccttagtaaagaagaaggttacgaacttttgaaaaaatgtgtgaaagaagttcagaaaagattgatcatcaatttgcctaactttaaggtgcagtgtgttgataaaaatggcatccaggatatgcctaatatcactgctaaggatttggtttaatttagtttgatataagttatgtatttttttattattaaataaactgaattttcttgta

SEQ ID NO: 10177 - DNA, 743 bp, Diabrotica virgifera
  SmartBlast Evalue=5E-76; Info=Talin-1 n=1 Tax=Camponotus floridanus RepID=E2AHI2_9HYME
atccagcaatttctctcccatgcttccatcatccatcaatgctgctatcattttgacatctttagtcatttctggtaaattactaccgattgttgtaatggcagctccaacagcagtatggtccacttcatcttgcggtccagaggtgagcgtaaccacttgagcagtagctgcgctcatggcagctatctgtgatccgacattttgcttcttggtatccaaagtaacttgcttccatttctttgcagctggatctgtacccaattctggaacgtgtgctctggcttcaagctcgatttctgattctttgattctggattgcgttgcggaaattgttgataatagagcacgttgtggttctgatattatcatcgttattttggtttgttgcatgttggtagtcgttggaggagcatggccaacattgacagcgccacttactgtggtctgctgaggaccacccatgacacccattgtaaaagttttctcggcatcagcggctctcattactgctggtttggccaaagattcaatgctggttctgcccatcttactagattcgtgttgcaaaatggttgctttctgtttagcaacattctcttcgaacatagtagatccctcgtctccttcgataccaaaatgatccttagcttgttgtttcttcaagatgatatcaatgtacccagctataatctgctggatctgctctgcttccgtcgtttgtactgaataatactgatcgg

SEQ ID NO: 10178 - DNA, 738 bp, Diabrotica virgifera
attctcttctccgctatcagaacttcttaacataggtactatctttatttcctcgtttcagaattgttacccttgttaatatggttctgaatttctgaaagtttgtcttagagcatttgtatgtttcatcatatttaattagaataaaccacaatttttattgaaaaaacgttatatttgacgttccaaattcaaagatagcaagtccctgtgtgatagcagtcataatctagagaagataaaattattaaatatcactatatcacgagtttcagtccaccataatccaggctgactatcatttatcaaataataatttcactgtacttgtattttgtttatgcctagttacaccaacagaacttaaagcacgacttaagcttaagatctgttcgtgcaaccagacattaatgtttcattaagggaaatattggtaattttcattggttttgtgggtatttctcactcgtacaagctatcctgccagtgaaataatatattttcctgatatagttaatcaaaaatacataattttgctgataagttttcaaatattttgtagattgtattcagtagagctattcctctacacttgtagcacatacttttgtcacttttttggtgaagtggacttaaccacgtcaagtttctactcgtttaataatttagttctttatatgtcttctcaagttgtcaggcaattctagctctccatcctttcaatactctgccctaatg

SEQ ID NO: 10179 - DNA, 743 bp, Diabrotica virgifera
  SmartBlast Evalue=4E-11; Info=GATA-binding factor A n=1 Tax= Harpegnathos saltator RepID=E2BZQ1_9HYME
ttttaattgagaaacttcaaaagatatgcttccataaggtcacttactcactttttaccaaaaaacaaacaattccaggaagtaaaagataacagataggtaaattaagcccacgaaaattcatgaatatttctgataagtaggtgcaacattccacataaacccaactaccttcctaatgcgataagaacaaaggaccctaaaatattctcgtgggcccctcagatccgcttttgtattcaaaccgaccgccaaacgacccatcgcctcacctgccagggtgctcctgaccctcggattggggccacgcgcatctcgcccaactccgctgcctgtcgggcctcagttgtggttggtgctcggaggctcacagaggtgccccacggttgtcaacaaacaactgacagaagcgtttctatgcgatttaatcgaggtttggagtttgaagtgacgatatttggggcgatcgctcctttggaatatggagtcttggcgcagttatgcaactatttgcaggttgtgcttgcagaaagacggctttatgctgggaatatttaatcacatacaaggcaaggacaggagcatttacaagaagattattgattgcacggcactccagatatccagtggagatggtttgcccaacgtaatttgccatagatgcctctacaagatagaattttgtctggaattccgtcaactttgtttcatgtctgatgctactctgcgccaattgactggtg

SEQ ID NO: 10180 - DNA, 736 bp, Diabrotica virgifera
attgtatttaattacagagtaatttccacatactaatatatttgtcaaattggcctctgtaccaccatcctttattatattacgaatatgtgtgccaaatatctctacaaaatattcaaaattacagccgcaatcttggaccgcgtttgttgctacctgttgattgctactgttgcctcttaatgaattccctcttgccattattactgtgacaaaattgacttggtagaaagagatcaattattacaaataattttttaaccccactagcaaagataaacctatgttacattttaagaaatacaactaactattttatttatgtactttcctcgtttaatggatcatgagagccatttacgtattctactacacttgcgagcaaaaaaatcgactgactcaatgaattgtagtttatgcttagttatttcatgttgcgttctttgaattaaaacaactaatacaaaaaatattgtctatcatagagcttccaaaatataattgtctttcgcaaattggcaacttgttgtaaaattgtggaaacgtgtctcacaggcttaccgtcgataccaggagaccggtaacagtaactacagtagacgaccaagtttggatcgaagaagttcaatgacagagagggatgattgattcattctcctgaactgcttgcggaatcggcacgagacataacccggtctatatagacatttcaaataacagaaattgccggagagcc

SEQ ID NO: 10181 - DNA, 728 bp, Diabrotica virgifera
atattagcaacaacataaaatactctaaaatgagtataacgttcagttttttgcgaatcgattcgctatcaatcatacgtccatttaaaattgtgcagttatacggaagtttgttaataacgatcattttatttgttaatagcacgttttaggctaaaataccgctttattgtcttttaatatgaatttatattaatgatgtcgagttttttctatcgaatttacaggttgtccaaaaaacctataaaatttgcatattccacgagccgttttatgacgatttgacattgaaactgctgaaaatggtttggatgaatcagatattgaattcgattgcaaatatgacctccgtgattatgaatccaacgatccatcagaaacagctgcatttaaaatgttacaaaagaaaaataatagattaatggtaaagaacaaaaaagaaaagaagcaagaatgaatgaccgataaaatattgcagacgatggaagagcgaaggaaattaaaaggtacaaatgtcaaaaataagaatatataacgggaaatgaaaagagcaaaagcagtatggctgatggagaaatgtacggaaattggaatacatgacgatttccacgtgcacaaaaagattaaacaggtgcagaacatcaaaatacaacccaatatggtctaagagctagcaatgttttcgagaaattatcttaagacggccgattccttcatatattgttccc

SEQ ID NO: 10182 - DNA, 742 bp, Diabrotica virgifera
ctcattttacaatgtcttaacactggccgggcaataaaaaaaggtatttatgtaccgctgtttagtactctaacgcttcgaataaaaacagattttaaaaattcaacaaaattcaatgtatcagttgtcaatggttcccactgcaagttattagataaataaatatcattttacaatgacgacacagtcttggcaataaaaaaaggtatagatgtaaaagaagaagaagaaatgtagaaaatattttacctctatttagatatttatacccttttatacaaataccaacttcgcaagtgcttgggcacgctcgtgtcgagtcgagcgcgtatattaaggggttaataatttttaaacgtgtcatttggtctgtgtcacatgtcagagattggacattcttaatgaaacactctgtatagatctgtaataaccaaaaaaattttcaatagctggatttgttactgtcccgaaaaaggtctttttggcttatttccctggtgtagaatgacttaaagtaggattaattataaataatgaaacatatcgattcgtggtattgctttaaatgtgattaatttcattgggaaccactttaatgccataatgcaagtgcaatatatcattaatttgttgtataattcagctgtttttagtattttagttttgtaatattttacatatttttaacacgaaaatttttgttgtagttttatagaatagttaataaaaataaaattcgtta

SEQ ID NO: 10183 - DNA, 735 bp, Diabrotica virgifera
aataatatatttattattgttaattaaatatctatttaggtataaagataccaaatcgataagattgattattttaaatttttgtatcacagtactcgacattttaataaaaaatgcacccctatgagcaattcgtataaaaatcaaccacataaaaattctaatgtacaaacctatacacaacttaaaaactatacactttgataacaccagaatgtactattacttactgtcacccacaaaaatgtacttgtcctaagaaaaatacatcctccatccaaaaaggttaaaaaaattttttttttgaaaaatttatacattaacaaaattttacattgatacgttaacaaaaagtatattatcaatcaaaaaatggtttttgctttaacttatactattttcttattaattagcaatatctcagattgttcattatgtaataggctgttttccgctgacccattcgtaaataattttgttttgaatttattttaataattttcgaaaaatgttagtttttaaaaaaatattgccacttatttctggacagaggtagcaatccatgtttatagctttatttttggatctgttttatattttagcttcctcaattatatttttttttcttaattatacactgacaggcacaaaaaaaaccgaccaccccacaaaatatgtcattttcgatgtctcgaatttcccaaacccgttgtccgatctaaatgattttttaaa

SEQ ID NO: 10184 - DNA, 737 bp, Diabrotica virgifera
ttagctatgctggagcttaagatttgttggtgcaaccaggtattagtgtcctatattttattaaatagtacaggatttgccttttttcgatttaaaaacaggcaacgctgaattttgatttgcatttgtgaccaatatttaatctaatgtaaagtaaatgcaaaataaattatatgacgtataacgacagttattttgcaattattatacattcttatcatattatatcttcatatatagttgagtcccgcgagtctttacccgtgcgtcatcctttaaagcatacgaaataagtcggaaatttactaaacgcaacagcaagtgacagaaagtgggtattattccgatcacgggttatagtataaaatttgacgttatcaaataaatagaatgtcaaatttaagttttgctttaaaattttggtgcataattacagctacatttgaagtagcttaataaattcttttattatcattgattaataaataaataaacaatttataaaaaaattcgataacatattttctttttgttattttattcactttggcggaacattaaacacaagcattccttaactgtgcaacaatgaggttatttgtacgttgtcaaaatttatcgtaaaataacataaacttatcataaaatttctaactccaatataaaattagttgtgaaaacaactgttggtatactataaaaaacttcaaaatgcaagaattcgacaaaataaccgc

SEQ ID NO: 10185 - DNA, 735 bp, Diabrotica virgifera
  SmartBlast Evalue=2E-60; Info=Zinc finger protein n=1 Tax=Aedes aegypti RepID=Q16FN5_AEDAE
gtggttgtatcgatacggtaaactgccactttaataagaattgtatacttaacctatgaaaatagccgtcaaatagttaaaatgtgtaaaatataatgtgtagcttaggtataaagtatcttggaacaaaaagtcctattttactatgtgttattttcacaatataatattgttggatagaatctacctacttgtatcaactataaatttcttaaaatatgttataagatcagcatcgaacacttacttgaaaattgaattcgccgtttctgtttagatataacttagataacctaattttcagtactaaccggctctcgtgcatgatgtatttgtacgtgtttattgtgatttgacttcgtcgtggaagttttaccgcatatatgacaagtgtaaggtctaacgccgctatgcacccgcatgtgatctttgagatagtacgaccgatggaaagacttaccacacacattacaattaaacgttttatcattctcgtgttctttgacgtgacgtagacaattgtattttctaatgaactgcgctccgcaataattacaagtgtacggacggacactcttatgagaattcatgtgagctgtatagtcggattctcgaatgaaggcccccttgcactgatcgcacttgaagggcttcgaatttctgttggcgtgagtccacttgtgtaacttgagattccatttagtggtaaagtctttattgcacatcaagcacgtg

SEQ ID NO: 10186 - DNA, 738 bp, Diabrotica virgifera
tgtttatgcgacacagtataaagaagtctgtatgtcttttatagaatcgtaaactttgcatttgatcatatatattcagctgacgcttttttcttacaatctaaaattcataaattaatgatttatactttttaatctttgccaaactacatagttcaagaatattttttttattataaataatgtttaaaatttaaatacctaaaaattaccagaaagccaaaaaaatactcaaaatattgcgtatactttttttctaataaataatattgttttgtgctgtctgcgtaaataatgattacttgatgactaagattggtcgtattaactcagataccttcccgggtccatgtacaacaactttgcttgatgtcatcatatgatcaaatgcacagtttacgattcgataagggcatacagacaaacattcatttttatatattatagagaacaaggaaatatttagattaataaggggttggtgatagaaaagtgaaaaattaaggtccaaaaaaataaaaaagaacgtcggggggggggggggagtgaggcaaccccctttttcacttagattggtcgtactaaggaagctttaggggattatgtataacaactttgtttattaaggaggtcaatcataataatattatgatattatcattattatgatcaaatgcatagtttgcgattctgtggaggacatacagactttttatgttgtgtcgtataaatggtaaa

SEQ ID NO: 10187 - DNA, 741 bp, Diabrotica virgifera
  SmartBlast Evalue=3E-88; Info=APAF1-interacting protein n=1 Tax= Camponotus floridanus RepID=E2ARR3_9HYME
tccattgtgttgggataaattttatcttacattaagttgttattgtagatttttaaggtttaattttgatttaaaaatggcctaccgagattctgctttctctgaggaacatccaagaaatttgattcctgaattatgtcggcaattctatgatttaggttgggttacaggaacaggtggtggtatcagtataaaacttgagaacaaaatttatattgccccatctgcggtgcaaaaggagaggattaaaccagaggatatgtttgtgcagaccatagacaacaaagatttagaactccctcctccagagaaaaagcttaaaaagagccagtgcacacctttattcatgtgcgcctatacaatgaggaacgcaggggctgtcatccatacacattccaaggctgcagtgctggcaacaatgctatttccaggcaaagaatttaaatgcacacatttggaaatgataaaagggataagaaaccaaaaaactggtgttaattttagatatgatgaagagctaatagtgcccattattgaaaacactccatttgaagaagatttgagagacatgttagcagagactataaaaaaatatccccacacttgtgcagtgctggttcgtagacatggggtatatgtttggggagatacatggcagcatgcaaaaaccatgactgagtgctatgactatttatttgatgtagtggtgcagatgaagcaacttggacttgacccttcgct

SEQ ID NO: 10188 - DNA, 726 bp, Diabrotica virgifera
cagactttagcagattttatagaaaagaagagtcttcatattggatagacacctgacatctgctctgttaggttgtgtacatgctgacagctaccagccgccatattgtgttggtcatatgttgacagctgaccgccgccattttaggttggcagcttgacttcaataaagcaataggagcgcggcggccatcttggaagtcttacaatgatgaacagtgatgattttagaatgttggataaaagatagaatagttagttactgtgaagtgagagaaaatcactacaagaaaagatacatggtgaatatgcttcacaataagtaaaaaggcatcagaggagacggatgaatttcttcaccctaattgatactgcctgcaattaattttcaatctgtttagtaaatattatttaaataattttttctgcaaccgtgttaaagatgcaatttttagcactacatacgagcgttaaaaatgttactttaaggcactagtgctttaaaatttttaaggcactgcagttcgtattgaccgtataggcaattttgatgtaatgtcaataaatatcaaaatggaatgtcagtcaagttcaagtaaaagtttttgtagatattgtcctgtaattacgtttgtagaaaaatattgtatgctatgcgtattgaaaagtacatttttaaggcactcatgtgaattgcagaactcgctatcgctcattctgcaaactt

SEQ ID NO: 10189 - DNA, 741 bp, Diabrotica virgifera
  SmartBlast Evalue=3E-24; Info="Transcription initiation factor ia, putative n=1 Tax=Pediculus humanus corporis RepID=E0VUA1_ PEDHC"
acaagtgttaactagtttataagcacgtgtgaaaaaaaagtgtattataataaattgtattaaagaattttccaggtgctaagttaaacatataaagttggtgctccactcattttgaaagctcggatttttgtgcaaatcgtgttcaatctttcttatcgtggtaaaatcaaccatatcgtcaagatgtctgtaaaaagtagtcgtcacagctctagcaagtcatgcacaccttcctcgatattgaaaaggcctacaaccatgagaagccgtatcagtgcactacaaaacactccctctaaggtccattttgtcttacctcactcatcaaaggtaagatctattcttgaagaattctcttcaaaagggtcttccagggagtatgaacagctgattataatgatcagagatgctacattaaccaacgatgatatatcggctctgttgaaagaagctacagaatgtataacccttctaagtcaaaatctaagattattcgtggaagctctagtttccgtagaatggattgacaaaaatgagaatgtggtgtcagaatataggtctttcatagtggatctactggctgctcataactatcactgtaagatggttatagataagttggttagattgtttttaccaagtcccacggatcctgattggcctgatggaatacctacagcagaagactgtggaaaatatatgaatctacacactctatttaatgtattattagctata

SEQ ID NO: 10190 - DNA, 742 bp, Diabrotica virgifera
  SmartBlast Evalue=1E-57; Info=PRA1 family protein 3 n=1 Tax= Camponotus floridanus RepID=E1ZVF6_9HYME
cttctgaagaatcacatgaaaccatcacaaatgggataacttgaatctttacaccgtttctcagaaaagatcactttccaatcccatctcttcaagaaaaaaccccataggtgttgtccgaagtcccaagttttctactttgttaacaatcttgttttttaagtttctcaatctcaaagaggcatggacaaagattgctgcaactggtaggagaactccaagaaggaaaaccataagagattgaagcatatatgctataaaataggctccagcaaaaacaataatgagagaaataattgggtgtttccttttaaattgtgctgctgttactttctcattggtaacatataagaatatcataaacagtacagcagttgctaatactccacaagccattttaatgggatgtataactcccacgatgatgaaaattagtatggacatcaaaaagtagttggtttggtagtagagcaaattttgagtgaccctattgccccatttttctaaatctttcacatttggaatctgaaaacgagccgcttctaatagaaaatcgtccaaagttcgtaagggagcgatttcaagcgagtcagacgatgcttgtttcttgtgcattttagacacttatttaaaatatatcgcaaaattaatgcttacaagtaataaaatttgctcttattcgataaaattataaattaatatgcagtgtggaatgcacttttacttatttataataatgaca

SEQ ID NO: 10191 - DNA, 739 bp, Diabrotica virgifera
  SmartBlast Evalue=0.000000005; Info=10G08 n=1 Tax=Ips pini RepID=Q5FYF7_IPSPI
atctacacacagtggtctcgcgatctctcgcggaaatacattaaaaaatacaatcttattcggttcattttctttttacttttaatcaaaatggactcgaacgaaaaagtaaactcgaaagaattagtagggcactgggtgaagcaattcatgacgcgacggcggatccaagaataccaaatcgtggacgatataagcaccatagaaaactgcggttatttaagtgatataaatctagtgacagtgagttacttgactgaaaataacaaaccagaaacattaaatttgattgtaaaacatgatttctacaagaagtcgccgttaatagcactggcatttagaatagaaacacacatttacaagacagtattagaaactttcaaccagttcttagagtcgaagaatttgccaagtttgaatgtcattccaaggtattttgatagttttacagatgaaaacgcgcaagtaattataactgaaaacatagttaagttaggatacaggttaatggatagaatagcttgtgctgatatgaatcactgttacgttttgctcgaagcttacgccaagttccatgctttatcttttgctttaaaagaccaacaaccagaaaaattcaaagctttatgtgatacagaagaattttatagtgtatatatagatgatcaaagagacagtatacgaaaggatataactgaaataaataaattattcaaaaggaaaggagatgaggacctag

SEQ ID NO: 10192 - DNA, 741 bp, Diabrotica virgifera
ttgatcaccctactactaactaattaaattttaaagttttgacgccagtaagatttgaacctgggtctcatgcatgccaagaattaatgctgtccattgcactaccgaagctataaaatggtaatcggtagtgtaccggagagatccaacacaagttttccgtattcaaaatccaaacttagatgtttgtaattattaaaggaatattaaaatttgagatctctttgtagcgattacttagatgtctgtgcctcacaggaacacagcaaaattattttttacatatcgttgctgtgaagtcaaaccggcataaatgaaaaagagacatttttcaccagagcgttccaaagattttgcaattaattttttatcgcttactaccgtttaattcacactaggggtacgatttgattagataaaattatggaaagtctttcttgttgaagtgttggtagcaaataaccaggttgttgactaagtccagggtaatttatgcagatatgccactataacttgtttaaatgtgattactgtttgcacttaagtcgcagtgacaactgattatctgccaataattcagatgtaggatgtgagataattcagtttcacttacatgacgcgtaacttttcatcttaaagtttatgaagcgactaagaggtctatcttctgttaagcaaagtagtgattaaaacattatgcaaaccagtctaaggtcataggacggattttcttttgaccta

SEQ ID NO: 10193 - DNA, 741 bp, Diabrotica virgifera
  SmartBlast Evalue=1E-34; Info=CG4289 n=5 Tax=melanogaster subgroup RepID=Q9VPB8_DROME
cggaatgtcttgaataaaaaacttatcaactcatatcaactttattaactaaaaattggactttgaaaaagggactacaggtctttaaaatacattagtgcaacaatggcttccactgcggtagacgtaccagctgaaacttcggcggttagggaggatatggtccagacagctataaagtttctagaaaatcctaatgtagtaaatacaccccttgctcaaaaacagaagtttctacagaggaagggtctgactgaccgagaaatacagttagcttgcgagaaagcaggggcttatgttctacatgaacaacagaaccgtcttcctcccccgttaccgcaacctagtgcaataagtagatatcctatgtatggccaaccaatgcaactgacactgtttgataggattagggaggtggtgcataacattgctttatttagtattgttgcatatgtaattcacaagttttacgagagatatatagctccattcttatttggcaaaaagaaaaaatccatcgaagataccattgacgaactagacggaaatatcaaaacttccgttaatgaactgaaagaagatctgcagagtgtaaaagtagaagttgataagattagcagcagtaacgaaagtcaaactaatagacaactcgtagaattaaagtctgagattgccagtgttaaaggacttctattaggcaggaaacagtttccgtcggtagcaaacagtcccgtagtacct

SEQ ID NO: 10194 - DNA, 737 bp, Diabrotica virgifera
  SmartBlast Evalue=1E-23; Info=Mitochondrial ribosomal protein L42 n=5 Tax=melanogaster subgroup RepID=Q7K0A0_DROME
aataaaagcgttggggatccaaccctttattttcactttccttgggtctcatttaacctgttcactaccaaggggcttatttaagtttcatcctcaaagatgaaagctatttacattgccattacgtgcaatgcaaccacaggcttacgggtgaaatgcttgtctatagaaaaatcgatgaggatataccgagtcacttggttgtgaacatgttaaactttcgtctataaagttgacttacaatctttgcaagatagtttcagaacatctaaaagctacaaaattgcattttacatttttattaaaatttgataataactatattcaattacaaatattctctgtccattggagttttctttgctcttttatctcttgccctggggaaccatctgtgtttggtggtatgagtgatgttcattaattcttgtcttgcttgttctggtgtcttcttgttgaatatacctaataactcaggtgtcactgttgtttttaaaacggtggcagtttcattttctggttctactggtaatggacgagtgcattcataggggaagtcatcttttgggtgccaagctattattgtgctaccttgatcagtaactacgattttttggtgacctgtggacaggggtcttgtagtaattagtcgtgtaaagcaaacacgataagcagcgcaaaacatttttgtttttgttaaattaaactttaacttatatgctaacctcaaaatcaaa

SEQ ID NO: 10195 - DNA, 741 bp, Diabrotica virgifera
aataagttggtcgttatgcagagattccttcttttaaccttttacggtattgttcactactattttttaagctatgaagcttggagtgacaactgcattaagagaaaatttccgaatcacactaacgaggtttatgaaggatgcctaaaaaataaatcaatagatgcctatcacttcaaccaaattttaattttcccattgatgccgccagcagagctattaaggctacgttgctcagctaaaccttattttgaagagtgcgtcgatgtgggcaataacgatattagagaatgtttaaattccaccgtattggaaggattgaaggtgtggaagcaaattgacaaagaaatttctgaacaagtgtgccaacctgctgttattgaatttttagccaaccaaaccaatggattatctgaatgtgacaaaaaattaaaagaggtattcaacgtatgcagtagaaaaattggcaatcccgatgcaaattctattgaaatcttcaatattccacagactaggggttactgcaaaaaaaattgcagcatatgaatcttgtgtaactgattctcttccatcaatgtgcgaagctgttgttaaaaataccctttccaaagtaatttcatcaattaggagaaacatatgtgatgtgccattataatggaaaaatattaaatttttttacatagttgggagatatatgaatatacataatgtactaataaattaaatgtttaaactttgcac

SEQ ID NO: 10196 - DNA, 740 bp, Diabrotica virgifera
  SmartBlast Evalue=2E-77; Info=MAU2 chromatid cohesion factor homolog n=2 Tax=Culicini RepID=SCC4_AEDAE
tttttgttcagattaacatgtaaacaaaaaatccggttttatttctaatttagtttagactctttattatagaactatttaggattaatggatattaagtattaaggatacaatggcctcttctcaagatgcctggtatctgtctcttctaggcttagccgaatattttaggacttccagtcctcccatgataaaaacatgtattcagtgtctccaagctgtttttaattttaaaccaccccagagagtcgaagcaagaacccatttgcaactcggaaatatccttttaactcatacaaagaacatagacctagctaagaaccatttggagcaagcatggctgctttctcaagcaattaattcatttgatgatgtcaaatttgaagctgctagcgttttggctgaattatatgaacaacaggatcagatttcattatccaagccaatcttaagaaaagccattgagttgtctcaacataatgtgtactggcattgtagactaatatttcaacttgcgcaaatccacgcaactgagaaggattacactttagccagcagtttattgggcgttggagtagactatgctcatatttcaaatgcttcatacacaagagttctgtttctcttaagtaaaggaatgttactactaatagataaaaagttacaagaagtccaacaggtattaaaccaagcaggacatttaatagaaacttggacaggggctgtgtaccagaaggaat

SEQ ID NO: 10197 - DNA, 741 bp, Diabrotica virgifera
attactttaaaaaagcatttaagattttgatgataattaaagcctatataaataaccaagagtaaaatactcatatattaattcaatatgatatttaaagtattatttttgactctaacagttgttgctgcacaattagtttttggaagaagatttcaggacgatgtcgttgaatgggtcgattatcatgtaaattccattcccgaaaatgcaattaacgttgggaaaacgcaggacaataagaacatttatataggattagttcattttgtgcatgaacaagcagaaggacttgtcccaactagcattgtggaaggagaagaatgtgcgtatggtttgcaggaattcaatattacccagtattgtgataatattaagatactggttggtaaaaacgattataaagataccctatattggcaatatgttgcagctataaatttcacgaagttatttaattcagatgatcatcgacctgtacgagctggatgggaaacattcagatggccctgtaacacatccatttacatcggtaggccaaatttcgataacagaaactgggtgggcaaaattttttaatagccatattaattggcagtggaatgatttacctgcatatccatatataaacttttcagatccttataaatacgatcatatcagagttcaatgggcaggcgtttatgatgtgcttatgtttaagaattagtagtgtatatgtttataaataaattcaacctt

SEQ ID NO: 10198 - DNA, 741 bp, Diabrotica virgifera
  SmartBlast Evalue=1E-99; Info=Mitochondrial Rho GTPase n=2 Tax= Tribolium castaneum RepID=D6X1S3_TRICA
caagtaacaagagataagaagacagatttagccaagaaacaatccagtagaaacgtgtaccagtgtcacgtaattggtccgtcagcgtcaggaaaatccaccttttgcaggagttttatcaaaagcatcctcgagtcaaatccccttcaacccgagaagactggagtcccaaattgtacagtgaacgttattcaagtgtatggacaggaaaaaattatggtacttagagatatcaatgttaggaacgtgtcggatcctcttcttcccgcagaggtgcagtgtgacgttgcctgcttagtatatgaccaaaataatccgaaatcgttcgagtatatcgccagaatatacattaaatattttgcggaaagcaaaattcccgttttagtagtggcgtgcaaagatgacctggaagaagttcgacaagactacatgctacaacctcagagcttttgtcaaaaatacaaaattttacctccccagaagttctccgccaaaggtcacaataggaaagacgtgttcattaaattagccacaatggcagctttcccgaattttcgggaattcggagtaatggctgccgattcaaccgtttggtggaaagcaggaattagtttagcagcagtaacagctatagggttcatcttagcgaaagttatgcatacagccgataaaacaagataaactgtgtaatatataaagaaaataattatatttattgtaccatatgtttactgtacctta

SEQ ID NO: 10199 - DNA, 739 bp, Diabrotica virgifera
tttagtgtcactgtgcgggcatgcaatccattgtagagacttttagaaaataatatatggacacgaaagtttttattacgatgtggaggattaaatcaatgaatatgaagtttgtttatttgtttattgttgtttgtgtggtacgaggggatgctgcagtccctgccacaggatcagcagcagaattatatcctaatcagactctcacatccgaaaagaagctgagcgagacgatacttgaagtacttaaccactataagcaaaaagatccattgggtatcccgggagcacccataccggatcccatgcctctaccagacatgagcaaatccttttccgttggaaggatgtttttaaaaacatgaaacttcatggtttgcgaaagtttagaatccaacatgtgagtgtggatgttaccaaaatgaagctggaagcgactttgtctattgatgctttgactaccaagggaaactatacgctgaggtctttgttttctagaggggctgggccttttacagttaaactaactaaggtagtagtaacagcgatagcgacaatggaggtacaggtagatggaacgttagaggcccaagatatggacatggacttgaaaattgctaatattgacatggatttcaaaggaatgggagttttgcaaggtgtggtgaactcagttggaactttcttcttcgactctatgaaaccattcgtacttcgtgaagcaaacacaaacatgaga

SEQ ID NO: 10200 - DNA, 739 bp, Diabrotica virgifera
tccttccttgattacagtcgaaaataattcagtaatttgtgctttaatattctttattatgcctgaaactgtttgaactgcgttgttgatagtgttaataacaatgctttgaatgggatctgttacggatgcgggatcgacgtagtaagaaagaatgagtttatcaataccgtcaaaaattgagtttacatgagcaattagtggttgcaagatgatggtggaaataacttcttgaaatagatttaatggaaatgctagatctcttctaaatcttggatttaattgtctggaaaagacgaacatgtcgatgtcttgaacactcatttcttggttgtataaaagagcgttaatagctggtgtcacatctcgtttatttatgcgaattgctgtactaccttggccttgtaaggaggattgaatacaatcactgagtattgcagcaaaaatatcagcattgatttttataccattttgtgttttgacaaagatgtcaacaccagcttgtgcgtttaaaacttccaatatattgtttcctgtatacatttgatcttctgcgttgctttggtttggaaaacattttccaagtaattggccgacatatctaacaagattttgacctggtggtcctgatatttcagctctcgttgtagtagaacctaccagagctacagccaaaattgtaatcaaaaacttcatctcgaacaagcaccttatcgtttcttgaataaacgttatatca

SEQ ID NO: 10201 - DNA, 740 bp, Diabrotica virgifera
  SmartBlast Evalue=1E-127; Info=Inositol hexakisphosphate and diphosphoinositol-pentakisphosphate kinase n=1 Tax=Harpegnathos saltator RepID=E2C3I7_9HYME
tagatcgaagccgcatacggcttgtttgaacgcgagacagacctttcgagagatgagcttctctgcgttgctgagaatgacgggatagcggatctctttaccgtcgcgatctcgctccactttgccgtcgagagctggagacttacgggcttcggcatgggcgtagtctgggccaactgtatatacctttacatccgttccatcggtaggcataaaatcttcgtaaataaaactgcctgtttttcttactctagattcaggagaatatacactactacgactaccgatctttctgaaaagcctttgactaccgcctccagcagacgtaggataataaatgtagatattgtgatcttctgcagaaacaggtttttcaacgaacggcttattaaaagtaattccgttgacttctacatgatcttcagattctactaattcatgattttttggatcagggctgtctctgtctaaaacggcataacgaggtatttcgattccttctacgtccagcgttgcgtacaccttccttctgtcttgaatatcgtactgcatgtgtaaattgttgatgacgtacggattatgtaattgagcatattgtattgccttatctaaggggaatcctttggaatggaatgaaattaaacaatcacatattggccactcttcgactactttctgtaaaataacttcctcttcaaacacgatcaccttgatgtattcaaactcctgtaaacgtgtaa

SEQ ID NO: 10202 - DNA, 739 bp, Diabrotica virgifera
cgactcatacggacttttattacgattgtctttaacgaatcctacatacattcggtttttatgtcatttccggttaaaaagttgtaccagaagtgcaacattatagttgcagaaacagcacaggtgatataagagtagacataagatataatatgatataagagtagagcattggaaaaagttttggttatgatatcacttccgaataaaagttatgacgtaatgttatatcaatcgacgcgtattgaaaagtcgagttcgaatatgatgtaatttctgattaaaaagatatacgtaatcgaaagtttggcaaaaataactcaaaaattagtcaaattgtatataaatcgaggcaaagttacacgaagagttcaaatatcgacttccggttttaagtgcggtcacgttgggtgaacacctaggacttacgaagtgcaattgcttgaaaatattctctccctacgaatcaattgcttttatgaatttgctatcttgctttgatataatggcacgaattttacaagcaagaatttcaaaatcagcagacatgttataaaaaaatcggaaaactgtactggatccccaataatgagctcagatatgaactgattgtagatacgttttttgattgttttcacgtctcaattagtgaaagcgtatatagatttgcgcagataaccaaagcaggcctcactatcaagatagggaaatcaatgtgttagagagagagagagagagg

SEQ ID NO: 10203 - DNA, 730 bp, Diabrotica virgifera
  SmartBlast Evalue=6E-63; Info=HIRA interacting protein 5 n=2 Tax=Danio rerio RepID=B0S8L0_DANRE
aaaatctggagaggttaataaaaatagaaaacatttataacaaattttctgttttatattatacaagaaaataatgttaatgtgaaatatgtggcgcagctcattacttttttccaaaatcttcaacaatccttttcctaaagggattattgctcaagaaaatatatcgcaatcatggcttcgaaacactatattcacctcttctcctttgaaaatgttcattcaaacacaagaaactccaaatccaaatagtttaaagtttgtacctggggtacaagttctagatcctggatcaaccatcgatttcccaaatggacaggcagcctattgttctccgttaggaaaattactttttcgagtcgaaggggtcaagagtgtgtttctaggtccagatttcattactataaccaaatcagaggatgatgaagttagttggaaactgctgaaaccagaaatttttgccacaattatggatttctttgcgagtggtttaccggttttaaatgaagccagtccgaatcaagacacacaaattaatgaagatgatgatgagacagttcagatgattaaagaactgttagatactagaattaggccaactgtacaagaagatgggggtgatataatatttgttgcttatgaagatggaatagtgaagctgaagatgcaaggagcttgttccagttgtccaagttctgtagtgactcagaatggggtgcaaaatatgatg

SEQ ID NO: 10204 - DNA, 737 bp, Diabrotica virgifera
  SmartBlast Evalue=2E-27; Info=Nose resistant to fluoxetine protein 6 n=1 Tax=Camponotus floridanus RepID=E2A1E7_9HYME
cgacggtatgcttttaccatgatattgcctaatcgctaaattagtactatttttttttcgagaaataaaacgaaaaattaaaatgaaggtactctttggaacggtgttaacgctgtgctttctactaacgaacaatttggaaaatgatgttgaccgttttccggacatttttttaaatatttccaatgtaactgtggcgcggaaaaatgtgcaaaaaaatattgattatactgttactaatgtaagtgtgggaaaaaccaatgaggaaaaggggagactttgtgtgaaaaacttgaccaaatgcatggaaaaagatactgaatacagatctaccacagatcgactctccagtatattattctcttccttacctccatttgacctcagtaacattgaaggagttagtaaagaatgccgtagacagagtgagaaatatgttctcgatttacgagattttcaagagtacgctttaaaaatgtacgactcaacagcaaaactaccatctggacttctaaacgggaacataaaccagctaggagacttcgacatgtgcttaaacgcaaactcaatacaaagaaatattcaaggaaaatattgtttagctgcaatggaagttcaatcgccacgaagtccatatttagcgggactctaccagctaatacatgctcatcaacattttcgaagcaaactggaagatccaggtcatcgagtacccagattttcttctataaactggg

SEQ ID NO: 10205 - DNA, 740 bp, Diabrotica virgifera
cttttgctcactaaacgtagtaagtggtaacgggggtaagctgttactgtaaatactaagcgaagttaactgttttagtggttcgaatgcttttggatgtatgtgtctcaagctgttatcttctatgtagagctcctggaggtgagaaaggtctctaaaggcatcttcggctatagtttctgttgaacagttcactattgaaagtttctttaacttggtcaggcccttgaatatatgtttatttatgtgtttcacttttttgtaatattaaatctaaactgcgcagtcttttaaaactagatagcacttcgtgtttgagactaataccagtattattttttagtgttagtttttctaatttataacaacaatttttaatatttgatcctctgggaaatttgtttcgtattaactgcaaactttgaagtgtatttgacttaaatttaaaagttttaaattccgtttctaataataagagtacctttaaactagttaaatttgtgaacaagtctggattaatatttccataaactttatataaacatagactaagaacttcagttggatttagttttgctaattccggatcagaagactgaagggttatcgaattgcattgccattcttcctcgtcttccatccagttgcatcctggtgacatacagttggagtgcgatacaacaagtaccaataaagaaattatgatgtactgattcttacaagtcattttgatgaaaatt

SEQ ID NO: 10206 - DNA, 737 bp, Diabrotica virgifera
ttatgtggcatataatttaactaagaaataacaaaaaattttccatgaacacattttgcgaaatatctgcaggtttggcagttttttaattttttaacaaaatactaaattattcaacaatgaaatgcaagtttttcacaagttttttcttcttcattaggaaacggtaaaaaagtacacttggccgattgatttttcattgatacaaatttaactgcaaatctaaagaattcggactgaagattatccgatgggacctttaactatgattataggtcacgtggtacactttgacgtagcgggggacgatcttatgtgtatgctttatgtgtgatttacaaaaccaagagattacctaaaattttactattaattttgtactaatgtattaatacattaatagaaatttatagtagaaaatgtctgatataatataatagtttaaatatagaaaaatacttaactatttttaacgggaaataagccacaatcttactaaaaaatgattttattaacgtttcgacgttgtgacgttaaaaacgtcacatctttggtattttatttttaaataattattttactttactttctttaatatttcattagtaataatttcttctatttgttttacctgttttcttcgttaaaaactcgttggcccactcttttattatcttctatttaatatatctctttttatctaaaatctaaatcatcatactgaacgtaccccgtat

SEQ ID NO: 10207 - DNA, 738 bp, Diabrotica virgifera
  SmartBlast Evalue=1E-72; Info=U3 small nucleolar RNA-associated protein 15-like protein n=1 Tax=Camponotus floridanus RepID= E2AFP3_9HYME
ggagtcactgctcttctacctgcaggtggaatatttttgtcggctggtggaacagaaatcaaaatttgggatagtttggctggtggaagacttctggggaatatttcgcaacatcataaaactattacttgtctccagttagcttcagataataagagattactgtctggaagtttagacaggcacgtgaaaatatatgatgtttctacctttaaaactgtgcatacattagattttcctaatgcaatcttaagtttaggtgtttctaaaactgatgacactcttgttgctgggttagtggatggattggtgtcaattagtaggagggaagatgcaaaagaagaaaagaaacctacaaaaaaggtttccgcttatcaatttatcagcaatacacatcagccttctgtagatgccatagttactgaagtaaagcatgacacagaacgaaagtttgaacaccacctaaggaaatatgagtattcaaaggctttgaatagtgtgcttctgccatatgtagcaaacaagaatccacagaatacagtatccttgatgcaagaattaattcgtagaagagccttagatagagcttttcagggcagggataaaaaatcattaacacaaatcttacgattctttattaggaatattactgatagccgatttacaagagtcctcatagatgccgccaatatttttcttgatgtctatgaaagtagtatcgatacattaccacctgaa

SEQ ID NO: 10208 - DNA, 738 bp, Diabrotica virgifera
actagataggcagcatgccagcttgctgtatcgattttagtattttggatgaacttgtcagtgttttcgataacgactcttggctttgtggttttgttcaatctcacactatgaaacctccaccaccgtccgtagagacagatgactgcgatgatattttcggccctccccgtacctacccaagtggttactgccctccaaagaaccgcccttccatgatctctgccaagtaccgccaaaaggaggaacgaagaaaggttctaaaaattagcatcaataagttaaagaagatcgaggatgctgaagtaagcttgtgcaggtccgttttgatcaataacaccatgaagcggttacaaagagaagccaaagaagagaagttgcagaaacaacaacttagttacccacgttgcttcgacaacgacaattacctgagcctaaaaaatgaatttatgaaaaacgaaaggaacgacgaaccacagagccttccaaccgaagcgtttgagaacgatttcgacgccaagttagccgaagaaattgactcagtcaacgccaaggaggtactaaacatggtcgaagagaatctgaatggtttgagcagttcagaaaccttccattttccgaaacttctgaaaccactaccaccactgataggttgtcatcgaggaaacgttcttttgatgatatggacgactgtgatgttcaagatgtgctgtctcagttctatatgccacctacccc

SEQ ID NO: 10209 - DNA, 739 bp, Diabrotica virgifera
  SmartBlast Evalue=7E-65; Info=Spermatogenesis-associated protein 20 n=1 Tax=Camponotus floridanus RepID=E2B1K9_9HYME
ggatcttatgagagcacagctaacaaatttggaacaactgtggaaaaagttaaggaaattttagaaaaatgtcatgaaattttgtatgcagaaagacaaaagagacctaaaccacatgtagatactaaaatcttgacttcttggaacgggttgatgatttctggctatgctagagctggttttgctttaaaagaccagacatacatagatagagccataaaagcaaccagtttcataaaacaacatctttacaatgaaaaagaaaaaaatcttttaaggtgttgctataaagatgagtctggaggtattactttgggcaacatgcctattgctggctttatagatgactatgctttcctcattagaggtttattagatttatatgaagcatctttggacactgaatggctacaatgggcagagactttacaagaaacccaggacaacaaattctgggatagcgaaaacagtggctactttaccagtgcttatgacgatactagtatcttggtgcgtggtaaagaagtgcaagatggagctgaaccttcaggaaactctgtttctgtacacaaccttcttagattgtctatatatttacacagaaaagacttccatcaaaaagcagagaagatactaaagggattcagtgatatgttggagaaagtcccgatagcattgccagaaatgacttcagccttgttgttttaccacaattcccccacccaggtcttcattgccg

SEQ ID NO: 10210 - DNA, 738 bp, Diabrotica virgifera
  SmartBlast Evalue=1E-122; Info=Exostosin-3 n=1 Tax=Harpegnathos saltator RepID=E2C158_9HYME
gtgcgtatcatcttcggacaaactttgaggacatcctggacacctgaaagtccatctcgaagtaaccttaaccgggggtttcctggtcacatgactaacaagaaaattcatggcgatatcttcacaattcatgtattcgtcaaccttgtctcttattgcttgtggtaaccatttccaatacagatgaagataatggcgatggataaatgcggcacctgtaagcaccatacttagctcgcaactgtagtttgagttgtacagccagctgctttttgtgtttagatcccaggcgtgatatcttcctggaaacccaacaattctatccctatgttccctccaaactctaaagccaaataatatttcgtcgtgtcgtaaatgagcatcatcatccacggataatatcgcctcagtctttaggttttctagaggtaaaaatctattgtttagcgaatttctagctgccttaacgacatgaacaggagctccaatgtctggccatctcagttcgggactaggcggccttggagagttccaaacgacaaccacggaatttaaataaggtagacccctcaacctcgctatggaatccaacaatacttgttccctttcgtaagttaacagcaatacagtaaattgttctctcggagaattacctcccaaagcttcagaaaattctttcccagaaccgccctgaccttgacctatgggcctaaacccacgaccagaaccgatgaattt

SEQ ID NO: 10211 - DNA, 737 bp, Diabrotica virgifera
  SmartBlast Evalue=3E-57; Info=Swiprosin n=3 Tax=Culicidae RepID= Q177V8_AEDAE
gtcgtctggttgctttttcttcttcgagccgtttgcgttcttcttgctccaaacggatctcatcttcgaatttgctcttcttcgccaattcaccaatcttagcttcgaaaaattctttagctccatttactccaactttatcaacatcgatctctgttaactttgccagttgtgccaaacctgaatcttcctctaattctccagcacgagccttgcggaataccaacatgaattcgtggaaggacaaacgaccatctccgtcttcatcgacctccttaatcatcgcctttagacctaaatgagtttgtggtgctcctaagacttccatcatgcgtttaagttcgtcgatgcttaagtagtcgtctttattcgtattaaattttttaaatgcagcttcataactcttgatttccttcctggtgaattcgtggaattcagtgtaaacattcactaccctgtatttgatttttacctcatccccgttgtcgagggcttcgttgatctcttgtctcctcaccaaaacttggttcaattcttgatcagctggcattttgattttttttttttcggtaactgaaaacggcctcgggatgaataaatgtaagtgtattattgaatgaaatggggtacaaaacactgagaatttagtgaatgaacgcgaacagaacgtatacgagagagacgatgaagtcgacagacgtcagttgagttgcgaggtaacgaacacgcggtttttg

SEQ ID NO: 10212 - DNA, 738 bp, Diabrotica virgifera
aacacgagaaactttattttctgttacttagatcacatttaaattattcaccataaataagaatgataaataaatatattgattgatagcacggtagctaattgcaaagatttgattttactatcttcagtaagggtgcaacagcatctgcgtcattctttgggcagtctttaagaagacttatgttaatacatgcttctgcttcttcaatttgtttgcagttagatttaactttagctaaattataaaaaggagcagtgatatttaaatctgatgtacaatctcttacggatctagtaatacctctatcccaacatgattgtttacttggtttgagaaagtcaagtgtcgtttcagcattatttttacaaatatacgccagaacttcctcatcaattgttttccaagtttccagccctttcagatcactctcaataagatgaaagcattcttttgctatatcaaagtatttattagcacaatcatttatatgtgcctcccaggtacatcttttctgcacaatttcagaaggtgatattatatttcctatgtttgacacaaactcaagtgccccatgttgtgtattaagacacgagaaaaaaacttttttcctttccaacaactgtttcaaaggacatgcctgttcattgaacggtgcaactttatatacgtacagattatgagttagacctaaaactatgtgaagacctagcattgaagtcatctttaaaattgatt

SEQ ID NO: 10213 - DNA, 738 bp, Diabrotica virgifera
  SmartBlast Evalue=1E-36; Info=USP9X protein (Fragment) n=1 Tax= Homo sapiens RepID=Q86X58_HUMAN
atgccattaaaggtgttccggaagagcgggaaggtcttctggaaaccatcgtccgtgccaagaatcactaccagaagagggcgtaccagtgcatcaagtgcatggtggcgttgttcagtcgttcgtcggcggctcaagctatgctgttgagacaggccgaagtgaggcgatcgtggacctcagcagtagcttggttacaggacgagctggagaggaagtaccccccgaatgctcagtactcctacaacacgtggtcgcctccggcacaaagcaacgaaagctccaatggatattttcttgaaagatcaaacagtgcccgcaagacgttagagaaggcgctagaactgatgcctgagaccgaaagagaagaggaagtggaagagacgcactcgcaagaggagccgtcgccgccctccgagcagcattcgcagcagcacacgatcgcgcagccgcaaaatgtcgataacaacgcgccgtcagagctgccggatgtaacacagcactgcgaaaaccagcaggacaggtaaaagaaatgacggacgggacggcggttgtcgagcatttcatccacttctataagctttgcacgttatataaaacgggcgataggaatgtgatatgtatgtatatattataaaaaacgttaacacacgcattttatattggctgggaagcatttttctcttgagcatgttcctcatatttttttggtttttaatccgcaagtctaaatgtaaa

SEQ ID NO: 10214 - DNA, 738 bp, Diabrotica virgifera
cattttttcaatacaaacgccccagaatctcgtaacatgtggtgtgtactaaagtcaagctgcaagtgaaagcagtaggtactaacagtataagttgacctgcaccctacaaagcagacttttgaaattaaaagttgtactgttggaataaaatcaatatttatacatgaaaaacaggctattgatttatactcttagtacagaaatgattaataaacattcaaaatatagaagaatcccgaaaggtccattttatgacttatactatattcttagtacatagcacgttagacataatataaagattttatatagattatttgtatttttcaatttaattataaataaacacaacattttcactttaaaaaaattccatcattttttgacggcaactttaaaattaatgtgtatgtgtacattaatagggacaaaactgttattctggccaaacgcttagtttagcataaacagaccaaagtcggcgcttgcttactctacaattacgaaactgttatgaatagcagttatggatatatggcagttatgaatggcaggtaagaatggcagttatgaatatagtcttattatgcaaaactaaaaacccttaatagacagaatgtcgcttggtttatttttgtttttcttagtaaccgttaacgtgacaataacagggatttttccaagatagttttagctatgtgtcaccagaatccgctgttatctcgattgtaaaga

SEQ ID NO: 10215 - DNA, 735 bp, Diabrotica virgifera
gccgcgaatataggaattgggtcacatttttttaatccctgaatagtgaaacacgattgaggagcttttactgtacagaactcccaagcccagcatcacttacgcatcagaaacataaacaaatgattaggctgttttgaatgaaaaatcgtaagacatctatgaaggtgtgcaggaaaacagattatgaagtagacactataatgttgagctttatcgcctttatagtgatcccagtattatcaaaatacaggcttagctaggcaacttaggttcaaaacggactaaccactctgtggatccacaaagtagcttccgatgatcacctgtaaattctcatgtgaattaactgtgccattccacaagagcgatagtggctgggctcggtttgcctgtttcagccactttgtggatccacagagtagtgctgcatagtgattcatctgttttgaacacgttgatggacattgcgtcaaatgtataagcaagtgttgtgacactataatatattttgcaaagtagaatagggaaaatagcaacatttatacatgtgtcatattacatcaatggaaattagatgttctgtccgtcaacatgttaaagagaatgaaatggagccctcgaaacacatttataaccaatgactggatggagcgacaagaggcaggcccagaatatgatttaaggaccaggtggaagacaatttacaagtagtatgaaattggaaatcaaagg

SEQ ID NO: 10216 - DNA, 723 bp, Diabrotica virgifera
  SmartBlast Evalue=8E-21; Info=Endonuclease-reverse transcriptase n=1 Tax=Bombyx mori RepID=D7F165_BOMMO
atttgtgacgtcagacttaggctgtccataacctttgcgatatgccgcttgttcattaggctggtaactatcgaatttatctgatagtctgttggtcattattgtgttaagcagtttgtacggatgtggtaacagacttattggtctgtaattttcgagtttgtgtttgcctcctttattttgtagtagaagtatctgcgcattttgccaagtggttggaatagcaatatcaaagaggaacttcttcattaggattttaactgcctttaaggtagtttgacctccatctctaataatctcttttgttattccgtcgtctctatattttccatttttcatttgatttaaggcatttataacttcctcgttattaataaaccataccataataataacattagtaataaactataccatttatactacagccaacgatcaaatgtgtaatttggaagagaagtgtcagaagaaatggagataaggagaggggccaggcaaggttacatactgtcgccgttattgtttagtgcttattctgaagaaatcacacaagaagctttggtaaacgagacaatcggcataaaagtgaatggaaaatttaattaatcacattaggtatgccgacgatacagtcataatatcagacaacttggaagacttagaaagaataatgaacaaaatattaagaatatatgtaatggagaatacggactctcccttaac

SEQ ID NO: 10217 - DNA, 737 bp, Diabrotica virgifera
  SmartBlast Evalue=3E-10; Info=Isoform 2 of E3 ubiquitin-protein ligase RNF180 n=1 Tax=Homo sapiens RepID=Q86T96-2
cctgtgtattatcattgcaatcgatgcggggtttccctgttaaaacccgacgtttctatgcgtagagagtggggcaacgtaaagataaagattttataatacttcaaatttttcggagagtggttctactgtccctctttatactgtggttaaagtatacaaatagatagttgaaatatgtgtggaatatttaaaattaaaactaaaaaaaaaatgtcgtttaaaaccgatgtcatagaagagcctatttatggtatttctggggctggtatagcgagtgataatgatagaaaaaagagtaaagaggacgataagaaaaaagatgatgacaaagaaaacgaagaagaaagaaaaaatgatgaaataaaaataaaaaaatttaagtaaaaaagaatgttccaagaaataaaatgcaagaaatgccgtaaaaccatctttagcccagatcaaatcaaaactaacctaattttaaatgctcatggtcatccaatggacaattctagagtttgtgatattgacgttgaagaaaccaatgtatttataaatgacgagcaccttcctagttggataaaagatcgaatcgaagctgaagaatggtctaaaggtagaattaattgccctaattgtgattcaagaattggtagttttgattatgtgtctggacaaaagtgtgcgtgttttactaatttgttgcctcctattcattttataaaaagtaaaatagatttaatcaaaaa

SEQ ID NO: 10218 - DNA, 738 bp, Diabrotica virgifera
caataagctatgctatatgattacaatttatagacatgtatttataaagagtaagagtgtaagcggcatagagtatcaatttcatattcaaaatacaggtgactatttttttagtttttgaatattcttttaaaaatccttacttgttaattgcttgaattactcattaattaaattaacgggattatttttaactaactatgcattcagtgactataatttatgtactatgcaataaaaactaataatccagaaaagagaaaaattaataaagtgattttaataacatactgttactatcggagtagataaattttgaacatctttaacagttaaaatacaattttaagaatttcagaagccgctttttagataaccacttgcttgtaatttaactatcgtattgcgttacctactccttgtaaattagtaatttcggaacttaaagtattcctttgaatctgctgatggactcgatactatagtggaataataagcaatgttgccgattttagtgattccttcaatgtggtgtatctaattaaaaactaaacgccctgtatgttaaacatatgtaacaatataaacattaacaaattattggaacattttatactccacataatttacaggataagtctgatattgaaatcttaataatcttaataatggaatacatatatcttcggtggtatgatgtatgatgcaagtgttttacttatactttagaacataaat

SEQ ID NO: 10219 - DNA, 737 bp, Diabrotica virgifera
  SmartBlast Evalue=1E-82; Info=WD repeat-containing protein 57 n= 3 Tax=Aculeata RepID=E2AJJ7_9HYME
acgtttaatgttaaatgttaatatttagttaaaacttattaaacataatggttattgagaataaacgccgggcagatgatgctgctcttgttcccgtttctaaaaaacaaagaaatgaaatcgtccaaagaaataaaaatacttcagttcttcaagcaactgctccaagaacttcaaacctatttgcacctataatgcaattagaagggcatgaaggagaaatttttagtgtagattttcatccagaaggtcaatatctagcgtccacaggttttgacagaaaaatatttctatgggcagtatatggagaatgtgagaatatatcagttatgacaggtcatacaggagctgtaacagaaatgcactttaacacagatggatcacaaatttttacatctagcacagatcatactttggggctttgggatgtagctacctctcaaagaataaagaaatacaaaggacataccacttttgttaattgcgtacaaggggcaagaaggggtccacaactgatgtgttccggaggagatgataatacagtgaaactttgggatacaaggaaaaaacaaaatgtgggttcaataaatactccctatcagaacactgctgtcagttttagcgatacgacagaagaaatatttagtggaggaattgataatgaaataagggtttgggacatgcgtacatatgaactcttatattgtctaagaggtcatacagacacgatcacagga

SEQ ID NO: 10220 - DNA, 737 bp, Diabrotica virgifera
cggtgggcatgtcggtgtggagtagtttagaaaataatttttcaatatcttaactttttcgatattgtattcaattttctaattcatttaatattcgtggagttattttaagtttcatatctttaaatggtattctttttaacacaaatgaaaagtttgatataaaatccataatatacctcccctagtaacataacaaacaaatctttgtaaaatggatgaagagttcagcccaatagatggggaatccgaggacaattttgacgatgatgtaggtttcgatagcgatccaggttcacctcaggattttcctccccaacgaagccgtggcggcagaggaggtttttcgaaaggcccaccatctagatggcaagctcctccaccaagaggggaaaggtttagaggaagaggatttggtcctggcggtccaccttcattttcaaggggttctagaggcagagagatgtttaggggcccccctccaagaggtccacatgggaacttcagtagtgggcctccaaacttttctggtggtccacctcctaattggagtgggccaccctctggtccacctcctttattaggttttaatggccctccaggcactaatttaccacccccttcaagcagtggtccacctcctggtggaatgaggcccccttcgggtatgtctggggcaccaaatctagatggacctccaccaatttcaaaacctggcgatcaagaaggttcaggtg

SEQ ID NO: 10221 - DNA, 736 bp, Diabrotica virgifera
  SmartBlast Evalue=5E-21; Info="CAP, isoform Q n=2 Tax= melanogaster subgroup RepID=B7YZD8_DROME"
atttcaatacacctgcggcgcctataagacgtacgtcgttgcctcacgatatttacgaaaagcaaatgatttacattcaagagaaagagcgagaaatccaacggcaattagaagccctcgaggaggaaaagagaaaaatgaatgccgatatggcaccctcgaagcaatttcacgcggaagactacaatttttctcgcaagggcgatttcgcggagtctaaaaaaagacccgtgtctatgcccctgattccgactgaatattttcgtcaacaaatgtacgaagagtatatggataagtttgccgagcgtgaagaacgtaaacaacataaaattattaaggtcacgtcgtccaaggacgtacacgaggatgatcaaaaaaccatcacagccaaggaaataattcatccggtacaaatagaagacgaatttatgaacaaagtgaaacaaaagcagcaagagggtgtattagaaaaccgaaaaagtgaagaaacagaaaaagcaagcagcacgaaagaagatgatgaacctcccgttttggtaatggacggtgaaaagttaaaggaggccagagaactacccaaacatttgcaggagttcgtgggaccagacggtatatggtcgcctggtcaaagaattgacttttcaccaacaaaagaacataataaaaaggactacgagagccaagatgaatccattcctcctatgtggacacccaaaagtgcaaactctagtcccgt

SEQ ID NO: 10222 - DNA, 733 bp, Diabrotica virgifera
aattccgtacgcagcgcctcccgtgggcaaaaatgatttaaggatccgttacctccagttccatggacaggcatcctgaacgcaacacaaaacaagagagtgtgcatgcaaaataacgcatcagcattaaccgcagtacctgaggatatggaaatatcagaagattgtctttacatcaatgtttatactccaagggtaccaggaacttcacaagagcttctgcccgtattattctgggtccatgctggtggatacttttatggatctggtgcgctgcaatattacgatcctaagtatttcatggattatgatattatagttgtaacaatgaattatcgcttgggaccattaggttttttaacaacagaagacaacgttatccccggcaatctaggactgaaagatacagtccaagctctaaaatggacatacgataatattaatacatttggaggagacaaacataaaattacagtaatgggcgaaagtgcaggctcaacaacagcaggatttatgcatcttagtaaaagaactcaaggtatggtagctggatacattttggaaagtggtacaccaatttccccctatgcttaccaaccaaatgccagacaatacgcttttaaattggcaaaattgctcgacaatacctttacatctgaagattccaatcaacttctggagtcgcttttaagcaagaccgcggaagaaattacagatacaatggtctctaatg

SEQ ID NO: 10223 - DNA, 721 bp, Diabrotica virgifera
ttgtattttttacaaaattgtcattttttcaattaaattgaaaactacactaagcatcaaaattaacgcaccaccataaaaatgggacatttttgatgtcttgtatttactaaacctcttttccgattttagtgattttttggtagctttattgctcaagaacatcgatgtaacaatgttactgccaaacaggcaagcgtcattgtacaccgggtataacaatgatagtgcgtttcctcctcaaagtttggaacaccctgtggaacattctagagcagggttgtccaactggcggcccgcgggccgcatccggcccgcgaggctatttgttgtggcccacgtaagattttcgaaacgcatatattttctttaaatgctgccactgtgaaaaaagattttttaatttatattttatggtttagcagtgtttttacatcacaagtactgtaccgcgagccgcttcgcggacgtgtaacgaacacaatcgtcctccaccactatgagaactgcactgattactgcgcatcacagttcacgcaggccacacctcccactgcttaccatccgtcgccagccgccatcgcgccagtgtgctactgacacgtaggctagtcggctaatctattacgttgctagtgaacagtgaacttgattaattctttgtcttgattcctcttatacaataatgagtgtaaaaccagtaaaacggaaattgatagtg

SEQ ID NO: 10224 - DNA, 736 bp, Diabrotica virgifera
  SmartBlast Evalue=1E-123; Info=Serine/threonine-protein phosphatase PP-V n=2 Tax=Culicini RepID=B0XAQ2_CULQU
cattgaccagaaacaatgtcttctgagcttgataattggatagaaattgcaaaacaatgcaaatatttaccagaaaatgatcttaaaaagttatgtgatatagtgtgcagtattttattagaagaatcaaacgttcaacctgtatctactcccgttactgtatgcggtgatatacatggtcagttttatgatctcgaagagttatttcggaaaggcggacaagttcccgataccaattacgtatttttaggggatttcgtcgataggggctactacagtttagaaacattcacaagacttctaacgctcaaagcgaagtatccaaacaaaatcacattattaaggggcaatcacgaaagtaggcagatcacgcaggtttatggcttttatgatgaatgtatgactaagtatggaaatgttaatgcttggaagtattgctgtggtgtattcgatttgttgactattgctgcgataatagatgagaaaattttgtgtgttcatggaggactaagtccagaaattaaaaccttagatcaaattagaatattagaaaggaatcaagaaatccctcacaaaggagcattctgtgatttggtatggtctgaccctgactatatagatacctgggctactagtcccagaggagcaggtttcctatttggagccaaagtcactaatgatttcatgagaattaatgctctaactttaatatgcagggctcatcagttagtacatg

SEQ ID NO: 10225 - DNA, 727 bp, Diabrotica virgifera
  misc_feature (586)..(586): n is a, c, g, or t
aaatcagtgtacctatgtatatttatttttattcacgttcatttatcttagacagtattgtgcaaatcaaaggaacaagttcgtcatttcgcaaaccggcgactttaagaaagaataccgaaacagatcgaattttattattaaattatgatattttaacataatatgtcataccagtcatgtcatccatctgggcgtgataacgcaatcaatgattttttaaatgacaataggggtcgtgtgctagctcatttgaaagatcatttaattctccactcagcaacatcaacattcacacaattacttatacagggtgtccaaaaaaaaattatttgaaatgaaattatttgccaaaaaaagaagaacgtgtgtaatttatttaattcaaaatacattatactgctgtcagctattagaaaaaaatatgtatatcacaaataaacatcgcctttcgcttaaattaaatgttcaaacttccaagaggcagctggcttgaacattgaatttaatcgaaaagcaatatttatttgtgaaataaacatttttttctgttttcgggaaacggttttatattaaaaaaataacnacattcttctattttttgtcaaataatttaattaaaattttttttttggacacgctgtacaaataattatgtaaatgtttatattactgaatgaagaagtgagtgacccttcaaatgagctagcacacgagccctattcac

SEQ ID NO: 10226 - DNA, 732 bp, Diabrotica virgifera
  SmartBlast Evalue=6E-11; Info=Endonuclease-reverse transcriptase n=1 Tax=Bombyx mori RepID=D5LB38_BOMMO
ctagtgtagactccactcataaaggctgactataaccagtgcaaatttgtctctatcttctgcttttctgaaaagcgtatgtgtgtaatccggtccagtcacaaatgtttttcagccagtatatttgtcgtctagtcgatcggacagctcagtgggactagcggctgaccgccacttcactttgccgtgaattatgcgagatcaagcccagccaggtcatcggaaaaacaaaaacaggctaacgcgtcagtacaaaattctaaatgtgaatgtggcgcttgtgtgtgactggaatatgcgggcgtctgattggcctatgagggagcagtacggtaagggataagggcttgcggctcggtgatagtcccccatacatccctactggaagggtgttgacgcctaaaataccggtgcatatatatatttgtcgtctaacaggacccctttctccatccattttatcagtcataaatagctgtaataactcgtactcctcatttttaagtacgtgcgacaaatatgctgtctttctcctttctccttttaatggtggtcaaaagttctctgtctcttcccattctgtgcatcatcatttcattcataatattatcggtccacggtgttttcaaaattcccctaaagagccagatctcaaaaacttccagctttctcatgaagtcaacattaacactaaacttcgacaccataaagaagaatagagcggatataata

SEQ ID NO: 10227 - DNA, 733 bp, Diabrotica virgifera
  SmartBlast Evalue=2E-50; Info="Titin, putative n=1 Tax= Pediculus humanus corporis RepID=E0W001_PEDHC"
tggaggaaactattaagactttggaacaacgcattcagtctttcgtgaaatcaggagaaaaactattagctgaaaatcacagcgagtctccccacattcaaagtgaaatctcggctcttcaagataaatggaacaacctgaaaaaccaagcgaaaacttcaagaaatctcctggatgtcagtattcactactaccaactagtagaagaggctgatgaatggttcagagaaggcagtaagctgttggtaacgatcgccagaaaatcaacagcagttaaaacaccagaagaagctgaagagttactaaatgaggtctccaagttcttaacacccggagaagaaaagcaaaacgaaagaattgaaaaaatatccgaattggctgtcaaactatatggagctgaccaatcaaaatatgctcccatattaaatggaaacaaagacatgttagaatcatttgaatcaatcatcaaagagctgaacactttggctgaaaatctgcgaagtgctgaagaggatagacaaagattggaaaaagaaaagaaggaagccaaagttgcagaagaacaaaggcaaaaagcagaagccaaacagaaagaagaggagaggttggccgatgaagctagaaaagccgaggaggcaagattggctgaagaaagaagaaaggctgaagaggctaggcttgcagaagaagccagattggccaaggagaaaattaaggccgaagaacttagatt

SEQ ID NO: 10228 - DNA, 736 bp, Diabrotica virgifera
  SmartBlast Evalue=2E-62; Info=Enoyl-CoA hydratase n=1 Tax= Glossina morsitans morsitans RepID=D3TMQ1_GLOMM
ctccaaccggaccattaggcaatattttttcggctatgctcaatgcttttcggaaagcagcatcgttattttcgttttgctccaccacatggttgacaataccatattctttagcttctgtgccatcgaaaattgctgctgtaaatataagttcttttgccaatgaagggtttatcagtcttggaagggtttgagttcctgctgcaccgggcataatggctaaacttgtttctacaagacccatcttcgctgtacttgtggctactctgatgtctgaagataatgcaatttcaagaccaccacccattgcagctccatcgatggccgttataactggtactggcaaattgattattttatatgccatgcttcttaacttcagaccaaattgataaacttcatttgaactcatttctatcctttcttttaagtcagcacctgcacaaaagactttgggaaccaaactatgtaaaacaacaaccctagtaacattatccgctgctatttgatccaaagccttatggaaatcagcaacaaattcgcctcccaaagcatttttacgatgaggtcggttaaatcctattgtagtaattccattttgttccaaagttaaatgtttgactactatttcttttgatttttgtgaatactgtctggtttgtaaaaataagctaatcacttttcgattcatttttgttgcactaacctaattgttgtaaaagataactaacctaac

SEQ ID NO: 10229 - DNA, 735 bp, Diabrotica virgifera
  SmartBlast Evalue=2E-86; Info=Pre-mRNA-splicing factor Syf2 n=1 Tax=Culex quinquefasciatus RepID=B0WLX7_CULQU
cacaaatacaaaaatgagttcacaaagtgaagcagacgtgaccaaaactaataagacattcgctgaaaaacaggctgagcggatgaaaaagttgagagaattgcacaaggtgcgaaatgaagctagaacacataatcatcaagaagtggtagcagaagatgccaggattaaactacctcagaactgggagagtagaaaacgacgagcagaatggatactaaacgatcagaaagaacgggaagaagctgctaaagaaggaaaagactacgataggatcaaattgttgaatgtgtctgctgtggaagctgaaaggtttgacagaatgaaaaaaaagaaaaaccctgatgaaggattttcagattatgaagcagcatccgtaaggcaatataataggttaataaaaacaatggcccccaaagacatggagagatatgaagagcaaaaagaaaagtatggagatgcgttttatgctggtccaaatacaattgttcatggcctgcataaagatagaccagaagctgtggacaacttagtaaagagtgtggaagatcaaatagctaaaagaagtaaatactccaggagaaggactcataatgatgatgcagatattgattatattaatgaaaggaatgctaaatttaacaaaaagatggatagattttatggtgaacatacaacagaaattaaacaaaatttggaacgaggaacagctgtttaagtgttttgtgaatattg

SEQ ID NO: 10230 - DNA, 721 bp, Diabrotica virgifera
ccgcacttattttgaatgtatgtttttcacccccgaaggggtggcactcatacccagggcaaaatcacatatcgacacaatatcccttttttctttggcatattagctatggactattaatgagaagttgttgcgaaatataaataaaagaaaatgatcttttttacactgtcgtaatttatttttggagtaactacttcccaaaacaacataaatatctgtaaatttgttttaagtaaatggtcgctataaaggggcctacttcttatggccgcctagggccccatgatgccttaaaacgtcactgtgcagtatccatctggcttgcaaattttagaagccttgtaggtgttaccagggaaatggaccaataagttttcaattcaaaaatcgttcagtaatatttttaatatttttcaataatattaatgttgctattaggattgaaaactttaccttacaaatgaggaagtttaaaatatttacaaagaaccacaaatagatagcataataaaatcaagaaggttgcagtagctgggccatatagaaagaatgcacgatggcagagtggtcaagaaaatagcaataccagattataaaagaaagagagtaagaccacgaaagcgatggagagaggcggtagcagaagacctaaaagaaaagggaataacagactggaagatgttgacaaagaaacagaaatctatggaaaagaacaaca

SEQ ID NO: 10231 - DNA, 735 bp, Diabrotica virgifera
  SmartBlast Evalue=6E-53; Info=Cytochrome P450 315A1 n=1 Tax= Tribolium castaneum RepID=D6WKZ9_TRICA
caagaattcccaaatttagagcagcaattgtataaatggtcattagatataatagtatcagtcttggttggtgcagataaatacacagaatgtaacagaaaagtagagttctatgtaaagcaattagcttctgttttacataaaatatttgatgatacctgtaaattacaactcttgccagcacctttagccatgaagtataatttacgtagatggcaaaattttgaaaattctgtaagaacatctttaaagttagccaaagatttgcttaatttaatttcggccgttactaataatgaagatggtctattaaataaaatgttgcaagaaaaagtagaaactaaggacattgatagaataatcatagatttaatattaagtgctggtgatactactgcatacacgatgtcatggttattgtttcttctctcaaaacatcaaaatgttcaaaaagaattacgagatcaagttagatctgaccctaagtcttcttatttgaggaatgttattagagaaactttaaggttatacccagtagcgccatttttaaatagaatacttcctgagacaacaaccataagcgggtatgaagttcctaagaatactcttatggttatgtcgattcatacaagtgggcgggattctaagtattttaaaaacccagagctcttccttcctgaacggtggagcagagataaaggaagtgatttatctctacaacaagctagtttacca

SEQ ID NO: 10232 - DNA, 718 bp, Diabrotica virgifera
gggcggtctaattgcaaaactcacattctccactttttcaaattttacaggaacacttgaaaaatttttaaaaaattaactatttttcatttgttatatctttttgtaaatagtgtaacataagcaacatttttaatggcttataaaatgtttaaatagcctaataaggcagaaattccacattaaatgttggagaatgtgacttttgtttataatcgtttttcttatttttgtttgagatttccctttgttggaagtattaactggagttacatttaattccatattataaaagatttgacaagtcttttaataagtatattttaacaagatattttaatatatataacaagttatttgattccaaacccgttccccgatcaaatccagtgtagaaaagttaaaatcccgtctacatcctcctccattcccaaaatacatatagaccaggactaatctgtaaaaaaacgtgtatttttggatgtgagaggtggcattcggatttttgtagacaaagttaggcgacaccctcagtaacaataattgacccatgctccctctcaaatatgcccggaacattaataaaaaaatttaattatttaaaaattctgaaaaacatcgatttttttccgccttccccgcttccaactctaaaacggttcgttttggaacaaagtcgcacagaaataaaataaagacaattgaattttgaatgatt

SEQ ID NO: 10233 - DNA, 735 bp, Diabrotica virgifera
  SmartBlast Evalue=1E-76; Info=Nuclear pore complex protein Nup205 n=1 Tax=Harpegnathos saltator RepID=E2BU35_9HYME
aaaatctgaggcttttggatcgtagtggtttaagaacttctcgaagagtttcaagcaaagcaaagcaacttcccacttctcagtcggattgcggtacgatcgtgagtagtgtttgttaaacactgagttaattatgaacgaaagatagggatcgaatccagggtttctgggaccagcgccgagcattcttgggatgccgaaatttgttagttcgtcgattagtttgagcatcgctctcgtcaaaggatactcctccatacgggactctatttcttctagctctgtttgtatacctctaggaacataactcgacgtcgtcggaatagtgactagaatctgcgacgcttccagattctcccaagtttgcgtcgcattctccgaacttttcgccaacgcagtcagcgttaggagaagatccgctttgagcgggatcggtacggaacaagtgacaaggcccagaagaaccgttagcggagaccagccgggatgttcgcaaagggccaggcgagagaattcgtcatgttcggctacggcgcggatgagttcgagaactgcgtggaggccttcaagttcttgcggtgacactcccttgtggaaagttgctctactcatatacacagtatcagcttgcagaggagcttcctgtctcaagttgctataatattgagaaaacgacatgaagaagtggtcccaggataagttggttgaaacgtgtgacccaacttgcttcagcat

SEQ ID NO: 10234 - DNA, 727 bp, Diabrotica virgifera
  SmartBlast Evalue=1E-23; Info=Ankyrin n=1 Tax=Sulfolobus islandicus Y.N.15.51 RepID=C3NIT9_SULIN
tagttcggtaaattggaggccgcagcatgctgctagcagttaaaactaaaacagtacagagttatcttatctacacacagtgaagcatattataaaacagtgtatgaaaatgtgaatacgaagagatatttaaagaagagaactgtgtcattaatatcgcagtcatcgcagtgtatttttaaatatggcgcagaatgagtttccccttcattcagccacaaaaattgggcagctgaaaaaagtaaaacagttgattgaaggaggagcaataatcaatgaagtggattctaatggttttacgtcactacatatagctgcaaatgccaaagccagacatataaaagtagtcaaatacttattggcacagggtgcagatgtaaatgcaatcgaaacttctgagggaaggagcgctttacattttgctacgcgcaagaatgatcttgaaatggttcgattattcacagaagctggagcaaatatacagtgttcagatatctatggaagtatgcctattcatgttgctgctgaagtaggatacgtagaaattgtgaaacattttttagaacgtgggatagatgtagatattctaaatgaaagcagtaaaatgacgtctcttcatatggctgcatgtggtggttacatcgaagtagtagattatttactgttaaataatgctaacgtgcatctcaaagattgtcagaaacgggttcgatttatcatggggttt

SEQ ID NO: 10235 - DNA, 734 bp, Diabrotica virgifera
gacatattgtaatggaaaccttaaaaatacatttgtaaagaatatcaacccctccatcactttttatattgcagaaaagagcaaaatgataaatatttttgataaaataatctcaacatgtacaaatttaaagcaaaaacataaaaattaataaaatttatctatacctcgtttaacataattaaataaaacaagtttttggtaacaggatttgacacaacttgaccattgcagtttctttaagagatttgtattggatgttttgtgtattgcaatattttttgcctctgaatgagactaagcggactcgtacaccaaagcaatatcctacagagatcacatataacatacattgcggaatgatatgcagtgagcggggttaaaaggacgtccatcaagttagcagaacaaagtcagcagaacacagttattcttataccataattaagtgtaaataagatgcaaatttaatgttccaagaaaaaatttattgctctttttttaaaaaagttatcgcatgttctgctaacttgataatcaagctagcagaacaatagttcaaaaatttgataaatcatttataattgaatgccaaagtattctctgaattaaatgcaaatttaatgttccaagaaaaaatttattgctcttttttttaagttatcacacgttctactactaaaatctactatatttcaccagattctaaaatctactagatctagtagaaaatc

SEQ ID NO: 10236 - DNA, 733 bp, Diabrotica virgifera
  SmartBlast Evalue=4E-88; Info=UPF0378 protein KIAA0100 n=2 Tax= Formicidae RepID=E2BI45_9HYME
aaaaatgcagatatatatgtccagagatctaaattaatgtacaaagccgcccctcaaagaacccgcttatttgcttggcatatgactaacatagaagttttggttcttgctgatccaaccattcatggtagggaaaacgttatccgaaccatgagagaaatagaccacgatacgccttggcccgaagaacatatggaattttcaacgctctggtgccgggtcatctctttcagatgcgccgagtggaaatttttgcttagggacttcccccaaccgttgatgaacgttagaaagtgctatatttggggacagttggtgggagccgaacaagttgcgccaaagagagctattcgaacggtggttgttcaattgggagagccgttcgaaccacatatcatagaaagagggatgcttccattgaaatattaccacgacttcaattgcgaaattgagtcatttagttacgcctttggtccatgttgggaacctgttatcgctcagtgtaatttaaatttcaaccaaatatctgcaccatcaagagatccttcaccacctttgtcattttgggataaaatgagacttttactgcacggtcggctcactatggtagttcaacaactaacagtcctactacatggttccttggatccttacaatactactgaagaaatggcgctgacttgggagaaagtcgtgatggattggactaacgctaaatttgtttacaaaggag

SEQ ID NO: 10237 - DNA, 735 bp, Diabrotica virgifera
  SmartBlast Evalue=5E-44; Info=Alcohol dehydrogenase n=1 Tax= Aedes aegypti RepID=Q16Q92_AEDAE
tcatctgatcctgctattcctatgactgttaatcctttaattttagcgatttgtcctaccaagttaccaacagcaccagctgctccagatattactatggtttctccagcctttggtttgcagacttctagtaaaccaaagtaagcagtcatgccggtcattcccagtactcccaatcctagcgaaactggcaactttccgtaatctggtagaacatccagtggtttatcttcatctggtatttgtccatttgatatggttagagttcgccatccaaatggagcacggacatattttccaatgggatatcttgtatttttcgtctctactatttgtgctatttgctgccccaaaaatggttctccaagttttacttgatctggaaaagacccaagtactctctggtatgggtccacgcttaagaaaactgctttggctaaaaattctccattttttagtggtggcaaattttcttcccgaattgtcatatcagtattcttcggaaagccatcaaaatattttacaagggtccaatatttagctttacaggttgaactagcgtcacctaaattacggttggcaaaatttggcacatgcagtgacctattattgttatttttaacagcacagtcaaaaactgacagttgaaaaaacaccaaaaccaaccatttccacatactggacttttttatgatactcttaaacaaatgtaaaacaacaatctactatttcaac

SEQ ID NO: 10238 - DNA, 736 bp, Diabrotica virgifera
  misc_feature (673)..(676): n is a, c, g, or t
  SmartBlast Evalue=3E-40; Info=Sap18 protein n=2 Tax= Clupeocephala RepID=Q6PC41_DANRE
attttgcgagcggtgtttgtaaactaatggagttataaaaaatacttttcttacattttttaaacgaatattagttttgttttaagtatggctgctgccacagtagttattgaagaaaaaagtgacgctgtcgatagacagaaagtttgtccttttttactaagagttttcgttacctcgaatggttcccaccataaaccatctgattatattaaaggaaacactcctcaaaacgaactacaaatttacacttggaaagatgctactctacatgagctgactcaattagtcaaagaagttaatccagaggctagacgaaagggaacaaaattcagttttgcttttgtgtacccagatatgagacagtctgtgtacagaataagagaaatcggaaatacagtaactggtgttaaaggaccagacgatttgaagacattgggtctcttaaggcttaatattggcgattatctcgatattgctatcactgctccagatacgtggaattctgcaagaaaggggtattcaaacaattataattctaggtctagaccatattaatatgtatattatagaaaaaggactttctatgtgtttatttagatatattttcctgaattttgtaagtaagaggctgaatagcttgttgcttaatgtatgttttaagtaatttttnnnnaattagtaatatgtacatttgtatcccctgaaactcaacaaaataaatgttttgactaat

SEQ ID NO: 10239 - DNA, 732 bp, Diabrotica virgifera
  SmartBlast Evalue=2E-90; Info=Monocarboxylate transporter 12 n= 3 Tax=Aculeata RepID=E2BUR4_9HYME
gctggttcgtcggagggaacaaagcatttcaggcagggtgctaagaagctagtaacggctgaaatggcaaaaagaccccctcctacatagaaaggtacatcgtaggaattggttgcatcgtataaggcacctgctagcggagaaccaattatggctgcagctcctcggaaaagaatcagaagaccaaacgcattggttaacttttccaagccaagcagatccactaggatgattgaggttaaagagatgtaaccagatactgcgattccgaaaaagattgatacggtgacgtacaatccatacgtgtggcataagggagttaaagctacagctatcgtagatataattaaacaacagttattaacaaagagtgcgttgacttgtggaaaatcagctatgtatccgcataccagacgacccacagtgtttgttataccgataatggaaagcaaaaaagatgctttagaagaatcaattccatctaatttagcgcattcaacaaggtagacgaaaggtatgtacaagcctgccattccgaacaaattcgaaattcctatcattaaaatactggatttttcaacaggctcacgtccaacatttgcgacagtgcagatttaaaactatcaggtaataccaggcaagggcatatatcaccaggtgtgccatcgtcttctccttttatttggggtatgctcaatatgctctgtctgtagttggtcagggatttctgag

SEQ ID NO: 10240 - DNA, 735 bp, Diabrotica virgifera
gagagaaaacctcaaataacgcctggacataaaaaacaaggttgtcatcaaattcttcttaaggtatcgtgtccgtcatcatgtttacaatttcctaatacctttcactatctgctgctgcgcgaaatatttcttctattgtggaaccacaccattgcctgaaagtttctttcgaccaatcaacctcttttacttcactttttcttgtattataacgcgaagcagatggtatttaggttctttagatgtttctcttctttgtaatgtttatgggcagatattctgaattcatcagtttaagaacatttccactggaagtgtacgaaaccataatatggttttatgttgatattatcatgtctaacaaccatataataggttcaccacacataacatttcagcattttcttgcgaatatgcatcgacaggtttctgttacataaaactttccacgtcataaaagccttacgtgatatttcgatctcgttattattatctcttcatcaaagtgacaatttacatttaaagtcaatatttctatttttatttatacgttgaacttccatcaggtctaggatttcctgtgtcatccactcttcaatttaaattttggagcagagcaaaagttcatcaaattgagacaccagacaattttcaacttaattattagtccctaaattgtttcttcaaggacacactctgacgcttttataagacactgagtagacggtgatc

SEQ ID NO: 10241 - DNA, 731 bp, Diabrotica virgifera
cgtgtgcagtcgtaagagcaattatctaagctaggtttgatctttaagcttgttcaattgaaatatatctttggtcaggttagccttggaaacaattgtaattactcaactgacgttctgaaatgtttttgtgtttgtacacgttacactgatgagttcctatcatttgtatttcacctattttaaggatagtgacttcaaaatggcgtttgttcttaacaatccgtccaaatatactcagcgtgcggtcatacgaatttcaaccttctgcgggcaaagttatgttaacatgtttcttcaaccatgaaggacccttgctcatggcgtgtgcatatcaaccgaaaacctgtatacagtggcgtagctgacagacccgcagggccccttaaagccttcaagcttaatacttctactttctttaaattggagaccaaaatatattttcctaataagcaccgaaatagggaatttggaagaaagtaatgaagcgggtaattgacgtaattcttactctttccgggtgcaaggtgcaatttagcgtttcgcggtcatgttggtagtttagatgaaagtgaatcgcaaaaagttaattttttgtcggtggatctttcactagctaaaaattctgttttagctaaattaatcgataaaaacaataacttaaacaaattacttgagccaccaaatacgaaacgtagttataagtttgctgcctcaagaaactgaaaaca

SEQ ID NO: 10242 - DNA, 730 bp, Diabrotica virgifera
  SmartBlast Evalue=6E-18; Info=7SK snRNA methylphosphate capping enzyme n=1 Tax=Camponotus floridanus RepID=E2A668_9HYME
aggattctggtgttttcgcttctgttgttgaactaatgtcagctgtaacgtcagacacatccatggtaccggacatagtacgacgttttttcaaacgctttttcttagactttttaatcggcgagcataattgttgttcatattcagcatcgtcatcacagtctatgagattcaaagggtcatgaatattttttgggattatcacttcgagttggcccttcttcctgggtggagtgggaaccggcgacgattttggtgttacagcattcatggctctgtttatttcctcatcttgtaggctgttcaaattaaggggatccttaatatttcctccaagtaaaaattttgaaggtaaaacaggcttctggttgatgataatgccgcacccagaaaaactcttcgacctctttctgctgcttctgtcatgcttgttttttcgtttgttttgattactgggattgggaggttttactggattcttatggcccgttttcacggccgggggatttaacatctgtacttgggcagtagacatacctgatttgtaatttatctccagagtcacccattctggagaaaatgaatttattccaactcaaacgtcctcactgtacccataacttcagaggcttatatcttaaaaccatgattgtttggagctatgcgcccattgagtcttttgttctacacatcaaggactaccagaacccaaagtttcagagcatttgac

SEQ ID NO: 10243 - DNA, 733 bp, Diabrotica virgifera
gaccacagcatcgtgtcatacctatgcgatatgttacgataatctatcttattcacgtttagatatcgtctaaaacgtatgtatcatctaatcttgttttctttaaataactcttaaaaaacaactaaaggtatctcatttgatgtgatacacaatcactatctctattgtgttcagacactctagataaacacggtgatgtaaacagtgggacagtgctatgaataattactgaggacattccagtaccagtagttggatttatttcgtcgacatgaacaatagtaatgaaattttgactgcacagaatgagaatatagaggctgttggttgtcggaacaaggggcacaaaatggtgcaagatgaattattatcaccatggagcagacaaaagtctattagtttcatcgttctaacagtgttgtttgttgtttgggcttgcatattctttccattgttattaaggcagcagtcgaatgacgatatggacaatatggatatgaagtcgaccacaatgggttcgacggaaatgacgggaatgtcgtcgaccacaaaggacatggtccacgatcatcatcatcgttaactacaaaactatttatatttatatttaaagaaatatactaaacatatttttattacgagatgtatgtgaattattgtaaagttttgtactgtattgtatatctttagtacttaagcacttattgaccaaataaatagttgtattata

SEQ ID NO: 10244 - DNA, 719 bp, Diabrotica virgifera
ccaaattacagactcactctgtatatatctatggttattagttgacaaataatggactgcattattggttgcctacgtttaaaggcgaatatgaccatagtatctttacaaaaatttgcagagtgtctgaaaaacaataagggtatttcttgtacaaaatttgctccttaaaaccaatattattatctaaggatgacaggtattcacagaagagtgctggggaggcacagggtacgttataattattactcagaaaccttagtcttcactacgtatatcttttttaagatgggttctgggaattggttttgatcttccagagttcagtcatgttttatctggaattaacacctggtgcgaattttactaaaactcatcagaaaaatgggacttggattaaattggagattaataaagaaaccaaaaatctagactacactatgattttggttggttttgaaggttgtttgtgtactccgctagactgtatgatactgtaacatgctcattcgtctaaatcggctgcttggtaataacttgtagaataaataatttggttcgattgcagtcttttttagttaatatttggtacgatcaactatacagatttgttaaattgctagagcaaacataagcacacagcaaagtctgtatagatgtctttgtgaatgttgtgttggtagtaagtactttttggtacttattgaaagtactttatt

SEQ ID NO: 10245 - DNA, 734 bp, Diabrotica virgifera
  SmartBlast Evalue=2E-26; Info="Beta-glucocerebrosidase, putative n=1 Tax=Ixodes scapularis RepID=B7PNW7_IXOSC"
cttatattcatcaaaaaaacttcttgtggtaatttgcccatacctggtagtactcatccttcacacgaccaaaccctgagaaggcgttattggttttcatccatttgggcgctatccacgcggaggcgaatagttttaattcctggtttaactcgttggcacggcggatatatgatagtttataacgatagtcttcatcagcaagtttaaatttacttagtgaaggatctggtgtatcggagtcatcataactgtatcctttggttgaaaaatcagtcccaccaatgggtactcttccaacattgtactctataccagattttgagaagtaagagcttagcaccttttcctgtacagtcggttcaacactttgcagattgataccaaaagcatctgtaaaagcacctccaaatccgaacatcgtttgatgcttctcatatttgtttatatgaatggtataaagagcgttaaatatgttaaacgcatacggtttaaactttcctgttgttctatgaagcctaagaccatcttgattcgacgtaaatacttgatattgtggttgatctaacttgcttaaaggtggtaattcatcacagtaggtagcgttgcacacacacacactatgccagtgtcgtatttttttcgaacgcattcctgacctaaacttatactagcaatcagtaaaataaaaaatcctgtagtactaaggatcattttaatcaccacttgttaac

SEQ ID NO: 10246 - DNA, 732 bp, Diabrotica virgifera
  SmartBlast Evalue=1E-41; Info="RING finger protein, putative n= 1 Tax=Pediculus humanus corporis RepID=E0VW18_PEDHC"
tgtagtcatatttttaatattctgcatagtcataattgattaattaattcttgctcgttcactaaatcaatcctcacatacagtgtatttagtgggtacttaacttaattattaggtactgaaatagtactacatactataaaagaatggcagattattttggagaaatgggatggacgcctcttgaaaatggacaagcacctgattattttttgcatctagcccgtttgttaagagattttaacatgttcgaagagttaagcgtgttgaatggtaaaaagttagcacctccagcttcaaaggattttgtggcagccattccaaatgaaagtattgaaaccaatgatttacaatgcccagtttgtcttaaagaacatactaaaggagaaactgcaaagaaattgccttgtggtcacttatttcacacagagtgtataatgccttggttatcaaagacaaattcatgccccttatgcagatttgagttacctactgatgatgaagattatgaagcttggaggaaagagaagaaacgagcaaaggaacgagaagcagatattgagcacttacataattcaatgttttcttgaaatataatagaaacattaattctgtgtgtggcgtgtgatttacagcacaaataggttttaattgcattttattcgttagaaaaaatattttttttatttataagtgaattattgttataagaaatatatgttataattattt

SEQ ID NO: 10247 - DNA, 732 bp, Diabrotica virgifera
  SmartBlast Evalue=3E-27; Info=Huntingtin-interacting protein 1 n=1 Tax=Camponotus floridanus RepID=E2AE68_9HYME
gcgggagagtcaaaatctgtggaaaggtttaaatattggtataatctaagttgtaaacagaaaaaaaaaggaattcaacctcgcattgagatctaggcagaaatataaaacatcgaatcaagccgtattaaaaaatcttaatccttattaaaaaaaaacagtttgagtaaatacagtaatcatttataataatgaaatcatttgttatatcaaaatggaatttgtgattattaaacttcgtaacggattattttctattttaatttttatcccttatttaatgatgtgattatatcaacccctcaatattaagaactttctccattcaacgattatatccttactatctacattaataaatagttatataacgattattagtttaaattgtcaatacttaagctaatttaagtctcgttttctcctgccaattggtaatggtgtttcctgagcctagagagtctgtaacgttcttgttccaattctttttctaactcgagaactctcacttgtgagtccatttccagtcgttttgcttgatggagagttagattggaaaagtcgtattcctctgactcatcaataagttcgctgcaatctttaacagtagcaacaacagttcctgttgctgtggtaactcctttagacgcctgcgtcaactgttgcaagttattactatttctatctgcttttactcgactggctactactaactgagctgtggaggcagct

SEQ ID NO: 10248 - DNA, 733 bp, Diabrotica virgifera
  SmartBlast Evalue=4E-10; Info=DNA adenine methyltransferase n=1 Tax=Aster yellows phytoplasma RepID=Q847N9_ASTYP
agagtagagtaaatttttatttgcataaatttttaacataattgagcaaataacgtcacattactaacaatcacatattaaaaaatgctactaataatcacatattaaaaagatatattaacaatacactaaaatatacaaacaatacaaattacatatatgctgatcaaggctgataggccaggtactccaccacagtatacggctcaatgttaaccaggtgttgaaaaaccgtttttttaaaagctttatagcttgtttcccgttgaatgtcagatggtagactattgtaaaatttaacgcacgcatacaaaggacttttctctgttagggacaatctgtgaagtggaatattcaaattaaggcttcttgtgttatattcatgatttggttgtaggtgataaaataaagtaaaatttttaaagagaaacataatacattcatatatatatagacagctgagaaagtgagtatattgagtgatttgaatcggcctctacaggattctctcgcctttagtcctaggatcaccctgactgcctttttttggactatgaagacagttgagctatccaccgaagcacccagaagactattccatatcgcataagagaataaaagtttgcataatataccgatagtaagattccctggtctagatagtttttcaaaactcttaatgagtagcaggctctatttagtttttttgtcgcattttttatttgttctcccc

SEQ ID NO: 10249 - DNA, 734 bp, Diabrotica virgifera
  SmartBlast Evalue=4E-45; Info=Pleckstrin-like proteiny-like domain family B member 2 n=1 Tax=Camponotus floridanus RepID= E2AKJ9_9HYME
cgtgtgttaagtttagaattttcaacagtaatgtgtatgcattaagaactaattatgcttaaaaaatagaatctcttttactatctaacctactcggaattgacttttggtatgtcgggtgtaacgtcggccagtataggatctacgcccaccttgggaacggtaaatcctggggcggtcgagttaatggacgcagcaggaggccgagctctgaagtttcagacagatactccacatttggttaacatcggaggagatagattaagtacatctgtcactctacatcccatacctcaaggccgagttacagtaggtagtggtccaaacgttgatattccggtgcaaggaactggtgttctgcctctacactgccacatagaaaacagcgaaggaattgtgacaatctatcctctttctgaaaatctttccatcgatggtttaaaggtgactagtccaacaagattgtctcaaggatgtatgctcacaattggtaggtcgaactatatgaggtttaaccatcctgccgaagccaagcttatgaaatcagtgctaccaaatccaaggatttcaatggctcctataacattcgaaccggacaacagttttatgagtaaatttaataagaaaccacctgtagcgcctagaaaaagccctagagaatctctttccgatagtggtagcgatgaaccaccatcaaatatcatgaccaaagtatccaagttcgaatacctggc

SEQ ID NO: 10250 - DNA, 712 bp, Diabrotica virgifera
aagtagcaccgaatgggtttattaagtcttttaagaatgctttaaaactgtagaataaaactaacagtaaaccatttggtttttaaggaaaccttaaggttgcaataaaactgctttcagcataaaagggcccactctgaaagaggtcaataaaaccaaaataaaaccttcttaaaactttgttttcttaagcaactggttttaaagctgtgtgaaggtgcttttaaaaccatgttaaaagacactttaagtgcagacagttttatagcaaacttaaaaaggtttcttaaatggagacttttaaagacaatttaccatattaaatgattctttaagcccatatactccatataggccaacaaatttttacatgtgttatgataggtagaaacgtatttgtaaccataaaataataaaacgtacttggttatttcgcactgtcaaggtagaaaaacacttgcgcacccaactttattgataatgttaacaaaaataggtctaaataactcacgcgccctaaaatttctgacttttggcgattaaaaaataaaataataatataacaatttaaatccgaaaaatattaatttgaaagaaaaataattttatctacaattttaatgttttaatgttaaaataaatcgaatttatatctctgtcgctcatttataatttttatgtaaaccttatattgtaatctatcatggctttc

SEQ ID NO: 10251 - DNA, 733 bp, Diabrotica virgifera
  SmartBlast Evalue=1E-41; Info=small ribonucleoprotein particle protein B n=1 Tax=Apis mellifera RepID=UPI0001A5DF82
gtttgaaaaaaccaaaagcttacgtttagttgttagttatttttaattaaagaatacagtaaataaaaacatattcataatgacgataggaaaaaataataagatggtacaacacataaacttcagagttcgggtaactctgcaagactcccgtaccttcattggaactttcaaagcgttcgacaagcacatgaatatgatattaggcgactgtgaagagtttcggaaaattaaatcaaaactgtccaaagttgaacgtgaggaaaaacgagtattaggatttgttttactgagaggagaaagcatagtttctttaacaatagaaggccctcccccaccagaagaaggtttacccagagtaccaatccctggagcagccccaggaccaggaattggtagagctggaggtagaggaatgccaccaggcatggcaggtgtacctgtaggccttcaaggacctgtaagaggagtgggaggaccatcccaacaggtcatgacaccaggaggtagaggccaagtatctgcacctccacagatgaatcaaggaccaccaaggatgggaggaccaccaccaggcatgatgggaccacctcccggtatgatgggcatggctccccaaatgggaatgggacgtggaggaccaccgccaatgggaatgagaggacccccacctggtatgatgagaggtggaccacctggacctccaagaccttttttaatgaattaggattaa

SEQ ID NO: 10252 - DNA, 730 bp, Diabrotica virgifera
tgaatcatcgcacactttacggaaacgaaacacattaattttatattgaaaacgtgctgaatgctcgaaatggatattttcgcggatagtagtttcgacgaaatatgagtttctaaatgctgtattcttcttgctattctgaccacacgggtcaccccctttatgttatgtggttattctatttttttcttttatatttagtgtccattagtttatatactgtgcgttacattttcttgtaacgtaactcgtctttcgatctctcacgtatttcgtgtaattcttctcagtactctcatatctgctatttagagcagcggttctcaacctttttgagtgatgtaccacctacaattattttttttatttttggtaccacctatatttttaaactgtattatcaatacttactaagtactactattttaattttttctgttttgtgtaccaccgccaataatgatatgtaccaccagtggtagatgtaccacagattaagaacctctgatttagagtattctttgtgttgtggctgtatcatgtgttttttctgatgcatatctcattattggtcttacactggctttaaaatgcttgacttcatctgagtgttaatatgtcggtttcgctacacagtgttattaaggcatcctgtcagtctatttgctttctgtagttgctttctcacttctttgtccaggtgattttgttttgtgagataagtttttac

SEQ ID NO: 10253 - DNA, 732 bp, Diabrotica virgifera
  SmartBlast Evalue=5E-90; Info="Putative ATP-dependent Clp protease proteolytic subunit, mitochondrial n=1 Tax=Camponotus floridanus RepID=E2AIL1_9HYME"
tttttagcaaaagaaatgttaaaagtaaacattttaaatttttaattattataaataataccgatataatagaaactaaaaatgttaagaaatagtttaaaatgtttgttgagaggaaatatctatttgggaaataagattactagaaatataggactggtacccatagtagtagaacaaactggcaggggtgaccgtgcatatgatatttactcaagattgctcaaagaaaggattatttgccttatgggaccagtccatgataatatgagttcccttatagttgctcaattactgtttttgcagtcggagtcttccacaaaacctattcatctgtatataaattcaccgggaggaagtgtgactgccggattgggaatatatgataccatgcaatatatattgccacctatttctacttggtgtgttggacaagcttgcagtatggcatcattattattagctgctggtacaccaggtatgagacattcccttccaaatgctaggattatggtacaccaaccttctggtggtgcacagggccaggcaacagatattcaaattcaagcacaagaaattatgaaattaaaaagtcaaataaatcagctgtacgttcgacacaccggacaagacttggctgttatagaaaaaagtatggaaagagattattttatgagtcccgacgaagccaaaaaatttggactgattgataaagtgcttgtgaaacctgcc

SEQ ID NO: 10254 - DNA, 733 bp, Diabrotica virgifera
gcccgggcagacattactttacgttctttatataattttgtatttttttttctaaagttgatcgtttttgagttagtaggtacttactaatttaaaacaaatacaaggtgtcccatttgaaacaagaaaactcattagacctccagaaaaaatagaagatctggtaacaatgcagataccaccataatatcggccacatcacaaaacccttacccactaaaatctataaagattgtgaaagctatttctgagatcattgaggcgttccatacataaaactcactctgtataactaaataaataagtaaaaattgggatcactgaaaggtgcagatgatatcaaacttttctaataatgacgcttgcgtggtaaagtttcttgctaaagaatgaaactttactacacaatttggcaataatatttaaataatataattgtattttaaatatcatagccacagtatttgttcgtttaactaaacattctgcccctatagtccattctaaaaaatctatagttgtattagttatctatggactagcagcatcaccttcagctgtttcttcttggccttcttcttcaccaatcactatttcttctggatctggagctctaggaagaaaatctaaatctgcatatatttgcctaaacatctcttctgcttttttcactgaataatcataatccaagtctgcatcaggaccaggacatacaaacacattctcaggaaga

SEQ ID NO: 10255 - DNA, 733 bp, Diabrotica virgifera
ctggtttagatgcagttctatagaactctttagagcagcggtggatagagtaaagatagtgatgatgatatccaacctccgattaggagacggcacttaaagaagaagaaggcctgtgttcccgcctaaagaatatggatatatggtttacgctgttttatatggtggccggtcagggccaaaatcaaccccctttggtattcagaaaaggtgtgttagaaaatccgtgtgaaaagctgtctttgttctttcctatgcctcgtgtcaaggacaccgatgtctgtttaagagtgacaaggaaatgttttttaaagaggtactgtacaattttgtttataaaagtaatattaaaatttgcagctggtaaaagtttctttttaattttattggagattattgctttcaatatggtaaacattttgaaaagagaataattctaaattcctttaaaccgattccacgacctgctcaccgaacaaccaactgatgcgccgttcgcaaaagaacgtttaagtgtctgtttcttcttctttagccccatttcgacccccccagtatccatgtagttaatgttatccctgaccccatctgagcagacattttaaaacgcttcaataattaaatacacgggagaaacaagacctaatacagaaaggacaaaaagaatactggaaacagcagagatgaaaacccttcgaaaaatcgatggtaagacactatgggatagagatag

SEQ ID NO: 10256 - DNA, 730 bp, Diabrotica virgifera
accgtttcaaaataaaaggtttttcaccacatattacaccgaaagaagttgtagctcttttaattaccttcaaaatggttttttataagttgtgatagcttcaaaattgaagtagttatggccctaaaaatctaaatcatacatattcaatgttttaatttaggggtagttttaagggttaaataacttgagcatataattttccagcatatctttttcgagaacgtggaacgatatttaaatcctttttagtttatcaaaagaaattttttatacaatgtttaattgaggggttgattttaagggttgaaatgggttaacaattaaataattaagatagagaacgtaaaatattatttactctatatttaagtcttcttgtcaaaccaaattaattttttgtattttttttctatttaggggttgtttttaagggttgaaagggggttaacaatatgataattaaaatagagaacgtaaaatatcatttactctatatttaaatctttttatatcatactaaattaattttttgtaaattttttcgatttaggggttgtttgcaagggttgtacggttttcaaggggatgaaaatgagtttatgaggttattgtgttagaaaacacttcacaatgtcactctttattattaaacacatttcttggcgataaaatggctcaatgtcaatttttccattaaggggttgttttcaccctttaaaaataaaaa

SEQ ID NO: 10257 - DNA, 731 bp, Diabrotica virgifera
ggaaactggataaggaaattcctttttattattggcgtatttttaaaatatatatattgatatttttatcacaattgtataattttataaataaataaatatatctcatattggtgtatgtacaaatacttctttaggtcttgatgatattttacagctctatacttattcacagtagaatacggacgagcctgttgatttcgttctattcctatcacgtacgttgatggttttgggtattttgtcggacatcagcgtttctttggtttttcgaagttgatcccacaaaattttctcaatcatctctttccaggttctccatattttttctgatttcgcttcaagaatataagtgtacttgctcgaattttgctttttcttgctttttgtaaaatccgttaggtgtataataaagtcattaaatgttgctatcctcaaatcattcatttttatgtggtcgtagtaatagaaaacttccaatcgagttgggtcacatgtcgtaaacaccaacacattggtaaataagaacaccatgcattctacttttctgggcttggtaatactgaacatttccctcattttaaaagatccataatccatcttacttataggactgttttcgatcgattcgatagccactgaatcgttaccctttgacatttcttctctcactattgctaaggcagtttgggtattatccacaggcaattccaatttcttcaattgttttt

SEQ ID NO: 10258 - DNA, 732 bp, Diabrotica virgifera
  SmartBlast Evalue=2E-76; Info=Uncharacterized conserved protein n=4 Tax=Schizophora RepID=D3TPM2_GLOMM
aatggaaatataacctgtgaaaataattactctttccttatttcctcaaacattgaagtgattacgttgtaatgaattaaaccacagcatcaagcagttgttgttctattatctcaaacgatattaattaaaaaatgttttccaatggtttaacttgcaatttaccgtttagttgtatgagtgtaagagactcaggttccgatgaactactacctaataaaatgtctcgggagcctgtgttgttaaatgtgtatgatatgtacaaaattaatgaatttaccagtaacattggattgggtgtttttcattcaggtgttgaaatatatggaacagagcatgcttatggaggccatcaatattcatttactggcatattcgaaaatatacctagggatgaaaaagaattaggagaacagttcaaatttagacaaacaatacatataggatatacagattttacagaagaagatgttaaacgaattgttaatgaattaggaaaggaatttagaggcgatagatatcatcttatgaacaataattgtaatcacttttcaggagcattttctaagatattatgtgggcaagatattcccccttggattaacagactggcatatttcagcagttgggtcccattcttggaacgctgcctaccgaaagagtggctaatgccgatggctcttcaacactcgctcagctgtcggcaagattcgacatgctcggaagcatcca

SEQ ID NO: 10259 - DNA, 728 bp, Diabrotica virgifera
gataatttccacctctactagtttcatgcctttttacttcacaatctattatgtttttcatcttttgcgttattttccggttattagcgcgctcatcaccgtacaaagtacccaaataaatttggtctattgagattggtgaacctagtagatttgaaaatttacaatgtaaaagtccccataatacacctatcaccaaaatatcaacaatgttttaatatccactgaatattaaattgaattccattgtcacacaaatcattgagcgagagaggaattactattcttaacaaaaaaaaattgtagttataatttataacagaaggtattgtatacgaaacagttaagaaatgtcaaatatgtcaaagcaatttttaaaatatgttgtagataaatatctctgaacatatttgtttcttctatctcatttaaaaaccaataaaggaccaaatttacttctagtggtcatttaacgacaactagcaaatattataccatagagctgagtcttatcgtattccctgtcattttaacactatccatagctttgaagtgatattacagaggatatagacatgatgcttagaatagatcaagatctagcctttctttacattttattcccagatgaaacattccaattgaatggtactcgtaatcataattgcagatattgggcagtcgagaatcctcattagatgtgaaagagcaaaacccaatatctgcaa

SEQ ID NO: 10260 - DNA, 733 bp, Diabrotica virgifera
  SmartBlast Evalue=3E-19; Info=Endonuclease-reverse transcriptase HmRTE-e01 n=1 Tax=Heliconius melpomene RepID= C6Y4D5_9NEOP
ctttcccatattttcatggtgtggctaagcagttttatagccctggagtttgtacattgttgtatatcgcccttgttttttgtagacaggtactagtatactgcttctccattcatctggcatttgtccaacttccataattctattaaataaacctgctagccaccttgttcctgtctctcccaatgctctccatacttccccaggaatatcatctggtcctactgcttttcctttctttattttttgaagcgctttagccacttcctcgtttgatattgtgttgaccattactgttactgactccacaggctgtctgtcaaattcttcatttaataagctgtcaaagtacatcctccatctctttttgacatccttttcgtgaactagtattttattattttcgtttcgcgatcatatcgttttgaaaatctgtgtcggatctggtttcttgtcactttttatataattttcccttcttttttatttttccttgtacttcgtttgaccaccaccaagtctctttatcctcgaaaatgttttcctgacgttttcccaagtatttcagtagcagtctctctaatactactggccatcttgtctactattctttccctgaatagaccttctttctcatcttttagcatcaaccacttggtgtccagcttgtaatttccatattggatatatcctctcgcagttgatcttcccatcttattttcggtcttcctat

SEQ ID NO: 10261 - DNA, 732 bp, Diabrotica virgifera
  SmartBlast Evalue=4E-19; Info="Valacyclovir hydrolase, putative n=1 Tax=Pediculus humanus corporis RepID=E0VP42_PEDHC"
gtgcatatagccgtaattattgtacgttgaacgaccttcacgaattcatggtgcaacatctctacatgaaaatcgttgaagttgaaaccaaagactaaagagcgaacgtgggaacgtgtacacgtgcacatattgtttctgactggagacttggagactggactgttagtcctattcaattcaaccgcgaattcaacattcaacgttgattgttgaagttgattaaactcaactcaagaattcgcttcattgcttcatcgcttcagttgttcacctatcactcgtggagcgtgagaattaggtgttatagttatttgaaggaaaataataaagctgtatcaaaatttcttagctataaatatatacataaaatggatacacgcagatctgcagacaaacctgtgaaggaatttaatatctcagttccttggggacatattacagtgaaagcttggggatcagcagataacccacacgtcttggtattccatggtctggcagacaacgcaggtagctttgacaatcttatgccctatttgtcaaatagtttttattacctttgcatagaacttccaggacacggcaaatcttctcatttcccagctaacctaccaatacacacgacagactatataatcgtttgtagattagtagcagaacaatttaaacagaagaaatacatcattgcaatctgcgcgcctagactgtgagataatataatgtatttcttct

SEQ ID NO: 10262 - DNA, 733 bp, Diabrotica virgifera
gtcaaaccaatttgtgattcccagacaatagtcgcgataattagtttttttttataaattagaattagcagatcaaagacagaagagttgagctatttagttgctgttaatatcaagttatatgtttaatgtggaataatatgttacaatgatcaggtcacctatttcaattttggaagaaaagtttgtaaggagtaagccagtttatatttatggagatcctgcgaaccaaggatatggttttacatgtaccgtaaaagtaggtggcattacagcccatggtaatgcttttacaaaaaaggaagccaaacaaagggcagctgaagaagctcttatattactgggaaacaatattaagactagtaccaccgtaaacacatcgatttcctttgatgctactaactatatttccttcctcaatgaacacgcacagaaaaatcgtttaagttctcctatatatatcgacagaccacacgctggtacatatgttattgaatgttactatgcgggccttacgggttttggagaaggagcaaataaaaaaattgctaagcaactagctgcaaaatcgacgtatgaaagaatcgattctacggagattaatgtactaagtgaccatctgaataattcattcccccaagatggcccttcccccgaacaaatattagacctctataaagatataaaaaagaaagatagaatcaaaacgtcagataatagattcagaaatcag

SEQ ID NO: 10263 - DNA, 728 bp, Diabrotica virgifera
aaataccaggtcatgcataagggaatctacatattcggtttgggaaattttgaaactggccgttggtacaggtggctgttgactagtgttgacacaggttttactgtagattgataacgttctgtcaactaggtaactatggttaaagtaactatgatatattttagattatgtatggcaccgatcggagccgtttaatgtacggttgtcgccgattggtgcctttttatatacggttggcgccgattggtgccgtatggaaatttaagtcagtacatttatcgtttcatatcacaatttacgtaatcacgaaaaacattgtattagcaatatttcttatgataaactaggtacttgtacgggtaactatatatagtcgttcaaaagtcttccagttgtaggttactattattagcttaggaaatattttgccactctttagctagttgttattaagcggtattatgtctattattaatttttgttactgtttaagttggtgcaaaataatgcaaatactattataggttaactagacaaggcgaaagtggcgggttcgttggaaaaagtgttcccatgagatttttttgcatatcacattcgttagacaccccagaataaggtcaacagccgagcgcccgccctgtcataagcgctgcgttattaacaattaaaaaacaatagtttaaaataaaataaacccaaaatacttatcgggaacgaataca

SEQ ID NO: 10264 - DNA, 726 bp, Diabrotica virgifera
  SmartBlast Evalue=5E-30; Info="Parathyroid hormone receptor, putative n=1 Tax=Pediculus humanus corporis RepID=E0VIW3_PEDHC"
ccgctaataacgacctaagacaaatttttttgtattcgaggatttcgaggactcaaaagtgttattgggagtgtgtttttgtttgttattcaaattctgagagtgctttgtaaataaccggaggagcaaggttgacaagtttacttacgataccgagaaagataagccatgcccaatcgccacatacaaataatattggagaaacaggatagggaattatatctagccgagcagaattgcacgattttatatggtcccgatgtgaagaataaacaccagggagcgttttataacagaacgtctcaaaatttgatgtgcccaccattttgggactcaatcatatgttggccctacacaccagcaggagaaaaagctgttataccttgcccatcatatttcgccggattcagagaggatttcaatgctaccagaacgtgtacagaaaatggcacatggtatgtaaatagcagtacacatgaaccatggggagactatacagcctgttcagagggacgaatcgcaaccatttttacaaatattacgtctaagtcagatctttggaaacgatatgagactttggtacccattctgaagattatctcacaaactggatacgctgtgtcacttctatcactgatagctgcgtttataataatgttatcaattaagaaactgcattgtgcaagaaacatcctccacatgaacttattcgcctcgttcatcttc

SEQ ID NO: 10265 - DNA, 722 bp, Diabrotica virgifera
taggatatatggaatatatcctataagaggtgatattgttaatactgacttcctcttcttgcttacgggtcttgtagatatatattctagatgtggtgactggttactactacaggtgatatgtactactgttgccagtcactagcactagatagtggttgctagggggccactagctgtgtcctcaagaagttggcctaccaaggatagaaaatagggagtcagtagagactagacagtagaaacacaagatactatagaaataataataggtttaatgatagttacctctgttgttatggggccacaaggaggggttgtcacaggaactttcctcgaccgcgaatgatggacaagtctaggaaagacacaggacattagtccaagcgtacaacaacaacgtataatcttctaaaatattcacgtgtcccaagctgaggttatgtctactctgagaactaaattaaatgtccatcagcacaacaaaatatttacagcttaaatccgtcactgacacaagcccttcaattgacgattagttttcataaactcagctgaattttcaatgatggaaacggattagaaaaatccacacttttaatctgacctcctctcagatcaatcaaagacaggatcccatccgtcttcccttatgtcattcgattctaaaacgaacggaaccacggttgatttagcacgtgacaaggcctatacaaggactg

SEQ ID NO: 10266 - DNA, 730 bp, Diabrotica virgifera
cttcgtcgagtgagtaggcagagtaggtctttgctggtctcctcctgactacccaagccaagctaaaatctgcaaagttccttttagcctttttgtataaatagaaatcaaaatgtctgacgaagaagttcaaaccaaaaaaggccgcaaagcagcagctgaagccaccaaacgtaccaaaaaggatgcgaaagctgaagttgaagatgctccagtagccaagagaggcagaggaaggccaaagggaaccgcaaagaaggctgaaaagaaggaaaccaaagccaaatcaaatggagtgagcaagcgtggtaggaggaaaaaggaagagaaggaggaatcagctgaagaagaaaatggagacaaaagcagtgaaaatgaagaagaggaagaagatgatgaataaattgttcgaatacatttcctttgcttttaaactattttttatacttaatgcttaaaatttacgtatttactttcagtatccatacttttaggtttatttaacagtacacacttaaattatttaatttttgactgatttgaatttggtattagtaggaatccaattccaggaaaatgttgcaatagcctctcattatttatttttagttttttaactcatatttatatatcatcagaccatgtaagttactcacactgaagtgtatttccggaattggtgtatttaggtactcgtttagtactttagactgaaataaattttgtatat

SEQ ID NO: 10267 - DNA, 732 bp, Diabrotica virgifera
  SmartBlast Evalue=2E-76; Info=Ribosomal biogenesis protein RLP24 n=1 Tax=Chrysomela tremulae RepID=D1M847_9CUCU
aatatattgtaatatatttcgaagtatttgaatgttttgtggacattcaaaaacattcagtaccaaataaaaaagtaacagctacaaaactaacaactcacaatgaaatgttatattgtttataattattgacaacaaattgtattttttacagtgtaacttctccaccatcttcaataataccttccatttcttcgtcactttctctgtgatcttccgccacagattcttcttgttttctttctttaagtccaacagctggggatctgataagagacagatccctttgtacctctttgatgtctcgttcttgttcgatttctctacctttacgtaatctttgcatgatgtaggctccttgccttttctgttttattttctctaccgttttcattgcttctacagcctttgaccaggtttctctgttatatttaagtggtatgtttctacgtttttcaaattcaaatgatggatctatcgttaactctttgcctactgttttcctgtacgccttggtccattttactttacgtggattctttttctttttaaatgctgcatggcattttgaacggcaaaacttaaatatcttgcagtcatttcgtacaaattgtattccatggcctggatatatccttgaagaacagaagtaacacgtttctatacgcatatttgtagtttaatattaaattctagtacattatattacacgtgcatcagtttattttgatt

SEQ ID NO: 10268 - DNA, 729 bp, Diabrotica virgifera
  SmartBlast Evalue=1E-29; Info=RNA polymerase II subunit B1 CTD phosphatase Rpap2 n=3 Tax=Rattus norvegicus RepID=RPAP2_RAT
aattatcactggtagactagatgacttttgtaagggattgtagccgacaggttccttctttacttgtatagttgtctcttcttcttctatttgttctatttctgtgattgtttgcatggttttgatcaatttggactttttcttatttcctgtttgttttgctttattttggtctctattggacccttttctttgttgatcatatcttctaaagaaacattagtaaagctacccacggaagtgaataaaggttcaactacaggtttagatatgccttggtctataagttcacctggtaagccccctccttcactacctaaaaattggtactctggaatggaatctagcttgcgcaaccataaaggactatcatcgatctgtttttttatatgtatactagctttataacaaaagttactacaatagttcttccgatctgtgatgtcatacactttgttatgtttagttgatatgtaaaactgttttttgggcatttctggaatctttcttccacatactgagtagccacatagctttgtaatagccctttcttcaactatatcttgataatgtgattgattaatgtatggaagacatctggtaaaaatttctggtctcaattttccttctattgaaaactcaacaattttgaacgctctcgtttcgcattcttttttccttagagcagcaatctggacatctttctgcgtctctttggagctaccctct

SEQ ID NO: 10269 - DNA, 728 bp, Diabrotica virgifera
  SmartBlast Evalue=7E-11; Info=Isoform E of Titin n=1 Tax= Drosophila melanogaster RepID=Q9I7U4-5
acaactatctcttgaattcaactgatgtctgtggtttcttgccttcttcttctctagttactatttcagtaacttcttctttatgaccttacgttttttcatgactttctttttcacgattattgtcttgttatcctctattttagtttcgatttcttctggcatttcaataactgttgccactggcatatactctggttgttcttcttcgacaagatattcatcgtttggaatttcttcgatcacaacagaggtttgaggttctttgccttgttcttccacggtacgtatttcagttatttcagttgtatcgcccttcttctttcttaagattctctttttaacagttgtcttttgaggtctgcctcgtttgtcttcggtttctattatctggatgtgttctggcaattcttcaagcacttctggctgtcctataattactactccttccctttcatctcgggtaacttctactgttggtagagctaaagcctttttcaaaagttcaatttgaatcaattcttccaccccttcagtggtatcttttttagcaagtgtaggaacaaacaagatattgtcttccgttataagttttacctctggttctttggtttcttcttaattttcttctttgtctttacttcctttatttcttcttcatgtacgaccactgatacttgaggctctttgccttcttcttcaacaaccaaaatttctgtcgtaatttc

SEQ ID NO: 10270 - DNA, 729 bp, Diabrotica virgifera
  SmartBlast Evalue=6E-55; Info="Deoxynucleoside kinase, putative n=1 Tax=Pediculus humanus corporis RepID=E0VRZ9_PEDHC"
gtagttccttaagatactccaatgaaagactgttttcttcaggtctcttcctcgcttttactcgttcataaactgtttcaggactacttcgaagatatactatcaaatctaaggcaatatcttcattggctcttatccacctgtaccactgatctataacagcataatcggcaccgtggatatacccgctcctgtaagcttgctccagaaaacaatatcgattattctgtatcgatctttcgaacatttgtactgttgtcgatgatgagcttggtttggacgtttggattttaaggcgagtaagctgcacataggtctggaaaactcgtaaccattcgtgaacatctgaatacattaggtctaagagattgtgtccatccacgttccgccaccattctagaggttccaaatatgtttcaatcccaggcatattctgaaaatatttgattagtgtggactttcctgctccaatattaccttctacagacactctaaaaggtctatctacaggtgttttgacatttgtcaattctctcatgggcgaaatcccaacaaaagttgtctttttgttaggtgaggcatctatgcttgcagctggtctcttctgaccacttatagttgttatgacaccctccatcttgcttaaattcaaactacagccagcggtaagtctcttcaaaagtaatggtaacttcttaaaataatgcacttttctaaccatgaattgaa

SEQ ID NO: 10271 - DNA, 729 bp, Diabrotica virgifera
  SmartBlast Evalue=2E-28; Info=LSM14 protein-like protein A n=2 Tax=Formicidae RepID=E2B6N4_9HYME
attcggaactgaagatcgtgatgctcaatatccagtccctgccaaaaccaagtatatgattatatactgtttaggggtaccgatatcaaggacatcagagtcaccaacaatgtgtcccatccacaaccactcaatgaccctgccattatgcagctttcagttccaccatcactgggaggccaaaccttccatcaaactcatccagttctgggtgcaatgggtcctcaaatgggtcagtttcctggtgcatatggtggcattggtaccattggagcaataggcactggagctattggaacatcattgggcatgcagagagacaacaggggtttgaacaattcaaagccaagtgagttaatattgggaactagtccccagtccaatactgtgaaacccccagttctttcccccactggtattcaacctattcagcctaataatcatgcttctgttttagatcttattggtggctcaagaagtaccacacctgccagcctcagttccagaaaatcccctactaacgaccagggagtccaagctggaggatcaggccacaacgagaagagagttgtgcagccaatccaaccacccaatcaaaggaaccaacaaagacggaggtcaagggagaggagagattctagagagagaaatgacaaccaacagcaaaacagacaacccattggtcgatctcaacagaataatgcccaatacagttaccaacatcatcaa

SEQ ID NO: 10272 - DNA, 726 bp, Diabrotica virgifera
gcgtgtgccaaatatctcgaggaaatgttcaaagttgcagccgcaatcttggaacgtgttttggctacctgttgatcgctactgtatcaccttaatattacaaaatttggcaattgacacatgttttaaaatttgaaggtttgtgtcaacctctatcgtctatcctttagaatgaaatctatgatatattactgtatataagtaatctaatgtgttgcgtgttcaccctgtatcgtattttaatcattgtaaaatttgaatataattttatatagacaaagataggtctgtatctttgaatgaatttacgactacaatgttcaatctccgcatgacgctaatatggtatgtttacgagcgccatcttgttttactattgataatttttgtatcaaaattaaagtgtactgcatttattagaagaatgatcatcattcatacttctggtgttaccgaacaattcttaacacattgtcaaatggttctactgtcgataacatatttaaaagctgtttaatgttaccttttactaagatcgagaaaaaagtgatattttttagacttttttgaaataaatgtccatatatttgtaaataaatgtgaaaaaactttgtgtacttcaaataataatggagaagaatagtctgagtgtcgctatcacatcatgtctgatattagtttatttctcaggaaccaaaagtattttttcacagcttttttgttttt

SEQ ID NO: 10273 - DNA, 730 bp, Diabrotica virgifera
  SmartBlast Evalue=2E-67; Info=Adenosine kinase n=1 Tax=Glossina morsitans morsitans RepID=D3TS39_GLOMM
tgattctaaaacagtctcctcgtctgctaacacaagtagataagtttgacaaaatgggagaaaataacatcaaagaaaatctcctggtcggtctaggaaacccgcttttagacatttcggctgtagtaaataaacaatttttggataaatacgaactaaaagaaaatgacgcaattttagcagatgatagacatcgtaatttatacgaggacattacagaaaattacaaagtaagttacattgcaggtggcagcgtacaaaatactttgagagtggcacaatggttgttgggaacacctaacgtagtaactaagtttggatgtgttggaaaggacaaatactcaaaaattctccacgacaaagctacagagagcggtgtaaatgttaggtatcaatatcatgaaagcgaaccgacagggacctgtgctgttcttataactggccaacaccgttccctttgtgcaaaactcggcagttctggacatttctcagtggagcatttgcgccaaccggaaaatagagaactattagaaatgcacaattcttctacgtgtctggatatttcttatcagcaaatcgcgaagcccaaattgaagctaataaaatagcattgaggaatgaccgaccctttatgctgaacttaagcgcacctattgtttgtcaaatctttgctaaggatatcctagaaaccctgccatatgtggatgtacttttcggaaatgaatctgag

SEQ ID NO: 10274 - DNA, 712 bp, Diabrotica virgifera
caaatttgttaaaaaaattacagcaacattttcgtcgttatggctgttcacagccaagaaaaatcgcgcccaaacaattatatagaaacagatcctattcgagtatctgtcggtcaataagcccgggcctagctagtaaaacaacatttttttgcaaacattattctctatatatcacttttaagatatatcttttagatctagatttatctttccttcaaaataagcttcagtttcagcgtttacttactcatcggagcgatgtcacttgtcacggagcatattttggatcggaaaaaaggtggtaatagctggggccagttctgcactacccggtgggtgcagaagcaattccaaatccaattcgtgcatttttgccatcgttttcatctactttttcttgaacaaataaagcttgtacgatttcatttattgtcaatgaaaataattccatactggttgcagaaccttaccggtggtgtgttacgtctttgatcgctttgggcggctttttttgggtgctctccagtcggataactgccgatttaattccgtaattaagtgatggattcatgtttcatccaatgtaacataccgacgcaaaactcgcacttattccgaaaagtatgttcaaacagcgtagagattcatcaattcattgttgtttttgctctggtgtgagaaaacgcgacacccacttgtaaaacagctt

SEQ ID NO: 10275 - DNA, 730 bp, Diabrotica virgifera
  SmartBlast Evalue=3E-66; Info=Dnajc8 protein n=1 Tax=Culex quinquefasciatus RepID=B0W9N7_CULQU
tcttgttggcctggaaattctgccagctgtttaccctgttttgtcgtgattcttcaaaattcttctgccactctttctgtgctttggccttttcttcttcatcaatttctgcttccctttttctctttctctcctcttggtccctctctgctagctcacgcctctttcgttccatatctgcaaatagtttcattgtcagaacatacacagcatgtttgtattgtccaggatcatcttcaggaactgtattttttccctcttttttagctttctttctcttctctgtcagcattaaatctgtccttcctacagcttcttcaataatatccatacacttttttctggtatcttcattttctaaagttttccaagctttgtttacagcttcaaatgcctgttgggctctatctgggtcatcttggttcttgtctggatgaactaatattgataatcttctgtattttctttttatttcatcaagttcagtttcaggttcaacttgaagcacatcaaaggggtttaagtttctgtatgttgaccctggtcttagtaatcggtcaatttgttgtttgggtgtgagtacagagtctcgtttttctatttcctttacctcagtgtaaaacaaattgaatttaatatctttttcaggctctgcactagtggacattttgaattttgttaaataattcgtcagtacctattaactatttaccatttgtttgctatcatc

SEQ ID NO: 10276 - DNA, 720 bp, Diabrotica virgifera
  misc_feature (645)..(645): n is a, c, g, or t
catagtcaaatttgatttttttataaaaaattaagtaatcgtgtggggaaaaaataaatatgccattttaattgcctatttgtctaatttgtaaaattcatattagagttttcaaaaagcatatacagggtgaaattttttctaagacccaaacgaactaatttttttaaagccggacctgatttttttctagtttgaataaatcagttgattaggtggtaatagtgtaacgattgaccaaaataagagacacatcgatctgaccgttcaaaaattatggcgaatataaatttctgtcaaaatgcgaaactcgccctgtatattaccaaacaaggggagcagacactttccaatggtcacttgttactccccataggggcctccatacgaggtaggagcatgtacagtttctcatgactcaccctgtataactcaaatgaagcggtacaaataacatagtggtaattatttgtagaaatattttccgataatttttttctggaccaaatatggcttttcattgccatagccttcaagaaataacgataatacttccgtatatatattaatgtataaagcagtttcaagttcttgtactatcatctgatcttgccttagatctaatacgttctttaaaggtaaatnttgcaaaacctctaaattttaagaaccgctcggactgacatgaaatccggcacacacacagccaacaagtcaaag

SEQ ID NO: 10277 - DNA, 730 bp, Diabrotica virgifera
  SmartBlast Evalue=4E-25; Info="Regucalcin, putative n=1 Tax= Pediculus humanus corporis RepID=E0VWG0_PEDHC"
gacagtatctggtattcgtggattaattttgtacactcttgaagattcgaagactgctacccataggtttccttctttatctatcgtcatgccaccacatatggcatcttcatcaaattctgcatggttgtataacgagaaaataacttgcctgttagacaatgatccggtgttaaaatcaatgtcgtattgatctattctttggcttagtgagtttccagatacaccatagtcagtcgtagtgcctgcccataatcttccggttaggtcaaattttccgccagtaaaaaagtttacgtaatctatgtcaacttcgtaaagtttattgattgattttacttcactatcttttctgttccagtccataactgctatcgaattgttcagtccaattataaaacgattttttctctccattactggaattatcattgatattttatggttttctattttaacttgccttaatttccgcttactcctcggtgcatacctatatactgtgctttccatgaggtcaacaaaatagagacactggttgtttgcatcccaataaggcgattctgcaaacgttaatccatctaccactttttcaataacaggggccatacttacgattaaaaattcgtactatgtagttaaatgttgaacgtatataaacggtgagatcacaaaacaaatattagtgacaaatatccaacctgtagtaaactgttagtgttgtaaatat

SEQ ID NO: 10278 - DNA, 728 bp, Diabrotica virgifera
tttttttaaaagtgggttgataacagtgtgatttatagcatagtataaaactaaatacctctctgtttacatcagaaggttttatttatatgattcaatgatcagtagcacgtttatatctttaaattgttattttcttaataattttgttgttctataaaatctattatatgagccctaacgactatatgtttggactatatatgaattggtaaaacaaattataaagagcgatccacaatagggaacttgcataaaattttaaattcgaaaaaagtgtaataaatcccaacagaacatatttaaaacgtgtatcaaagataaaaaaagttgttttttgttccgtttggcccctaaaggcgattctaaattcaaattattgcacctatcccaaaacgagtcgtgacgtcatatggttgtgtgtttacattctgcaccaacaaagtcaacaaaattgtatataattgtaaattagacattataaacgtcagtagaaaatacgtttgatcgtttcaactattttaaatacatagaaaacttgtacttttacaaaatggcactaaacaacacttataatcttttcctttattttccatagtaaaccttctttcatttccttcaaaaactgtatcaaactccaacctcaacaaactggtatatattattacaatgacatacgataaaaatgtcattagcatataaatattttcccttatttcgcgacgatg

SEQ ID NO: 10279 - DNA, 728 bp, Diabrotica virgifera
  SmartBlast Evalue=1E-33; Info=Putative cuticle protein n=1 Tax= Bombyx mori RepID=C0H6P8_BOMMO
caaatacaaatcaatatacacctagtgcggttgtgatatttggacggttcatttacgaccgatcattattcttgtattgttttttctgtctatcgattccgagatgaagaagtcgttaataatattgcctttcttactgtcaattggcctttgtgacgtacatcttcttgtacctgaagaacatacaccgccaccacctccgaagccatatgcgtttggatacgctgctggaaggttcccggggcacatagacagaacccactccgaagtatccgatggatctgggcttgttcaaggatcatattcctacgtagatcccaagttcagaatccgcaaagtagactatgttgccgataaagatggattccacgtcacatccaacgacgacgtaccagcccttccatcagatacaccagtagtggcagctgctaaaattaaccatctcagaaaatatgcagcaattgcagacgcacaacaagcatcacctggacaagtcttcgtgcctgctgatacagtggctgtgcaatatgccaaaaacaaacatttgtctctctatgaaaagattgcagcagaccacgcgaggatagctgcagaactggaagcggccaagcatgaggaggggcatggtaatgaggttggcgatggattgtacggtcatgtttagtttttttgttaaagtgtatgtattgtaaaatatttatgtttatagtacttaataaatagattcc

SEQ ID NO: 10280 - DNA, 730 bp, Diabrotica virgifera
  SmartBlast Evalue=4E-95; Info="Elongation factor G, mitochondrial n=2 Tax=Anopheles RepID=EFGM_ANOGA"
aatgaatgtgtttgaaaaataattttgattaagtaataaattaaataaattagtaaagcaaagacgttaaaaatgattcgtataaacagcgatctattaaaaaatatatcaaaattattgaagcacaactacaaatgtatgtctagttacgaaaaatatgcaggacacaaagatcttgaaaaaattagaaatattggaatatctgctcacattgattctggaaaaacaaccttaacagaaagaatactttattatactgggcgaattgaagctatgcatgaagttaaaggcaaagataatgttggtgctactatggactctatggagctagaaagacaaagaggtattaccattcagtcagctgctacatacacattatggaaggaacataatattaatataattgatactcctggacacgtagacttcactgtggaagtagagagagctttaagagtgttagatggggctattcttgtgctgtgtgctgttggaggtgtacaaagtcaatctttaacagtaaacagacaaatgaagagatataatgttccatgtttagcatttattaacaaactcgatagattaggagctaatcccaatagagtactatcacaaataaggtccaaaatgaatcatcatgcagctttcgtgcaattgcctattggcgttgaatcaaattgtaaaggtattattgacctgataggccaaaagtcaatttattttgatggta

SEQ ID NO: 10281 - DNA, 730 bp, Diabrotica virgifera
gccgctcaacttcttgtgacgaaacactagtgatcatgtgattatcaggaatatttgaagtatacaaagtagtgtaatcatagacgttctgcatgttaacatcttttgacatttcctcatctaacatgttggtaaaatcttgagtgttgacgttatttagatcattaatatctatttggagctccggatattcacctttcatagaagggtattcataatacatggtctcgcaaattttttctgcaaacatattatattggtatttatctttttgatattcacaagcttttttatcggcgatatattgcattttttcattgtaattaagattttctatagtatttagttcgatggtggaatactctatttcttttggaaggtctgtattgatcatttcagattgtgtttcataagaactggtgccagaaggagtactatcgtaatactcataacatctactagttgctgacatatcactggtaggagggacattattcaaggtctcaagagttttggtcccttcttcgtataattcaggaactacctgggattgatagttttctttacattcttcagaaatgttcagtggcttctgaggttccttggttttcacaaatttctttttgactgatttaagacagtttttgtaaagagacacggttctggatttgggaacccagccagtctttttaggttttcttttgggtttgtttgctgccaaggaaaattt

SEQ ID NO: 10282 - DNA, 728 bp, Diabrotica virgifera
ttctaaaaatatcccctgacttttccgatgtgcgtatatagagatttagtatttttgttagtaacataataaaaagaagtgacaattattataataagaattgcatttttagtttaactgacatacgagtacattaagtgaaagtgtatacctcgtataataggaaagtgaaagactaaaaaaaacaacaaaatatgattaaatgataaaaaaacattaaaggtacaccaaatacatataaccaatatttgtataagtatacaccctaatgcaattctatattagatatcgttaggaagttagtaattttgtaaaaagttgcccactctcttccagttttagttaccaacatccctatttcaaaaaaatcgacacaaacttgacttagaacagaaaactattcctcaattaaaaataaaatgagcataatcaaaagtaatttctcttatttagtcgagttgtaccaactggatggattgcatataaataattgtgcgttttgtcgtgaactttttgttaaaaatcaggtcactttctaaaaatagaccggagtttatgtgatgaaaacttcacgaagcaattatccaaaaatcaattttctaaaattaggcgccgaagcgaatccggaaattagaaataaatgggagtctacattacaaacatcgcaattttttaccctattacatcatcatcaccgactacattttggtaatgaataatggatattt

SEQ ID NO: 10283 - DNA, 726 bp, Diabrotica virgifera
  SmartBlast Evalue=1E-19; Info=Globin n=1 Tax=Samia cynthia ricini RepID=B6ZIV9_SAMCR
tgtctttgaatcatacaaattgtttaatttcatttcatctcacactctccacacatctcaagcttaaatggaaatgattattcattttcttcatgaatgcctttaaatgcggtttttgcgaagtaatcaagcattttgttccaagctgctaactctgccgttgtcataaaagcaaaaatatccaataaagccctttttacgtcctttagagcctgtagatctactgatcttcttgcatgatttcgtcctattttatcaattatagctgctacggtatcgacatcatttaagctgttgacaattgaacttattgagtacataacgctgtttacatgggcgtgaaattttttgtttctaggaaggtcttcggtaggtacgtctttgaatggaaaagttaacttgtgcttaggtgcaatttcgaaaagcctcataaaaaatttgataccattttcagtaggctgggaaataaccttgttccaactatttgtaattaagtatatatcacgcgatgtgagtcctgttacagggttggcatcgtcgattctaccttggttaacaaagaatcctaagaagtagctcaatactgaacccatgtttgaatatgggaataatattcatccactcactaaaggaacgactgataacaacatgtatttactagcaatttacaatatacctactcaatattcttaactctgaattgatactactaagtaatcttatttg

SEQ ID NO: 10284 - DNA, 730 bp, Diabrotica virgifera
  SmartBlast Evalue=7E-81; Info=Putative U5 small nuclear ribonucleoprotein 200 kDa helicase n=3 Tax=Aculeata RepID= E2A6Q4_9HYME
gttgtaagttttgtttactaatttaaaaacatgcaaaatattagtatttgtgcattaatataaaataataataattgtttataatctatatagcacaaaagcctaatcatggcggatgctgcggcaagacaacttcaatatgagtacaaagctaactccaatcttgtacttcaagccgacgtacgactaatagagcgtagaagcagggatgaggctacaggcgaagtcatgtcccttgttgggaagctcataggtactaaaatgggtgatagagcacaaagaactaaaccagggaaagctgaagaacgtaaagccaaacgccaaaaaagagatgaagcacaatacgattttgcaagaatgaaaggtgcaacccttctgtcagaaggtgttgatgaaatggtaggaatcatatacagacccaaaacgcaggaaacaagacaaacatatgaagttttactcagttttttacaagaagcactgggggaccaacctagagatatcttgtgtggggcagcagatgaggtattacaagttctgaagaatgacagacttaaggaacgagaaaagaaaaaggagacagaaacgttattaggagggatagcagatgaaaggtttgctttgttagttaacttaggcaagaaaataacagattttggaaatgaggaaaataagggaaccgcaggagaggaaaacattgatgaaacatatggtattaatgtccaatttcaag

SEQ ID NO: 10285 - DNA, 726 bp, Diabrotica virgifera
  SmartBlast Evalue=3E-47; Info=Histone-lysine N- methyltransferase SETD1B (Fragment) n=1 Tax=Harpegnathos saltator RepID=E2C3Y5_9HYME
agttcagagaaagaaaccgtcgatcagccccagaaagaccagcctgtacaacaactttctgctcaaagtgctcttaacgatcacgagtatctttccaaggaacagaaaatcgagaaagttaaaaaggagaaacctcccaagccaattaaaccgaggaagcacaaggaacataaaaagttacaagaactccaaaataaactcgcctacgagaggcagttcgcttggggtggaagtgatccatacagtttccataacgtacagcataaaccaagggatcagctgtcggagttctcattaatgtttgaatttttagctaaaggtattgataaagaagacgtggaatacattaaaagatcttatgaagaactgctctcaaatgacgcaatgagctattggttgaacgacacccattgggtcgaccactgtatgaccgatctctattctagtcccccgaaacggaggaaaaaagatgaaagagtccacgtcacgggcaacgcaagaactgagggctactacaaactgtcggcacatgaaaagtcaagatataaatatcaccacgcgaagtcgcatgctgtcatcaggtctagcactgcaacggttaccaaacaaggattatcccgagaggctcgatccaatcaaagacgtttgcttgctgcattcggaggagatacagactcggacctgctcaagttcaaccaacttaaatttagaaagaagcaacttaag

SEQ ID NO: 10286 - DNA, 730 bp, Diabrotica virgifera
  SmartBlast Evalue=3E-32; Info=Thickveins n=1 Tax=Tribolium castaneum RepID=D6WX32_TRICA
gccttcgtctaatatctacaatttggttttcatttaggtcaactggactcttgtgaatgtatatataggtacttttttcgactttacatactatataatagtgaaattttaactaataaacaaatatttacaacatagtcgtcatctatatacaatttttctttcaacatatagtaaaaactgcgatttccgcatctggatctgtgagttttgagtttaaagcttgtgacagatgcggaaattcgctcagagattttagatctctagtctttgctggggaaggtaccagtattacgataaaaaacgaaaattttcgaaaataattataaaacgcaatatacaattcaatatacaatttagaaattaaaaaaaggtatgtttagtacatgttattaatttggttgagctcaaagctctgtaattctgacaccatccccaattatatataaaataaagtcacaaaattaaagaccactacacaatctttatacttgtgtccgtatctaacttcgcgagtgtctttttcactcttagggccgttaatcgaacgtcgggattagagtgccaacattcttgcatcactttggctaaagtctgtaacacttcttcgccctcccacctcaagggtatctgggggcgaatctttttcacacataccacttgtagcatgtcttcgaaagatggatcagatggaacacagtcataatatggcactgcatactcatctgct

SEQ ID NO: 10287 - DNA, 728 bp, Diabrotica virgifera
  SmartBlast Evalue=1E-15; Info=Diphthamide biosynthesis protein 2 n=1 Tax=Camponotus floridanus RepID=E2A1X7_9HYME
tctctctataagataataccttctttttgttaaagatttaatatcatcagcaaatgcttgtactctcgacttttccaatatcgtaataaaatacagccaatggggttattagggaagtaatattaaacatttttctttcatctttaccataaaaaaatatggtatgaccctgtcgaacgtctttaagattgtcaattcttatgaactcaaggtatttgtaatctttaaatgcttccaccagtttatcgaataagtgaaggtatccaaaatctaccaaaaatgcaacatgataatcatcaaaatttgtctctacaatcttctttaaatgggcaatatcaagcgggcgcttctcataaacatacataaatggaacattttctgcaaattttgaaaaacatacaggaccaaaatgaataatcgcatcagcgtttatatgtgcagcagcaataaaatcaatgcaacaactttcgtaaacagtatcccctaataaataaattgtttcattcacgatactctccaattttaaaactacttcactggcatcttgtaataaataatctggaaattgtaaacaaacctttttaaatccattagactgtatccattctgcacatctttttattcataaacttcatctatatcatcagctttagtttcaattaggggatggtttgaaacaacgactttttccaagctgttttcttcatttgaataaaatgaagtcattg

SEQ ID NO: 10288 - DNA, 729 bp, Diabrotica virgifera
  SmartBlast Evalue=2E-21; Info="Synaptotagmin, putative (Fragment) n=1 Tax=Aedes aegypti RepID=Q16WM9_AEDAE"
ttctagacaaagaaagtgactcaaaattaggccaactaacctaccacattcaagatttgttccgagcccctgatcttcaacttagtaaagaagaatttaagttggtcaattctactggaaagctaatactgtctcttcaactaaggatcttaacacatgataaatttgaatgtgaggatagtgaatctgattcggggaatgaggaagatgatatttcaagaaaatcatcagtgagatcatcctccagaatgcaaagatcaatatctacctcaagtaatagtactcctcctccaaaaacacctacccaaccagaaactccagtttttgagcgtgaggttgaaccattcgtgagaaaagagagtgttagagcttcacagacgtcagtcaggagttccagttttagaatgaaaccagaactggggcaactggaagtaacactattttacagcgcacctagacaaaaactaattgtgactgttcatagacttcagaatctacctttaaaggatccaagtaatattcccgatccctatgtcaaagtaaaattagctgctcccggagcccacagagtcaagaacaaaaccaaagttgttatggacaactgtgatcctgtatatgaagaaacatttgaatatctcctttcccattcagatcttccaaatcacaaactagtttttacaatcaagagcaaaaagatgtttaattcgtatattatgggacaagtaatta

SEQ ID NO: 10289 - DNA, 729 bp, Diabrotica virgifera
  SmartBlast Evalue=0.000000001; Info=Novel protein n=3 Tax= Xenopus (Silurana) tropicalis RepID=Q28C36_XENTR
ggagaacctcttccataacttggagcgcctctaccacaacttggtgaatctctgcttgaagtactgttgaatctactagaattatcttttaaggaataccctgtatctactaatcgttccattttctgcatgtaccgttcttttcgtgcttctgcctttttgtcttctatagattttctggtctggtaatacgaactcttctcgaagtttgtaggaggaggtggcagtggtttaggttcaactggctttctgcacgttttttcatggtcggagaactggcctttgggcaccggttccttgcagaccttgcacaaggtaatgttccttgcgcagtgtatcgtgtgcatgacatagttgggctgtgggatttcctttttacaattattgcaaatctcatgttccacactactctccatattgtctatttaaaacaccaaaaatatcaccaacagcacaagaaaaaagcaactgtactcaacaaaaaactacttaaagaactatttagctcattgatgttaatgcactgagagttttacaaatgtgtgtgaaacaaaaaagtttgagatacacttattatttttagaaccgtccgtgaatatgactgtgggtctaaagatatcaaaagttattttgggaaaaactgctgactatcaataatccgagtctaggcttacgtctcaccgacacgaaaatgttcaccttatttttggccaggttttaaatctctag

SEQ ID NO: 10290 - DNA, 729 bp, Diabrotica virgifera
  SmartBlast Evalue=7E-75; Info=AP-2 complex subunit sigma n=49 Tax=Bilateria RepID=AP2S1_HUMAN
atcaggtcgagtgtcacccacaaggatcaacgattttaaaaaaaccttcagaatcagaactatctttacaatttggtgttgatgttgttacttgtgtatctgtcatttcgttactagtttagtgcagtagatagtattagcagaattaatagtaaacttataatactcatttaataatatactcagacttacaaacagtatttataatgattcggttcatcctcatacagaacagagctgggaaaaccagattagcgaagtggtatatgaattttgatgatgatgagaaacagaaattgattgaagaagttcatgcagtggttactgttcgggatgccaagcatacaaattttgttgagtttcgtaacttcaaaattgtatatagaagatacgctgggctctacttctgcatatgcgtagatgtaaatgacaataatctgagttatctagaagcaatacacaatttcgtagaagttcttaatgaatatttccataatgtatgtgaattagatttggtttttaacttttataaagtatatacagtggtcgatgaaatgttcctagccggagaaatcagagagacttcccaaacaaaagtgttaaagcaactgttgatgttaaactccctagaatagccgtttttgttgatattcggaatggatgctgatcaagtagcgtttgatcttctgtaaactgaacctttatgttggatgtgtgttattgtatcta

SEQ ID NO: 10291 - DNA, 724 bp, Diabrotica virgifera
  SmartBlast Evalue=8E-38; Info=SAPS domain family member 3 n=1 Tax=Camponotus floridanus RepID=E2AZS4_9HYME
gacccagtgctaactaccgtaggtaatttaagtccgcctttaggtaatactcgtttgcaagttaccagactgttcgccgtattgatagcttccaataacaaaagaattgttgaagaatgtcgaggcgaccgatacgttttctgtgttgttagatcttttttttaaataccagtggaataattttttgcacactcaagtggaaaattgccttatagctgcgcttaaaactcattctacggaggaaaaggatgagaattcaaatgccttaagtaaacacttgctgctcaagtgtaaagtaatcgaaagaattataactgcttggaaagaaaatgatgagcaacaatctcaggaaaaaggaattcgcaaagggtacatgggccaccttatcagcattatgaataagatagtagatttgtgcaataattctttaggtcaatatctcaaggataacctaccagacgttgccaaaagtttagatgaatttaaagagaacactctcgcagaaaccaatagtgtgcagcgatgtctgttggctgatgctcatcccaacagttcagcggaagatcctgacaattatgataaccttccgttttcccaaaatggacccttactccaacagatgtacttccaatatcagatgcagaacctgactccacagatcatagaaggttacagtggttttaatgatgatgcgttcaatgatggcgattccattcttcaatcc

SEQ ID NO: 10292 - DNA, 728 bp, Diabrotica virgifera
  SmartBlast Evalue=9E-51; Info=DnaJ-like protein subfamily C member 1 n=1 Tax=Harpegnathos saltator RepID=E2BY64_9HYME
aaaacatgatatattatattttatttcaagtatttgtaattgtatctgtaaatgcttgggatacagagcaattggaagtgtttgatgcaatagaagaagtaaaacaaaacttctacgaaattctaaatgtttcaaaggaagctgaaaataatgaaattaaatcggcatttagaatgctttctcttaaactacatcctgacaaaaataaggaaacggatacctctgaacaatttcgtaacttagtgactgtttatgaagtcctaaagagttctagcaagagaaaatattataacgatgttcttgtgaatggcttgccaaattggaaatctggtattttttactatagatatgttcgcaaaatgggaatactggaagttatcatcatcatatttgtcattaccacaattggtcaatacctttgtaattggggagtctattttgagaaaaaaatggcaattgaggatcaaataaatagaaataggaaattaaaatcaaaatttaaaatggatgaagaaaaatatattattgagaaaccgtcagtatttgatactttgcctattcagattccaaaactaatttggcttataattacatcaattcctgccatattaagactactttcacatttatttaaaactaagattgaaagttttcataaaagtaatgaacctgaaactgagccagtatccaacccaatattaaaagcaaaaacagctagaaaaagaaat

SEQ ID NO: 10293 - DNA, 725 bp, Diabrotica virgifera
ttcttcttattatttttttggactatggccttgacaattatccagtaactaggactaatataattggccaatataatcaaaagtgcgaataatgttgctgagcgtagaaaccaggtgttgctttgccgaacttgcacggtcccaatcggacgagtttggcaaatgccactgtgaaagtgacagttttagttgacatactcctctgatacttctaaaggtgagaacagtggatataatgtgaatttattcgtttttatcgctaaatttcccaactctactagtttcatttctttttatctcacaacttaatattttttccatcttttgcgttattttgccggttgttagcgcgctcatcactgtataatctaaatatcttgtaactgcagtcacaaaatattctaaattgactgaaagttacaggagaacagttcctacataaacaattaagttttacattcaacagaactatagccacactcataaatattacttgtcacgtttacgtaaaaaaatattaggcacttaccggaagtaaccaaattaagagaggacggtagctagtcgtactaacaaaaattgttaaaaaataagaaatacaataacatattgtataaagactaaaagacgaataatttgaaaatccaaataatcaataaattgaaataatatccaacaaatacgctaatgtcactgtcacaataagatatcaactacatgccata

SEQ ID NO: 10294 - DNA, 727 bp, Diabrotica virgifera
  SmartBlast Evalue=6E-24; Info=Putative uncharacterized transposon-derived protein F52C9.6 (Fragment) n=1 Tax= Harpegnathos saltator RepID=E2BUQ3_9HYME
tatatatagaccggtcactctagtatagagtataggtcgctcaggttcatgagctcttttaatccatttcatgcggtggattggtccgcataattcctcttcattatcctttatagattttcgtgttttttttgctttttctgtaatctgtttccattctttcctattctgtattttttctctccagcctgtaatttccatattggatatatcctctcgcagttggtcttcccatcttattttcggtcttcctctaggtctgtttattactggcgtccaatttgttatctgcctaattagtgcatctgcttctcttcgttggatgtggccaaaccattttagcctttgtgctttaatgaatctcactatatcttctccttccattagatttcttatttcgtgattcatcagaattcgtatttctccttgatctgttttgattgggccatgtattcttctaataatttttctttctattattctcagtttttcttcatctttttttgtaaggcacattgcttctgctccataagtgatgactggtctaattgccgctctatatatctttgtctttgttttcttgcttaggtttttatctttaagtaacttgtggtatttccagaatgccctattccctgctttaactctttcatttatctctatgcttcttctgttttgaccatctactatcactcctaagtatttaaagcagtcaaccctttggaat

SEQ ID NO: 10295 - DNA, 727 bp, Diabrotica virgifera
ccgtacttgatattggcgttacaccctgatgcattgagtggcatataattagcctggtctatggttaacatgtctctgatattatcataatagggcttttcatcgattgtcatttgtttcgagcttctgtcatttatcaaagccctatacatattgtgccttcgtttttgacagacatcacgtactgccgacgcactgttgccaaaggttcgcagaactttcgaaaaacggtgcggctactatctctcgaattaatattgatgacgcgctgatgaactcttcaaagcaacttttgtgaagatgatttagtgactttttattcattttgttcatttatttattgttttaaattacttttataggccgttaaatgtaggatcgtgaagaacttgaaaatattttaaagtttaattaagtgcaggatccatcacatatttttgacatttttgtttttaatgaaacaactgttgtccattagactcagatatgatacttttatagataaaatttgtagtaactatagtatttatatttatataaaatcactatcaaaaaatataatcaaaatctagaagataatttcaacttttgttcgataattcttatacacagaataaacctcaaccgttataagcattgatcagttccaaccccacaatacaatcattcagtcacttatttcttaagatttacggaactgcgtccagtaatatataaaagaggtagt

SEQ ID NO: 10296 - DNA, 729 bp, Diabrotica virgifera
  SmartBlast Evalue=4E-68; Info=Endoglucanase n=1 Tax=Phaedon cochleariae RepID=GUN_PHACE
tatatattttcattaaaaattagatcgatcacagaacatctttgaaaatataacttaataattcaaatttccacaagcagtaacagcaataagctcggcaggacattgtacttcttggaaggtaacattgggtctatacacgccttccatgaactggaacctgaatctgcatccaggttgtaaaacttctggtagaagacaacattcttcaagggaagaaacaccatcatatcttctaccccaaccgttttcgccagctccccattgagcatcgcatccatggttccagatacctacaccacctccgggtatttggagatcgaagtggtttgaagccaagtcagttccgctgttaacaagttggaccaacatctgttttccagctagctggtccttaaaggacaacaagaaacagctacaacatttggaattgtctataccacctgtgaaagaagcagctgaccaacctagtgccaaggtgtcacttacgacgtacggctgttgattactgcatgcgaatgcctgtcctcctactctacatcctgaaacgataccgttttgatctatagtgatgttcgtagtgccatcgattgcacatgtttgaacaggaatgccgttgtcagttttaacattttggcgatgggcgcatgtttgagcacaacagtcccagtatgtggtggtgattccatctccactcaaaccaccagggatgggcacgatgtcaggacc

SEQ ID NO: 10297 - DNA, 727 bp, Diabrotica virgifera
ggtatctttcagtttctgaagtattgcttgttttcccaaactgatcttgctgtctgccgataattttcgctttctgttagagctatgtgcttcaagcgtttcttctgtttttcgattattaggtcgttcaggagccgcgtgttcctctttgtccagtaactgactaatattatctaaactttcttctgaatgatgcaagaaaaacattccagggcttaaatggtccttatcttcttttgctacatctgcatcttgtacttcatcggtttctttggtatcgctgtcgtcacattgatcttcatcaagaattaatgaactacaactagtttttatggaatgattttgcgggtcttttacttctatgttgggaatttctatttcttctaccatataagaggattggttgtcgaatgtagagacttcggatatgtccatatctgatttgcccatagtagaggaactctttgcattacgcattccttccatggtgtatggttcgggatcgaagatatcgtagaacggttctttgtacaaatgagtccaagggtatcctcctcttctgcgggatcttcttacgtcctcccacttgtaggttttgattggcacccgggggaaattttctttctttcttaacttttttatctactcgttccattttctaatgcacttgtgacgatacaacattgattagaaatttccatgtctaaaagtctatgaaatattccat

SEQ ID NO: 10298 - DNA, 720 bp, Diabrotica virgifera
ccctactataaattaaagaaaataatattagtagtgtatttatatttagagttatccagaatctatattggaatcaaaacgcacgagtgatggagattttacttagttgcgtcatgacccacttattcccaaattttggtgcactatgtcgattatgagtgtcccaaaataaaaataataaaaaccgcgactttgaccccttataactaccctcgtcccccactctggtttccggccgttggggaaagtcatgtacacaactaattcaacgtatccccgtatagttttccatattacttatcacgcacaaaatccacttctatctctccgactatcactcccactgtaataaataatccgttaaaatgaaaataaactctatgtaatagttagaatgtttgcaatgaaagtgttaggcaaaccacattacacgttcgaaactttgagaaaacgataagccctcttgtgtttacacctgggtttggaaaagcaattttatgttgatttcaagttatcgattttatttaaatagatggtagttgttggagtatgtgtaagttcaagaaaagatcacagtgggggtgacggaagtgtaaaaatgtctcagtaatctagaagggatgtataaaacaagctcagacttaggcgactaattcccaaagaccccgcaggctaccctgatttctaagggttcggcaaaagaaaccgtcatattatgat

SEQ ID NO: 10299 - DNA, 728 bp, Diabrotica virgifera
gaatatacttgaaaattgaacaatttttaacatgaagaaagtattttttttgttctacgtgaataattttaatatatggatctaaattcagaaaggtactttccttcacactttttacaggcttaggactgtcagcaaaaaactggcgtgtttaaaagtgtttgctcttcctaatcggatatcgttaaaaatgtacagtaataatagttctatttacagtatatattacatacaaacgaataccaggtaccagtttacctatttttggtattttcagagaccggtaattagcataattggttcttagtagaaagtcgttatgcagattagtgaagaataagtagtttagataagggcaccttattgtgtaggtatttattaggaattccatgaagtcattacgataagacattattggaaatgctaaaataaatattgtacaaaagttctttgtctaattgtgcgttattcactaatgtggtaattattattccatattcgtgaaacgtacttttattactttttaatgtattttggatgtataagaagatgggaaaaatatcgtatatctcattattcattagcttgtcgatttgtcaagatggtcttaacttacgtaaagagtcaaaaaggtgccaatatgttggtgtataatggatatatccactagaaaggaaaaacgattgatcaaaagacaattaggtaagtgacgctcagtacaataagca

SEQ ID NO: 10300 - DNA, 728 bp, Diabrotica virgifera
  SmartBlast Evalue=1E-23; Info="Nuclear RNA export factor 2 (NXF2), putative n=1 Tax=Aedes aegypti RepID=Q177Q3_AEDAE"
aatttgatcgatgatattgattctctacagcatttgacagaactaaacctaacagatttatttctggatggtaatcctttatgtagcaagtatggaccagaggaatattttgccaaaatttcgaaacatcttaaatatcttacgcatttggatgggcttcctctgagaaaagacggttttcctgtcagcagacgacactatatgtgcgatctgggagcagcagatcttattaatcagttcattgaatattatttctacctttatgatctaccgaatcgggacatattgaaaatggcgtaccagaaagatgcaatgttcagtcttaccgcttcctacatcgcggatcagatatcttcgagccgcaccaaaatgcctaaatacttatctttatctagaaatatgcaaaaaatgtcgaactttagtcagtgtcacaacaatttaatcagagggaatcaacagattgtgaatatcttaaaaacctgcctctaaccgaacactatcgtccgtccttcgccgtagaattaatccattatacaaatacatgtgcagttgtgtcagtgtccggtgtatttaaagacagtgccgacaatctattagacgcagaacaaatcttcggattccgaaggacattcgtattggcgataaaaccagatggcgcatgcgtcataaccaatgaaatgatgcatgttcacaatgctctcacctggcagcaggtaactagtttcaag

SEQ ID NO: 10301 - DNA, 727 bp, Diabrotica virgifera
  SmartBlast Evalue=1E-62; Info=transport and golgi organization 9 n=1 Tax=Nasonia vitripennis RepID=UPI0001A46D3B
gtgtctgtgactgttttgttccattttatataaaattttagataaaaagacaataatttctttagtgggccaacatggcttggacacaacgacaattattaatagctgtctttatgataataactggcagtataaatacgctaagtacgaaatgggcagacacactaaaatcaagaggcagagatggcgaagtaaaaaactttaatcacccatttttccaagccagttctatgtttttaggtgaattctgttgtcttcttgcattcaaatttttttacagaaaattcagcaaaagaaatgatggtacagaagacgtacatgacttaacaaaaggaaatagacactttaaccccttaattctctttattcctgctatgtgtgatatgatggcgacatccattatgtacataggattaaatttgacatttgtttcgagttttcagatgttccgaggatctgtgatagtatttgtaggattattaagtactggatttttagaaagaatgttaaataaatcacagtggtccggaatatttttcgtgatacttggacttgcaattgttggtattacagactttgtttatcatgataacaatggatcgcatggacgcaacgatattataacaggcgatatgttaatcataattgcacaaattattcaagctgttcaaatggtagtcgaagaaaaatttgtagctggacaagatattcctcccctgcaagcggt

SEQ ID NO: 10302 - DNA, 723 bp, Diabrotica virgifera
cacagaaatacatgttttattactactaaccaattagttaaaacaacataaattaaacattataaatatcaatttatgttaagaaaagtgttatttttcttaaatctcaatattaatcaagatttaaaaactgttaattcattcattgtgagaaaaataattattttctagtcactagccacctataagtacacttacactaaaataaattaaggtatacaagtataataaatataaaaaaatacatatgtttattaatattaatgtttaaaggtatggccaagaaagcagagatcgtggaaacaaacctattaagtaaactcataaatgcatagcttccacgacctgttatgttagtagtactctatactgtcattaacaaacccattaaactagtagaatgtctaaatgcttattatataaaaatatatgtacctatgcccgtgacagacacctcgtaacgcgacagttcgcaaccggacagttggcaacggacaattcgcaacagcgacagctcgtaacagcgacagttcgtaacggcggcacttggtaacgacgacagttcgtaaccatacaaactcgcaacggacaattcgcaacgtccaaactgaattattacgtttatttccgttaacgtggaaaccaactgctaccacagttataactgaaatcatgttcatcaatttaacgaatcagtacggataaacatgtttaacaccctcc

SEQ ID NO: 10303 - DNA, 722 bp, Diabrotica virgifera
ttataaataaaaatggaggaatcgcagagaaattccactgacgataatgttaaaactgcggtcgtgcagtccccaattattatgaagattgatggacctgaagaaacaaatgataaagaatctgaagaaaacgacaagaacaccgaaacattgaaagcagatgaattcaaaatgtgcagtccaacatttagacctactttgccactgtcaaacaatccatttgcttccccacaaaataaaatatcaaaaggtattctaaagccagctcagtttaatattaaaaccaacaacaccacctcgacaccgtttgtattaaagcccagtcaacttaatccctttaagaactctagtgataagaccaatagtgaaaaatcagataatagtgatacacgagtaaatggagacatgccgaagtttgtgcctttggtagtacctgaaaaatcaacacaaaagttacagaaacaaaacctcaacccgttgaaacgaaaatctccagtaattcttttgtattcggacagaacttaaaggaaagggtggcagaaactgaaaataaagaggaatctaaggcttcaacaagtttaggggccaatggtacttctgaaatgttgtttagcagtgctatcaagagtgaacttaaagccgatccaacagattcttcaaaagaaaaagaaatgaaatcattaagcgaatcagcaaaagaatatgaggaatccagagctaac

SEQ ID NO: 10304 - DNA, 728 bp, Diabrotica virgifera
  SmartBlast Evalue=5E-20; Info="Glutaredoxin, putative n=1 Tax= Aedes aegypti RepID=Q1HQU6_AEDAE"
accataccttataagtacaaattaacaattttacgtaacctgtgatctttttaatactgatctgcttgttgattaaattaaaactacgtcaatcatttagcggtttctggcgttactgcctggtttttccagtcaccaatacacaactttattacccgttttggtgttttttttttataaattgcagtgataacaaggattgaaaatggttcgttctcatcatgtagaaggctatgataattttgtcaattttatgaagaacttcaaggcacaaggaaccgtagtttgtatttattttggtggctctgtagacgaagcgactggtgaaagttggtgtgatgattgtgtaagggcatggcctgtaataagtaaggtacttgaacagctagacgataatgtggatttcatacatgttgaagtaggagacagaccaacatggaaagacccaaacagctccttccgtaaagatcccaccaccaaactgctcgttttaccaactttgctcaaatggaaaacgccaaaaagacttgaaggttcccaatgtgaaaaagagtttttggtcaagatgcttttgtgcgacgatgatgatgaagactagagatgtagatatatatgtactggatgtttttttatatgattattaccaataagctgaaatattaactttgtattttgtatctattatagagtattttccgatatgtaaataaaaaatttgcactctttgc

SEQ ID NO: 10305 - DNA, 724 bp, Diabrotica virgifera
  SmartBlast Evalue=5E-52; Info=Pyrexia n=2 Tax=Tribolium castaneum RepID=D6WP79_TRICA
tgatgtcaggagaattagagtttgaagatgtattttttcccgatgataaagaagagcaaatcaaatatcctgttacagcacatttaatgtatctatgttttgtaatcttggtgacgattattttaacgaatttaatagtcggtctggcagttagcgatattcaagaattacagcaaagtgctggattagacaggttagttagacaagcggagttagtagctcacttggagagtatgttgttttccaaactcttgacgtgcataccttacaaggtgatgaaatttttacacaccaaagcattgcttcttagatctcagcaccattgggctttatatatacggcccaatgatccaagagaagaacgaataccacaagacttgattaaacatatttatcaattagtagtggcgcggagagaaaaaccaaaaaagaatcgacgaatgaaatccgactattattacgacgttatttctccttcgctctcaagactgagttcttataacagcgatgggggaaagtacggcagtagaaatcaattaacaaatctgaaagctcaagttgacgaagtaacaaaagcttttcatgaacacaataagatgatgagacacaagattgacaaaatatacatggctctaaatggtactaaataatttctgacaatattgaatgcatcacaaagctgtatttattagagaaaatggagttaaaatgtcccctgatgtag

SEQ ID NO: 10306 - DNA, 724 bp, Diabrotica virgifera
cattttaattttccatcatttggaaattgatgtattaaatttattttttaactcaagtacaaaacatagttttagcaattgtcgaaaacagtgcagtctttaagatatagatgtatcgaaaaacatgtaaatgaacttaatttatttagcagttatgttggcaatctactgacctttttcccactaccactaatcacctataaatatggcaaatatcgaaattagacatctgcttcagataaataggataccagaaagtgatatcaccttaatattgttcatactctacctccccgttggattagtattaatactattaagatcatttatactcttgagtctctttctcatcactcaggttttaccagacacaccagtttctcagaaactcattaatagaatagcatgtgtaggattaggaatatcaattcacgtcgaaaatcctaaagttaaggacaatgtccatatgtacattagcaatagtttatctattttcgaccagatagcagtttgtagtgcctctggagctgtttcgcctagctgcagaacgactctagaaaaagtattagggcttagtacttattgctttggatcgatcacaaatctggataattttaagaataatatcaaacaatttatggtagaaaagaaatcacctttgtactttgccccagaagaaaaactcaccaacggaaaggcgcttttgaagttcaaaacatatcca

SEQ ID NO: 10307 - DNA, 727 bp, Diabrotica virgifera
  SmartBlast Evalue=2E-12; Info=Ras small monomeric GTPase Rab6 n= 2 Tax=Endopterygota RepID=Q2F5M6_BOMMO
aggacaaacttgtcttttacaatgagtaaaagaacaagaaagcaatgtaattatatcacacataacacataaagccattaaaagagcttttcatacataaaatattgcaaagcacaatacatccaactttcagactgagattaaaggtgccaagaccaagataccaatatattggatatattgtaaacaagttattttacatgtatgaaaaacgcatgtgcgaaggttcttataactgcccagacaagtactttcatcaacaaactgatcattacttcgatttactgaataccaaaaccctgattagtggcagatattttatatactttgctttccggttattctgatgagcgctttttagggaagatacattcgttcacaaaacaaaattatttttttgaaatgtcacaagccaagtcaagagctacagtttgttacaattgcttgaagaattcactttaaatgtcagtgtcagtacctacgcaatcaagcacagaagtggataatttttgatatacatatataaaattcaacacgcacatccgccgtcaggatctttgagttcatttggtgtatccttcagtactacttcttgcatatcttctggaggtttattctccgtggagtccatacctggtaaagctgcagctactctcctaaaaagttgtttaaacaattatagccagctttcgcactggtttctaatgaaacataacatttaattcct

SEQ ID NO: 10308 - DNA, 725 bp, Diabrotica virgifera
  SmartBlast Evalue=1E-39; Info=Proteasome-associated protein ECM29-like protein n=1 Tax=Harpegnathos saltator RepID=E2BPU0_ 9HYME
gttcctccgatttgtaagtgtcgtaaactacacacaatccttttgaagcgacatcttggattatatcattattttcactcaaaaagcccataaagatgttctgcaactgctttagcctcttcgtgataggttccctttctccgcaacatttgatcacagccagtaaccaaatagctgatgcctgtttggaattagggtgggattgttgggctagacttaaaagttcccctagtaaccattccaaactgtcgtccgcctgaggttcgctcaccagaggtacataatctttgggtagggtcgtccatgggtttctagcttctggtgaccatataccttgacagcacatcaccagagattctcctatggtgaaatgaacttcaatatctttggtttctttggcggtattcagcaatccctgtagcacttctctagaatgagggaactttcctccaacgcacaacaaccctagacttctggcagccttttctctaacttttggagataactttgtgttattcatcacgtccagcaattcgtttacgatatccatctttgtaacagcgtcaatcgccatctttttggcgtcggggcttccattttcttttggtttgccatcttccagaggcaaatcacacacccgacctatcaaaccaatgctggtacatgctgcgcttactagaagagcgttctgatgcttcaaaaatggaactaaagattcgatgcat

SEQ ID NO: 10309 - DNA, 718 bp, Diabrotica virgifera
attaggtcctattgccttaccatttttcatcccatttaatgccttgataatctcatctttcgttctcgttatgatgttatcatattcttattttgcgtcccacatcctttgtctctcctacctaacctaacctctgtgttattcatttaacagctttctaaaatactcgtattatcttttctttatttcaatattggatattagcactcaagtcaagtcttagtcctagtcttaggtcaaggccggtatgcatgagccagtgagagggcggatagtgggtaggttacttgtcttttgtaaacgtttgcttgagtaatattttactttctttgccttaaaatatgactcaagtaaacgtttacaaaaagcaagtaacttgtggcaagtaacctgcccgctttacttgctttcttactggcttcgtgtataccggtctttaacttaagtaagtcacgtattcacttgactcaagtgaatcaagtcatttaatgaattttctcttgctttagtaatgctgtacctactcttcattcatttgtgcagacgatttttccttagcagtaactactttctttgctacgttgtatatatttttatcttcttctcttttaggcctctcatacctttatctagcctctttcttctttcctaccttcagttgtacttcagcatttcaccaccgagttactttccgtaaacagacaaatagtaccaacgc

SEQ ID NO: 10310 - DNA, 725 bp, Diabrotica virgifera
  SmartBlast Evalue=2E-35; Info=Pyrroline-5-carboxylate reductase 2 n=2 Tax=Glossina morsitans morsitans RepID=Q0QHK4_GLOMM
ataaaactaaaataaaataaattatgttatgttatttatgtgatgtgtatcttttggtatgtaggataacttatcatgtttttgtataattataattaaaataaaataacaatttggagcaatcttaaaagaagtttagttttgatggtactgttggctaattagagttgttttctactgcaaacatgcctgagttaacagaaaaaataggatttataggtggaggaaatatggccaaagcaatttgtgaaggaattgccacaaaaggactagtttcttatcagcaagtctatgtgtctggtccccgccttgaaaacttatcttggtggagagaaaaaggttgccaagtattccaagataatagtaggatggtgaaggaagcagatgtggtattcatttgtgtaaaaccacatatgtttgaaattgctgtagaccagatatacaatgaattttataatagtgatagctcagtggtatcaaagttgtttctctcagttatggctggtatctctttaaaacagttggaatcaccgcttaatgggagctttctacaggggagaattgttagaattatgccaaatacacccatgacagtgggggaaggttgttccttatttagtccaggttctctcgccaccgaaaatgatgtgaaactagtcgataaacttctgtctgctacaggaacttgtaaacaagtaccagagaatctcttaaatgctgctgga

SEQ ID NO: 10311 - DNA, 722 bp, Diabrotica virgifera
  SmartBlast Evalue=4E-70; Info=Contactin n=1 Tax=Camponotus floridanus RepID=E2A878_9HYME
agatgttagatattgcatacatatggaaacacaatggaatggttataagagatgtcgatgttaaaaattcatacaatcgtataaaagttgatggtggctatctaagaataataaatgcaacattttctgattctggtgattatgaatgtgttgttaaatcagcagtaggtagaatatattcgaggtctcgagtcatagtagaaggcccgcctggcccaccaggtggtgttcaagtattaaatattcagaaaacatcagttacattgcaatggacagatggtgccacccatggttccccaatttatagttacacgattagcggaaggaccaattggaatcacacatgggtgaacattacccatcaagttagggcaacagaaattgacagatatacaggaagaaaggagaccacaatagacaatattcttataccttggtctgtgtatgagtttagagtagcagcatggaattctttgggaatgggtgaaccatctcaacacagtcccagacatgctactccacctgatagaccttacgttgctcctcggaatattggtggaggcggaggcaaaattggagatcttactattcgttgggaacctctgaggccagatgaacaaaatagccctggaatacattataaaatattctggaaacgtaaggacggagaagttgaatttaagagccagaaactggaagaatttggaaatgttggagaggct

SEQ ID NO: 10312 - DNA, 727 bp, Diabrotica virgifera
tatgcttgttacgcacggggagctgtactataatatatattataggtaacttatatattatatcttatatcgctcactatagtaataaatgagcctgcaaaaagccataatatacataatattatggttccgtgtatgcaggctgactcattactatagtgagcgatgtgagatgtaatagatgagatataatatgtattgtagctccccgtcagtaacaagctttatgcttggaatataaacgttgaagattatagcagtatcagcgcgtatttaattttgaaaaaaacaggctcacaatgttgtacccaatgatatttcgtcaattcgtatgtcgtgcgaataacgttaaacttaaactgtgtaacagcttaatggaggtaaaatactgttggttgatctcaattctatcaaaacagacgaatatcaatggcttactgtgatgatataccttactgtgatgtgcttcgctcgacgcgcgcagcttgttcgttagattagtacgtgttttcaagaggcgctctgtgtgtgcgcctaaatctaacaaacatgctacgcgcaagcggcgcgcgcgccttacagagcgcatatttatacatacctttacacgtaaattcttcacataaaatttaggttagactatgcagaaattcaatttaaagtcgctcctgtaaaattatctttaaaatgagatacgaagttttcacactaagtcgccatcgataca

SEQ ID NO: 10313 - DNA, 723 bp, Diabrotica virgifera
  SmartBlast Evalue=2E-57; Info=Cytochrome P450-like protein n=3 Tax=Tribolium castaneum RepID=D6X2T2_TRICA
cccatacctcgggattacgatgtaggtcataaattgatatatccacactacatccctttggaatgatataaccagttttggtgtgaatatcttctcctgctattcttgaaatattatgggcgcttggatatagtcttaagccttctttaatacacctttcaacaaatttcatttccccaagttctgcataagttaatttatttggatcttcgaccactgcttgtatttcttgatatatttcttcctgagtttcctgttcatttgctaagatcatcaaaatatgacctaaagctacagctgtggtatcgtgtccagcaaaaataaaagtatctacttcctccctaattcctatatcatctatagcagctccattatattttgctttaatcattaagtccagcagacctaagcgctttttggcaaattggacatcctgttccttgtccaaagttatgtatctctctctaataatattattggtgaagttatgtagtgtactgacagttttttgactttgtttgccaactttagtcgaattgaacaacaaggaggattggagccacgggcgcattagtctataaataaactgttctccaaaatcgtaaacagcttgtttgtattcttcacattttggatcatcccgcaaatcttttccaaatgatgtctctccaatagagtataatgtgaattctgttattggtttgacgacgtcaatgtatggtt

SEQ ID NO: 10314 - DNA, 723 bp, Diabrotica virgifera
  SmartBlast Evalue=7E-12; Info=Endonuclease-reverse transcriptase n=1 Tax=Bombyx mori RepID=D7F167_BOMMO
agttatactagatccgagacagatgaagttgtctagtcctgcaagtggttactcaactgaatagtggttaatctgtctatcaccattattttcgtcttttttattaatcttaagaccaactttgatgctgtccaactcaactcttcgcaggagatctaacattttttgttcatttgctgctggaagtgtactgtcatcagcaaatcttaaattggagatttttctgccagccaccattactccatcaactcatccttctaaagctattcacacaatatcttcacaataaatattaaataagacagttgcaaaacggaactttgtctaacccctctctctctctgctctgaattggcttgagaacttctgatctagtcgtactgttgccatattagactgattaggtattaattatgtactgattaggtggattaagtatttaaaattctctcgagatttgcataagacttttttgaaagctcttgtaccacttagaaacaaaaaaaatactttcactgtgagtcagtttaagataattttaaagcgacagaaccacacacaaatgtaaaagcttattaaaagacacaagagctgtcaaatgacgcactctactgcaaatgtttaagaaaaatgatataatattttgacagatgtcagcacaaaagaaatgaattttattaggatattgcagattatagaaataaattgtcctattcgagcatt

SEQ ID NO: 10315 - DNA, 717 bp, Diabrotica virgifera
cgcacaatttcatttattttggtcactgtttgcggagttgaaacagagacaggtcaacctggacgttggtcatcttcggcgctctctcggccttcagaaaaccatttataccattcgaaaacacgcgcacgagatagagaattctcaccataggcctccttcagcaaattatagcactcagtcggagttttttttaatttaacgagaaatttcacattaatccgttgctcatgtttttcgtcacacattgttatcggcacgagaaaaaaacacgttattttctaacctctacagaaaaaatactactacagcgacaaaaacgtgttttcgttctggaagagtagacacttccagctatccaatgctgcattagtttcccactcttcgcctctaggacgccttctgcgcgcgcagtctcgttatttaacagccagacctcgtagaggccccagtggctggccactgtcgtcaatcctcgccactgtggcgtccattacaaaatcactggggctacaaaatcgcctgttcaagccactctgtggatccactcggtagcgctgcagagtgattcgtctgcttctgcattaactcaatttgtaatacagccaaatatatgttgcttggagtggatgatcatgtgaatacacatacaaatatagacattcttatacttccataaaatatacagctatttcttatattctgtttatttgtact

SEQ ID NO: 10316 - DNA, 713 bp, Diabrotica virgifera
taagaaataataagaaaatatctcgaacatttaacacaaacagaaatgaatatcaatttcagccaatcttcataataaatatatgtaaatggtatgttgtttattatggtcattagtaataataaagctttaatattattctaagtattataagtttttttccttgtattttgtttgttttttatcttataactttttttattttgtcatgtccctttttacttttgctgtttactaatttattatacccttggatcaattccggttttttcttatgaagttaaataaataatattttattgtatttattccacatgttctgtatattttttctgcctttgtcttcttttatcttttttatttccgttgaagtaatcatcttttttaagtcttctaactctttacatattatgtctttgatatgtacatattatttctttgatatgtacatattatgtctttgatatgtacatacaatatagagggatgctgagaattgcacggatacaaaaagttatcaacgatgaggtacttccacgtttgaataaacaaaagaaccaggatcaaagagacgaaaatacaatacttgggtgatgtgttgaggggtgaaagatatgaattactccgaatctcattagaaagtaaaaaattcgtaggaacacaccaaaactacatgggtggaaaatctgagtagatttcaggtcagatacata

SEQ ID NO: 10317 - DNA, 726 bp, Diabrotica virgifera
tgtatgtaaaaagtaacaaggaatcgaaaacatgccgaaataattattaaaacagtggcgcagattgtgaggggaaaaggggcgaaaatgaagtatatatccctacagcacgcctctggcaacagcggaaaaccatctcccaagaccagtcaaactattctaacacgtgtaaactatgtgtcaagtttgaacaaacaacatcaaaaggtgctttaacaatgggccaaaatcattctagaacattcgcaataaaacactctgtacttcggtaaggacaattcttaatgaaacatcctgtatatacttcttagttttggtaccagtatcacgggaaagtcaaagtgtaaaagttatagaactacaacgaaagaatttcgtaagtggatataacacaaaagtttaaaaagaaatggagctgctatagtatacagaacattactgagaaatgcatcctaaatatagcatgaaaaagagctaaaataataaaaatattgtcagttggttgtctttacagatgttacaagaaaaacgaaaataaaggatttgaagaccaaacatatattttaaaaacaattaaaatatatataaaactcttcaaaaacgatacaccttaattataatagaaaataaaatattcgagcggaattattattttattaaatacattttaagttaacaaaataataaatatctaaaaatcatcaaaatatgagcatcaacaacaga

SEQ ID NO: 10318 - DNA, 719 bp, Diabrotica virgifera
ttgtggaatttatggctttggtgagaactaattagctttaaaattgttagtaatagatatttttaacataagtaaatagaaattttatttaaattcgtatttaaatctatattgtgagattttttctctacgcgcgactaattatgttctcgagcttctgtcatatgccgtcatacggcatatgacaggagctcgaaaccaaagagaatcgttgaaaagctctattgaagcgtctttacgcggtgctttttgtggtgcgttgttgactacgtaaagaggcacgtttttccgtacttgcctcttcgcctttacactgatattcaaaagacatgtttatttaattattttttggaatcaatttgcgaagtttagcacatctcatgatttttctttagataattcaaggtcttctcaaagttccacaacgtgaaactaaccgcaaggtaataaaattatctaaatactttgaaaattgaaaggaaaaaatcataaattaattaaattactccataataatgactttattgtccattattgaattgttcatttaatatttacaaagaacttttaaaaagccgcataatttaaaacatatcaaattaacagtgaaaacacctgaagaatatgttgaggcaagaagacccccgtttagtgaagccgggctcaaacgactcgtgtatttggcgaacaatcgtcacttgagtatacttgccatgtcg

SEQ ID NO: 10319 - DNA, 722 bp, Diabrotica virgifera
tttataaataatatgtcaaaataggtaaaacaatttaacaagtttactaaaataccatcgattaagttggtactaacttgtaacttgtcttattttcacgtttatatttcaattgtaaaattgtctttcataaaacacctgtctgacgcattttgtgaaaaattctagtcaataatcaaatatgaattttctgacgttttgaatttatacaattatttttattaatgtatattttaagaagtgaaattaaaacacacacatcaaaaatgcttaagaaacaccactattattccacttttttcaataaaaacacacggagattgtcaatgtgcaactatttctccacaggatcggtgtgaggtatgtggtaggattaatggtctaaatgtgcatataactgcacctgaactctgcgaagccttaaaacatacccacaacatttcatttttgtaaccaaactgtaaggaatagataacatgcagctgacctggacgtcagacgtcatggaaatcgtggactcagattaaggtgggcacaacatgaagtgtgagagcagctggccgacaagagagactcaggaatgcacagggtgttcgtccacatagtgatctacaagttattatgtaggctggaataattgttcatcattggtttcataatgagggtttcgcttttgccgtggctaacaaaatctccagatcttaatcccatcgagcatgtac

SEQ ID NO: 10320 - DNA, 726 bp, Diabrotica virgifera
gtgtagccccatagacccatagatgagatggctccaaagaacaacaaacgtcgtctgaaaaccaaatcggtaaatcggcaaaatacggtgtcccagtgtaacgtcatacgtacgcagattatagatgaagataagatgaaaatgaatacacaagaaggtccttttccaagggaaacattggtaaaccagcaaagtgacgtttcacaatctggtatcacgaataatcaaattattgatagagaaaacaataaacttaagacctctaacgaactagattaccaacatgatcttatttctaaaagggtggaagaaccacaccaaggaaaggatgaagcggggatgaaagatcttgaacaagttgaaaaaactgaacctatgaagacggataaggactctgtattgatcatgcaaaaaatattaaatatttgcaacgactccaaccagctaaaaagggaactattaagtatattttcacaatatcttgaggatattggagataataaatgtgagctctcgtttgtatcaaaaatattatctgaacatctgttaccaaaggagcttcttaaactcatcaatagaaaatacaaaataacggaaaagcggcaatgtggtgcaggaggttttggagttatatatctaggaaaacttcgagaaagtggtggacctagaatggatgttatcgtaaaaggtgctttaccagaaaaggagaaatacctaaaatccgag

SEQ ID NO: 10321 - DNA, 726 bp, Diabrotica virgifera
acaattatcaccgggtgtaaggtatatgcagaatataaaccgccactacattggattaataattacagtggaaatgaaattgtgtagaaaagaactactatgagatattcaagataacacaaaaatgtagccattaacactttcagctccggcctccgcgccgggacaatatcagatatttgtctcatgtgcccatttgtacagttattggaaaattgttgaaatgtaaacacggtagccgagtcggtggcacccgattgataacagcgcaaagaatatatactctcctagaagaagcgtttgaatggaacagatgtcacgtttatttgtcccttgaaaataccatagtcgttgtcaggccacatgcacctacacagtaggaacacaaaatcctatgctgaaacgttacagggcagtacccttctaacagtgtgaacacgggagccgtgttgacggaattgaaaatattaaatggggtattcacttatcacagtgttttattaaatgttagacagtaaatacgatttttattccttttgtaaagttaaattcatacatatttttatttttaaattaaaacatttaaatatttgttacaattttatacacatttgtaaattttttttataatttacacaactgaaatatttcagtcttcaaccttctattagtgtacacttattttgctgctttcttaacagtcagtttcagaatacagcccttgac

SEQ ID NO: 10322 - DNA, 726 bp, Diabrotica virgifera
caaccaattcgtcttctatatcatatccaagaattggttttcgtcccaacttggtatttataattacatcaaccgaattgttgctcgttttgactttgtttaccattctctgtaaagtcgttcttggcaccaggaaacttttggaggcactttttaatcccatttttccctcttttacagcatctacggcgttcttcatgtcatctttgttccatttttttcgcaaattgagacagttaaattttctattattgccagacattgttgacctgcaaaaaaagagatttttaaactattgcggtccgaatatgggcccctagcccatatttacatcacacatgaggcccatatttcaaaatatgtacgttcaaaaaatatatcaggttatgattttataattagtctttgttcataatctacattaaaaccagtttcctccgtgtttctgccacacaagcataatatatcaattcggaaataatgtcaataaacgcaaatatcacgtaatataaacttacccgataaaatttcttcaagagccaaaaacaaacggtctgcactgtgtaacaacaacatatacactggtcaagaaatctataaatacaagtgaagagaggggtattctagtatatttaagcattttctaacagatggcacttcttgtttcatagatagtctgggggcccatattaaatacatgacccatattcggaccagtttcctcta

SEQ ID NO: 10323 - DNA, 715 bp, Diabrotica virgifera
acatctgtgcgtaaatttagcagctagataaccagatactattgtagaatgagtctcaagcaatcagttttgtaataagttaataagagcctcattctattggacaaactacatgttggaggaagattcactatcacagtttcagaaaatatagtaaagtatacgtaacatcagtaaatttattattaactatatcgcacatcccgttcaaaagtgtattaactcaaaaaattacatttttgtgtttatcacaccaacaaaatgctttatgcatcatcttttccttagggaactatgatatcgcaaccttaacacaatttcaatactaggtagagcaaaagacgtcacaattaaaaatcaaagctcatggtccgataaaaacagtaaagtagtaccagatatccagagactcattaatattcagctcagcggggtgctattgttggaggtgtggaattccataaacaagggatttatctgttttatgaaatgagcccttgtttatgtaatttcacgcctcaaacaatagcatcccactgagctgaacattaatgagtctgttggatacatataatgggtctatcattcggacttgtgacaagaagatgcgctagttcccggtgaaaaacgtaataaaaaaagtatgtgttttaacgtttcttttgggaaaaagtgtcttagatacattttttttggatgaaatctgaattatttc

SEQ ID NO: 10324 - DNA, 723 bp, Diabrotica virgifera
cgccggaacaatccgaaaggatctcttcggaaaaaatgcaatacaatattatttttatattttgaacccaaaatcctttaatcctgttgctaacataaatcgtgtttgtaacgtaagtcttgtttagttttgcatgctttctttaatattaattttatttttacggtgtaatattttaaattctctactaacttctgaaatatcccaactaattccaaaaactgcgactccgatattttatttttttacagttacatacttctgttcgacattaattttgaaccgggtactaaatatgtgtttaactagttcagtgcccacaccgacagtgtgtcggcacgagggtttcataaagagtgccggcgacgcacgagtatggacgatagtattacggtactaaatgaaccatttaagtaggtggtaccagccatgtggcgtttattcaagatgggcaccgaacgtgtaggtatcacctgtatacaacgatatctccagatcaagatactggatagaaagtttgttaagtagcaatttcattttcaaaacaccctctaaaacgaataacaatcctatattacacacgaaatattatgtatctgcataattggtcacacttttttaagttttagtatgactacgcctaaaacgattttaagaatatacatagatcgataaaaaatatttcagttccaaattcagtacctaattccatggacaataatt

SEQ ID NO: 10325 - DNA, 721 bp, Diabrotica virgifera
tagcttttttcatcctgtttcttgtatgttcttttgttgtttgccagaatgctatagcctgccggctaaattcccactttgtgatgttgctaagttcagccggccattctggatcagacgctgctaagtttgtagcggatgtaaagtctgggatgccacttccaccttctgaaggtattcttcttcgccgtatgccgttgtgtctttgtcacccgtccactctggtctactgaagtgaaaggtgttaaccccccgtgacgtggacgcgttagaggaggctctaactctccatggagcgggttaatgaacacatatgattccatgcccaaaagcatcgagtgttgaatggcttggaatgacttgtttgtgtataaatatattatcattgcatcagcgcctttttcgcaatccactttgttcttatcgtataagtacttctgagcctgtgtatgatagaaatctttgtgattacctgaataataaaatgcaagtaataattaatttgaaattatgattaggataataacaatttttggtatctatattattgtcgaaataattttatttcttggaaataggtaatttcttactcatctgaattttggtattggtagatgatatagtttacgaaacaagaaagctctattgtttcaaaatatcatcaatcagccaatcgcgtccactactggacataggccttcctcagttatttccggtgttc

SEQ ID NO: 10326 - DNA, 723 bp, Diabrotica virgifera
  SmartBlast Evalue=1E-59; Info=Metastasis-associated protein 3 (Mta3) (Fragment) n=1 Tax=Aedes aegypti RepID=Q16YA1_AEDAE
gcagttacactacccctattcttcttccggtacacaagcagttgtttcagttcaggcagtgattttccctccatttgtatactgcactcctgtttgacagcttgtatattaatggcaaagaagggtgcccttgccgcgtgtctcggcctcataatatgtctgcacagccttctggaaatcctagtaattggcgtcgtgaacaaataaaacgccgtcctagttttcattattggtctcggtgaaccagatctgataactagtccgtgagcagtggcataatgtctacctaaatgtgctttaagtttgaactcctttccgcacccgccgatattgcaacggtgcggccgatgtgacatgccgggcaatctttcctcgtccacgtcactacccgattttttcttcccaccgttttcaaaatcaccgtcaccgaatctcgtcggtatctttaaccctccgtactttttccaatactgccaacatgcttggcacagacgacactgcatgtgcgaagggccccaggcgtaccattggtttgatacggttacattacacgactcacacgcctttccacctaaagacaccgctggatctgagctgccgttactaccattaacaacacctttgttattatttaatgccgcaggatttggtttattgtagttaggaatgtagacttgtttcaattttgactccgcttccacagctttcactcgttttgttgta

SEQ ID NO: 10327 - DNA, 723 bp, Diabrotica virgifera
gagaagcgaaaacataagaagattatgcaatgtagaagacataaatggatgggtgacaaaactgaaacaggagtggaacgaacacattagtagaatggcagaggataggatatgaatccttgttgttcatctgataaagttgttagtttattgattttgttggttaggacttttgtggttagcttaagtgcggtgttcagtagatgtatacctttataatttttggggtcttcgtctcctttcttgaacattggtatcattatgctgtttctccatatgttcagggaacttgtacatttttttttattacataataatgttgttttgtttaaaaatgatattccaaaattccactcctcaaaaacttagaagtacaaatttaaaatcttctgtgtatttaaaccatttcaaacgagccaaaaagctcgcgaacacttgtgaggtcacatcattatattatataattccatttatcgtatgtcattctaataatatatatgcttttacaaaaacactcaaatattactcagaaatattttccagaatagaattccaaacctaatgaattaatggcgagaacatcaaatactataatgatatgacgtcacgaccaatgagggcgcgttttgggctgcctgcagttatttgaatttttgaaatgaaaacttttttttcgttgatatatgttttaaattatgttctgttgtgatttattgcattttt

SEQ ID NO: 10328 - DNA, 725 bp, Diabrotica virgifera
  SmartBlast Evalue=4E-45; Info=Glutathione S-transferase n=1 Tax= Glossina morsitans morsitans RepID=D3TPR9_GLOMM
cgcttaaataataatatttattgattatttatttattgtgcttgtcctgtaagttggagaaaatatcccttgaacgaatccactgcttctttatttattttggaataaggtaattcagacatcctgttcaaccaagcggctattcttggatacttgtcttcggtatagactccaatcccattccaagtagtaagtgaagtccaaaagctaaaatctgccacggtcaatttatcaccggctacgtattgattcgaatctaaaaatttttccactatttcatacgcttccaccaatgctgccaggtcttctggtacaacgtctcgtttttgttcatagaaaactcttttcacaatacgagcacctcttgcaaagaggatattagaatcaaagtgaagtctctgatcaacgatggctctcttttgtaaatctttcggatacaaagaatcattttttccatattttgatacgaagtaagtcataatagaatgactgtcgattaatataaaaccattgtcatctaaaactggtaccgtgtgttgtggatttatctttaaaaactctggagcgaattgttccttggctggaatattcacattcttcagagtaagtggaatagataactcttgagcaagcagttgtacagctcgacatggcggactgccatcaatcatgtataacagaggcatcgttaaatatgtgacggaaagtacagagatatgtaagag

SEQ ID NO: 10329 - DNA, 723 bp, Diabrotica virgifera
gtatgtggggatctgtcgggaaagctaacactggtgatgggtgtgactgctcaaactcttcgctggtgttttctaaatttggggatgttgcagtgtgaatgctccatttgactgctaatattatgccaaaatattaaatgtattattagtaaaaatgtaatcgatggtatgtaataagtagttggtgtattaagttagaattaaaaatttgtagcaaaattcacctcaacctcgatattattttcaacttcgccagtaatcattgtttgcaaaagacattcatctgaaaagtactctttagttagttgttatatagaatcgtcaagcttgtttagaatccaaaatattcgtgatgcatcccttggccgtcagttcagacagatcaaagttgctacaaagccattaacggtttgatttatttcatcgacagctgtgtctattgtattgtttgttctaaattcatcctactttatgcttatacttctataactattacttaaagtaataggcggggtattttcttaccttattctgaattattaagttaatgaagtagaatgtattccttttgaggtctctatcatagcatttcctttctatgtttttcatctcacagcaggtcgtcctctccgtcttcttccctgcagatcacagtccaatattctttttgaccacctgtgctctgaaattctttgtacatgtccgtactactgcagggctctg

SEQ ID NO: 10330 - DNA, 724 bp, Diabrotica virgifera
aagtacaagttcaggctgcttttcataaactacttgtccaccaggctggtacatgattctggagtctccgggttgattttcgtaaactacttgtgtattaggttggtacatcattctgtctccggagttaggatacatgacttcttgtccgttagagggatagtagatggaaggattgtattgtccgttgactgactggagataactggggtcgacgaggatgtattggccggtacgttcgtcccacatataattgttgttgtctggttgtgtgtactggatttcgttgtcgtcgtttttgccttcaacgtagatctgtccgtcgtccaaatattggcggaccatcactaatttggatccgacgtattcgcgcttaagggtgtactgacgtccgtagttgtctctgtatacttcgtggttgcgctgatcaatttcacgtccgttaagaatatcagcctggacattggctttttgtccaagaacatcgccgttaacttgaccgtaagcgccgattccttgtttgccaatacctgcagaaaggtcagcacctatttcgttgttgaggactttggcacgagcattggcgtccaaactggcgatgttgtcaatagcaaagaaatctgtgactttatcgaggaggccgttttgtccggtgatgagtgctgcgtggcaacagccgaacaggagtacaaaagacgtcaacagcttacagttcatgttggtg

SEQ ID NO: 10331 - DNA, 721 bp, Diabrotica virgifera
  SmartBlast Evalue=2E-45; Info=Transcription factor MafK n=1 Tax= Culex quinquefasciatus RepID=B0WFX1_CULQU
ttaaaaaaatatatttaaattaaaaggtatatagatacttaaataattatacatcattcatagataaaatttataaaattaatactacaattgttcaagttctggtggaatgctaatcttatttgtcactgcaaaccttttcagagcttcatacctatctttgatctcattcatttcatttctatatgaaaccacatcatcttgcatattctccatatccttccattcctgtgttttctctgtttccagttcatctttttgttcaatcctttttatcctacatgaagctgcatatccccgattttttaatgttcttcgcctttgtttcatgcgtacaatttcatctctagaaaggcctcttagttttaattgcctattgagatctctaacagaaatagtgactaattcatcatcagatatatcaacaattggaggcggtgaaaggggagcaagttttcctgctttcttgggatgttctgaagacatttttcctttttattttgtaaaactgatctaaatttgagtaagaagataactacgcctttattatttttctgcaagtcatgcttaaatcattatcaatagaataaatgttgtttgaaaggtttggtggaaactgaaattttgattcatttaaaataataattgttcaggatcatttacataataagtttgcttttataaaataccaatgaaaatactatgatataataatattcag

SEQ ID NO: 10332 - DNA, 715 bp, Diabrotica virgifera
ggctgttgtcgaggagttgcggtcagctctgcaaaggtgaatatttttggctgaaagttttttttagaataccttaagtactatgtttttacatgttccaattatgaagaaggaggaataatttttggttttcgagatataatttttttaaaagtggctttttttacccgcatgacctatgtaaccccttaacatattctctttgattatagtagttcgtataatgttattcctttcgggaaagtacagactgtatttggtccttctgagcctgccattaaaagttttctataatcagataggctaaaactcgatgcttgtaaattggactgaattcattaatatgcggttttggcactacattttcctatcgacagagaatgaaaaatatgcgagacagagtttacgtttaccataatttatacagggtgcaacaggaggcatttcatggattgaattgcatattttgggaccaaatggttcgattgaagctactcaccttagtacaagcgtgcacagaaggacagttacagccctttgaagttacaaaatgcaaatctgtttttttccggtgtatcgaagctgttaaggattttttgttgcaaatggattcttatggcaggaacatcttaaaaaaaaaggtgaagtttgtacatcccacagaggttttatgggggtttgttcccttaagccccccaaatatttgtgtacattc

SEQ ID NO: 10333 - DNA, 722 bp, Diabrotica virgifera
  SmartBlast Evalue=7E-55; Info=Cytochrome P450 4G49 n=1 Tax= Manduca sexta RepID=D5L0M8_MANSE
aaaaaaacaaaatgtctcaaccagtggttcaacctcttgagactgagactagctctattcttactagtaatataccactaattttgattggaattatctcagttttattaggataccaatactggtttaaaaaccaacgatatgttcagatgggcaataaattcccgggacctgccactttaccattcaataggaaatgctcacttagccatttggaaaatctgctcatggattgtttgaactggccatggcatattataaagaattacaaattgacgttggtaggatttggcttgggcctagattgatcattggcgttgcaaatgccgatgatatagaaattattttaggcaatagtgttcatttggaaaaatctcctgactacggtttattcgaaccctggcttggtgatggcctactcattagcaaaggggaaaaatggaggtcccacaggaaaatgattgcaccaactttccacacctcaatcttaaaatctttcatgccagtatttaacagaaatgctactgctttggtcgaaacatttagaaaggaacagggaaaagtattcgattgccatgattacctcagcagtacaactgtagatactttgctagaaactgctatgggtgttacaaaagaacacgacagcaaagctggattcgattatgccatggctgttatgcgaatgtgtaacatccttcatcttagacatatgaaattct

SEQ ID NO: 10334 - DNA, 724 bp, Diabrotica virgifera
  SmartBlast Evalue=1E-34; Info="Ankyrin repeat-containing protein, putative n=1 Tax=Pediculus humanus corporis RepID= E0VWZ4_PEDHC"
acacagaagattcaaaagcgacttcctcgtctgttattgataaaagttctcatacattgttgcatggtttcctggtttgcttctaatgcctgtttcatttcttgaatagttgccttaagatgctctatctcaacagtctttctcttcatgatctcctgaagaccgatcaaaggtttattatcaaggcaacagtggtctttggtaatgtcattattaaaccaataatagtcatcaactggtgtatctggagtaccagaaaaatagtctgtttgtcgtttagcaaccttaaatgctgctctaattatgtctttcggtaaacgagtctctttgggattcaaaggtttaatatttagtactaccctggaaggcttaggtgataccaaagccgatacatgcaaatgttccaaaatatacctaggaagactaccattaaacaaacctttttccatatgtgatattaatttggtttgtctcactagtttagaaagagtagcagtcttttgcaaacctttgatgtcatctacagctatacctgctaatagattcatcagaataattgttacagttatcacaaatattacgtacgtaacctgcgcactgaattccaataagtaatgaggattgtctggattattgtcgaccagaatatccaaatttaactctccagatagcataacaatgatcgttactaaagagataaatggattagcaaaaaaattagagt

SEQ ID NO: 10335 - DNA, 726 bp, Diabrotica virgifera
  SmartBlast Evalue=2E-73; Info=Actin n=4 Tax=Culicidae RepID= B0W1T1_CULQU
tccattgtgttgggaacaaatctaaaaaaaattgtaatttttgttagtttaccatacattcaatatgtctggttctttgttatatggcggtgacgaaattggcgctttggtttttgatccaggacaccattctctacgagtaggatacgcacaagaagacacaccgaaagctgaaattccggctattgtgggggtagcaccggcaccagaagaagttaaattagatcctgaggtaaaaccagatgatagcaatgtatcatcaaatgctccgactcacaagtattacattgacacagcttatttacatggacctagagcaaatatggagttgcagagctatatgaaagatgggatgattgaggattgggatttgtttgaaaagataatggattattcatacagcaaagttattcaatctgaatctatgtaccatccagtactattctcagaatctccatggaaccaaagacaaaaaagggaaaagcttacagaaataatgtttgaaaagtacaaagtgccagcgtttttcctggtgaaaaatgcagctctggcggcatttgctaatggcagagccactgctttagttattgatagtggagcaactcatacaactgcagtacctgtacttgatggctatgtattagcaaatgctgtcgtcaagtctcctttgggtggagacctattagttttaagggcaagggaactattagaaagcatgggaattga

SEQ ID NO: 10336 - DNA, 723 bp, Diabrotica virgifera
  SmartBlast Evalue=1E-14; Info=Reverse transcriptase (Protease) (Fragment) n=1 Tax=Anopheles merus RepID=Q9U997_ANOME
gattgtgtattagacgctctttacaataaaattttaattgatcgtgcaatagtctatcaaaaagttttggtatagaggattgtttacaaacgcttcgataatttgttatgtcttgtttattacctgatttaaaaattggacagatataagagtgcttccataaagttgggaaaactgatgtctttaatgatgactcaaaaagaagatataaaggattagttagtgaatatatacagttctttagaaagtaatcgggaataccatctggaccactgcttaacttattgggtagggataaaatgttgttgaaatatctttcactgatattgaaaaattaggtataaaaagattgttgtttccctttacttccaagttattaatatttgattgtggcgaataaactgttagaaaaaaattgacggaaacagtttgcaatctgttgtccgtttgttgctatagcattaccatagtacatactgtttggtaaatcatttgatgctctcttactgtttacaaactgccaaaagtacttaggattactgcataaattatgatttacttgattcagataagtgttataacattgatttgatagatccttacacaatctcctaagttctgaaaaaatcacataatcctcttgattacaggaagctaaataatttttatgagcaatttttttctgtacaactaaataacgcaagttggcatcaaaccattttg

SEQ ID NO: 10337 - DNA, 722 bp, Diabrotica virgifera
cgtattccagcaaagaaaagcccagttcccattcctattcggataaggagagacatgtttcacattcgtatgcagcagataaagacaagcatagctaccaatcgtactctgacaaagacagacatggacattcatcgcattcagaaagagataagcacaagaagtacgaagataagttgttgcaccatcaagaaagggcttctaagttggataatttgttgcacaacgacaaacccgcgaatctcagcaaacagatagataagccaacagatctgtcgaagtttcagatgtttaagccgtattctgagacacctaagtcacacacggacgcgagggatcttaccaagcaacaccacatcgcagagtataaagctaaggaggacaaacatcatagaactatggatattccaaagtcgatgccacaagatgcgtccaactttacaacgaaagcttttactactcccagtgattttatgaattcgcggtatgacgtgtcttcgtcttcgaagcatcggagcaccaatgcacatgggtttactatagggagtctcagtaacgatataccccaagtgagccaagtcaaggaagataacggcgtgatagttaagaatatccaaacgaaagacattaatagagaagatcaccataatcctgtgataccactagctgctcactgccaaggagtcaaaaggaaactaatggaaacctattccaggagtgcc

SEQ ID NO: 10338 - DNA, 721 bp, Diabrotica virgifera
gctgagaaagaaatagaaacgatagataacttggtacagaacttgagacagacgttgaagtaacatggactgctctaaaaacgaaaataacaagaatacaagaagaagacatcgagtttaccaaaaacaatagaaaacaagaatggatagggtaagagatcaggtacttcatgaacgtaagatgaaaatataaaacaaacccaatagagtacaaacgaatcaataaaatcaggaaaaagagcagagtagcaaacgaaaactggtaaaaaatgttaacaaaatacctagaaattgaacaacttcaggaaaaatttgagaactttgatgtccataaaaaactgaaagaaatgacaaggtaaacatagaaagagacaagaaaaaactgcagagaaactaaagaaaactggatgtcaacaaaatacctagaaattgaacaacaggaataattcgaaacttttaatgtccataaacaagtgaaagaaatgacaggtagacatagaaagagacaagaaataataataaagaaacaattacaggtacggaagacaaactgaataaagtttgtataaacatacctcaatgaggtagatggcttggtcacattatacgaatgccagagaacgtgaaagagagcgaccaaagaagaaatggttggaaggaataaaacaatacttaacagaaataagcgtatgagatattaggaaaaaaagcaagggactgg

SEQ ID NO: 10339 - DNA, 725 bp, Diabrotica virgifera
ttaaagactgcatatattaaggtatctgcactatccaataccacttctacaatttattaagttgtaggggcataaatataagaactgacacatatcgagacgtaactatggtaccccttaaaattgctaagctttggtactacatcgttaacaatacagtcaaaacgagccttaattgatgatagttcattgtaaacgaacaatagatgtatataaagtattgcctttggtatacagtgaagtatacactattttagcactagttaagggttttagtactgcaatgacaaaatagccactaaagagtgtatttattagatgaaagagcactgaaaatgagtaacatttatacataaagtcattctttgaagacgcaaagtgacagaactctggtaccactcaaaaattgcggagtttcggtactacatcagttatatcacagtcaacacgaactcttatttctgaaagtgcattggaaacgaaaaatggaaccgaaaatgaataacacataatataaagtcattttttgaagaccaaaaaagtaccaaactctggtacttttcaaaaattgaggagttttggtactacagcacttacagcactgtcaaaacgaaccttaattcatggaagccatgtatataaagtactgcctttggtacagtgaagtatgacactgttttagtacttacgttaagggttgtagtaccccaataccaaaatagcca

SEQ ID NO: 10340 - DNA, 723 bp, Diabrotica virgifera
  SmartBlast Evalue=3E-69; Info=Ubiquitin-conjugating enzyme E2r n=3 Tax=Culicidae RepID=Q16XJ8_AEDAE
gtaggtctgtcataataattttagaaaacattacgatcatttattaatttgtgaagtttcgaaatataattaataaaatattaaatccgcagcgtttaaaatttagtacacacaaatatctattgttcttccttgaatattctcaaatttattttacaaattagtctggagttgacagcttatcgttttcaaggagttttgttggaatggcgtctcgataagtaaagttgaataaaatagtgtgtacgttgtgtagtgagaataaatctgacttaaaaacgggacattagtgctttgtgaacagacatggcaaacaaagcaactagtagtgctctaagggctttaaatgttgagtacaaaagtttgttagaagaaccagttgaaggcttttgtgtaaaacttgttaatgaagataatcttttcgaatgggaagttgctatttttggtccccctgacaccctgtacatgggtggttgtttcaaggctagaatgaaattccccacagactatccatattcaccaccgtcaattagatttttaacgaaagtttggcatccaaatgtttatgaaaatggtgatttatgcatcagtattctccatcccccaatagacgacccacaatcgggcgaactaccctgcgagcgttggaatcctacacagaacgtgcgtacgattttattatcagtaatttctctcctaaacgaaccgaataccttcagtcct

SEQ ID NO: 10341 - DNA, 725 bp, Diabrotica virgifera
gccattgagaagaacgaaaggatgcactttcttcgagtaaacttttttatccgatgccgattgtgtcattttggaactactaaaatttttatttcattggtagttccaaaatgacacaaaatctaggcatcggataaagaagtttatttgaagagagtgtattttttgttctttttaatggcggtacaggctcgtttgtttaatattgtgtttgattacagagtaatttccacatgttggtatatttttcaggttgggctctgtgccgctgttctttgttatattgcgaatgcttgtgccgggtatctcgaggaaatattcaagattacagccgcaatcttggagcgcgttttcgctacctgttgatcgctactgtttcctcttaattatttctaaaacgtcgttgttcataaccttatcgatccaacttatttttaaaattcttctataagcccacatctcaaacgcttctattaatttatttatatcctttttaggatcgatttctcatacctgcgttaatctatggttcagttgaccgaggttcaccggtgaacttcggttttgtttggaatacatttctcattgttagtgcatgttctacagctttcgagaaatgccaatagatggcaaaaggtaaaatactatcgccattttgtacgaccttttttatgcttgtttttgaataaaagttaaatttaagtatttatagtcaaatctgttct

SEQ ID NO: 10342 - DNA, 723 bp, Diabrotica virgifera
tgttgctctgatagcctcaaataaagtggccaaaatgaaaatttcaaaacctaggatttagaaccgattcttgtctccaaaccaggatgtcatgtcttgtatgtgacgtcacgtagcactacccccactatgaaaatttcaaaacctaggatttcgaaccgattcttgtctccaaaccaggatgtcatgtcttgtatatgacgtcacgtagcactacccccactacaaatagccttacaaaagaaatccagcacctgctttataacacgttttggctgtatttagttgtgatattttactacacttcctttgtaagatttggtatttctaatttttataattcacgtaatttttgagaggtagagttatgcatacaacaaaggaattgctataaattctcaacattgaacaattttttaaaatcttacgcttctagaacttcaatcacaattcatacaaatttaatgtataatgttctagtatataatataaacgaatgtctttaagttactcttttctgatcgatacagcgtaagagttaattcataataaaggttctagttttataaacagttttcaaagttttcacaaaataaaataaaataaaataaaataaaataaaataaaataaaataaaataaaataaaataaaataaaataaaataaaataaaataaaataaaataaaataaaataaaataaaataaaataaaataaaataaaa

SEQ ID NO: 10343 - DNA, 722 bp, Diabrotica virgifera
gcagcaatagtattacaatggtattgcttaggaatcgggctataacgtgttcagggaatcgcttggatcggccaacaggtttggaaaatgtgagacatcggggatgagcagatttttgagtgggccgatttctatgcacgtttatttagtttaatgcacccgaaaagctaaggggggccacggcccccttctgcttatgggtatgggcgcccatggttatatatgtaactaccatctggggatagatcttacaatttttagtttttttcaacatatactactcttgtgcttgtcttctattttaaacaagcccaaatatcttttttctaaatgtcttacatttgtatgtttttcatgaattttcaaggaaaatgttgtttttgtttataaactcacaaagtctgttcgttcgttagtgcgttgcccgcccctgcaatacttggagccgatctaccgatgtattcgcatgtaattttgtctcctaatcccaaatctgaaaacgtcatttcgatatctcgaaacatcttcgggataaccgacctcaaagtcgaaaattgtgacgtcgcaaacttacatctcggggcagcccatttagggtcctgattacaaacgtttataaccaatgccagctaagagcttatgcggatatgctttttcttatgaggatctttcagtgcttcacagttttcgatttctttctaacgcattaaattgtatgtgac

SEQ ID NO: 10344 - DNA, 722 bp, Diabrotica virgifera
tgtgtataatacatcaaaaatattttgcaatcttggtggttatcaaacttttatagtggaagtcacattcagatggcactgtacttaaataggataacagtgttgccaattctaaaattgttgtaaatgttgtaaaattgtaaattttgctacttttttaaaataagcagggccaaactcaaaaaaggttcacaaaagtgtagtatttttccattttacattcagaaatatttcccaaattagaattattttataagggccggctcataacgtacaattaaaaacttttacaacattgtacatagttatttctgccatatagaaagcacaggcctatctctgtaacgctgccatctgaatgtgaacgtcagtatagttacgttatgtatgatttaaaacattgttaacatacatacataaagaaatacgtaaaaagaaacgaaaagacaccattaaataaagttgaaagtcaaaatgctacgctacaaaatgtgtaaaagattattccggaatggagaactaaaaacgaatctaagacatgaaggaaaaacgaaaataatataatatatcataattactaagaaggcagatctgaacgaatatggtatcaacataaatggagagaagctcagtcatttgagtttcgccgatgacatcgtccttataaccgatctattgatgatgaaatacatagtaatgttgaataaattatatcacacttc

SEQ ID NO: 10345 - DNA, 722 bp, Diabrotica virgifera
  SmartBlast Evalue=8E-87; Info= Choline/ethanolaminephosphotransferase 1 n=1 Tax=Harpegnathos saltator RepID=E2BNE7_9HYME
aaacgcactacatttttaatttaaatttaagttttttatgtctaactcatgtgtttgttaatagtcttgagttaaaaataacaatttagaacaaactttcacaattaatattgatagttcagtgtagaaatgaagttgtacaagcaaaaacttttatcagatacacagttgaaaaagttaggagaacacaagtattcttgccaaagtgttagttttttagataaattattacagccctattggtgttggttagtgttgaaagtgcccatatggttagcacctaatttaattactgtcctagggctgtgtgtcaacatatttacatctttattattgatatggtattcacctgatgccaaagctgaagctcctagatgggtttgtgccttgtgtgctctaggattatttatttatcagagtttagatgccatagacggaaaacaagccagaagaacaaactcttcaaatccacttggcgaactttttgaccatgggtgtgactcaatttctacagtatttgttgctctttctgcatgcacagcggttcagttaggatattatccgggatggatgttctttcagtgcttttgcgccatgacactcttttattgtgcccattggcagacgtacgtctctggaacgttacggtttggaaaagtggatgttactgaagcacaattcaccataataggtatcctcttaatatcctcgatattcggccc

SEQ ID NO: 10346 - DNA, 720 bp, Diabrotica virgifera
aactactgcaaaatcaaggatatgtcatgttgtggtcttattataatagataatcctttaaaccacataggtatataccatttgacaaagcctccaatagtagtaaataaggagaaaacataagaatggtataatataggatattataaatatgtaaaattataaattctgttccccttggctgctttacaagacaaatagaccttgtattgcactaacagttggctgtggcgactgtcgtaatgcactgtggcaaatgttcactacaggacatatatgcctcttaactcacttaacgtaagtttataaatatctctaaatgcagtaaaggtgtcaaaacatcagaaataaatttcacaaagaaggttctgccaccaataaatttggaaatgaattatcacagaattctattattggtaatattttattagaaacagtgaaggtgaagaactttgacagctatatactaatgagaatttgataaactaaacacagaaataaagaaaaggtgataagcaatataaatgcaatggatagaagagcagaatgacagctagtaggagcagaaaattgtctacaaaaatctatcaaactctatgaattaggtatattataaaaatacacagagtatattttttgtggaattctaaaaaatattcaagtcatatctttattttaaatgaaaagtttaaaataaaataaataattgggtacaaccat

SEQ ID NO: 10347 - DNA, 718 bp, Diabrotica virgifera
  SmartBlast Evalue=7E-71; Info=CG8668 n=5 Tax=melanogaster subgroup RepID=Q9VLS8_DROME
aagggccagatctgacgaagggtgtagcggctgaaaaaatttacgaagctgggcatatgcatcacgattctgagatatgtccaaatatgggtgaaaatgtcaagttgctgatagcgatcacttcagctcctagtcatgaaagtgccagactcgctgtccgggagacctggggtcattttgcgataagaaaagacatagttgtagcttttatgttaggtgccacttcgaatcaaactgtaaataatcgaatagaagctgaacaacagatctatggtgatattatcagaggaaaatttgtagatacatatgacaatctaactcttaagactatctcaatgctcgaatgggttgacaatttttgctcccgagctcagtttgtacttaagacagatgatgatatgtttatcaatgtttcgagacttttagagtttatagcaaggcataagcctgaagaaagaacgatttatggtcgactggccagaaagtggaagccaattaggaataaaaaatctaaatattatatatctcttcaacagtataagccgcctgcttttcctgattttacgacgggaccagcttatctgtttccagctcaaatagccaaggaactgtacgtagcttctttaaaactatacttattttaagcttgaagatgtttttgtcacaggaatagtggcaaatggacttaagatcaaacgtgcacacgtaccagagttcg

SEQ ID NO: 10348 - DNA, 723 bp, Diabrotica virgifera
  SmartBlast Evalue=4E-36; Info=CCR4-NOT transcription complex subunit 1 n=1 Tax=Harpegnathos saltator RepID=E2C0J4_9HYME
agtcttttgaatgcacaatctgcccagtcatatcctttcattatagatttagcttgcctagcttcacgaagggagtacttaaaattagaaaaatggctttctgataaaataaatgaacatggagaggcttttgttatggcatgtgtaaaatttttacatagacgtgttccacagatatcaaaagcagatgaatcgctaggcaaagttgttcccttgcctacagaaactttgactacaatgacattatgtctgcaaaggactatgaacaatttaagtccagagtgtcacgatgctgtaatgacaacagttaataactgttctttgattataaagtccagacaacaacagcaacctgctatacttcgatcgagaggaatagatggaggaataaatccttcagtttttgctcctctctataaccattctggagttgattctatgcaaggacttaacacgacattggcaaatatgaacttaggtggtcccgcaaattctgcattcaacttacaaggtggattaggacctttggtaccatcaccaggatctccctcaagaattttaaatgctggcccatcgagtagtccttttcccattatgccaatgtcacatcaaggccctgctggtacaagttcgtctctagtcctaggagtcaatcaaattagcaacttaagtaggatgggacccaatactaacatagacaagactagattgccagaatataac

SEQ ID NO: 10349 - DNA, 719 bp, Diabrotica virgifera
tgagcgaaaaatacgactgtcataatatatggtgttgattataaaaaacgcttctattagataaagacataatgaagcatacaacagagtaattgggaaagggagtatatgatatttatacaattaacagttcgatgtgaaatcgttaatattttagcagaaggcatacgaacaatacatatacatggcttgtacaaaatactttttttcgtgataatgatgacatggtatcatttatcccttaaataccgatttaattatacaatatttttattatttattagcaaccaacaaaatatttcattactatagaacagtaaattgaataaaaaaaaaagaaactggaaaaatctaccgaaatcttcgtttgtgtcaaaatctaattcacaacaaagtagaatattatttaaaacaaaacaaggaacactttaatctagattatcgtcgtcgggttgtttaggttctggttttggagttgtatctgctccgggaaatccacccgggaagccaggaaaaccgcctcctgcaccggggaaaccgcctcctgcacctgggaaaccgcctcctgcacctgggaaactgcctcctgcaccagggaatcccatgcctgcacctgggaatccagggatattcattcccgatcctgcaaatttacttgaaagtttagtgacgagattcattactttggggttagattgatatttggcgaagttggaagg

SEQ ID NO: 10350 - DNA, 722 bp, Diabrotica virgifera
catatttaaattaatttattatccttattgaaatttagtaagtattgagatttttaaagttttatacagagatatgaataacaacaattttagtcaaaataatttataaacaaataaccatagtattccaaatactaggaaaacattgatcgaaccaaatatggagacacttctgttgcagggaggataaattccattggaggattgacatacacacacttctgtttcatatcctctttccaatttctgtttatagcatccactgtcaatatttcccccaccttcatgctgaactttagaacacatgtaggtaatattttcaattttctggttaaagaggtaagtgtacttgacacacatctggtttatgctgcgtttgcagagtacgctttctttgtggttgtcccagagatactgcatatccggtaacgttccatcatacgatattacgatgggagcagcgcagggtataccttcggctcttgtttcgtccagataatcggcacacgtattattgtacgtggacacgttattataatctggcccaaaccaagtgaactcataacaataggaccattctggccgtaggtcaggatactccgagttgttggcaccacgtgcggaaacaaaccatataaaaagaagaaacaaacaaaaacaccacttttccattttacaatttctacaaaataatcagaacaaggtaatttattattactgtt

SEQ ID NO: 10351 - DNA, 720 bp, Diabrotica virgifera
attaaatgtaacgttagttgcgttttatcagcttcaaggcgtggtttgatcttcaccaaaaacaagacaattttaaagattttttagtactcagaaaatagagccataaaaagaacttaaagattgatggtggtgaatggattctaactcatctggtacttgtgatgcagtgtgagtgctatccgaggaatgggtgttatccgatgataatcgtaccctcataaattgcataaaaaaaaacctaacaaaatctctttaaaaaaatatgaatatctcctaagaatatctaggagccttgaacacgcgccaactttttttaagagttactactgtggctactttttcaaattttaaaatctctagaaaacaaaaaaatctttttcataaaatttttgtctcaaatataaaatgtcactaaatcgtaaaattgctatttgtgaaccagtgtaatgtattttccccagtagatcctgtaatgttttttataacattttttaaacatatagtttctttttactagaacgaatacaatataatactataatatatcttaataaatattaagaataatttttagttactatttagagcctactgtagagcttctttgggtcggagtccttgcttcaacatgaattttgctcgctcacctttttcggttcttgttaaatttcatcacggtttttgtttctttctttcctagtccattcttctcttaca

SEQ ID NO: 10352 - DNA, 719 bp, Diabrotica virgifera
  SmartBlast Evalue=7E-36; Info=Mitochondrial import inner membrane translocase subunit tim44 n=2 Tax=Aedes aegypti RepID= Q16KX3_AEDAE
tttaggactaacatatactctaccttctatactagtattgtctatttcttgtttaacagccttagtagcttgagatatactttgaaacgctccagttttactaatttcttgagctgtttcactaattttatgtgtagttttaccaacttcttctgtgaatttgccagccttctttgctaaatctgacttgctagcttcatctataactcctttaagcctttccttaacagaacctaaactttctttaaaaacttcgctacctttactagcttcttttctacactttcaaatttctgtctagctgctttcagtgcatcactttgttctaatttttgagcttcctctcgaaattttttcagggattctttcatttctttgttcttggccatctcatctttaaaattttcaaagagccggccgataaaggaattcctctttgcaggttgttgggaataatgtcgaaacccattgcgaatatagattcggtatgaaattctctgtaatccatacattgttaaatataaatttctaaaagaaaatcacgttcttgacattaacataacctaaaaaaattgtaaagtagggattgtgttttacttatttatgatagtcggtatatcagagaattttccttggtagaaaaattttaacttttattttaaaattgagaaaaatcttattttcgtgacattttctgttgaccggacttgacgtgggtt

SEQ ID NO: 10353 - DNA, 717 bp, Diabrotica virgifera
gtattttctgaggttaactaaccttccgatgaccaacctttttttgttacacggatgaccaacgggggtaaaaaatgaccccaagtaaaaatgagaattaacaaaaaaattaagttgttttaagaaataaaataatgtattcgtaattttaatacatattagtgttgtatcaataaatgataaataaacattagtaaaacatattttaatcacaactgaaccaaaacaggaatcatcattctgaacatagaactaaagaaattttgaaatatacactaatttacgtcagcacaggtttaacaaacaactttttttcaatattggaatgtttcttacaaacaattccacataatagacggtatttacttaatataaaattggaacatggaaggccaaggtagttcgtctttgaccccaaattcagaaaaaaaaatttttttcgtaaaatatagggaattttttttatttgcaaaatatgcgagggtatctagaatgatattaaagttaaataagaaaataatgagtttaaaattgaaaatatttctgaatttattaaataaaaacatacgctggggttcaaatttacccccttgttcatccgaaggctaagacaaggagaacgatttgcccaatttaatactgtcgacagaataacctatcgagggcgctcagttattgtttaggctggtataagtttgttgctcgttgttcgtactg

SEQ ID NO: 10354 - DNA, 718 bp, Diabrotica virgifera
  SmartBlast Evalue=3E-67; Info=Alpha-tocopherol transfer protein- like n=1 Tax=Harpegnathos saltator RepID=E2BJ28_9HYME
aactgaagctcatacgtgaattggggcacattcctcctctaccaggtttgactgcaaacggtcgccgagtagtagtccttagatccaaaaaggtagacgtcgatacttacgatatagctgatattatgaaggttgttcttatgatcggtgacgtaagattagctgccgaagaagtgggtgtagctggagatgtttatatattagacgccacagtagccacagccgctcatttttccagaattaatccagcgatgatacgtaaatttttggttattgttcaagaagcatacccagtgaagctaaaagaagtccatgtagttaacgtttcaccgttggtagataaaattataacttgggtaaaacctttcttaaaggagaagattcgggaacgaatccacgtccattccaacttcgaatctctacataaatttataccaaaagatgtacttcccgaagagtttgatggaactgctggtccactacaagtattccatgatcaatggatggaaaaactaaaggaatacacaccttggttcaaagaacaagaaaacatcaaagccgacaatcaaagcgaccaggcaaacctaccaactatgatgatctctttggagtagatggcagctttaagcaattaactattgactaactccaatcaatataacttgctgcaaagttttaataagtataggaaatggtattggttattgaattatctttt

SEQ ID NO: 10355 - DNA, 721 bp, Diabrotica virgifera
gcgtcgtattagtataatataatatttatggattaccgtcgaaggtcgatatgattaatcaaaaagaagataaatctggtgaattttctagtgacattattgggtgtgaatctgtctttttagttactcctcttggtttaaaaacaaggtatagtaggagtgaaaaaatacaaaataatgaaacatgacagtattcgttacttcagtttttttaggttttttttggtgtagcattgcttcgagctcaatagaaacagagagaagaagctacaggcgtgttgcatttgtgtttagaactgttgtttttgctttgtaaagtaagctttgtttgcttctaatttctgaagatagatattactcacagaaggcacagtaagatcagtaatatttgtgtaattattatggatccaattattaacgaactatactgtatattttatattactatctttagttcttggttcaaattgatgtaaaaactgtaaaaaacagttggacatattttatacttgaatatttgggaaacttgattgaataccatattcaataatgccacaatgaagtaccaaaatgttacttaaagataaaaataacaatattgtataaaataagttaaaaaataaagcaattgataattactttataatataacgtagaaaagtatagtccactatatcaacggaatcgcccataaatcttttttaatttaaaatataaagat

SEQ ID NO: 10356 - DNA, 721 bp, Diabrotica virgifera
aaagaagttgagacaatttctttcaacgttcaatttgttcaacgcttttattgaattgcaaaatacatgattcattttggttgaatcatccacattgttcaaccgaattttagttatctaattacaaaagttaatgtccgcttcattggtcccgtgtgtaataattatgagattcggatcagtaaatttatccaactaagccgtatcatatccggttactttttctcttttgtatttagtccatttcgatttctcaatttgtttcgaaacattaataaattgtaaacatctactaaaattttaatgggctttaaaaatgtatcccaattcaactaacaccttggctaccgtgtgagatgccggcatctcacacaagatatgactagtaccgtgtgagacgccggcttccatcgttattaaatgatttaaaatactataaaacagcctaggataaaacgaggggttttagtttctcgtattggttcctaaataaggtagtgaaatcatagttaccatggttttcgaaaaagtttaatataacgtgcatatcgtcgccttagtactagtaacttgataactccaaaatttacgtttttgacataactagttcacaaaatgtattttattgtgtaaaaacttgataactcgctccaaactagttaagtatttatttatgattgacgaaagttgataaaactcaaatgcccctaatattcactgc

SEQ ID NO: 10357 - DNA, 720 bp, Diabrotica virgifera
ttatacactggcagagctatagttcctgaaacattttacaattttcctatactttttaccagtatacatcttttataagactattagaacttaacattaacaaatattatatacaatttgttatctgacatttttctacctctacgataaacaagaaacattttttacttatttctgaaaatgtcaattctattattaagtgcttaaattataatataatatttaaccctttgttgttgcgcatattaccagacattgactattcagtgaaatacaaatgcaaagaataacttacatttaagctattgtgctagcgatacctagataaattattaaatatagatcatctttttcataaattttgaatgtacagctaagtttatctgcgaacaaagggttaaacaacatgctttaagtagtacttagtctatattatggaaaataaaatgatcttaggtacataatatacaaaaagaatgaatgaacaattatcaaagattaagtttaacaattattggacgtatgcttagacattgttttatattaggagaagtctggaaattttacgattttattagtttaacctgagatacatacgtaaagttgcaaatattttaatgtttgctaaatttatagattttatttttctttttatttcagtgacattgccaaataataatacctttatgtaagtaaagactgaatagatataagattttt

SEQ ID NO: 10358 - DNA, 723 bp, Diabrotica virgifera
gcgagattaataaagtgaatgtagggcactatattcaaaaatttgttagaagtcagagactgtcatgactgagacatgtctagagagaagaaacaaaatcaacaaagaaaaagaaaatattacttatagaagccgataggacgacgaaagaagaaaacctaaaacgagattattggatggggtggaagacgatgaagagaagggcactaggcacaaagacccatccagggttatgacgccaaaataaggggaagaggatgattttcatttggcctagttgtcgcttaattcgttttttttttcatattttgtagaacagtaaataacagtactacagtcaaattatgcaatgtgggtcacggttttggttagaagtttacttttcaaatttggcattgacaacgcaaaatccacttggattatcaaatgtgccggattagaggaagtttactgtaaattaacaaagaaggattacatatttatacactcaaattgtgagtcaaccgtcaaaaatgaatgagatataaaagtttaaattttgtagccaaattaatagtaaaataaaaaatatacccatccttataaacatggttctaaacataataataactccatttgagtgaagaaaaaaaatagatgatgcatttccatagggcagcgtgcgttaatttttatttggcacctgtgcaagttccaatggatgacagttttaaggtcaatttt

SEQ ID NO: 10359 - DNA, 719 bp, Diabrotica virgifera
gtatctgattttaaacccaacccaaatcagacacctgaaagagtataaggaaatggagaaagaatgtttgaatggatatttcctttgaatgtgtacctatatattgcccacctatctgaccgtagtttatgttttgttttttataatgaagtcgttctgatgaacctctgagcgtaaatagtatcctccctgtacaatcagtatgaatgaatattaatatttatatgtattgcgtggctaaaggttccaaaccaaggccaaaaatcaaaaccaaaaaaactaagggatgacgtcctgaacatctacttcgtacttcattctccactttcccgaaggggctattggaatattacaataggagaaaagattaacatatagtggtaatttaataacataagtattaagtattgttttagagaaaacattaaatacttaaaaaatgaaaaatactacaaatcacattatgcaacagtacataacttacattacaacgtgatgatcaaactagatgacttgaaacaatatctgaaagcatctgagctaaattggcaatatctcttaaataatatatttactgcaataacaaagcgtatataaaataatctatatttcaaatcatccaaataaaacagaaaaggaaatcagtcgaaggcatattaaataaatggaaaaattgtcacattagtaactacaattaccgattttgtcatccaattgcc

SEQ ID NO: 10360 - DNA, 720 bp, Diabrotica virgifera
  SmartBlast Evalue=0.000000005; Info="Protein-kinase, interferon- inducible double stranded RNA dependent inhibitor, repressor of (P58 repressor) n=2 Tax=Danio rerio RepID=Q803J5_DANRE"
tggggttttcataaatattttataattgttgaaaaaagtatattaatattaaaaattattaaaataaactataattgtgatggctacacgcaaaggtggaatttcttgtgtggttcgtggatgccagactagatctggggaacaaataagtcttttttcaataccacgagatcgtagcagagctgaattatggctaaaagctgcaattcgggaagatttactttcaaaggatgtcaatgaattgcacaaaaattatagaatgtgtgagaaacattttcaaccacatttcatatcgaaggggggaaacgtaagaaaaaatttatttatacaagctcatcctacgatattcccatacaaccaagatgtacaatctgcagatgaacccttaagaaaaatcattagacttgaaacacagattgaagatgttgatgtcaataccgaagtatctaccagaccccatactccagcacacacagtttcaactcaaactccccccaaattatctagtagctcaccaaggaaagtaaaattacgaataaaaataaaaactttacaaaaaaatattaggaaatgcaaatcttccaagaagaagaataaggaaaatgataacatttatttaaataaatttaatcaaatgtatgacaaactattaaacaagcctttagcacaaatagtaaaagctcaagcattattaaaaagtaaacctccaaaaagtaggag

SEQ ID NO: 10361 - DNA, 720 bp, Diabrotica virgifera
aaaacaaagaatagctcaacagtttggtttgaaactagcgaagaaaacagcgaaccacttctgtatcaaatcctcaaaattgctcaaaagtcgaggaggaatttggaagttaatcttaacgttaatggaaatatcgaagatgataagtctgacagtattagcagtgaaatcaaaagcatttcaaccccaggaaatatttgctcaggaaaaaatagtgaagaacattcaaagttttctttggaaatcccaaacggacttagacaaacaaacttaaacagcacttttgacgtcctcagtccaatactacaccccagtcatagtagccacagtcataacgaaaatgacttaccatctgctcataaggacactagtaagaaattagatagtacctataataaaaaagaaagcgacgatacctatgatgatacgagttccttgccagaagacttggttcaaactgatcaagaaatagttcctgaaatcaaacaaaatggtttatttgagactgaaaaagaaaatatcagcgataagctgaaattatcttctctaaagtctgataaattaaaaactaaaagtaatttaagttctctatcagatctccctcctcttaacaaatctcgggtaaatgacatattaccttcattgtataacaaaggttttaaagataaatcaaaccttcgtgaacttgataaactattcgatacggatgcagactacgaa

SEQ ID NO: 10362 - DNA, 712 bp, Diabrotica virgifera
tttactctttattctttgcattttggtcatattcaatattgttctgaaagtactttgaaaagatttttttaaatcctcgttcattacacttatgaatcgtagatttctgttgaatgtatttattgttacatggattattaatttgggtgttctgtaactaaggtgatagaatatttgacttcagaacagaccaggcttcaattttcatgaaaggaaaaaacaaagtcctttttaataagaaagttgggtaaattcagtggtaaaatagacatttgaaatatttcattggctttgaaggaaatacctatatagcagtttatgttgatgggaaacctaaactacaaaaatgttgtgttaaaaaaataaataaatgaatccctaaaaaataaccacaacatcaaaacataaacctaaacatttaaatactgaccccaaatttgtcaaattagtaaaaactggattattacattgcatatgaacaccttattgcctttttaccatattctaactttatatgactcactattactaatgagagctataaaccaagaacaaaatagttgtcagtgacgtcattcataaattttttttgagtgtaaaaaggtttcttagatgacgagcggggcatttctaatgccctgtaaatttatgccaacacaaaatacatatttctgacgcaatatacatattaagataacagtttattagatat

SEQ ID NO: 10363 - DNA, 721 bp, Diabrotica virgifera
  SmartBlast Evalue=5E-66; Info="39S ribosomal protein L24, mitochondrial n=2 Tax=Culicini RepID=B0VZY0_CULQU"
cggctgtatccttcggctgttctttatatgtggcttttgttttataatcatatgtttcttccatggaaggcggcattggtataatacgcccagttcttgttgaaactctcactcgttctccctcatctgtgtatctccattctatggtggttggagctaggtctgaaggatcgactaaaactatttcagatgtcaccagtaggggtttttctgattttacccatacaccttgaaattctttgtcatcgcctatttgttttaattcacaattcagaccttcaactattacccaatttctttcttgtattatttcttttattattccttgctttcctttatcttttcctactaatatttcaactctgtctcctcgaaaatgactccattcttttatgggttccacccaaactttcttatgcattgttcctgaagcgttatcttgtctaaattgaagagtccatggtctattcactgtaaaattatactttttgcgttgtactactgcatgtggtttgtactggattcctttaggatttctccaataaacttgttccattgctcttttgatatatctgtctgggagattggaaaattgttttgaccattttccaactctggaaaaaaggatgtcggtaatcctcataatcgattcctatattgtaatttattgtaaacacattaaataattattttttgaaatgtatgtaatttaggttagttg

SEQ ID NO: 10364 - DNA, 721 bp, Diabrotica virgifera
  SmartBlast Evalue=3E-74; Info=Nardilysin n=1 Tax=Camponotus floridanus RepID=E2AMV2_9HYME
tggagatggaagactctgaaagcgagtcagacaacaaattatcagagtcagaatcggactctgaaggtagtgatagttcttctgaggctggtgaaaccacttccacttcagatcagaagatggctgctgctgcactttgtattggtgtgggaagttttagtgatcctaaggaagttccaggtatggctcattttttggaacacatggtttttatgggtagtgaaaaatttccagcagaaaatgattttgattcatttataaagaaatgtggtggtactgacaatgcttcaacagacatggaaacaacatgttattattttgagtgtcttgaaaaaaaattacatgaagccttagataaatttgctcaattctttatttcccctttaatgaagaaaggggcaatgacaagggaaagagaggctatagagtctgaatttcaaatggcactgccttcagatccacacagaaaagagcaactactccttcagttggccaagcctgaatctcctgttaatgcatttggttggggtaatttaaagactttaagagatgatatcgatgatgataagttatatgagggagtgcatgcttttaggaaaaggcattactctgctcatagaatgactttggccattcaagcaagactgcctttggatactctccaggaatatgtagtaggttgcttctcaaatgtcccaaacagtcatttagataaagatga

SEQ ID NO: 10365 - DNA, 718 bp, Diabrotica virgifera
cacaatggcggtgtgccaatcaagcaaagggacaaggaacttccgaatatggcctaactgggggcacataacataacataacctaatcctaatatttacatttgtaaagaatatcctgtttgtttttattgtcgattgtgcagcgaaattgtgtgcagcaaatcaaatataaagtagtttatcgcctacagaactgaattagtccatagcagttatcagtttttctttcttgggaagcttatacatgtaacttgtattgttgtaaattgtgggagtagggcagacagggaaaagtcttattttgtactgttcccaaggctccccatgcaatacatttaaatgaattatccaaacaaagccggggacaatggataaaagccacaagaagaacagatataagggaactaaaattaaaatatgaaaagtaaacattttataagtggaacaaccaccagatatttaaaaggtataaaaagaagaaactgctggaatttcaaaacaaatgtgtttgactagtaaagatttggataaataacaggagttactttgggctatagctacgtgcagatttatttccttgtggcttcctatgttaattcttattaattatacacttaaatatgtttttagtctcaggaagattttatatttgattatttttgaataaacattattattattattaccttaatttccattaaataaatttactgtaatc

SEQ ID NO: 10366 - DNA, 709 bp, Diabrotica virgifera
  SmartBlast Evalue=2E-74; Info=SCP-like protein n=1 Tax= Diabrotica virgifera virgifera RepID=D7EYY3_DIAVI
aaaggttaccaatgtacaatttactaaactttttgaagagtatcagttccacatagtccgggatatttcggattccttggcagtcctccacagtttgaagcaggtggtccttgctcatacaatggtttcgcgccagcgtttcctcctggcccatagttgcatgccatgtaccaagtttcccaaccatcttctaagtatttagtaataccgcagcccacatggttagtgtcagcccatactatttgtgtatagtgtccgaccttttttccatgggtatcaaatgatttagcccattctggtgggtatattttgacttcgtcgtaccaaccatggattgttgaatttatcatttctcttatagtaatagtttgccctatgaactgttcctgcatgatactttggccgacccaatcccattgagaagtacttctgcatgtgtcatgatgatacacgcattcgttagtatgacactgtgctatatactccaaatccgtattgtagctcattgcttgcatattcgtagctgaaggttggggccctatgttttcatgtccaagagcaactctgttccttaattggttgtgaaggtctataataaattgtctgtcttcattagtcatatacattgcttggaagtttttgcacgctggacctgccccacagtcgtatttttgtccacacaaggtgtgtatgccttttttgcatttgt

SEQ ID NO: 10367 - DNA, 719 bp, Diabrotica virgifera
accggaacctcagatacctatagtatatcctaatatgcagcctcaattcaatccccagtttaataatatgaacccttccaatttcatggctcctagattttcagctcccaacggtcctatggtaccacagataccaaataatttcatccccaataatatgatgcctactaataatatgctgggcattggcgctcacaatttattacaacctaatgatatgatgatgggtccgatgaatccaaatatgttccaacctggtcccatggcagacggatttggacctgggccagagcccgattatcctcccatgtacggaaatcccaatggaccagctagtaaaaatatgaattcgtttcctcccaaaaactttagagatattagaggtgatattagaggagatattagaggtgatattagaggagatattagaggtgatattagaggagatattagaggtgatattagaggagatattagggatagccggaataataaccgaggttctggtggttttcgtcgtggtagaggaggtaacaatgatggaggttgggttagtatgagcgatagtcgtggtcgtggcagtaattggcgacgaggaggaagaggtggaagactttgcaaacacattcaaaatcacggttactgtcgaaacggcgacaaatgtgcattcatccatccttaatgcctctaaacaggcaactacagcaactccagtgtga

SEQ ID NO: 10368 - DNA, 720 bp, Diabrotica virgifera
  SmartBlast Evalue=1E-68; Info="Beta-glucuronidase, putative n=1 Tax=Pediculus humanus corporis RepID=E0VTV4_PEDHC"
actggatcaaacctacacttttgacttctttaactatgcaggtatcgatcgaccggtgtttttatacacaaccccaaaacttatatcgatgacatcttcatttctacggtagatgttaaagaaaacattgcgttactggaatacaatattacggtcgttggagataatagtttgtcatctaaaatttgccgcgtgagtcttatagacagaagtcgcaaggttgccttttccagtcaagacaattgtggattttatggagttatgaagatcgagaatcctaatctatggtggccttatcttatggacgatgatcctggatatttatacaattttcaggtggatatattcgaccaggatctcactccagtagaccagtattttctaccagtaggtataagaaccctaacgtggacaaacagttccttcttgataaacaacaaaccgttatatttgcatggattcggaagacatgaagattcggatattagaggcaaaggcttggatcttccactggtgatcaaagatcacaatttaataaaatggatcggtgcaaatgcttacagaacgtcacattatccttacgctgaggaaattatggacgtcgcggatgaaattggaataatgatcattgatgaatgtccaagtgttaatacagacatttttacaggttccctgttggcaaaacataaaatttccttgacagaattgataaaaagggac

SEQ ID NO: 10369 - DNA, 719 bp, Diabrotica virgifera
agaagacaccacagaaggagaatattacaactgttcgtagtactaccacggaaaccgaaactactaaagttgtcaccacaaccacaagcttaaataggtatacctttatgaaaattatggatgaggacaattcaataaaagaagacaagaagataagaacacacagctgcagtagtattccatatgataacattatagaaaacttggcgccgttcaggaaaaggttctgcaacatacagttgttcagaaaagatgaagaagaaaaggaggagaaagaaaaagaagatgaacctgaaaacaccattccgaccagatctgaaatccagcctgtagtcgaatcgatcctcgatactatcctcgacatggcagtagaaataatcgacaaaaaccaactccgcctagacacactccgcgacaaaccggaccaccgtcacatcgaactcacacgtctggttccagaatataaaagccgcataagatgcaatactgccgataccataacgtcactttacgtgcccaaaatcatgcaaacaccttcgagtgacaatcttatcgacgttaagaaattcgtagaagaatacgaggagtaccatgactcgtgttcggagatacaagatgcggaaatagccataggacaggtaatgaacgaattaagtacaaaagttgatagaatgatcatcgaaaagcagaaaaacaaaaagaggaaagacaaatcggtg

SEQ ID NO: 10370 - DNA, 719 bp, Diabrotica virgifera
  SmartBlast Evalue=3E-74; Info=Ubiquitin-conjugating enzyme E2 Q1 n=4 Tax=Apocrita RepID=E2ABE6_9HYME
tcacattctaatgaaacaactcgctaatagtcctgccactacggtaatatttcaaggaacaaaagaaactgtccgcaggcactaagaacaacgattttgacgattttttgggaactctgtttattttaggggcgatattttttttttgaaacaatgcgttctacgcccacagaaaatgtagaaataaaaataagaagttggtcgtcgccttcgtcggtttagccatcttcttttgggggcgtgaaccaaccattcttctcgtgaatttgtacaagagatttgaagctttgttgggcacgcgctagactatactgcccctgtgagcagacttttggtgttccaaactggatgcgagctttgccttttaccaaggtagccgagatctgcattatcacagcttctactgtatacgcactagaccagccttgtttcgtcaatagttccatgcagatggcacctccaaccaagacatatccacctgagataataggatgcacaactctgacaaatggtggctcaaatggatacgtgtctttgaataacatattgagctgaatcgcgtctttgccctctttctctttgagcatctggagatcatggctgagagggctatcaggatcaacgcacatcaatctgacgttccactcatagagtgaatcgctaactattcgatctggtacatcttgtttttgaaggagtctgatcggtatatgtcgcgt

SEQ ID NO: 10371 - DNA, 716 bp, Diabrotica virgifera
  SmartBlast Evalue=9E-41; Info=Transformer2 (Fragment) n=1 Tax= Tribolium castaneum RepID=D6X1S0_TRICA
gcggcggcactcgaaaaatttttcaaatataataatttcttaactagtggagaaccccccagttataccatagaagaaatatcgaaattagtttcaacagcccatagacattctattttgcccgaaaatgcgaaatatatctatgaaagaaatacagctccttctgaagtccatccaggaaaatactatttcaccagagatccaaggctgaagactggttcatttaccacatattgccaaagagatttggttgaattagcccaacatatcactatgcctatttttatagcaaaagctaaggattcgatctattacgaggacaaggagaacttttatgaagtcatcgatgtcataaaaagatcaagttccgattgtgattttcattatgttcctggtagtcaccatgtgcatctaaaccatccagaaaatgtttctgatttaatcaataattttattaggaaaaatagtgtaaaagataggactaagggtggcattaccgaagacataatcgtgaataatgaaaaaaggatggagggtacctagaaacacgatgtcaaagatgcagttccaaaaatgatacgcatgcaaaaattatttatcaacgaaaccataaaaagcttcaaccgccaatttaaaaagacatgatatccttctttagttgtttttgattggaagaatggtgttaaataactaaagaacaagaaaaaataagagac

SEQ ID NO: 10372 - DNA, 693 bp, Diabrotica virgifera
ttcagctaaattgcagccgttagatgttggactgctaagtctgtttaagacgtattattatgccgctttagaatcctggatgcttcgtaacccagagaagcctgtcaccatttatcaagtggctgagtttgtcggccatgcttatcccagagctatgccaccactgaacatagccgctgccttctccaagtgtggaatttttccatttaacagaaacatatttagcgacgaagatttttgccaagcagtgttacggaccgtcctgaacccaacaatacaacagatgagccaacctttgaaacaactgaaacgccacaacgtaacgaaaaaaaggcccaagcaaaatcgcggatgatgttgcagacacagagaaatccattgaacacccttcccagtacaccaccaaagtattaataacaccagaaatatttcgaccacctttaaaagcaggtcctcgtgatgaaaagaaaaaacgtagaaatgttaaaaaaagcgttatagcaacagatacaccggaaaagggtgcaatagctttagaacgggctaacgcaaaagctaaaaaagaaactgcaaaagacaggtttttgcagattctgctaatacaaaaaccaaagctgcattgacaaaacaaaataagcgtaaaaaaaatctgattcagacacaaacgaatctgaataatttattctgatagct

SEQ ID NO: 10373 - DNA, 709 bp, Diabrotica virgifera
gagaaagaaaggaataacaacagaattagcttaacagaataacagaacagattaacagaaaaagctttcggaactaacaacaacttgagcaagtgtattgggaacgatgggacccgaaatggaagacaactgcagagtggtgtttgcaaactaacttgtggtgactgtccgaaagcttacatcggtcaggctggcggaacttttgacaggcgggtggcggagcacaaaagggcttttaacagtagaggggcagacacttctacgtgcgcacttcaccttctggatcataatcattcttttaacgaacagttgcaaattctgcatattcaaaataagggccttgagctgtctttgttggaatctatggaaattgataaattggaggatacagatatgattctgagtggccagctcgagacaagcagctccccactccttaacctcttcagttgaagacttgaagtaggcaaaccattgtaaactggatcacttgagaaaggcactctgttgaaacagctgtggtcgcatagttgtaataagttttgtggaagtatggaaggcgggcgtttttagtgttttgttgttagataaaatgaacttccatcaagtaacggtcgaatccatcagttattcatttggcatcagttattgatgccacccctatacttttttgtcatttcactcatccatccaagcattctcatttcca

SEQ ID NO: 10374 - DNA, 718 bp, Diabrotica virgifera
  SmartBlast Evalue=0.000000005; Info=Mitochondrial tumor suppressor 1-like protein n=1 Tax=Camponotus floridanus RepID= E2AJC2_9HYME
gtggtaaaggcctgagatgtcatttccaagatcactttctagctttggattatttagtgttttgtgaatgttatgtacgtcgatactacagagtgcacaagaggtacaatcaaagggggtcgtacgtcgcccaccgttcggccccctgcaacaatcagggttcctcaagttaagcagcctcctgttgccgaagcacttgccgttctagtacaacatcttgtttttaatgttcaagcctatcaagttcccaacttgaaacgccaagtagaaaaattacgtatagaatctgatgaaattaaactagcctatcagcagctcgaagaagctctatctcaagaaaaattacaacactcgagggcgatcgaagatgaaaggaagaggtatcaaagtgacgccacgttaataattgagaagcacagacatgaagtttcagaattaaaccaacattatgccgagctagaacaacaaatcttatcagaaaaggaaaatactcatcaagccttatgcaaacaacatgaagaacaactctccaccgttaagaaagagtttgacaagttgcaaagaacccacgaagagtctctggacattctccgagaagaaaatgattccattagagaacaaatcgacgagaagcagatggaaatagataggattaaacacgaaagtaagaagctaaaggacgactactaaacaaaagaaaccgttctgaaagagcacg

SEQ ID NO: 10375 - DNA, 720 bp, Diabrotica virgifera
taaattggaaaagtatcgttaaaaaactaattattaataatttgtaacttcacaatatgtatttatcatactcttaatctcaaattgtgatctccaaaaatgtcaggtgagggcactaaatgtcgcgtcagtcattcacggagcgaatagattaaaaaatgatattgggagctattttaaatcaacgttgtgcagcaaaatcttgtttagtcttaaatatattcaattgtggagtgtcgtggttaaaccaccaagaatctgtcaagtcacgaacatatgttatttttttactaaataaaattcagtgctcgatatctgccttttatttcgtaaaattcatatattcgagcattcaaccacttcctattttatatgtttatttgttcagatgcactccttgcttgccttacgacttcaataagtaaagctaaaattatatatatgcacacaatcagaaattattttcatgtacttatttatttctatgccacttttttatacatcgtgattacgttgtaaactgtgtttcgttcaaccaaaactttatttatttcgatagtcctattagtttaattcagtaacactaaatacatacaaaatgtacagagttgaaataaaaatcatttagactataaataaaaaaaataaattaacattcttaaatgaaaataacttctttaatttttgcaacatttaggtgataaaaacattccagttgtg

SEQ ID NO: 10376 - DNA, 719 bp, Diabrotica virgifera
  SmartBlast Evalue=8E-23; Info=Endonuclease-reverse transcriptase n=1 Tax=Bombyx mori RepID=D5LB38_BOMMO
gtggagtgatgttaacaccattttaactgtttataataaccatccaaataacatttagttgtaattacatgagtcttatctcttttactgcgacaagtaaaaagaactgcttttcggtcttctgctgttcggtctagtgaggcttcggcaaagtgcccctcggtccactgctttcggtctaatgatttcggtctctttacagtaaaccagaaaaatcaggttacttcgatgttatatctttcctatactgttgcactgagttcagttgtggattctcacagactccacctgcaaaaaaattgaggttttcgaaatctggctttatcgttgaattctgaagatatcttataccgaccacgttactaatcagggtattttattaacaatacattaagaaaaagagctgttaactacaataaaaacagccaaaatcgaataccccggtcgcaccattaggaacagcgaaagaaatggactgctgcaactaatcttgcagggaaaagtagcaggaaaacgaggaccagaaaggcaaaggatttcctggctgaaaaatctaggtacgtggttcaacacaagaaccacaaattttttcagagcagcagtgtgcaaagtacagattgccatgacggtcgccaacattcgaaacggataggcactacaagaaggtcccttgtgtaaattggacctgaaagggaagaatacccatatagtccaagagg

SEQ ID NO: 10377 - DNA, 711 bp, Diabrotica virgifera
tccagtgtcctttcattgggcaaattttgtaaaatttcgattttttaatttttgatatttaattacgccctctagaggtggacttgcaattgtgaaaataatttccaggcttttctctaggcaaattttgttatgaaattttttttcccaaagctgtactataaacggtttctgagatgtggccgagcgccattcttattgggacacccggtacatattacgaagaaggtttctagagagaactaatagcactaacacttcaacgatacaccactgaaaaaaaggcgaacttcgtttaagcggtctcaggagtccggtaacccaatatgaaaataggttatttcgcgcagctcatcatcgtaaattatgttgtaaggtagcatataagatatatgcataaaatcttgctttccatctgagcgtctaaacacctacacatttgaaaacagttttgtcaggaatatactgatggagattattagtagcaatcttttctggattaaaaagaattgatcgtccaagtttaacaatatctaaaaagtatttggcagctattattgaaacgatacatttttactaataaaaaggccgctgaacacgactacgccatcagaaccgacactcggagtacctggtatctaggatcacgtcatcttctggagtctcgagggattgcggcactgaattaatgacaaacagattacacggggg

SEQ ID NO: 10378 - DNA, 717 bp, Diabrotica virgifera
  SmartBlast Evalue=1E-104; Info="Striatin, putative (Fragment) n= 1 Tax=Aedes aegypti RepID=Q16SH0_AEDAE"
ggaacagcagagactccagatggtcagccagcagacagtgcagtggttccttacactgataatagtttagtattaaaaagccaacaaaatactaatcagaatcaattgagtaatcaattgaaaagggcacctacaatgccaaaaccaaaatggcacgctccatggaaactgtacagagtaattgctggacatttggggtgggtgaaatgtgtggctgtagaaccaggaaatgagtggtttgctacaggagcagcagatagaattataaaaatttgggatttggctacaggccagttaaaagtttcactaactggacatgtcagtacagtccgaggtttggccattagtcctagacatccttacttgtttagttgtggcgaggatagacaagtgaaatgttgggatcttgaatacaataaggttgtcaggcattatcatgggcatttgtcagctgtatattcattatcacttcatcccacaattgatgtactgttgacagctggtcgagactctactgccagagtgtgggatatgcggaccaaagctaatattcatacactgacaggtcatacacatactgtttcgacagtcatttcccaagcaacagagcctcaggttattactggatcacacgattccaccattagattatgggacttagcagcaggaaaatctatttgtacattgaccaaccacaagaaaagtgtgagggatatc

SEQ ID NO: 10379 - DNA, 719 bp, Diabrotica virgifera
ggccaccaatcccaacgccaagactattcctccaataaaactgggtccgtcgaatctcctgttatgctctggctttgcagtaggattcggaacaggacttgctgtagtacttgtaacaggcggaccggcagtggtagcagttgtggttgcagtagttggcggttttacagtagttgtcgttttaatagttgtggttgtggtagtcgattttgtagtagttggggttgcacttgttgtaggtggagatttagtgctagaagtagtaggagtgacgggtgtagtagctgaagttgtattaggtgtagtggctgttgtaatgggtggtttaacagtggttggatctgttggtggtgctggcgggtgttcaggagtaatattatcttcatgtggaatatctgtcatgttcgtggtattaataataacatcctcggaagttttcacgacagcagcttttgtaaacgtaatggagattatgataaagagagttgtcagcaaaattgaaaaattcatttttttaatacagatctctaacttctcggactagaataaacttctgattacaaactgccgtgtaagatataatttgcaaattattaaaaatttgtcgttcgaatcacagccccagaaactaatttcaaattattaaaataagacgtaaaacagaagtaaaacttaattttttcttccgggaatattttcgagactgacggttgacggac

SEQ ID NO: 10380 - DNA, 712 bp, Diabrotica virgifera
aattattaaaataatgttcaaaaaacctaaacttttctctacaaatgaattatataataataaaatctgtgacttgaaaacactctatatttcaacatgttgcacatatgtatattcacaaaaatttctccaaacagacactaatagaacataattaccaaactagaggtaacatcaaaaaggacctagtattaccacagttaagtcgaggaataagccagcattctgtgatttttagggcatccaagtattataatttactatcaaacaaaataaaagaaatcaaataaataaaaaagtttaataaaaaggtagttgattgtattattggaaacaaaacacaatttgaattataaatcctgaaaaaaatgttctttttttgattttggaattcttaatacctataagttggattttttacatattattatattatatagatatgctgtttacttagttttaagtctaaattccaaataattttgatttctcgaatgtgtttttttttgttacgtttgtttataagtaatctatatttatttaggatttttctatagacacacacagatgttttcacatctaggtgtctatctgtatattatattatatgtacttaaaaatgtaaattttggctaataaattgaattgaattgaattgttcttagggtctttggaatgaagatatattaaatgaaaagttatacaatgtagc

SEQ ID NO: 10381 - DNA, 714 bp, Diabrotica virgifera
cgtcttcttattggggaaccgtctctcgctgtcttgcctactctatttattgtcattcggcttatcgttccattctactcttctatttcttactcggttattaatgttctccacctgccatctccgtcatatacctgtacttcatagtgtctcatagttcggtctcatagtgtcttaccatcgatttttcgaagggttttcatctctgctgtttctagcattctttttgtcctctctgtgtcaggtcgtgtgtctgccgcgtatgtcatcatttgtttgtaaattctgcctttctttttctttacgattattttttttctccatattgttttattaagaaaacctgcagctttgtttgttctactaacttgatcttccacttctgtttcgagctttccgtagctagatagtgtgatgctgagatatataaacttcatcacttgttctattatctaaccctctagctctaatttataacttaatagatttgctgtaataaccatgcattttgtcttttttggggaagttaacaggttaaattttctggcggttatattaaattggtccagcatacgtttaaatcatcttcacttcgaaagattagtattgcgtcgtctgtatagcagattattttaagttatttttctctcatttggtatcattttttagttcttacttttttattatttcatccatgatcagcttgaataatac

SEQ ID NO: 10382 - DNA, 719 bp, Diabrotica virgifera
ggttctctcatattggtcgttttttttcgtagttaatgggctagctttattcaaaataaattcaaaatcacttcggaacattctagttacgtttttgaataaaatatcacctaattcacaatacaatgaagtttgcttttgtcttgctaaaaactttcgctcccatatacgcctatttcctttctttcttttttgcttttgactcaagcactacaagcagccgctgcaagaatgtcgtccatgatgggtgcagtttttcaactgaattgcttataagtattgctttcatgtatgaaagtattgtctagtttctttgagtttccctttatcgctcaatattgtagttgctaaacctttttctgaaccgatacttgttgctgctgccctaacatgcttgatattttgtcacatcgccatcgaccattactgctcataattgagcaatttttgttgcccatgtaagcgcaccttaatgatggtttaaaagtaacaatttaataatatgagaagtatggattttagagctaaaataatgcaacgtcaaagtacccactcctacacccaatttttacatacttttacttattctttaccttctctaatacattgagttccgtatacctatcgtaaacacctgattgtataatttaatcaaacctcattgacaacatgcaaattttttatagaaaatcataaaataacctctacacaatgttaca

SEQ ID NO: 10383 - DNA, 718 bp, Diabrotica virgifera
  SmartBlast Evalue=6E-44; Info=Low-density lipoprotein receptor- related protein 6 n=1 Tax=Harpegnathos saltator RepID=E2B7S9_ 9HYME
atttcggacagtctgcttcgtctgacccatctccacaatctttctggcggtcacatttccacgcaatagggatacattcggttttatccttttctggtatattgcacgtaaatcgatcatcaccacaatgaggaggcactaaacatgtccttctatcatcgttcaggatctttccatgaggacaagcgcagatcaaggacgagctattgtgtatacaaaaatgcgaacacttatgtgatgcgcgagagcagagattttccgtgtaatgtttcactgagatcaaatcgagtatatgcgatgcttgaatcggtaaggttgatcgagactttcctgagagtatttctattctttggagctgatccaactctttgtctatccaatagaggaagcccagatgtacagtcagctgagtgataatggagttgctttcatttaaaactacgtgttgattttctccatctatattactaatgtatattccgtgtccttgagcccacacgatcaaatcattttcggtatctaccgctatagctgtaatattagctgccttagtaataacgattctatgagaaccatctaatcttacacgtactaattgtggcgttttaccaatatcggtataaaatagtaatcttttgtcaacatgtaaagctataaggcgtggtcgctcgccttccctcttttccaaattgccaaaagaattttgattttccaggta

SEQ ID NO: 10384 - DNA, 710 bp, Diabrotica virgifera
attttaccttttccctatttaaaataaaattataactttaattcttacatttgaacttactttttaattatacttctttcacttttaaaataattatttgattttctgaccttttacatattcttcaattaaaaaaatttctcctttttcttcctcttcttcttgtctggtactttactaatacatattttcattttctttatacttagtactttcttcatagtgtaataataaacaaaaatcttcttcttcatatttcttcatgatttctttatcacttactttatatatcatgtatcttccttcctatattcgtattatttcataattcttcattttctaacccctacctacttgatgggtagtttttcgcaactttatacccttgaatttgcttccggtccttttgcacgtccttagtcgtgagaaggtttgttccaaaaagacaaaatggatagttgtgcgcttacaaaaaacttctacatcttgcatccctaaattccagtctgatctgatatactcagtgtaggtgaaatccagttagtttcaaaacacgaaatgggtatgcttatatcttctaattttcattttgtaccttttccttgacaagagttggtttttgttgtctaaattgtctttaattgtactttattataaaaaatttatactaaaattcgacggatattaaaaaatttaaataaaaaattcgg

SEQ ID NO: 10385 - DNA, 718 bp, Diabrotica virgifera
  SmartBlast Evalue=2E-33; Info="Protein NUF1, putative n=1 Tax= Pediculus humanus corporis RepID=E0VTR8_PEDHC"
ctgtttccgagctaattcaacgagttgttgtgccaattgagctcgtttggcaacggtgccgaatgttaccggcatatcacagtgttcttgaactttgagatcgacatcactttcacttccataatctccagtaggcggaggaggaatcggagattcgataattgatttactaaaaagaaaaataggatttgtgtcggttcctgccgaataggagcacaccctcttcttcgggtccaaacattctcctccgctaatcaacaacacttgtttctcagctgggattttgaattcctcttggacgtatcgtttcaggttgtcgacgctttctagagctaagctcatgtcaaacgtcatcatacgccctgagtccacatggaatacgtgcagcattttgaactggttttgctctcagattttatgcaagtataatttttctaggcatacctaaaaggtgttgaacacaccgatcacaaagaatttctagtttttttcaaccattgttatgacagtttaatggcattttcacagctgatattggtaaacactaatttgttcacttccattattgtcactcgatgatttcactgcatcacttcattttgtttcaatattacacggcgtgctataattagacattctaattgaaaacgtaaattaacaatcagctgactaggaagtgttattttgcaaactttaaacgacgttcgacccgtgcgac

SEQ ID NO: 10386 - DNA, 706 bp, Diabrotica virgifera
tataaaatatagtattaacaataaccattaggaatatatcaatttaaaggacaccacacatatcttatggaaaatgtaatgccactcaaatgttataaaatttacatcaagagattcgtctggaaattacaatcatttcatatcattgcgccaactctgaatgttgattataataacggcgtaaattgtaattaaagtttatgtaaatcacattttgaagtccataaaacggtcataatcataaatattattagtctagtcgctatcgaaaataaattaagccagcgtgagctaaggcaattagaggaactatcctgagttaatatctgcagaaagatttatgaactgccgattcaaaaaatctgttttttcactctaactcacgtaccgacccatttgattttgtatttaattatatcaatttataccattattaatcaagattcagagtaggcgcaactatatgaactgattgtaatttggagacaaatctgttcatgtatatgtaattgcatttgagtgatattacattttccgcaagacgtgtgcggtgtcgttcttttggatacaattatatttcttatgctgctgaaggacaattatcttgaggtacacacgttccagttgaattatcccttaagtattccttgtttacacacacaaaacggacgacagtcttcagagcaaatcatgtctttacgacaag

SEQ ID NO: 10387 - DNA, 718 bp, Diabrotica virgifera
ggcgcagtctttgttcagtcattttcactataacaaatttgacggagcaaaaaatgtatcctatttatgattgtaaaatcgtcgtggaggtccgttaatagttactagatgattatattgtaggttatttatctggcgaaccgtcttttgtaatattaaatatatctagtctaaaaaatattagggattatgccgagtcgggttattttttagcattcactattgatccgtggcatcacaagaagtatctgtgatggtaatttacgattttccaatattttgagttcttcactgaatagacactaatctgctacacatacctgtttacaaaattagtttgaataatcatctactttgtaaactaaaagtacgtattttgtccgtttatgtcttagtaagctctcgtcactaagtcagtgtaagtgtagttctaataattcgaatatttttctttttggcatcatatttttaacattaattagaattgtatccatccagtcgaatccaggaatagatattaatgtatcttacgcttgataggaattatttgtccagaaacgtgtacaatacacgaaaatggagtagacttttttgaaactgtataactccagaattgtgtcagacaccagtaatagtagcttttttataacattgtatcaattattgtcttcaaatgtgttattaaacaaacgtgttatgtagacgaagcaagatctgt

SEQ ID NO: 10388 - DNA, 716 bp, Diabrotica virgifera
cttatatatacgtcgtgagtgtgaacaagaatcggaggaatcagaactactgtcgacactctccgatgacgaagcaactcttcttggtttcctctgttttctttttgtaatcagaactagctgttgcaacactctcagatgacgaaggaactcttcttttcggtttcctctgtttcctctttcttctaaatccaactgatctcctaacactactatcacttgaagagctacaacttgaagagcgatatcttcggaaacgttttctgtatctttcctcttccctagatcttcttttgtgcttaaggcgtaacttaaggggtaatactggggatctgttatctcttggtggtgcttctggactgctatcagatatagggatgagttctggtggcggaggttcttcgtgagatactaaaatgggctcgtcatcagagtctgtgttcaaaagatctataactacaggttcttgaggaccagtcgaacctactataatgacatcgctatcatggccgctgtctgaaacatcatctggaagagtaaccacagataaaggggacagtggtcgttcactgtatatcacttgtctatcatatccaatcatatcaaaccgtgatttcatgaaactgaaaaattcatgaataaagtggtctgttctgatattgaggtgttctaaaagaacatttcggaatgttctgctgcaaatatgacgctgcaat

SEQ ID NO: 10389 - DNA, 718 bp, Diabrotica virgifera
  SmartBlast Evalue=6E-40; Info=Ataxin-2-like protein n=1 Tax= Camponotus floridanus RepID=E2AAH8_9HYME
ataccattgttgtctgaatgtgatacaaggaaaatcactcgaatgcgatcatcgcaacaaaagaaaaacgcgttcttcggttacgtcactaggccattttgtatttggtgaaatctttgttcctgaacagagaaaagttgtaaggtttttcgtaaacctcgtgttctttttagagtgttactaaaaaattatcaaaattccggtgcccacgagaaacagggatcccggccactacggtagcggtgatatgaacaacaagaggaaaaatcgagggggccctgtcaggacccagagaccttcaaggtcagtggtatccgatggagtatacaacaatgctcattttatgcatgcttctactggacaaattggtaatgtagttcgaattactacagcttctggagtcgtatgggaaggtgtatttaagacattctcaagtagatttgacgtagtattagaggtggcagccaaagtagaaaacccagatagtcccaattcccagatcaatgttgatacctacgtggacaagctcatatttaaggcgtgtgatattttgacaatggtagcccaggatgtagatctagaatacccaattagagatactttccaaacggatactgccatttccgctagacttaacggtagtactaagttagaagagcgagagctggaaccatgggattcttcagggatgaatggtacagacatacagctagaactt

SEQ ID NO: 10390 - DNA, 718 bp, Diabrotica virgifera
tgtgttggggctcatcactgtataaaatctatattctaagatctacaattctgataattacgtacctatatgaattagaattcacacgcaagctcctcaagtaaactaccaaatgttacttgaatgaattctagaatctattaagtgattgagtgactgattcggttacactgcaacgaatcttcgatccagtgattcggatattcaaaaagagttaaacgatccgagcctcaaaattgtaagcagatctttctttgatgtgctacctataagtaataaataagaataattaattatgtgaattaaaatttaaattcgagctttgtgatctaattgaacaattaaaacatgcatttgggatacactctaagaattttatgattcattgaaccaactcactgattcggattcgccggaacgaatcttaagaggattcgagctggtcatcactgcgtagaatgatgtcagtagcaataaaaatttgtaaaacgtccccaactaatctacttcagatgaaatgacactatttttgacaaaatacgtaacaacaagaaactgttacattccaataatcgtaatgatatttatttgtatgtgaaagtttatatcttattgataaatggcttttttggtgtgttaaaaaacagaatcaaataattcgaatgtctttaggtgttgaaaaccacaataattatgtaatacatgaatgtataataaa

SEQ ID NO: 10391 - DNA, 715 bp, Diabrotica virgifera
gattggggatgtacagtgagagctttcaacgcgaaaagtctcaggtttaaattactatttgccattttgatttttattaaattggtggattctgcatctgagactcttcaatttgttaaatatttttaaatttataatcttcttgggcacgtaaatagcaataatttttttcgttgatatctgtagagaagtaattgttttccccacaactttttgaaaattgtattcgccggtacattaacaaagttttttttgtggtcacttattgaaaaatgatttaattccttcgctgtaaatcttccaggaattatttttttttcgcgaaaacagaaaggggaataattgttttcgttggcatctattaagaactaaatcttttccacataaatattttgggagttataatcttcgcggacacgcatataaaaaaaattgtatcgccaacacttatcaaagagttattattttcactgaaaatgtattaggaatcacattaatttagctgtattttattgtcctgtaacagggcaatttctaaaattatctttgcacaattcatattgcaaatacaaaatcaaatattcatacaatatagaataacgctataaaataatgctaaataatattatacacggtagtcgcgtgacgagagaatatctctcgtgaagcgcactgagttaacaaacgggccatactaagtcaactgttcgagtaa

SEQ ID NO: 10392 - DNA, 718 bp, Diabrotica virgifera
  SmartBlast Evalue=7E-43; Info="Carnitine palmitoyltransferase I, putative n=1 Tax=Pediculus humanus corporis RepID=E0VY59_PEDHC"
caacgatgatgttaagctggtctatcagttcactttcacttggaagttctccgttgctgtttaacacatcaagtttgaaaaaattgttatttttttactacgactatatgtttcgagtgtatactgaattgtaaagcatctctttttggtcttggtatccgacaggtcccaaaaatctttttgtactggttcatgtccaacggttccttgcccattttatccagcggcaattgatcattccatatgtttaaataatactcaacagcagcgagtattagatttgcagtatatttcaatctatcatcttcattattgaaatcttcgaagggaaacaccagacctgggctggagaaaacaacaacaggatctcggtattccaagtaggaggtattcaaccaccattcttccaaccaattttcatgagatttagccctctcaaccagaagatgttgcagtttctttccgataccattatcagaaccaaactctgtcaacaatctcttagtattggtcaattcagtttcatttaaaaatggtgttacagtcttaacatacttatcgatagtctgatttaatgtcggcactggaagtgagggcaattttaaatggttttcaaacaattttttcgtagctgttgttgacatggctgcactatgttttactaggtatgatacagcttgtaaggtcctttgttccagaagcagtctaggctttgaca

SEQ ID NO: 10393 - DNA, 717 bp, Diabrotica virgifera
  SmartBlast Evalue=3E-16; Info=Reverse transcriptase-like protein n=1 Tax=Glyptapanteles indiensis RepID=B7S927_9HYME
aaaagatgcactagagactttcagaatattgatgcaattaaattactatattgttctttagttagacctcatctagagtattgttcttgtgtttggtctccatcttacaatatttacataacaaaaatcgagacagtccaacacaagttcttaaggtacatagcatataaactgggtataccttttgagttaaatcagttaaattattatcaaattgaaacccaattgggtattctctcattgcgtgaccgacgagtaattaaggatgcaaggatgctctatggcataattaattcaacagttttgtgtcctcagctacttgagcaggttggtctccatgtacctctccgcagaactcgattaaatcaaacattctatgttcctatccatagaaccaactatgcatataacaactttttatctcgagcactaagatgggcaaacactcaacctgatctagatttctttgcaccgaagtctgaattcatctctggcctcagacgtttgtttgtttgagtagttgttggatatttattattgtgatatatgaatctgatttatgtgtttaagtttgtgatattttttgtattttattgtattatcgttttattattactattttactgtagttttattattattgacacatgtattatgtatattggacttataaacttgtaatcttattgggcagtgtcccgttgaaaataaataaaa

SEQ ID NO: 10394 - DNA, 717 bp, Diabrotica virgifera
aaaatgtactacgtaaatacagcgctactttcattattcaattgtgcattgttattctgcttcaatttagttgcatatacacattccactgtaaattcaaaacgatattgtaatagaaccaaaagctgtaattatgcatttatcgatactaggagcgttacttttgcctatagtaatctatggagaaagaattccacgacgatcactaggtgtgcgttgcaataatacaaaatccaacaaagcgcctcctttatccatggaaaatgaaatagacaatcctaaaactgcttgtccagatagcttggatcgctgccatcgatttttcgacaccgatactgatttcttcgcagtttattacaaccacataaaaccatacagtctgaaactcagtatttcgtacgaaactgcgctggggatagaaaaagccttcttcgaacaggaagaggatatgttcagaaattacacgaaaaccttgattcaaagcgtaaagcaatttgatggcatcagctggcacgctgatattaaagaaactgattatgatttcttcgtaaactttttgtttgacagatactcacattttcgtaacaagctcaagagcatacctgaagatgaacatcgaaatatcatagagctatctgttaagagcgatggtagttttgatccagctaaaatggttgtaattcatgtaggttattaaagattgttaattgtgtaagg

SEQ ID NO: 10395 - DNA, 716 bp, Diabrotica virgifera
  SmartBlast Evalue=3E-28; Info=Serine/threonine-protein kinase Doa n=1 Tax=Harpegnathos saltator RepID=E2BX10_9HYME
gtgcttgaattagatgaatagtttgtctggggcatccagtttactacaaaagtctacccaaagaacttggagctgtgtgctaaactttgcaaatttaatttggagtactttatatacaagtcaattaaccatgcatgaatctagaaaacggtatcattcccattctagatcgaggtcaagatcacattccaaggatagaagttatgatcgtaaaaagttaaaaaagtcatgtgaatggaaaagatcgtgaaggaaagcgtaggaaggttgatgcgtatgatagtccatcatacaagaaatctcttagcagtcaaagggctcatcggtcaaggcagtatgaaagaggaactagtggggaacgcaggtacaagagaagtcgcagaaggtctcgtacatcgaagaaacatcgtcactaccatgaaaagaaaaagcataagaaatccagttcttcagagcagcaggcatcaaggattatatcagtagaagatgatgatgaggggcatcttatttatgaagcaggagatacaattaaaggcaggtacaaaattttaggtacacttggagaaggtacatttggtaaggttgtcaaagtaaaggatatggaaatggatcattacatggcacttaagattatcaaaaatgttgaaaagtatagagaagcagccaaattggaaataagtgttttagaaaagttggcagataaggatccaaactgt

SEQ ID NO: 10396 - DNA, 715 bp, Diabrotica virgifera
  SmartBlast Evalue=1E-27; Info="Adrenodoxin, mitochondrial n=1 Tax=Camponotus floridanus RepID=E2ASX4_9HYME"
tataaatagaaaagcatgcaacgttcgtcattttagtttatctccgcgaatcttcaaagtcaaagtaagagaaagttaattttgtgagagtcattaagtaattttacttttattttgtggttacaacatacagcgacataatttacaaatatagttacataacaatagtgttattatgttttacctgattgtttgagatttggtataattgggtaaaataaactacaattccccaaatggctcttaatgcgtttttaaggaaaagtgcgatcttgccaaggtatttaaataggcatgtaatggtaaacaatataaggctgttatctgtaggacaaccagaattaagtaaaaaacaaatagaagttacgttcataaaagcaatggagataagataaaagccaagggaaaggttggcgataacctattagatgtcgtattaaataataacatagatatagacggttttggagcatgcgaaggcaccttgacatgttcgacttgccaccttattcttaagcaagaagactttgatgccctccaaaaaaagcaaccgatgaggagctagacatgctggacttagcttatgacctaacagatacttcccgattaggttgtcaaattatattaacggaaagtctagatggtttagaagtaagagttccaaatactgttaatgatgcgagaagctaaaacgttcagccagttctaaagatat

SEQ ID NO: 10397 - DNA, 718 bp, Diabrotica virgifera
  SmartBlast Evalue=8E-51; Info="Protein claret segregational, putative n=1 Tax=Pediculus humanus corporis RepID=E0VE11_PEDHC"
aattacaacgaagtgcaataaattacaagaagaaaataacagattaatagatgaattaagaagtagtaataatgaatgtattgatttaaaaactacaaacgagaagttacgtaaagattatttgcaaagtgagatagcgaggagacaacttcaaaacaccgtacaagatttaaaaggcaacatccgagtcttctgtagggtaagacccccaattaatgaagctgaacatgaaaaggcaaaatgttatataaattatctaaatgaaagcaccattgaaattaaaagtacccaggaattgtcccagtgttcgtcaaacctaccgaacaaaagttagaatttacttttgaccaagttttccaggaaagtgcaacacaggaagaattttttgtagaattatcccaattggtgcaatcggcccttgatggatacaacgtctgtgttttcgcttacggacaaactggatctgggaaaacctacaccatgcaaggctcagaaattcctgtacacacgggaatgattccgaggaccattaatttaattgttgacacgattaaagacctgaaaagttgtaaatggcagtatgacgttactgccagttttttagaaatatataatgaaaatgtaagggacctgctggattctgattcaaaccagaacttagaaattatgtacaatgaaggacgagggatccaagtgccaaatttaaaagacgaggaga

SEQ ID NO: 10398 - DNA, 717 bp, Diabrotica virgifera
atcatttacagttgtattgtgcgtctccttgataatatacgtttgctttccaggttgataaggctcaggccgttggggatattcagttacattagtattgtgggtttccttcaaaatatacgtctcctttccaggctgatggggatagcttctcggaggctcactttggttcacgttcgtagtggtttctttaagtatgtacgtgttttgggctgggggtggtggaggtgccggtgggtatccgttatcaacgttcttcgtggtggtgttggtctcgttgtatatatatgtttggttcgtagttggtggattcttgtcaactctgtagcctggttggtagttgcgagtagtgatggtttctttcactaagacacctcctggaggacttggtttttgataaggaggataattatcctgttgttgcacgatggtgttctctttgttctcgactttattatagacaaaactcttgctcggcgtggttatagatttgttaggtgagtaaacatatttttgctcagtggcagtagagtcgttgacgttcgtggggaagtctccagaaccggggatttcgtaagtgtaagttttgatggtagtggtaactttggtgttaccaggaggtcttaagttagggtccaagtgggccagcacttcaggatctatttctggagtgactgtttcgatgacctcgacagggtactcgtggatgttgttgac

SEQ ID NO: 10399 - DNA, 709 bp, Diabrotica virgifera
ggtggaaacttattgagacagaaaacttttgtggaatatacaacatatcatcatatacaacatatcatcaaaaaaaccgaaaaagctatgaatatcctaagggctttctgtaaagccaactggggtgtagatcccaacattagtttaatgttttatcgatctatgatacgaccacttttcgataccaacgaacgttttgatacgaccacttgtaataaatgtaatggaaattgaagctgttgaacctctattgaatttgcggcggcagtatcttaccgacaaatatatagctcgtaccattagcagagaccaagtatttctcaaagatatacataatctggctgttttagatctgactaaaagttattggtttaagaaaaaatctccacttgtggcggaaagctacagaaatctttcgaaattccaaaaggtgctttataagggtcacattccaccagtttatactgaaaagccccaggtattattctcaacaaaaatcaagacagaatttcttagtgatgtccaaggtcccatgtttaatgtagaagttcagaagagatggcctaattattattatttgtttaccgacggttcaaaaaaaggaaataacacagcatgcgccgtataccaacagtattctggacaacagtataaatataagatacctgatgaagctaccatctacacagccgaaacgctggctttaaag

SEQ ID NO: 10400 - DNA, 709 bp, Diabrotica virgifera
  SmartBlast Evalue=5E-52; Info=Glass bottom boat n=1 Tax= Tribolium castaneum RepID=D6WJG3_TRICA
actgttatagtataaactgcatctacatttttcatatcctttccattacctttgtatattcttagttcagccccaacaacgtcttctgctactggtacatcactggcattgaaccaaagtcttttacctcgttcatgtcttacattcggcacatggtcatttgcactttcaaaagtcataatgatatcgctctcatcaatttggttttgttcttcgccactcaaataaacatcaacactcctcttggccctttgatcatcttcgttgtccgcatccatcaacgtcttgtaaatatccaacaagaacctcggagctgacctcttcagcggattcttacttatcgtccttggtctcttaggcaagcccaagagactcaaaatctccaattccatttcccttttttcatctctggtcatcgtcctctctatagccgtttgatcaaaaccattatcgatataaatcccagaccgcgagcatgatgagaaactccaaaacgtaaaaaacagtaaacaagccaagacagactgcatgttgtcgaagttgttttgtttactcacaacccacgcgtttttgataagaaaataatgtaaacaaacactaattattcgcgatgtagataaaggcactaaacgcgataatttaactcactaaatttcttgagtgctcatactgcactgcaacctgtacctgcaacagacattccacttcc

SEQ ID NO: 10401 - DNA, 703 bp, Diabrotica virgifera
atagatataaataaatctaataaggtacacctacaatagcggtacgttaagagccaatatacatgtttttcttttttttcatattcttaaatcgtctcagaatattatcggtcgatgacaaaaattattagaaatattaactagtatccttatcagcagcttaaaaactgattatttttttttaaacacgaatttatttcagtaaacataaaaatacctataaatagtagaaaatgcacaagttatatcccgacagtaatattttaggatacctatttttaaattagttactttgattgaatacatttttaaacattttattattgctttagaggtgtaagatattcaaattcttacagaataagccaacaaataattaaaattgttatctaattaaatccgtgtgatatctaacattaaaggaacagttatttataaatgtacctttaattatagatctcacattaacataacattatttattatttaaataaaattcgtacgaaagaatgtaaggacaaaacaagaaaaaaatatagtcttccaggaaaaccaatttcctggaagaatctggattcaaacaaaagacggagagttaatattctcgtaatgggactaaaactaaacaaaaaatgaagcaaaatatagtaatagatcagtatgtacatataaaatcgactaaaataaaaatagacaaaattct

SEQ ID NO: 10402 - DNA, 715 bp, Diabrotica virgifera
gatcaattatcctccgttcaacgcactgagaatgcactaatggatttctgttcggtcttttatactctcagagacggtatagaacatgtttttttggatacataggcgtactctagacgataagagtaacaaaataaaaccacatatgccaactactagggcagctactgatttacataagcagatcttgatataactgcaagctataaacaaaatcgattattttaataaacccaaaaaatatactggagtttctctaaattaaaattaccctaaataaggttttgtagtgaatttatactcattaattttaatttagtttgttaatattacacccacatgtacgtacaatttattttttaactagcatcatttttcataaattgtaaattaccattcctccgatgtggtataggaataaactgccaaagaatatttgatgttaaaatgataatgtaagttgaggaagcacgatgctacctcttaatgtaatatagaccggtagattatacaataaacctaaaaaaatgttcaggataatttgacaatttacaagagatggtatttctttagtagaacgcaagaaaaagaagtgattagatcaataaataatccctcccccagatcttctttggtctttctctcctactccttccaggaatcttcttacttcagcaatttttcggattgggctattaacgtctcgacgttgaac

SEQ ID NO: 10403 - DNA, 716 bp, Diabrotica virgifera
aatgtgttacatgctgtactctactaaaagccttttcgcaatcgaagaaaattaaccatgaaaactgataacagcctatggtcttcaataaagacttgtctcatcttcctttggaactaggtgttttggtaaactttggtaaaccaaattttctaaaaatgttgcgctgttgtttccaacatttttcatatatttttctatgggacttggaatgagaatttcaagataatcattttctcaaaattctttcacattttcccaaaacattgttttgaaccacgatacaaaatatttggaatagttaatcacaaacaaaaattattccactgtttttccatgaggtaataatgttgaaatataatgttgatttataaaaatttcactgtagtgcaaatgctaatttgatgttgtaatagcacattaatagtctatttagacaaaatttcttcactagattaatatattagtagaattaagaatataacgatgtgcaatataaattatcatggtctaaaataaaagaaattgttattcgtcccattttttaatattaattttattttccaaacaatgtctaaaataatctaagtgacgcttatgaaatatttgctaatatttagtgtacatggttattaattataaatgtacctccctctatatttttaatgcacactttatacaacacggttaaattgatactagatatacagggcagc

SEQ ID NO: 10404 - DNA, 709 bp, Diabrotica virgifera
tccgatggaatattagacagtgcacccttcatgactaaaaacaccaactgaaaattggtcatctttcaaaaccaaatcatacaataaaaaacagatgttgcactgaaatatgaccaagcccccagcttttttaaatatatctatataatataaacactaactaaaaactgctctaatattccatccgaaaagagaaaggccttaattatttttttgtttttctaatctagaatcctacctagtatttcttaattctatgacttacctaattttttaaatctagaaactattctacacgctagaagctacccttaactaaatgctttctagcatactttttacaaattggaagttacttccaacgatgaccagatttcagagattaaaaaattagtcgatctgaaacgacatttcccactgtagttgacatacaatttgagcacttcactaccaaaattttatgtaaaacttgatttacaagaaaatttttctacaatgtgtctaaactgtttgtaattagaacaataaagtcagatatctcatgagtgtagcgatttcatgaagaaaaatataccaatatacagtcccttgccatatattagacgcactatacgatttcacaaaagtcaattatgaggtggtactaaaaaggtttttgtatgtaccggacacaatgtatgttgtttggttgtccatctaattttccaca

SEQ ID NO: 10405 - DNA, 716 bp, Diabrotica virgifera
  SmartBlast Evalue=1E-103; Info=DNA replication licensing factor mcm5 n=2 Tax=Culicini RepID=B0WNG2_CULQU
cagcagcaagtacagagcatcttgaatttaaagtagtcgtgatgcctgctttggcaatagaaattgtttgttgttccatagcttcatgaatagctactctatcatcttctctcattttgtcaaactcatcaatacagacgacaccaccatcagcaagaaccattgctcctccttccataacaaagttacgtgtagcaggatctctcataactgatgcagttaaaccagctgccgaactgccctttcctgaagtgtatacagcaataggagcaactttttcaacaaactttagtagctgagattttgcagtacctggatcacccaacaacaatatatttatatctcctcttcttgtcaaaccatccggcagtctcttcctagaaccaccaaaaagaaggcaagcgattgcttttttgatatcagcggatccataaatagagggagcaatacttgtcgctagtctctcgtagatgtttggaagggcggctaaacgacggaaagtgctttcttcttctgaggatattacggagcaacctaatgatcccaatccttcactatccagttgaatacctacaactcgcatgtacgatgttcttactccagtagtggctttctccctaccttcccgcctcgaaactttgctgatttttttaatacaaaatattcctaaaatctgcactctatttccaggaacgactctctcacacaagtaccta

SEQ ID NO: 10406 - DNA, 716 bp, Diabrotica virgifera
  SmartBlast Evalue=2E-83; Info=Mitochondrial import inner membrane translocase subunit TIM44 n=1 Tax=Harpegnathos saltator RepID=E2BW71_9HYME
ccatatgtacataaagttatggactggaaattaaaatacgatgaaagtgaaaatcctgtcatccgtgcttccagagctctaacagaaaaagttggtgatatcatgggtggtttatttcagaaaactgaactatctgaaacacttacagaaatctgtaagatagatcctgcgttcgataccaaaagatttctgaaacaatgtgagacagatattattcccaatattctcgaagccatgacgagaggagagttagaagttcttaaagattggtgccatgaaggtccatttaatctttttgccgttcctataaaagaagcctataaaaagggatacaagattgaatcaaaaattttagatatcgatcatgtggatttagtcttaggcaaagtgatggaccaagggccagttttgataatatcttttacatcccagcaagttatggctgtccgagatgcctcaggtggagttgtcgagggagatcctgacaaagtaatgagagttaactatgtatgggtactatgcagagatgtcacagaacctgatcctagggcggcatggagactgcttgatctttcagccagcagcaatgaacaactggtttaacacaaacatgaacgatgttatgacaaattaatgaaatatacgattgatcgaccttattgttattgatttacaagggagatcaaatcagggcgactcgggccaggaggacggtg

SEQ ID NO: 10407 - DNA, 713 bp, Diabrotica virgifera
catagctctaaattcaatactgtggtccaaacatatattttataaaagaaacacctatttaactcaatatttaaaagtatagtactgtatgaatggtatgacaggtaaatacatccattgcaagcttattgtccttgaaaatggacttctgacgaagatctgccagaaaatcaagactgtaaaaatacccaatgaccaaatacgacaaaatataagtatcatcaattattattgacgaaaatgaacgcacataacatatttgtcaaaaaaattgatgacagatgacttcctaagcaaaaacatgggtgtcagttgaaggaaggaaaagaggaagaccaaacagccataattagatcaaagagaaatgtaagaggtgaaaattcagtcagaagattgggacgacaaacaagaatggacactaggaactagaaaacgtcagacgctatgaaaagcggatgaaaaaaattgccagggaagagaagcgatattaatgatgtttgaacacgattttggacagttgtatcgatcaaaaagaaaatacgacaaaatcacaatacatttctatcatttgttagttattttattataaagagttttgccttacaatggcttaacttaagccgtaaaatattaattcaaataagattaatttgactaacctagatttaacaatattatctactgtatatgcttgagtatttagttatttaaaa

SEQ ID NO: 10408 - DNA, 714 bp, Diabrotica virgifera
  SmartBlast Evalue=3E-67; Info=Ras-related protein Rab-23 n=2 Tax=Formicidae RepID=E2AZR4_9HYME
taaacttcaacattctacataaacaaaaatatatttccacttcccacacattaactgcaaatatctttggagtcaacgcaaaagggttctgataatagtagaggaacgatgagctcgtcagcccttttaaggggctacgggccacgtgcctaatattatgagggaagaagaacttgaagtggccctgaaggtggtcatcgtgggtaatggtggggtaggtaaatcaagcatgatccaaagatactgcaagggaactttcaccaaggattataagaaaaccataggagtagattttttagaaagacaaatagaagtagatggcaagatgttcgacttatgctgtgggataccgcaggacaagaagaattcgacgccattacaaaggcttactatcgaggagcacaagcctgcgttcttgccttttcaactgtagatagggattcgtttgaagcagcacattcatggaaactaaaggtagaaaatgaatgtggcgaaattccaactgtgattgtacaaaataaaattgatctattagatcaaagtgttgtcaatcccgaagaagcagatcttctagcacgtgcgttagggtgccgactcattcgtacatcagttaaagaagacattaacgtagctgctgtttttagacatttagcgtcaaagtgccttgcagaacttcgagatcctcgagatggtgattatttcacacctaccacg

SEQ ID NO: 10409 - DNA, 712 bp, Diabrotica virgifera
  SmartBlast Evalue=6E-18; Info=28 kDa heat-and acid-stable phosphoprotein n=1 Tax=Camponotus floridanus RepID=E2ABW6_9HYME
tgtgttggggtcaactgtcaatggttagggcatagataaaaatttgcgttattaaatagttttatttccattttaaagtatttaatactaaaaacagcataaaattacagttttacgtgtctattacttaagttaataaatatcaaatatgccacgaggaaaattcacaaaccataagggacgtaaccgtaggtttactaatcctgaagaattagaagaggaaaggagaagggaagaacaacagaaaaaatggagacaacaaagaggagaaagcagtagtgaagaatctgaagaagaggctgccgctgacaaaaaaattagtgaagaatcaggttcagggagtgagtcctcagaggagagcgatggcgaggatgcaaaagctaagggtgtatctaagctaattgaaatagaaaatccaaatagaattcaaaagaagactaaaaaactcaccactcttaacacaactacggatttagatagtaaacctcagctgtcaaggagagagagggaagaaatagaaaaacaaaaagcgcaggctctttatcaaaagttgcatgcggaaggaaaaaccgaacaagctagggccgacttggcaagattagctattattaaacagcaaagggaagaagcaaaaaagagaagagaagctgaagtgaaagaaaaagaaaatgcagccaaagagaagacagctcaaacaaagaaggccctagga

SEQ ID NO: 10410 - DNA, 714 bp, Diabrotica virgifera
ggtgatactgttgtaattctgaacacttctataccatcgttcaaatcaaaaccgtccataactttactattgaaagtggtcgaggaacaacgttgattgtcgcactgactcaaatcttggccttcatgagaagctaagtttatcatggcgtcatcttgtaaagaaattctggtatcttcgtttaaaagagttgcggtattaaaattggtctcgtcattccaggagatgattgtctctgttaatatagttacgttgtattcaattgtagaactaatagtcaaatccgaaaaatctacgtttctattcaatgattcatagacgtttagagtaatgcttactgattcagatccggtagactgaacacttgtataatttctattagtaaaaggtgtcttatcgtagggactttctcttttagttatttctaagttcaaaccttcttgtgttggtaaaccggaaatattaacagtttgtgctactttaaaatatagttcaagatattcgtctgggctgttggtatatgagagggcgctgagatttatatcactaatgtaatcggttgatacggaaactgatatattatctggattaaattcatcattgattctgtttcccaatttcgatggcctattatttttaggactctccttcgcaagtagccctaaaaacacgaaaagagaataatatttctcagaataaccatttttgttccat

SEQ ID NO: 10411 - DNA, 694 bp, Diabrotica virgifera
attggcttatttgattgtaaatattttcaagagtgtaccattaaaatttcaagttaatccgagcaaaattgacggagatatggatattatatacaaaaattttcttagtattatattgacaaaactacatttttttaaacgcgttttctgaaaaacatgttttttgaggcggtgtacatcataactcaaaaagtaatgcaccggatctttctgaaattttgcacacttcctttttagatattttactaggtagtgacgtcgagtttttgcttattttaacattttttttttttatgtattaccatttttctgttaaccgaacacacttttttttgtttttttttatttttcactttaaagttataccatgaatttaaaatcaatataatcataaaaactcgacgttactacctcaaaaaactcttaaactaaaataatctttttcgtttatatgtttcaaatgattctgtccgaagatatggtgtacgccgcaaatcattttctttttggatcatctacttgaaaatgacgccactgcttcattttttaatatttttgaataaaaatttaactgaataatcttcaagtgttgttctttaagatagccttttacccatttaacttaaccccaccactttcaagggaaatcgttttaaaattatgtaaaaaaacgcagaattaactataccccccc

SEQ ID NO: 10412 - DNA, 715 bp, Diabrotica virgifera
cgcgtctcattttagtcaataatgttacatagcgcggggatttggattatgtaactaccgttgtaagactcatgctgtaacttccgagcgatatgtgagtttcttgtgataaaaaattaaagtacacgcgggacagccggcgaatttgaaaattttggaactggtggataatttttgggaatttatttgaattggacgctctaaattttttctgtttttatttttatttggtaacgtttagtattttcggtttactttgtgtcacaatgaaggtgcgggttttttaagacgggaaaataagaaaaacggactgtcggatctgatgaaaggtgggggattttttggaaaaggagtgctttgagaaaatgggaaagaaggccaggaaaactagatggagaacattggaaattaccgatgaacacagcgacagcgaagaatcaaacattaccacatcaccgaggttaccgaagacatttcagcagaaatcttactacaacaaattaccttattctagtcaatcgaccccgcgccgaaagtaccaacatgagagtaccaaatccacccgaagcagcagtacggctagcgaaaacaaaattacatttaatgaagatgagtatactaaaatcacgactcctcgacaagatgttctatttaagaagggttacctgaacaaacctagaaactaccagacgcagacgtcaactggtacttccac

SEQ ID NO: 10413 - DNA, 716 bp, Diabrotica virgifera
  SmartBlast Evalue=1E-53; Info=Nuclear pore complex protein Nup160-like protein n=1 Tax=Harpegnathos saltator RepID=E2B6Z5_ 9HYME
atgtgttccagtggatccaaaggtcggaggaatgaaaacgtcgactttttcaaaaatactgctccagagacagaaggtaataacatcagacctagaggttttaagctagcgatatgatactgtacgcagcaagagtagaatttttgccaacaccattctgcacattctaaatattcatcatcattcacattagatccgtttaccgtattttgtatttcattatccacagctagacaaattctctgttttaaagctgaggctgatatttgggcatcagataatatagtagacctcttgtaaatggaaagagctttgcttattatgtgcaaaggaaatctgccgggacggaaaatgtgttgcaaatacacttgtctaggatcactgtctccatcattggcaggtgcttggttggcatcgggcaatgtttccaaaataataggtgaccaattgcttgatttgtaggaagcacaacgggatactggcagtgtggcagtgtagactacgctgtcgccatcttcgcatcgccatacagaccataggcgattggtttgtaaggcaaaatcgataagatcattctcaggagagtataaagtaaccaatctgtcaattgttatttcctggccatttattattggatttaagatatgaaattgaccaacactggagtaatttaaaaacaccgccaagatactttcagtactattgccatctactgc

SEQ ID NO: 10414 - DNA, 716 bp, Diabrotica virgifera
  SmartBlast Evalue=3E-88; Info=Ribosomal protein L17 n=1 Tax= Chrysomela tremulae RepID=D1M7X8_9CUCU
gtcactgtcatcttttcattcctttttgtaaaaaaattgtcacgttttaggtgatagtttatagaaatcaagaaaataaacaaaagttatcaaaatgggtcgatatgcacgtgaacccgaaaatgctgcaaaaacctgcaaagctaaaggttcaaacttgagagtacattttaagaacacatgtgagactgcaaatgcaatcaaaaagatgcccctcaaaagagctgtagcctatttaaagaatgtagtaatccagaaggaatgtattccatttagaagattcaatggtggagttggtaggtgttctcaagctaaacagtttggtactactcaaggaaggtggcccaaaaaatcagcagaatttcttttacaactcttaagaaatgctgaaagcaatgctgattatagtggacttgatgtagatagactagttatagaacatattcaagtaaacagagctgctagtttaagacgtcgtacatacagagctcatggtaggatcaacccttacatgtcttcaccctgccacattgaattatggttgactgaaggagaatctacaccagaagctcccaaaaagtcttcccagaagaaatcggctcttaataaaattaagaaaccaaaagcacctcaagctgtatcaaattaaacagtttgttatttaattaaaatatattttctgtattctgagcttctttttaatacatgtcttagct

SEQ ID NO: 10415 - DNA, 716 bp, Diabrotica virgifera
catattgctattttagaccaacacaaaaaaatttgaaatcaccttattttaaactaaataattttgcaagtaccatcaatataacatcttttctgttgtcataaaaaaagatactataatattaattacattgttcggctacaatgttcttacatctgttggaaaatctgaaacaaaaatgttatatggtatgggcgattaaatactcccctgaggcatcccttcctggacttgttgtagcttagcccgggccccctcttccaatgacattttaggttttattttgcggaaataactaatttcctaagtgataatttaaattttcatgttaaggtctgttccaattacattttagtcaaaaatactaattttcccagcgaaaaattaaaactttatgttgaggtcaaaggtgcccctgtaagatctttttaaaattgtgtcagttgaaaatatttcgttgggatcggcttttaaaatacatatttttatgttcttcgttaaaactctatgcacggggcccccttgatcgggggcccaggggcactgccccgaattgccccaatggtagttacggccctgctgtttaggttgactgtgtgaattgttagatgggcttgttcttctgtggcggttagaaagcgaagatgagggacgggtaagaaaaaaaaggaagcagattctggggctatgactttataaagcctcttcagagaata

SEQ ID NO: 10416 - DNA, 711 bp, Diabrotica virgifera
  SmartBlast Evalue=2E-86; Info="Lethal (2) 01289, isoform F n=1 Tax=Drosophila melanogaster RepID=E1JGY6_DROME"
gagcttgagaatatcgacgacgaagcagatcaattgggtatcggatttgttaagatcaatgatgaaagcttggccgaagaatataacttgggtacgcttcctgctcttgtgtattacagacatcaaattccaattatctatgaaggtgaactaactagagaagatgacgtattggaatggttagtgcagcataaaagtacaggggatgaagatgataccatcgaagatgtgactctaaaaaccctttctactcttatatctagtgtggatcacttagctgtacttttctatgaccatggatcggaagaatctaccaaagtcctcgacgacctggagcatatcgacgatgattgtgacaaatacggcatccagtttgtcaaaatagacgacactaacgcagtcaaagaatacggattggactcattgcctacacttgtatacttcgaaaagggaattcccaacatatacgacggagatctggaagaggagaccgaaattctggaatggttggttgaacagctggagaaagacgaaattgaggacgtcacggatgagatgttagataagttgatacacgagagcaaatttttggctgtactattttatgatgacgacgacaaaaatcacaaaaagtcctcaacgaacttgaaaacatcgacgacgaatgcgaccagcttggcatcgttttcgtgaaaattgacaacgatgacg

SEQ ID NO: 10417 - DNA, 711 bp, Diabrotica virgifera
agaaatatattatattgaaggtgataataactaatatgcacgagtgtcactagcgttttttgaataatatttacatctgatctggtagtatcatgggaaaaagtgaatcattcaagcaaggttcgaggcgtttaatcaaggcacgatacgtgataaactgttaaccagctgttatattctttatttaggaaaagttttaaaattcataaaaaatccttcctcagattagaatacaaatttttgctaattttggtcattttacctaaaaattctttagaccccgggaaactggtgtagcttccttactcctatgcaatatgaaatatatgactccgacaagaagtagcaatcatacatgatgtgagcttttttcctacaactcgtgtttttgtttaaggctgaaccaaatctcatatccaattgatatttacattatatcgttagtattaagctcaatcaatattttccccaacaacaaatttacccattaaaagactaattatattacaaacattaacaattaataggtaaggcaataatttgttaacagcaagcatgcagagaacaaactataaagaatttagcaacaattcgttgaaagggataaaaatattagagttaagtagtctttaaggatctttggtttatttattcctatatattattatttggttaagttatttcctactaaaattatctttcagaaaatac

SEQ ID NO: 10418 - DNA, 714 bp, Diabrotica virgifera
  SmartBlast Evalue=4E-61; Info=Carnitine O-acetyltransferase n=1 Tax=Culex quinquefasciatus RepID=B0XHW9_CULQU
ttagtcctgacagtttcattcaaattgccatgcagtatgctttttacagaatccataagactccaggagcacattacgaatcagcagctactagaaaatacatccacggcagaacagaaacgatcagatcctgttccatagagtccatagcattcgctaaagccatgttggatagcagcaagtctttgaacgagaaagtagcagctctaaaagacgccatttcctcgcacaagaagtattctatagaagcagtaaatggttttggcgtagatcgtcacctcctgggtctgaaactgatagctctcgaaaacggcatcgaactaccagaaatctacaaagacaaagcgtacagtctcagtagtcgaatgcgtttgtccaccagccaagtcgccaccaaatgcgacggctttatggtttacgcgcccctcacagacgatggatacggatgctgctacaatccgagaccagacgacattaattttggcctttcagccttcaaaaacaacaaggaaacgtcggctagaagatacagggaggctctaaccgagagcctgcagtatatgcaccatatactagccaaaacacaaaaggcgaaattgtagtggtacttacttgttcagatatatttcgagtactatattggcaatgtgcttaacagtactaaagaaacctttctgacatgttgtgcttttcaactcagttaatgagtaaatg

SEQ ID NO: 10419 - DNA, 714 bp, Diabrotica virgifera
ctttcagagttggtattacacgaatttaaagtagacataaaatagtttcacatagttgttccaaaaatagcaaataattctacaagcagtttttactagttcaggatactttgattcttcattatccttcgcccgtctctcaaaaaaacactgtcttcctctgaacttaccacttgacctgcacattttatcttagcttttatcacatctgacaatgttttcagtatttaccataaagtcaccaattcagctttgcggcgccttctccgctctcctgtcaattttctttgagggtcaaatatcattctgagaactctcctttcacgtacgatgtagagtccatgttccacttccataatataacaattggactatcaatagacatgtacagtcttaatttagattgtctttttatcagcttagatcttaataatgatgatagggagtataatgctctatcccacgcagctatccttgctgagacctctttttatatgtggtaatcatctgtgattactgcccctagatatttaaactcttactacttcgaagttgtggtcattagttatgtcttctcttcgtttcttcgaagtcccagactatccgtttcttcctcgagttgtgaaaactcttctcccacgtctcttgtagaatgagcgactgcacctagatcattagcaaaggccaacaatagttctgatcctcagttggcaa

SEQ ID NO: 10420 - DNA, 714 bp, Diabrotica virgifera
  SmartBlast Evalue=7E-53; Info=BRCA1/BRCA2-containing complex subunit 3 n=1 Tax=Camponotus floridanus RepID=E2AXC7_9HYME
ttgatgattaattagctttattgaataagattttttttctgtttgataaaatgatttccgaaaattaccttaaacgggtaaatattaccgcagatgtgtatgctatatgtgttcaacatgctttaacaactgaaaaacaagaaattatgggtctacttattggagaggtaaatgaaagtgaacgtgtttccaatatttcagcttgtgttattttacatagaagtgataaacagccagacagagtggaaatatcaccagaacagctttgtcatgcttcaatgcatgcagatcagttagctaaaaaacttaatagaccgatgagggtacttggatggtatcattcccacccacatattactgtttggccaagtcatgttgatataagaactcaagctacatatcaaacaatggatcccttatttgtgggattaatcttttctgtttttcaaaatgatactagatctcgtaggaatcagatacaagtaacttgcttccaggcccacaatagtacatctgaacttgaaaggagagaagttgagttagtgataaaaccctcaccgtttgaaaattacaatttagaaggaatagcaaatcttccaaaaatcctggttcaagaagaagttgattgccatgacattcaagacaatgacactcaggatgaattaagtagtctacacaatgatgcatttaaaacattagctctagttcacatcg

SEQ ID NO: 10421 - DNA, 712 bp, Diabrotica virgifera
gcaggggtacttttttatttttgttttttattaataatgctatgtgaactccaatgtctagttaaatagttagtaggtaaccacttaataaaaacgacgtagggtaaaaatttgattgtaactttttgctgtggacattttagaaaaacgtacagaggaaaaacgttttagaaaaattaatcctatttgttctatatttttctatccttataggaatcccataaataggatttttgaatttttcttgtcactcaaagaaaaatagggtggtggaaagatttggttgaaaaataaatcagaaaaatatcaaaaatcgtgaactatctaacttaggttacattaacgggcaaccactttcgcatatacagacgtactagacagaaaaatttaagaatacttatgcctggttgcactaacagatcttaagcttaagatgtgccttaagctcagcttacgtaacatacgcgttgcaccattgagtctaagatcaattttcagcttgccacaatggatttccacgtggactgcatcttaaactgcgcctcagttaaggggttacatacgtcttgcgggtaaaaaaaagtgaactttaaaaaaattatatcaacgaaaactaaaaattatttttatttataattggaacatgtaaaagtatagtacttaaggtactctcaaaaaaaatgttcagccaaaaatattcatttttgtatag

SEQ ID NO: 10422 - DNA, 710 bp, Diabrotica virgifera
  SmartBlast Evalue=4E-60; Info="Canalicular multispecific organic anion transporter, putative n=1 Tax=Pediculus humanus corporis RepID=E0VYF0_PEDHC"
ggagtacacaaaagtgaaacaagaagatgactcaggcaaaacaccaaaggactggccaacagaaggtggagtcatttacaagcaagttgaattaaaatacggtgataacaaaattccagtcttgaaaaatattaattttacaataaaacccaaacacaacattggtattgtaggaagaactggggcaggaaaatcttcaattatttcaacgttgtttaggctatatgaatacggaggaaatattgaaattgatggtgtggatatcaaaactatatctttgagttgcttgaggaaaaacatcgccataataccgcaagaccctatattattcagtggcacacttcgagaaaacatagatccctataaagaacacgcagacgataagatttggtctctgctaaaccaactttcgattgaaaacatacaaactttggactctactgttgccaactttagtgcaggacaaaaacagctaatctgcatggccagagcggctttgaataactgcaggattatagtcttggacgagattaccgcgaacatggacacggaaaatgataacttgatacattcgttggtggagaaaatattcaagaattgtactatcttgacgattgctcataggttaaactttattctgagctgtgatatggtaattgtgatggaaaatggacaaattgttgagttcgatgagccgaagacgctattag

SEQ ID NO: 10423 - DNA, 713 bp, Diabrotica virgifera
  SmartBlast Evalue=1E-75; Info=Apolipoprotein A-I-binding protein n=1 Tax=Camponotus floridanus RepID=E2AZ44_9HYME
agacatatcatttagtggtagtcaaacattaagaatggttaagttacttggacagaaagaagctcagtcaattgacttagaactttttaatggctattcattttctgttgatcagctaatggaattagctggcttaagctgtgcttcagctatagctaagagttatcaacacactgatattggtaataagtcgatactggtttgttgtgggcctggtaacaatggtggagatggtttagtttgtgcaagacatttagtactttttggatataaaccagttgtatactaccccaaagaaacaaaaaataatctctacaataatctcatcaagcaatgtcagttaatgaatatatctgtaattaagagtttaccagataaatccaactttgaatctgaatttggtattatagtggatgctttatttggatttagctttaagccacctgtaagagaagaatttataccagttgttagtctgatgaaggaaacaaaagtacctatagcaagcattgatatacctagtggatgggatgtaaattcaggacctcctgaagatggcgtcaaaccagacatgctcatttctcttactgcccccaaaatgtgtgccaaattttttgagggaaaatatcattacttaggaggaagatttgtacctccagccttagaagaaaagtacaatctacagctacctaaatatcctggtacagaatgtt

SEQ ID NO: 10424 - DNA, 712 bp, Diabrotica virgifera
  SmartBlast Evalue=2E-45; Info=Protein FAM102A (Fragment) n=1 Tax=Camponotus floridanus RepID=E1ZXC9_9HYME
gtccagagtctccgctactgctctgcctactatgcgaatgcgaatgaatactgctataaccggaagccttcgataattgactagtgttcgaagagttcctggagtgtcctggttcgcccagggcgatttcctgaggttcgtggtcaaggtgtggaagagccgaaggtagggacgatactggatgggattcgttggtagcgtcgggcgctatcgacacttgggcgttattttcggtaagggtttgacctattactaattctgaagaaagaagagctggtcgtttctttggtaaactaccaaaaccagagcttccgctagctatagaacctgctaaagaaccactagagaattcgtccgatctctgttctggccccgtttcttctacattgactggtttatgcttcagggacggagatggcgctttaaaaagtatgtcccccgaaatcatattcaactgtatcttgaacttcaacatactattgtcctgtcggtgcctagtgtcgtagccttccaacagagcctttttgtgtatcataccggcgccagcgtattcggcgagattcaaatcgacgaatcccaatttgttgaacgaccggccacctttcgattccttccttatggatatcctaaggacgcatcgttccatcactcctgtggatgcgttggccatcatcttacagggaaaggtgaagtttgcgttccaatgtacttt

SEQ ID NO: 10425 - DNA, 707 bp, Diabrotica virgifera
ggttaaatgttataattttttctactttggtattttcttttttgaatctactttggcagcgctgtgctgagaaagccctgcctgcgacatgaagtgggttgttagcgctatctcgctttgccggtgtatatcttctggcccgttttgaatgtataatggatacatgtctctttgtcgctctcattggagggcgcataccaaccatgagaaatttttcaatcggtatactttccctttaatttcattgattccaaacacctgagcaggctcttgtatgattttctccatctagtccacagctttactaaggatgttcgcataataacatcagttgaacacaattcagttcttttactttataatttaccagagacaaagattgaatagcagacaagatattatttcatgggaggtgccatctatcgtcggtttcatttccattattatattgtgaaatttccttcgctggtaggtttggtattgtcggtttgtgtcagtcagtgtttgacacatctccttcatatcgacgcaacttttataaatatgcatagttcacatagtgtctttatcatcatctagtcataaaagtttgtttctttctttatatttaagtcgggagtcatgcaataaagtcatctaggttgaatgtatcacgaattaagtgacgttgtgccttaggttttgtagagatatattgaaaacttgtt

SEQ ID NO: 10426 - DNA, 709 bp, Diabrotica virgifera
ttattacaggagaattcttatacaatttgaatgtttcgaaatatctttatatatttttataacaaaaactgcttttgcttaaaaaaatacgttatatttatgtatgtttctttttctttgtaatcgacaagttgctcattttaccctgtacattgattggcacgctaaaacaagtttttattataaacatatcctataaattatgttaaaatgcgatttcttgcttactgtgcttcattctttgctcggtggtttaaataatatgaagacttgctattcaactattcaaaacaatttggcagcagttttgtagcctagcgtgcgacgagaagaatatttttgacttcttgagtaattgacgccttaaataatatctcctaaagatggtaacatgtcagatgtcacgtacttatcaacggctctttggcacttcagtaacatacagcctcatttaaatctacagatgatggttgataattggttatcaaccaaatatcaattaaatatcggttttaagacgcttattgtttttatatttttatatagacatatggaaaaaacggtctaacaatgaacgtcaagaagacaaagtttatgagaatatcgaaaactcaaagaaataaggggaatctcttcataaacggatccaatatctaacgagtcaaacaatatgcataccttggaacaatgatcaacccacaggagattt

SEQ ID NO: 10427 - DNA, 710 bp, Diabrotica virgifera
  SmartBlast Evalue=4E-47; Info=Phosphatidylinositol-specific phospholipase C X domain-containing protein 1 n=1 Tax= Harpegnathos saltator RepID=E2BH78_9HYME
atcgtgacatatggactcaattagtttttggaattaggtatttggatttcaggataggatactatggagctgaaggatttttcctaaaccacgacaaattcaaaatccaggaagtccgaccgctattccgacagattcgaaaattcttggaagcttcaccggatgagatcgtgattttggatttccacaggtttccccacccctcccagttcccacctcatttgcatactcaattcatcgaaattgtgaatgaagatctgggagatttggcggtacctgtgttcaatggacgcaagggaccgacgttaaacgagatctgggctactaataagagtttgattgttgcttataataatcagcaggttgtggaagctgcaagagatcttaatttggtcgatagaaaaccctggctatggtatcccctttcccaattttgggcagataccaagtctctgccaaaactgaagaaatatatggagacgtccattgcggaacatgctcaaaccagacgcactaatcccttgtggtcactgatggcagaacttactccccaaccaatcgacatcgtttttaacacatacaatttaagaaaactggctcaagatactaacagagaaattactaaatggtttagagatgaatttggtaaagatagtaatatcgtagctaccgattatttcttgggtaatgacattattgacgttgctata

SEQ ID NO: 10428 - DNA, 713 bp, Diabrotica virgifera
  SmartBlast Evalue=1E-122; Info=Cytohesin-1 n=1 Tax=Camponotus floridanus RepID=E2B031_9HYME
gccgcgtggttctttgtcagtggtgtattcgaaataatacaggcagttgtcgtttaatataaaccaacgacgtttccagctcttgtaacggccaccctgtttccatagccagccttctttgtctggattgaagaaggtatgcattaagtcgttaccatcatcctctggaatcttgaaaggttcggctttgatgctgtcataaagactcactaacaattctctgggcaaatcttgcccttgattaatgcccctattcatattaataaattgttctatgctgggtttttccttaacgctaggattgtgcaaactcgtattgagcattataatggcgaatgaaaggacgtaacaggtatctgaattttcgaaaatgttattttcgccttgacattcacagtaacgtttagcgaaacattccatcatccggtcgatcttttgagcttcacctggtagacgaaaactccacaaaaattgtcttaaagcctgcactaaaattaaatcggtaaaatcgtgtaattcaacaaatgcttgtaaaacttgctcgttaaaatcgtttttttctcctaaataatcaccaatagcagtcttattcagcccttcgcccttatgtagaaactgggcaacgctttccgctgtattctgtaacagacctttctctatcaaatattcaatacccttcttgggatccatgttgaacttctttcgacctattg

SEQ ID NO: 10429 - DNA, 713 bp, Diabrotica virgifera
  SmartBlast Evalue=5E-87; Info=Xanthine dehydrogenase n=1 Tax= Harpegnathos saltator RepID=E2BWN6_9HYME
atcacataccagcttgcaaagtaatcggaataccgtgcaagacaaatctgccatccaacacagcttttcgaggattcgggtgtcctcagggtatgtttttggccgagaatattgcccaacatatagccgactatctcagaatagatccagtggtggttagtgaacttaatatgtaccatgaaggtgatataacctactataatcaaaaattggagaattgtacattgcgacaatgttggaaagaatgtatggagtcttccaattttcataagcgtagaagaaatattagggaatttaatagattaaataagtacaaaaagcgaggtattagtatcatcccaacaaagtatggcatttgctttacaggaacctacttaaaccaagctggtgttctagtcttaatttataccgatggatctgtattaatttctcacggaggtatagaaatgggccaaggtcttcacacgaaaatgattcaagttgctagccgagctttgggagtccccgttgagaatatccatattagtgagacagctaccgataaagtaccgaatacctctgctacagcagctagtactggatcagatttgaatggaatggccgtagtgaatgcctgtgataaattaaacgagcgattgaaaccttacaaagaggcgaatcctgaagcttcctgggaggatttgatcaaaactgcatacttagatagggtaagc

SEQ ID NO: 10430 - DNA, 695 bp, Diabrotica virgifera
aaaaaaattattacgtgccttcattattgatgtttgtcatttttaactaattacggatttttgttgtctcgtgctagtttttgctagctcacgataatcagcgtgatttgtaatatatttaattttacgtatgtacattgtacatatacagggtgccccagaagtagtagagcggtcgaatgtttcgcgaagtgaacatcggatcgaaagactgaaaaattcttgttcggtagatttcaaaaatctatcaaatgacgccgagcacgaccccccactccacccactggaggtggggtggggggtaactttaacacattgtctaccacgtcacccaaaattgactgacagaaattttttgctgtaggccgtgttggtcatatactcgtatgagtgacaacgttgtttcactgggggccacagacattttctaataaacttcatgggagaccacagcaaaaaaagaagatatatggaaaggtttttacgtctagattatcatgttttcaggaaaaaatgattgcatgataaaaaacattagttttgtttatttaaaaatcgtcacctaattgtgactgacgtggcctgcccgaaaacttattttggtagaggccatgtcatttgcattcacagctgcatagaacagctggttcaacaaatgttagacatagaaccaagagaagaacccatgaaaaaaa

SEQ ID NO: 10431 - DNA, 712 bp, Diabrotica virgifera
  SmartBlast Evalue=3E-31; Info=Huntingtin-interacting protein 1 n=1 Tax=Camponotus floridanus RepID=E2AE68_9HYME
tcaattttgtacacgagtccagaattttttcattaacttccaatttaataccagaatcagcagctctagatgtggtaagcatatcctgtattctatttgctgcttcttcgattgctttgtccatagcactcatctcatcttcaagcatatctactaaagtctcagccttttcgcctaacagggaagcacctatactgtctgctagagctgctaattcctctaatttttgtttggcttcattagctgtaggttcggagtcttcattttgttttaaggaagtaagaagttttaacactatttttcctaaatctttacatgcctgagtcactttttctccaaaagatatatcgggactcgtgttgcaagtagcccttccttgtaaaatatatgttgcatgtctatgtgcaattatgttcgccacagttacaatgctgacataatcattactcgtaatcttcgtactttcttctaatgagctcttgcatccatccgttaaacttcttaagtaatcggaagaacaggtaagtgcagtcaatgcaggattgtcaatctcgtcgattgcgtgcctgagaatatcttcgctactttctaacgatttagtaacaatttctttaatctttctctgtagatccgattgctctttggatagttgcctttccaggtccagaagtttgtatgataactcttcagagttcttctttaattcttcctt

SEQ ID NO: 10432 - DNA, 711 bp, Diabrotica virgifera
  SmartBlast Evalue=9E-43; Info=60S ribosomal protein L44 n=17 Tax=Neoptera RepID=RL44_AEDTR
attttaaatttcgcgctaaaccaaaactgacatttcaactttgatgtttgacagcttccgttttctccttctttaagttgacagttgttaagaaaaatacaaaatggttaacgtaccaaaacaacgtcgtacgttttgcaaaaaatgtaaagtccacaagccccataaggtaacccaatacaagaaatccaaagaacgtcatgcatcccagggtagaagacgttatgaccgtaaacaacaaggttttggtggacaaactaagccaattttccgtaaaaaggcaaagacaaccaaaaagatcgtattgaggatggaatgcagtgattgtaaatttagaaaacaaattccacttaagagatgcaaacattttgaacttggaggtgacaagaagcgtaaaggacagatgattcagttctaagttattaaaccttgtttttaagttaagacctcacaaaataaaccaagtttgtatataaattttgagtttttatttaccatccagtcaaattagtcacaagatagaagtgcttacaatacaattttgctgtttttgatttttcctatcataattagaagttaaatattcaataaagtttaatacagctcaaaaacaaaatttgtcaatttcctattaacttttaaatgttattaataaaaatataagagcaaatgtaaagttaatgtgtgcaacaattatttaaacaagttatt

SEQ ID NO: 10433 - DNA, 709 bp, Diabrotica virgifera
  SmartBlast Evalue=1E-25; Info=General transcription factor 3C polypeptide 3 n=1 Tax=Culex quinquefasciatus RepID=B0WFX5_CULQU
atatagcttttgtttttgtagtgttcctttgctacctccatactaagattaagaattatatcggcatgtttcttgtctatatgatttgccattgtttgcttcgcaacgatggcactctttgaatcacatttttgttctaacagttccaacctctttttgtgtaaaaagaaattagtaagattatacttgatacttcgagagtaacatttaattgcttcttctgtttctccatcttgtatgcacaattcagccaatctacaggtcgtagctatacttgtaggagcaaggtgactagccagcattagataagctttgtacttcttttggttgtggtttcgtacatctgtgataaagttaaatacggttcgtaggaatcaggtgcctgccttatgacttcgaagcacattttctttgctgtttccaaatctcctcgggcataacgtaggttggcctctcccatcagtccttttaagtgagctggtagtttgctgggatctttcttagatccttttttagtttttccatcttcttggtcattttcgtcctcagaataaaagtcttcctctattgttggaggtcctggatcctcttccataattttaaatactagaatttgagtagtacatttatttttatcttatctatgactgtaatactgtatagagaggaagagaggtgatttttgttatatattatttatctatgattt

SEQ ID NO: 10434 - DNA, 709 bp, Diabrotica virgifera
  SmartBlast Evalue=1E-102; Info=Disks large 1 tumor suppressor protein n=1 Tax=Camponotus floridanus RepID=E2AM49_9HYME
gggattttggggatcttatattagtttaaatagtggcgtcttcagtgcagccgttgtggacgagacggaagagtccatatgggtggggccaaaggtcacagtttctccttggccggtacccatatgtttggtcctgattgttccttaattacttctttgacttggttatatatgtcttcgggagtgtcgccttgcacaacagctgtgaagtactcgccgaattcttgttccatcttgattgctctttcaaaagtcttcttggcttgctcttctgtcattcttttattcatttccattatggattcgaccgattttggcttgacaaaaacagcgatgggatacaactgcgccacttgcagcctttttattgcattaccgctaacatccaggatacaatgtttacccttgtcagcgacttcacgtacagacgctacagaagttccatacaaattgtcattgtactgtcccgcttcaatgaatagatgattttgaatatctctttccatttgttccctggatgcgacgaagtggtagtctctaccgtccacttcatattcccgtttaggtcttgtggtatgtggtacacaacttccgaacttgtcaggaaactcagatatcaagtcatcattgatacgatcctttagaggacccagtacaataacaggtctcgtataattaatatgcaactgttggactggttcgtacgata

SEQ ID NO: 10435 - DNA, 712 bp, Diabrotica virgifera
ctcaaataagattcacattataaaaatatataaaatcaattaaatttctgattacctaatctagaatatttaagatattgtcatttacttcacaaatttttggaattataaggcagaaaccaaaatgttacttatatatttatttagtgtagtacttcatatttcttttgtgctttcagcggatttaactgtagaaaccacttatggaaatattgaaggttacctaagaacaagtccacatcatgttacatttagagcatttcaaggaattccctacgcgaaaccaccactaggcaatctacggtttcaggcacccgttcctcccgatagttggtctggtgtaatagaaactaaaatagatggatctcgatgttattcagtagctaaagatactccagacgaagatgaaaattgcttgtttattaatgtttatactccgattttaactaagagcaatgcaacccttctcccagtcatgttctacttattcggaggaggttttcgagacggtgcctcccaatataacgtctatggtcctgattaccttatagaacaagaagttcttatggtatcactgaactatagagtgggcccatttggatttttgtctactgcagatactgtcatacctggaaacgctggtttgaaagatcaagttttaggattgaaatgggtacagcaaaatattaagtcttttggaggagaccctgac

SEQ ID NO: 10436 - DNA, 713 bp, Diabrotica virgifera
ggcgcatcattttaatttcatttgcagtcaccagttgaacgttaccaaaatcaacgaagattactgagacatatccacaatccaaatcttccatatggtaaacttcacctcgataccaaagcttatcttcagggaactggcacacgcacggcattccagtttccagattttctatcacaggttgcaaatgtacagttttttgaatctcattgttcagaaactgcagctcttctgaaagtgtcgatatttcttttaaaactactttattgtatttgagtactgacaatatggagactggtacattttctataccgtcaggaagaggacgaatagtgtatttatacttcgttgtatctactgattgattaccagcaaccagtacattttctgctcctttgtctaacccatcttcatcttcaatgataggttcatcatcttcaatcaatatgtcgtcatcctcggactggttttgattattcgggagttttctagtcaaattggcacaaagctgtaccaaaagttgattaaggtttatttccttatcagtaaaaacttcagctgtgggaatttcgtcatccagagaacttttgataatgattttgctatattctgtcacattatccatgagcgtctggtaatctgaatcgagccattctccagttttagcatatatcttgtctagtttaatcttagaagcaaaagcgggaatctcg

SEQ ID NO: 10437 - DNA, 713 bp, Diabrotica virgifera
  SmartBlast Evalue=4E-57; Info=Heat shock protein 1 n=1 Tax= Lonomia obliqua RepID=Q5MGP0_LONON
ttttaatttattatttaattttgttagtttaaagaatataataaataaaaattaaattaataatatcagccttattagtcaagatctcttagttcacttgtggttggggttggggagactctacaacgggtgttacagtgctcttggcgggtccagtttgtgtgataggtactaccctttccgaagctacaggtttttcgcttttctttggtgcgcttactgtcaaaacaccatctgaagacaatgaggaaaccacgttttcggcatcgtgggtttgtggaagaacgtatcgtctgacaaagtgtctcattatatatccatgttcgtcttgtttttcttcgtgtttaccttctaccaagatgctgttgccgttggtttttacagtgatttcgttaggagcgaattgttggacgtctaaaataacctgaaatttattctggtcttgtgtaatggttgagccggaatcttgtctttgtagggcagtggatgtagcccatggtctaatatatctggacgacaatgcagatcttctgggtatatctcttatcgagttaagaagatcatctcttcttaatcccaaaccgaattgttggtcgagaagtctggaaggacgcatgaggtcttcttcatcccaccagtcacggaaaagaagtggaaccatggacatcttgatggtttttgttcttcagttgcagcttaccacagcaaagcta

SEQ ID NO: 10438 - DNA, 712 bp, Diabrotica virgifera
  SmartBlast Evalue=1E-85; Info=Nucleotide-binding protein 2 n=2 Tax=Formicidae RepID=E2ATX4_9HYME
gcaactctccaacttttggatcgattggcagggtacccaataatgtaatttccgtaagttccgctagggattcccctccacctttactgaatatattcgtacaatcatgacaatgtggacaaacgaacccactcatattttcaataagtcctaatatcggaattccagtttttttacaaaatgttatttcttttctaacatcttcaatggagacttgctgcggagtagttactataatagcaccgtcacatttaagtgttttcaaactctccattactgttatatgttcatctgaggttcctggaggtgtatcaataatcaaataatcaagatctccccagcagacgtcagtcaaaaattgtttgaccatcgcagtcttctttggacctctccatactacagaactatttctgtcatttagaaggaatcctattgacataacggctaggttttggttctcgtcaaaaaacactggaatccatccttcatttgcttgatgaacatcttttccttcaagtttcaataaataaggaacacttggaccgcataaatctacatctaataaaccaactttgtagcctttttctgctaaaattagacttaattgggtactaactgttgatttcccaactccaccttttccagaaaggactagtattacgtgttttacactatctaacattttgaaaacaaccacaacacaaccacaacc

SEQ ID NO: 10439 - DNA, 705 bp, Diabrotica virgifera
tttttttaatcaggttgcaaaaatcaatatttttgaccggaacaattttttttgcgttttttggaccattctggatagaaggggtctcttataatttttctctgaagttgatcgttttcgaggtagaagcattttaaaattgaaaaaaacgaaaatggcgattttcaaggcttaatagctcggttaaaagttattactgtgaaagtcggaaagtgattaaatgaaagtttaaagcccccctacaagatcctgagaaatttttgtcattacttggttactgggctgttatttttaagtaaaaataatgagcgccatgcacgttttaggcggccgtccatgatgagtgcgaatgagatgccatttaggcagtccaatggcgcatctcactcgcactcacatttacagccgcgtcaatacgatgttacccctcattattaataattaataataacagcttagtaatggattaatgacacaaattccttcaggatcatgaagggggggctttaaatttgatttagtaactttctgactttcatgataatcatttttggccgagttgttgagtcttgaaaatggcgattttcgcgtttttcaaattttgaattgcttatagctcgaacatgatcgactttggagaggaattgtaagggaccttttctgtccggaatggtccgaaaaatctaaaaaacatttctctgggag

SEQ ID NO: 10440 - DNA, 712 bp, Diabrotica virgifera
gtccgcaaatggataaattgactaattctgggcagctttcgttctacagatttttttatttaggtcaatacttttcaagttgttgttgtttatttttcgccagaaaaatcacgttttcaggcggtttttcgcaaataattcaaaaagtaaatattttatcgacaaaaattgtcttagaaaaatgtagcttataaaaaatcgaaaaaaatggagtattaataaattctataaacccagtaaaagttgtagctcatgaaatatacattctttttcgtcaaatttcacatcgaatacttgaacgtcaaataaccaaaaaagtttgaccggttcgaagtgcttattttgaaaaaaaaaaaatggttttatagttaaaaaaaattatagttttctaaaaattttggaaaatgttgttttttttttatcaaaataacttaaaagtattagtgatacgaaaaatgtaggttttacttttataaatatgctagtttcattccttcttttttttcaaataaaaatttgttaagatatggcctttcaaagtttgcattcactcgtgattagtaactcgtccaagtcttttcatctatacctctttccaaaataagcactttaaactagtgaagcttgcaaattatataaaaattacataagtaaagtaaattctttgtaaagcggtaacggttaatttcatttagagtgctaaataggggga

SEQ ID NO: 10441 - DNA, 711 bp, Diabrotica virgifera
  SmartBlast Evalue=3E-31; Info=Hematopoietic signal peptide- containing membrane domain-containing 1 n=1 Tax=Culex quinquefasciatus RepID=B0WHI3_CULQU
aaacattgtcaaagtcaaatgatgaattaaaaatccaatgtaaattttatatttgataaaatacgaaatattaaataccaaaactatgattgcatttaccagactagtatttgtagccttaattatagccactacatcagcaagcaccttagaacatgatggatcagtaaccattcgtcttcaacactctttaactttccaaaaccctcctgtttggactgaaagaggaaacataaccatagtgagtttgaggctagggcaggccacagtggaccaaaagccccttttgccagaagaaaagaaactgttaagggacttgtctgcaaaaaatagctactatcagatcaaagccatagttacagcaaatgatggatcacagaagtcttttatatccacattaaaagcttgtatgttggcagaatctgagctagatgatagactctccgtttctattgactatatgggtagagtagtaggtgtgagctcagtcatagcgtccaattctgcttgtgaaggggctatagttccattagaaaatcttaaacaattcaatactgttgtatatgttaggcatacagaaacaggacccatccctgacacttcaagctatgtccagaaattggaaaaagagaaagaagccaaggaaaagggtgaaaccaaagacaatagatcatttttagcaaaatattggatgtacatagtacctttgtt

SEQ ID NO: 10442 - DNA, 711 bp, Diabrotica virgifera
cgttttgcatgagatcgaatcgattaagatacagcttggcaacactgtgagttctttaaacaatgatgaataagtgacttagttcctgttttttgttggaatatttttggaattgcaggtaaaagtgctacttggctgacttagtctacattcaatcaataaaacacgaaatttacagtattagtttgcctcgctgttcttggtatcgtttctataccttgtttcacgttaagaagaaatgttgcgtttatgaagattagtgttgccaaacctctagggtacgggtggctactcgactgcctatatacgattcattctaatcagtacggcgtggtatcggcgcgcttctatcgtccataagaaatacattggcctatctaagcaactttctatttttaacgtgaaattctgtatagataaataaatgcgcacttgacagacacaaaaattctttatatacttttactcttcaatatcagaagtttgtcatataatccgagaactgcacaaggtcgactgcatactacgtacgtgaaaactgagttacatatatgtaaatacttttcaacgagcatggctaattatttaagaaatgttctaaagctttcagtactaagtacatgtgtatataaaaatatgcttcacgaaaatgaagccaaccttgttgaacaaaccttttcattcttcattctatatcgaaactcgtcatcg

SEQ ID NO: 10443 - DNA, 712 bp, Diabrotica virgifera
ttgaaaaaactaatatttttgattcggattattacaagagaactgacaactttatcattaaaaagagtacctaaataattgtactttctcgcttttctcactcgttagaagcatagatttggttttgtttatgtttagtgtagtccatattcctcactatcttccatgactgtattgatacgcgcctgtaggtatttgaagtgttccgactatcatcactgtatcatctgcatatctcagattgttaactcggcttccgttaattttaacgctatatatattcttgaccactcaatgttttattcattcctccgagttcatattgaacaggattgcgaaagcacacaactctgacgaaatcccttctgtgtttctatattttcagttgaattttcttctttttgtactaattttagagttctcgaagtctagagttttcctgtatcatttatctgattactttcacattgattatcgtaaatgagccataataaataaatatccacaaggaaaaagttttcctgtagttggctgtataccatgtaatacaaaaagcaataaagtcctttataaaaggtatatatttaaaatccctaaaaagggctacatcacagaactagttttcgattggttgaccaatcatcatcagtgcttacgtgaaatttacatgctaaccccaagatatattttacaaaatatgtgggtcagggcc

SEQ ID NO: 10444 - DNA, 705 bp, Diabrotica virgifera
  SmartBlast Evalue=1E-22; Info=Retrotransposable element Tf2 155 kDa protein type 1 (Fragment) n=1 Tax=Camponotus floridanus RepID=E2AX00_9HYME
gggtgtttatcttgaattttagagattagtttaatgaaatcacctgtcgtctgatttttggaagtaactgcaaatgcatatctggtaaaatgatctacaagtaagtggaggtatttttttgttgaacgattgccagcaaatcctcctattgtatctagggacattatctcgaaaggttcttttgccggacctaattgtgacaagagaccatattttggacctactcttgttttatttttacagcagatctcgcatttctggcagatatcttttgccagtaaatccaaattcttaatgtagtaaaaattcctaatttagttaattactttaccagcacaaatatgaccataaaatttgtgaatttttgttattaactccactccaaaatctttagataatattattttttctggttcttccttaatttatagaatacatcttggttggaaattgttcctatcattttatctatagcttgtcgattattattctggtcttgttttatctcagttaatgtcactaggttcactgtttttataaatgtttctgcattttctatattttccaaaactgggtttctagaaaggcagtctgcttctacattttcttttccaggttcatatttaatgtcgaaatcaaattgtgaaagaaaatgagtcatatctcctaacttcttcatctggtcttgtacgaagttctcttccc

SEQ ID NO: 10445 - DNA, 710 bp, Diabrotica virgifera
  SmartBlast Evalue=3E-31; Info=Vitellogenin n=1 Tax=Anthonomus grandis RepID=VIT_ANTGR
ggaggatacccttaccggtaaaactgaaactttgtaccttatcagacctttaccagaccaagtagtgcaaagaaaatctagtgaagctaaatacttagatgctgctgaaaacgatgatgttattgagattgttaaacataaaaattacagcaatgccgaggaattacctgcctactcatatggatttgccaaacttagatacggagagccagctgataatcaaatgggagacatcttgaccagagatacatattcccgtgttattgtgactggaagcttagacaagttcacaattcagaaaacttttaccattcacaaagccttcgtaagtctaactctaagcgacaatgataaggcctctgttgtgtcagaagtaagagctacattggaagaaataaaatctcaagagcaaaccattgatgaagtacctcaaccggttaatgtaggaaaccttgtgtattcttacggaaaaccatctgctcttacaggagcatctgcatcaagaagatctagttcaaacgctcatagatacgatcaagacgattttaggagaaataacattagagatcgtcgtctcttcaattttcttctgaagaatcttcaatagaatctgcagaagaatctgcaagagataacatgcaagaacaaccggacttaaaagaagcttctccacgcccattcttgccttacactgtaggatacgaaggaat

SEQ ID NO: 10446 - DNA, 709 bp, Diabrotica virgifera
  SmartBlast Evalue=4E-23; Info=Endonuclease-reverse transcriptase n=1 Tax=Bombyx mori RepID=D7F170_BOMMO
gaactcttcttttatctatctttacgtaggtatttatatcaaatgacaattttacgattttaatagtttcctacactaagtttcaatgcaaatcgttgctaacattctaagaaatagaatgaaaatgaaagtaagatattcgaagagattttccgtccacaattgcggaatccaactttgtgaagagtgactaaacacatccgtatcccgcagtggatactggaaggttttggtgcagagttatgtttcaagatggtatacttttagaataaatctcatatcatcatcatcaccaatttcgcactcctaacattcgcaagtcgtctttcacctggtccttaaatcgtgttctgggcctgctttttcttctcactccatccggtctctagatataaatgtatgtcgatggttccacctcattcattctctctaagtggcctagccaccagagcctgtttattttgatagatctaccaatactaggctccctataaaggcagtaaagctcaaaattatagtatctatgccataatccattttcctgcacgcctttataaatatgcctgaggatgttcgttcaaaactgcctcaccgttcttcaccagtttttgttttcgtccacgtttctgacacataagtaacgactggtttgattagagttctatatatcaatatttttgttctttttgtaactatgttcgatgttaaa

SEQ ID NO: 10447 - DNA, 710 bp, Diabrotica virgifera
agtatttatgaattaacttttagtacttttaattactttccccattccttttggaaagaggaaagtttaaacaatgacattttagttattgctgcataaatttgttttaacaatatgaaataggggttttgccaattctgtggcattcctcatgcaatttcgttctagcttgcttgttacacatgattccattgtccctattttattgcatttttgccgtactttatctacttgataaaatggaacagttatccccagacttcgagaacaatctgttaaaattcgggataaaccttgacgacaactatggtatctgttctttaaaagactagtcattgcctcagcgtcgtgagcacaaacatagttgataatttctgcatcgatttttttccaaacttccagccctctgagatcatcggcattaacacattcttttatcagatctaaccaaagatctagacaatcgtctaaatgtggtttcattgcacatcgtttttttaaaaactcagctattgaaccacttggtctcatgagcgtttgggaaaatgcataggcaccttctctcctgttaaggcactcatttagtagtaattgttttgcctgtactttttctggtgtacacacatcgtcattatagttagctatttcacaataatatatgctatgtgagagccctaataaaataaagtatggtaactgtgtcatttttt

SEQ ID NO: 10448 - DNA, 709 bp, Diabrotica virgifera
  SmartBlast Evalue=2E-85; Info=THO complex subunit 2 n=1 Tax= Culex quinquefasciatus RepID=B0XJB9_CULQU
gatcgaacacgtggagaaagtgatgtacaggttgaaacaagaaaaagacaactggttcttgtctcttgcgaaaactgccaaaaatgaaactatcacgaggttcctgcagttgtgcgtctttcccaggtgcacctttacccagatagatgcagtattttgtgcaaaattcgtacacactattcaccttctgaagactccaaatttttctacgttactcttttacgacaggctattctgcgatgtaacttattcagtaacttcttgtaccgagaacgaggctatgcgatacggacggtttctgttcgccatgctggaaactgtaatgaaatggcacaaatccaaggagaccttcgagaaagaatgcgccaactacccgggattcgtgacgaaatacaggaagaacaaccagcacgctgacaatctagacaacgtagactacgagaactaccgccacgtctgtcacaagtggcactataagctagccaaggcaatggttacctgtctcgagtccaaagagtacgttcaaataaggaattcgttgataatactgatcaaaatcatccatcattttccgctcttgatcaaactgagccagttcatcgaaaaaaggattgagaaagtgagagacgaagagaaaaaacaacaggcaggatctctatactttgtccgttagttacttgggattgctcaagcagaggaattctgctgg

SEQ ID NO: 10449 - DNA, 703 bp, Diabrotica virgifera
ccagagagtagttaagaaaggaagtctgctatttatcaacccatcactaacagaaagtacagtagtaaggtaattcatttttcattgttgactactattattacatcaatgaccttaccaaagcggttagtaaaaatgaactcttgaatgatcttgcagtgggtctaaataaatttgttgcaagtcattttttgagtttccctatgcaatcctatataattgtttcttaaacattgtttaatcaaaaatgtcctttttgtaaaagaaaacatcaaacaaataaaatctgatacacttttcgattaaagcaaaattcaacaagggaatatctgtaaccttataaaaaactcgcatctttaagtactcaagtaattgttaaaattatttacaggtgtttttctcactaaaaataattaaatctaatcatagaaaatcttgattttttcaatatacagagctaaccaaagatagcaatcaaaaagtagtcatgtgtttcaaattgattgaaattttaaaatactactattacaagatttagaatgatgttcatttaacacttggacaagtactttatttgttttatcgattactaaaacgcttttgacaatgtgaaagatgtgttaataaaagcattaagggagattcgtctcaatgggaaagatatgaggatgatccaacaggtgtattggactcaaaaggcaga

SEQ ID NO: 10450 - DNA, 712 bp, Diabrotica virgifera
  SmartBlast Evalue=1E-11; Info=Protease inhibitor 1 n=1 Tax= Bombyx mori RepID=Q2F5I4_BOMMO
caacaatctcatatcaaaacaaaactactgcaaaatgaaatgtttgtgcatctttgtcgtggcaatcgccgttttgggtgtaagttgcttaccttcgagacaacgacgccagttcgattgggcagagtgggaaactaacgccaatcaggttagaaataggaatataaacaggaatataagacaatcatggaatcaacaaggaggaagacaaattccaacaaattcatggaatccaaatggtcccgacttctcagatccagattttaatcaagatccaaatgtgaatatccaaataccaagtatccagatacctaataaccaactccctgtcgataatggtgttactccagatggatccactactactacagcctcgccagcttatacaagatgctttgcgaactgccgaactaccagtgaatataatcctgtttgtggtactgatggaaacaattacgacaaccctcagagacttaattgtgccagaagttgtggaagaaatgtacaactacgaagaggaggaacctgtcaaccgttgtaaggatcaaactccacgaatgaataattttcaggactgattatatttattatatttattccataacaattttaccccattgaccttctagatgattttgcttaaattagtgtcaataatgatgtgatatttatttaaaaaagaatagttaatttatttatgacgcttttttga

SEQ ID NO: 10451 - DNA, 701 bp, Diabrotica virgifera
aatttaagtgttgccttggaattgcagcaaaaccaaaaaagtttagcaacttattagtgcatcagcaacagatgaatgtaaatgcaaatgtaaaaccaacatcaaaaaggtacaactttatatatccattcacctatttcggagtatcaatcaaagcatgattcaaaacatatcaaacaaaactttgcagacaatgccaatttttggaatcactatgaattggtactatagtaggttacatagttgaagtgaagtatgatgataataaactaagaaaccagaggacaataaaaagtttatcgatataaatggatgctgtaaacagcgtaaacggtatcaactatccataatattttaataatagtcagctatgtaccagaaagcgcacgcgagatgttgacgtggttggaaacattttgagctgagtgaagttaggatacgacccatatcttagatatgctctgctatgcgttactaatgatatactatgactaatgaatgttcacaagcccttgtcgctaccatgccattcgaggccaatttatttaagctttgaatgatattcctcatctttacttacacttaataaaataaatgaagtaaaagacagacgcactcgcaatcattcattgcaacttccgacgaccggcttcgctctccaaagtatgtggagcatcttcaggtcaacggccacaagtcat

SEQ ID NO: 10452 - DNA, 711 bp, Diabrotica virgifera
  SmartBlast Evalue=1E-25; Info=Proteasome formation inhibitor PI31 n=1 Tax=Glossina morsitans morsitans RepID=D3TQ73_GLOMM
ggaagttttgttacaagttttgttttggttgatttgattgagtaaattttttgtgagatataaaacatttaaaatggcccaatctctatttggttgggatctgctgtatagcagtgttgaaaaagatatacaaaataaccaggatatcttagtttgcctaactcatcttgtcctagtctcaaatggttttagatgtgttggtttgggtgagtctaaggtgttggatggtgacgaaaaaaagtccgaatcgctaccaaagcattggaacgaggatcaaaacaattattccataagatatgtatatcaaggaaaactgtacctcttaaaagcaaccaacctagatgatgcactaatggttaacttaatcagagtcgatgaacggaccgtgtcatttttacagttaaacaaacgagatgttgccactaagtcaggcagtttagataacatgattccgaagcacaaggatattgttgatcaaataaaaactcaacttattgataaagttatagtttccaccaaatcaaaagagactggtgttcagactgaatgtcaaagtactagagacagagacagaagtactggattattaaactcaccagatcacagaacagagagaattgattttccgtatagagctccagcatatggacaagatgatttaaatcccctgggcataggaccattgcctcgaatacctcttggcggtggtgg

SEQ ID NO: 10453 - DNA, 711 bp, Diabrotica virgifera
  SmartBlast Evalue=6E-36; Info=Afadin n=1 Tax=Harpegnathos saltator RepID=E2BUW6_9HYME
agactgatggaggttgttaggtcgggaagttattgaagaggctggaggataatatgccgaagaagggcgctgggagttggcgatggatgagtgaagtgagttctgtgagctgcgaagagctgaagttctatctcccaattgttgaggactgggaattttattcctgtaaacgcttaagttctgataaaaccctccgtcctgttgatgcaaattgtgcgtggatctactccgcaaggccgtattggcagctactgatcctccgttcattagtacttgcccattttgattattgttaatgctgttgtttgaggaagttcgactgtatacatctgaagctgaagcctgatttggccttaaaggttgttgttcattaacgaggggggaatggatttggtgaagggcgggaacagatttggaagaggggatcgaacgttcagaatctaccctagatggcaggtcgcgctccgacatccgtcttggacctcgatgtggtgttgggctgggttgttgtaacaacgtagctagaccatgataaaccgctccggcctttgccacctccaatgtgacaatgctagtagtcctctgaagaaactcagcggctttttcctgtgtaattccaagcaaagactgtccgtcaaccgagagcaattgatcgcccgcagctaaacgcccgtctctatcagcagcaccgccaggtaccaccgacttgat

SEQ ID NO: 10454 - DNA, 705 bp, Diabrotica virgifera
ccctattgtagtcaaaataaattaatctcaagatatcaagaaatgaaatcctcacgtatacagggagattcattaagaatgtccaatctcagagttgtagattctacacctcaaaatattatgattccgcccaaagtgccttatacaaacaaccaatttaaatggacatgaattactacagtatatacctcgtaccttaagccaaagcatgtggtttggttggaatggtcgtggaagtgagtttgcttggccaccaaggagtcctgatttcaatcctttggattctttaatttggtcgcaaatgcaggcaatttacaaaaaaagaattaattttttagaattgtgacagaaaaaggaagaagccacaaatgtgattaaaaataatagtcatgggttatatgatttaaaagatctttgcgaaaccggatcataaagtttattgaagtaaatggtggacattttgaagatttccataaaattaaaattcattgggctttttagaaccaaataacttgataaccgatcgaattacatgaatcaaacaaaactaacttttttagaagtataatttaacggtcttcatatttttttattattttacccatagaaaattaaaattcatatttaaactttaaacactacttagatatttcggaaactagcaatatttgtataaggcacgttgggcagaatcaatatattttc

SEQ ID NO: 10455 - DNA, 710 bp, Diabrotica virgifera
  SmartBlast Evalue=1E-24; Info="DNA-directed RNA polymerase, mitochondrial n=1 Tax=Culex quinquefasciatus RepID=B0W1Q8_CULQU"
aagagttgctaaatctctgttgaaggctttaagggcctcttcttcccacattttatagtgttctgctaaggaattgcgatgcctttctacttcgtcacttacttcagctttgctaacaatactttggatcgtgacatatccatctttttccatgcgaatctgcttgtcaattcgatccgtaagagttgaagaagtaaaaagtccaccagattcgttatcggctgtaacgaatggctgttcttgctccgaattatttaaatgattgactaacggattgttatacaaaaccctggggtgattatacttcggctggtactttggatcaatatgatgtatcgcttttaaaaccaggtctctctcattatttaaaaatactccttcattcattatattatcaaaagtgatgccttgtgcagaagcttgtttcacaaacttccctaactccttttgataactttcaaaattatttctactaatgcattcaaaaatagctgcatagctatgaacgttcaagctaatgtgctcttcctgcatgatgtctaaaacttctttgattttatgaaaatcgcctttgtgtgcaaaagctctcaagagagtattgtaaactttcttgctttttattggtatataatttttactattgatttttctactcttaaccctatgaaagttaagagcacctaaaccacgctggggattctttaaatgtc

SEQ ID NO: 10456 - DNA, 707 bp, Diabrotica virgifera
  SmartBlast Evalue=5E-44; Info=Short-chain dehydrogenase n=1 Tax= Aedes aegypti RepID=Q17JY1_AEDAE
cggtttcagcaatagaattaaacatatctgtatccacagggccaggactataattaagaacaattatatttggttcctccagagctaatactttaaagaatatttctcgtgcagcttttcctgatccatacatacttagattcttgaatgggacacgcccaacaagagaggtaatattgatgacgactaattgtggtgcgactggtctaagatgtttaacgaagacattgtttaataaaactgttgaaaacaaattcagatcataatactctctccaaacagccaattctgataaatccgttgtctgtttaacagttccaacatgcccagcattgtgaaaaactattccagttttgatatctttggtatctgtgttgcttaataccttcttgaaaagatcattgtattggttaatatctggtttagacaaatctaatgtaactgtttccacatgaattgatttatctatttctccaatttgagctttagtttcatccaggccattttgggaacgagctattaaaactattatagaactctgttccaattttctggatacttcaatagcgattgttctacctatccctttggaggctcctgtgatgaagactatagattttttagaaaaatctatgatagtattagaagtcatgacttttaatcagtaattaaatagcaatatgttaattttcatcagtaaaaaacca

SEQ ID NO: 10457 - DNA, 695 bp, Diabrotica virgifera
tgaatgccaatatctatccaggaccacaggtgaatccttcagcaatatgtaaacttccaatgctgttatataatgagcaaaacgatggtatatattgtctagtagtggattgttagtaaatttatcttttaaagtttctactgtgcttgaaggcgaatgggattgtacaccattgatcttcttcgataaaccactcacaagagttgattttcctgatcctgctaatccttcgagaactattaaaggatggttctttctatagtttcttcgttgaaactcagcatttttgtccttcgctctttgatataaccttaaaagtccttgtacgccttcatgatcactgaactgaggaagacgcagtatagttaacattgaatctgcatctggatagatgagaggaaaaggtgttttaatagaatcattgttttgtgcttcaactttaggtgcaggacatcctctatctgttacaaaacctgtcgtctgtagcaccacgaaactcaatacaacaaatatcacaaatacgctcattttcaaagaactaaactgcttcagttttatcatcatctgaacacaaccgaagttaaataagaaaatgaataaagaaacatctaatgaaatattggataaagagttagttttgaaatagtacattatcaaaattaatagttagtgataaagctcagtgtgtttatgtg

SEQ ID NO: 10458 - DNA, 702 bp, Diabrotica virgifera
  SmartBlast Evalue=2E-30; Info=Endonuclease-reverse transcriptase n=1 Tax=Bombyx mori RepID=D5LB38_BOMMO
cctcatgaaaaaaagcatatcaatacttactaagtacctactactattttaattttttctgtgttttgtgtaccaccgccaataatgatatgtaccaccagtggtacatgtaccacaggttgagaacctctgccttaaagacattcttataatggcaacactgccaaacaccttcttcttcttgtggtgctttcgcctttagtggaggttagcgactacactgacaaatatatctctgtccaatgtggctcttaacaaagatgttgaatcaaggacgctccagtctctgatatttctaatcctgatctgatgtctactgggaccccgttttccttcaatcttaccctggatgatcagttccgcgagggggtagttttcgtttttcattatgtgtcaaaggtagttaactattttaactttaataatctttagtagttccctatctgtacctattcccctcagaacattttcgtttgtggtgagggttgtccaaggtattttcaagattcttctataaagccaaagtgcaaagatttctaacttgttaatcagtgttatgttgaatgtccatgcctccgttccatacaaaagtattgaccacacatagccatgcagaaaacgacatctaatgctgatattaatactactgttacaaaataatcttttcattttgataaacccttgtcgggctacgtctattct

SEQ ID NO: 10459 - DNA, 710 bp, Diabrotica virgifera
  SmartBlast Evalue=3E-23; Info="Major epididymal secretory protein HE1, putative (Fragment) n=1 Tax=Ixodes scapularis RepID=B7P1A9_IXOSC"
aatagtcatctgtgcgcgttgctggacggaaactgctctccagaattaaaaataatgattttataaggatataaatactttgttccggtgaccacttacatattgtatttgtttctctaattgttgcaggtttttatcttgaaaccgaatccaaaacaacatgcattacaaaattttcatagttttcgttgcgttgctcggtgcctgtgtagctactgatacggtgaattggtctgattgtggatcaacagctggtgaggtaaaatctgttgttgtagctaattgccattctgacagatgtatcttaaaaaggggaacgaatgcaacattggccattacatttgattcaaaagtcagctcaaaaaacctaaccgcagtagtatatggtgacgttttgggttacaagaccaaattccccctaccaaattcaaacgcatgtaaaggagtaggagtggagtgccctctagaagaaggaaaaacctatgtatatactgatacctttgacgtaaaacaagtatatcctagggtgattgttgagatttggtgggaactcataactgacactggagacaaagcagtatgtgtcatcataccagcaaagataaattaaatgtatttatatttttagtctaagaaataagtacctataaattctctcaatgttaccttcatatcatttctcgaataaactttaaaaatatttaaaaaaa

SEQ ID NO: 10460 - DNA, 703 bp, Diabrotica virgifera
ggaataaaagatgttcttaaattcgattgtgcttatcagcataaaggttgcaagttcgcagtcaacaagcaagataaagaaaatcacgaaagagagtgtaaatttaggaagtttacctgcgagggaaagagatttgcaaagtggtcatgcaattggtccggtgattattcagaaatttatcaacattttaagagagatcataaagataataccaggctagagtttaaaactgatgcagtgatgaaagttagcctaaaaaccagcttcaataatgtctatctaatatctttattcagtggacaaagttatttatactgcaagcaccgagttgacacatcgaataaaaaaatatacttccattttcaattcataggactaaagagtcaagcacaacactattactacgaatttgaagtttacaaaggcactagaaagtttaaaattactgaaatatgcacaagcgacacatcaaacattgatataacgtctgaagaaaaatgcttcgtaatgtcttttattgctgtaaaaaattatttgaacgaagagggagagctcccttttaaatttagggttatgtccactaagaaaacgtctgtgtaattttcagtttttcatgtgacgaatgtgccattttagaattcgtatacatattcttttcgcactgttataaaattattgaggtcctaaaataaacgagaaaaga

SEQ ID NO: 10461 - DNA, 709 bp, Diabrotica virgifera
atagggtagactttgtttcttgggctattccctacttactgtgaaaatatcacgtaaatcgatatagtaggatggaattcggagccacataccctcattgactgcccatagtatgttgccttctgcgtttattctcatggatttggttttataacgtttatttagatattagactaactatggtgatatccgatttccaatagtaggtgcctagtggcaccacaaaaagatgaaatgacattaatattttttaattgatatcatctgtgttgatatttagctaaaaagttgtggttgtcttttcacataaagcaagcacaatcaatctcgaattttcatagcgttaacttttgttctgctttaaacacatttcaagccatttattttttgtaagcatgagatatttgacagaataatagtttctgaagatggactaaaaatatttatattatcaaaatatattgaaaactgtgaacagcaaaacgtctttatcgtataaggagtttatttaaatttttaaattatatttctgtatatgcttataggtactctagttcttaatataccttaatatcttgtagtaaatataattttcatttaggtattaatttatcctctctagaatcatcgaagaaactatttttctgtatatttaatatatcagtaaattaaaatgtttgtccaactcttagacaatcagtcgtagaaa

SEQ ID NO: 10462 - DNA, 706 bp, Diabrotica virgifera
tgacagttgagatttttggggcgaccctccatttggacattcattaaatctgcagtggtgccaacagtaaaaaacttcgtatctgttctactttatattaaagtttgtcggtctctttatttcctgttaattgtgcatttattgttttaacatgcgtaagtgtagataattagaaattaaacattttttgaaaatagaacattttaattttaaatcccgatatcggtcctgttaaataaaactataaatttcaaaatatatcgcccttacatcggtttattgttttcgcccattttacatcattaaattgtgagagccatgaattattcacgtctgtctgtccgtccgtaaatacaactcctccgttataagaacatataaaatgacaaatgaagtgtcgaatgagagcgtataacccaaagattgtactaaatgtgagaaatttgacctgggacttaaggttttagagttgcaacaagaagtaccgttttacggtcgccgaggtagtacaagcgatgtattattcgactcgtcttagcaagccgagaacaagtatatgcttcctgtttttatatcacttctggttaacaagtgctaatcggaagtgccacaatataatcgcagaagtagtacatgcgatatatcaagcgacgggtatggtaaaatcgagttcgaattagttccggttgtgatgtcatttccgttg

SEQ ID NO: 10463 - DNA, 704 bp, Diabrotica virgifera
tatacataaatatttacaaaatcaccaaataaggttaattttaaataaattacagaagtaatacatgcaagtaaagcatttaaaaatctcaactgggactttccaaaaataacctacaacgttctctttaaatagacgatgacgtcacaactcaaccgtgccacgttgacaaatcgttcaattttcgtcgtggcatggaaaaacatttgttgatcattaagaaacttgtttcatcgtctatttacaataaataagatgtaagagcggtgttgcttatacggttatatcattgttcgtatttccaacaccgattcaaaagacaaggtatttttcttactgaaaatggtaaccgtcaaatttatattgacaggaaaagctgtatgaccgagggagagattgtttatacgaacacgataactatctttcgactacgacgatttattcgcctttattaaggatttattgagaaattcacaccgagaatcatccgagaatgcagtacggctaagatagggcaatacatttctaatggggaataaacgcacagtgttgtcggtcttcaccagttgtgtctctcaagagtgtcgcacaggaactgtggcaacactgaatgcgcattcctatctcaaccgtactgcaatcccagtgtgaatttcacgttagacacactattctactatagataataagtctggctactgcat

SEQ ID NO: 10464 - DNA, 709 bp, Diabrotica virgifera
ttggtagtactaatggtggtgaaagagagtcaaggattgccatgaagataatatatggcattacttaaatagcacaggacagttttggtttcaggatattttctttttggaattgaaccacattaccaaattacacaatattgatataatagtttactacatagatggcttgtttgactagattcaatttgaaaattataaatttcctctcacactcgaaaaaaggattaataatataccacgtgttgtgtaattcatctttgtataaaatatttgtatttttgttctaaaaatttgtcatattatttatttgccatattttcagcagctcataatgatttaccttgtatagtgtaaggttttatttgaaacattaattggaaacattctaaatgctgcgaaaatataagaaaagcggcagtttttacattatttaattaaattatttatttatgttcagttagtttataaatgattcaatttgtttttgttttcgggtttaatccgaatgtatagcttattataaactgagggtgacgtaacttttgacagctcttttatttatattgatttggttggtagtactgtcaagaaaaccgtccatctaatacaactcttacaggaaaaatctagactaaacaaaagatattaacaatatttcaaatatctactatgatcaacaaacagtagtacatatataacagcagac

SEQ ID NO: 10465 - DNA, 710 bp, Diabrotica virgifera
  SmartBlast Evalue=7E-24; Info=Transcription initiation factor TFIID subunit 3 n=1 Tax=Harpegnathos saltator RepID=E2BU54_9HYME
agaaaagaaagacaagataaagaagaaaaataagaaagataaaataaaggagaagggcgaaaagaaaaagattaaagagctgaagaaggaagttaaggaaaaggttaagcgagagagaaagatcaagaaaaaggaaaaagccgaaaaagcagaaaaagaaaaaatcgaagtgttagaaaatcctgcaatacctgcaataccaaagattttacttaaagttccgtctccgcgacctgaaacaccgggaaagttaaatataaagccaatagtaaggaagaatgaagacattattccggaaagaaaacgggagccctccccggtcgggctggcgaaaatttcggcactagtgacaggccctcccaagcccaaatcgacgctgtctccagtaccgcccgttgacaagccggtccccattgaggaaccagtggttcccccaatccttaaaacgcctggtcgacctcgattaacccctacgaagcccaaaactacccctaaacccaagaaaatcgagcagcaaacgtttaaaaagatagacgagcatgggaacgaagtgtggatatgtcctacttgtggtatccaagacgatggtagacctatgatcggttgtgacggttgtgatgcgtggtaccattgggtgtgcgtcgggatccaggtaccacctgatgaaaacgagaactggtactgcaaaccgtgtttagctaggaagaacg

SEQ ID NO: 10466 - DNA, 710 bp, Diabrotica virgifera
gaaaaatcggttggaaacatgcatttttctcatgaaaaattaaaatctttgatctttaataactcaggaagttttcatttattttaataacctaatagaacaaattttgcttgaaatttgttcctctatcgagttatggggttattttcaataaaataattttatccacccccagggtaggagcgcaagttggcaccatgtcacctttgttccttgagatatcctctgaccactcaccaattttcatgcaaatctatggaggttcaacgaaatcgaaggtaatagctcatatccacctccagtgactgcactaatagctttagaacaacattaaaaaagtaatacttcgcagcgttattcattgttaataaccataaaccacaatgtaagaactctgatatatctactgcgttttttagtctgaggtcacatctaatggaaccaatctgtcttacaacttgaattcgtaagaataaagttcagaatgaaacaaatacgtacaatgttatatgcacagttacattatttacaaatatttcttacgaattcctacgagctcatacgattttctgatgcgatcaatataatttgttttttctgcgactattcacaaaaaaattaataatatgtactagtccaagaaaggcaacctttatgcgaccaaaaaactaaacaataactcatatgtccagccactgagatcgaacgta

SEQ ID NO: 10467 - DNA, 710 bp, Diabrotica virgifera
tccattgtgttgggggagaaaaaccctacaagtgtgaaatttgttttaagctatttaatcaagcaggtaatttgaatgcacatttgagagtacatactggagaaaaaccctaaaagtgtgaaatttgtgaaaaacggagagcatatgatttgaaagcatatttgagagtacatactggagaaaaaccctacaagtgtgaaatttgttttaagcaatttagtagagcaagtgatttgaaaacacatttgagaatacactctggagaaaatccctacaagtgtgaaatttgtgaaaaacagtgtagtagagcaagagatttgaaatcacatttaagaattcacactggagaaaaaccctacaagtgtgaaatttgtaaaaaaacagtttagtagagcaagagatttgaaaacacatttgagaatccacactggagaaaaacccttcaaatgtgaaatttgttttaagcagtttagtcaaaaaaataatttgaaaggccacttgatagtgcatacttaagaaaaacattatatttgcttttagcagttttctatgaaaagtaactcgaaatcacatttgagattccacacatatgaaaaatttcttttaagtcattttgatgtagtctatggtttgaaacaacacacaagaagtcaaaattggactaaaacagaaatggcacctaaagaagaaatatggatgttggtgtacga

SEQ ID NO: 10468 - DNA, 709 bp, Diabrotica virgifera
  SmartBlast Evalue=9E-85; Info=Thioredoxin domain containing 14 n=1 Tax=Culex quinquefasciatus RepID=B0W1B2_CULQU
ctaaatttaccaattagtcgagaattttaaattaaaaatgtctttcaagcaagatttaaagcaggttcttaaaccgtattacatatttaacatattattaagtctgtcctatgtagctttgaaaagaacaccaggtgtatgcaattatttatttcccactagtggttgtgaatttgaggggagagaaacagaaattttgttctttcttattatagttatagcaataaggactagaaaagcaggaagtgtttctatgattaattatttgtcttctagtttcatttataccaaagtggcgaatttgattttatggttcagtgcggatctttttatgggaattgtctttggaatagtattcattttaggagcattgctatttcctgagcctacctactcaggccctgacaaggtgacatacttcagaggagttcaaggactggatgaagaattacagagagacaaaaaggttacatggattgttaccttctacgcagtttggaatccagcttgtgtgaactttgcaccagtgatttctaaacttagtactatatatgacatagaaaatctgaaatttggtaaagtagatatagggaggtacccggatgctgggcagaagtaccacgtaagcgatagtagcatgagcaaacagttacctaccgtaattttattccaagatgggaaagaagtgatcagaagaccaatggctgat

SEQ ID NO: 10469 - DNA, 707 bp, Diabrotica virgifera
  SmartBlast Evalue=0.000000002; Info=Endonuclease-reverse transcriptase n=1 Tax=Bombyx mori RepID=D5LB38_BOMMO
tgtgttggggaaacattgttaggaatattggaagaaatcacgatcctcagtaatggggaaacgacaggagagagagagagagagatcatcatcaacgcctatcaatccggatggaatgtttgcctttgttacttagagctctctgattcgcttattgcggtgaatcactccgcattccccttagataagcagtacatacagagagtatcgacaatgcattgagttctgttacatcttcttgtagctccttttgctatctgaggttggctatcatcacagctatccgtaccttattggcggctgctctgaaaagatctactgtgctgcaactataccattcagccaggaaattcttctacatatggatcttttccccttaattttgccctgcattatgagccataatatttcatattttgcacctctagtaatgtggcccaaatattccagctttcttgttttgatgttctttatctcgcaatccttttgtagcctttttaacacttgtgtatcgtaactcgttggatccatggtagtttcaaaatccttctatagcaccacatctctgcttccaacttcttttagtgtccagctttccattccactaaacaaagtcgagaacacgcagcatattaaggctcttattctcagctccagaggaaggtctcaattaacaagcatttttttttaatgttacatacttatcg

SEQ ID NO: 10470 - DNA, 710 bp, Diabrotica virgifera
  SmartBlast Evalue=2E-27; Info=Putative Rab5-interacting protein n=1 Tax=Glossina morsitans morsitans RepID=D3TQV0_GLOMM
cacatttttcatatccctgtaaatttaggttatttataaatatatatgtagaaattatttaatgaaaagatgagtacgaaagcgaaaacagtagagagaaatggagctgccaaatccaatttgccatcagtgtggactagagcttttacatcaaactcagaatggccagataaggaagaatttttggatgtcatatactggtacagacaaatattaggtataatactaggaataatttggggactaatacctttaaagggcttgctaggactgatgctatttgccctcataaatgcaggtataatgtatttctactttaatagttttcaaaatgttgatgaagatgagtatggaggagcctgggaattaacaaaagaaggatttatgacttcttttgcagggtttttggttacatggataatcatttattccggactatattatgaagtagacaaattttcataaagatttccttcatttttcattccaacccaataatttataatatcagccttttttaaatttgcaaaatttttgtaatagtgaccattgtagaaactgtatcaatttagaaaaagaagaggtagcaattttttacctatttccagttttaaataagatattacaatcagtggatataagattttcctactcgactgattacctgttatggatatgaaaatatattgtttttaataaactcattttct

SEQ ID NO: 10471 - DNA, 707 bp, Diabrotica virgifera
  SmartBlast Evalue=2E-43; Info=Pheromone-degrading enzyme 2 n=2 Tax=Antheraea polyphemus RepID=Q2TIL4_ANTPO
atagcaccaacaaataagccagctgatcctggacttagcacttggtatgtaactgacgctgctccagcactttggcccattatcgtcactttagctttatcacctccaaaaagatggatattattctgcatccacttaagaacaaattgttggtctttaagacccatattaccaggaactacagtatctgctgtcgatagaaatccaaaaggtccaactctataattgaatgtaaccactgttatattttccctcatcaagaaagctacagacttaggatcataattggcgtgtccatgtacaaaagtacctccatagatgaacactaacacaggagtctttttaccgctggaaggattgttaggtgtataaacatttaaatgtagacaatcttcggtttgatagtcgtcatctttgtctgtttggtaacatgagattttgctattatttgcctctaaaatcccattccagttattagccggttgtggaggcttaaatcttaattctcctattggtggtgctgcaaacggaacacccaaaaatgcataatacgtgaggtctatagtaacaggtggtgttacagtaattccgcgaatctgtccatttggcagtgtaactattaggtcgtcatcgcaatacactttgaatataaaatgcactgatagaaaaacgctaattttaacattttatgaataacagaataaccg

SEQ ID NO: 10472 - DNA, 709 bp, Diabrotica virgifera
accgaaagaagttacatacatttagtttcccgcttgcaagcacaatacactttgacaatatgatacagacggtttagttttgtattagacatacatcctatacatggcaacactgcttcccctcttcctatctaatcagccctattcggtaacttttaacaaatcgaacagatgttttcgtttttggattggcattccgtaattcacatcgtaatccgtgtaaatcgaaaacgctaacttctagttgacgcgctcaggaggtggcaacaccgcactgcaaagtgaaataagtgttctgtgcgaagaattcatcaaaaaagaagaaattgtggtttattttggatggttttgtttaagtttgacaaattcaacacaacaagaataaaaaatggcaagtgaaacaccgatgggaacacgaacaccgaagaaaaaacatctgctgtgcatttaaattagatagtagactttatctctgaacataaaatattattgcacggtaaaagtaagttttatccctaagaaaaattttggtttttcgtctgaagcacactagatacgttcaaatctacgcattctaccagtaaattaattggactaacaattcttaaaatgtttaatgattcctattaacctggatgctttacaattaaattattggtatataaaattaaatggtttactgtaaagagaccgaaagcagtagaccaaa

SEQ ID NO: 10473 - DNA, 709 bp, Diabrotica virgifera
atatgaagaataccttgatatgctgttaagaaccttagccatagttgtgtcatcctcatacaaaaatattatggatttgggttgttttaacctcttaatgtcatgtagggcaaccctgacattaatccagaaatcgtccgtttgtggatgatcacttattaaatcggcaaaatcactatgtatgctttctataggttcggcctggggattgtacatatataggcctactaaaactggtataataaacaaaatgtaaatcatatttccattgacactaaattgagttttgctcacattcggttcaggatttaggctattttcctcagcggaatctacttgtccttcaccatctgaatatgactccgttccagaactaaagcattcccttgcatcttctctttgaactttatcattgtaatgatctgtttgtgatatatttttttgattttcaataggactcacaacttgataatttcgaatagattttcttcccattactttttttggtgtactggaagcttcaggattatctaccatatttgatgtaaaattttatttattgttcataaaaacttataaattcggttcaaaactcaaatgcttattaaaaataatactttaaaaacttattgcatctctcacaagtctatttgtttaccatgatgttgattttgatgtttggtttggttttggtttttggttgatgttg

SEQ ID NO: 10474 - DNA, 706 bp, Diabrotica virgifera
cgagtacttagtgtaaaatttacctattacaaatttttctactactagagaccaaacagaaagagtcatttaagactgtatcaactaacattattttttaaagtaagcgttttgaaaatataaactaaacattaacctatagatccttatgtttactgtagagaaatgttttttaacgcccttaacttcttggctatgaaaacatccatttcctgcgaagggctcttcgacggactcatgatcaaccttctcctgagcctgggattaatctcagactttgttaccactggctctggtgttctgtctctggagggagctagtaaactacctattttatgatagtctaccggagaccaagtgatgggcttcttcctgggtcctctttggataaccagcatctcctcagggtttgtagattttggagtatctgggatgtgttcattgagttcaatgagagctatacgtagagatctgcgggggacattttcgtccacaaaggcttcgtcttcctccattgtaccaacggtcactaacggccttaacggtcactggtcccttgtttacactgaggttagattctatgttttcatagtgttcccgtgacttatttacttaattacttttaggaagaatgcactataaatgtttttaggcgaaatttttgttatcttagcgccaaatcgaacctattttcattcactttccg

SEQ ID NO: 10475 - DNA, 706 bp, Diabrotica virgifera
  SmartBlast Evalue=1E-33; Info=Uncharacterized conserved protein n=1 Tax=Glossina morsitans morsitans RepID=D3TNS6_GLOMM
ttttctttttttctcctggtatatttctttcattctttcagcacttggtacaggcttgatataaccccattttttcagatagttgatggaaatggtagttccccctaatgtaactgtgtatcttgctggagtagcaatcttataacatgcatatgcaactgctagataacccatacttgaatccctcaatggatttaataccttctcgctgacgtgccatgattccaatatatgtacaatatcaataccactttttgccatgtagtaaaatccaccaaaccaaatactggaggtgacaagatgaactggcactaatatataccaataatctctatacatttgcttaaacttctgaaacagtgtcaacttttcaggtggcttttcaccccccttatctgaataattgcatattctatatttttgtggattaatacgaaatgttagattataatgatcgcaactaaaactataatcgtttatgcgtttgtttaatctagttatgcaaggatagtggtagtaggaaagtatggaaaattctcttttgaccaatctaccacatgctgcccttgaaacaattcttgtaagaacatttgccattttaataatatcgatgtacactatttcgaaaaatcatgtaaatgttttaatacttaatattaaaatatatgtaacctacatttccaaaaaaaaattataaatcaaaaac

SEQ ID NO: 10476 - DNA, 709 bp, Diabrotica virgifera
  SmartBlast Evalue=9E-48; Info=Putative membrane protein n=1 Tax= Ixodes scapularis RepID=Q4PM88_IXOSC
tccattgtgttgggatagaatagtggtcagtcatctttagtagtaaccttaatttattatgtacttttcacttatatgttaataattaaataactgttgtatcgaccattttatacaggtacttgaaaatgtctaacaaagttcaaaatcggcgatcaaaatggaatcttgattctgtcagaataactcgtgtatccaccgaaccgttagcttcacctccaggctacagctcatctaccatcggttctaacagtgaagtgtctaaaaagactgacgtgtctagattaataacaaagaaatcatgggacttagctctagcccccatgaaacaagtacctatgaacctttttataatgtacatggccgggaattccatatcaatcttccccatcatgatggtcggaatgttgttgatgagacctttacaagcaatttggtctactaaggctacttttaagatgatggaaacatctaacgccattctacaaatgattgtgtatgtgttaggtaacttcgtaaacataggtttagctctgtataaatgtcacagtatggggctgttgcccacttacgccagcgattggttggcttttgtagagcccccaatccgacttgaatatttgggtggaggaatacaactatattaattgtaatattttttatttataataggtgtagttcttaaaattaataaaaacatgtaattaag

SEQ ID NO: 10477 - DNA, 705 bp, Diabrotica virgifera
  SmartBlast Evalue=1E-33; Info=Vacuolar protein sorting- associated protein 13B n=1 Tax=Camponotus floridanus RepID= E2AKD0_9HYME
gctgctacccaaaggcatgaagataacggctttatagtattacaataaccagagcaagctgccaacacacgcacactttatggggggcagtacagaaacgtcatcataaagaaccgaaaagaggagaatctttaaatccacaattactgtcacagagtcgttacattacagaaatagttgtaaatatacaacctatagattttgtgatatccccgaaaacactacgcagtttctacatggttatagtacctcttctagaaataccagcccataaggaaacaaaagtttccgatacgtccgtctctctcttagatatcaataatcaaaatttacctttggcatatctggagtgccaagacattaggataatcataccttcggcagaactcggatgcaaacatacgctacacgacgtaatactctttcaagtgcagaaaatttgcataagtccttccgctgtaaatcctatttgcaggtcgccattgaggccagatatttacgaacaagcagcacatgctagaattttaagcattccaggaagtgacgtagaagacagacaataccagctagacctaataggaatgtcattatgtacgggtgcgtgggaagacatagattccgtactttccccttcaaatttcacttcaacgttgaaagggttaagtgaaaatccagcattagaatggaataatttagaacaaggcc

SEQ ID NO: 10478 - DNA, 706 bp, Diabrotica virgifera
  SmartBlast Evalue=3E-68; Info=Ankyrin repeat-rich membrane spanning protein n=1 Tax=Harpegnathos saltator RepID=E2B4F1_ 9HYME
cgtaccatatttgtctcctacatttactttagcattacgttgcaaaagacactctacgatatctgtgtagcctctaccggaagcccatagtaacgaagacacgtgaaaatttccatgagcgttaacgtccgcacctcggtctactaggatcaggccggtatccacgcgacctttgtatgtcgcccacatgagagccgaccaaccaccaatatctctatgatcaatagctgcattgtgatctagtaattgaagaactatgtcggtgtgtccttctttggcagcacacaacagtgccgtccacgaatcgttgtcctctagattgggatcagctccatgcgtcaacaattctcgaaccatcgtggatttgcctttggccgcagccaccatgagggctgtggttccgttctcatctttatcatcgacctgtgcctgtctgctttccagaaatgactgcaatccccgtaaattgtcatcgtttataaaacctgtcagggatcgaaagcagagtgataccatggactcagaacgatgcagcgtctccttcctgaaatgagctccatcgctaaaactagtcgagctcaatctgcccttaagctccttccacaccacgggcacttgtcgataggaaacactttgcacgcgtcttaagggattacttttgtgtgacatttctcaagagataatctcgtatcatgtcgattcgtca

SEQ ID NO: 10479 - DNA, 703 bp, Diabrotica virgifera
ttttgtataaattcagtaacactaaatttgctaaaaaaaattacatgctggcgttacgaattttaccgttacgaatatgtatagttacaaactgtcgccgttacgaactcacgctattatcatttgtcgggttacgagctacgctcgagctgtcgcgttacgagatgtcatagaacctaatttgtccaaagtattgtaaggattttcgaaaaaagttcagagctgaaaactcgctataaatatacatataatattattgtttttaagtacaaatctgatcttttgagaaagatttttgcattttaaagtttatttatatttaataaaaaatttattttataaactgaaaaaaattctgtatttcctttactttattgcttttacttggtctattttcctccttttaccatgtttgattttactggagcgactcccgctcttatcctattaatagttttccacgttttaaactctagagattggccggtccattgaacctggggaagaggaaaatactcaggcggttcatcctgtactgtccaaggagctttatatagagcaggggttggcaaagtgcggccctcgggccgcatgcggcccgcggaaaagaagtgaattattttcatttaaagatttttttaattatttctaatattaataaataaatgtagataatgaagctattaattaacactttcgcagc

SEQ ID NO: 10480 - DNA, 702 bp, Diabrotica virgifera
tatattgagattaaaatgaaaattcatgacgaaggtagaccaaacggttcgatatgtggacattttgtgttataagccaagtgaccgttgactgaatttcctgttgatagttgaaaagccttcaacacgtagctctgccagctgtcacttgtcattaaaaaaggggttacaagcatagatatattaacaatagaacaggctagttttaggccgctcaatgcatatataggtcgaggtgtaacgccaatatcaagtacagtggtctagttatctttgctgtcgtacgagtgtgagcagacacaggagcagcggccatcatatgctagagagagaaagctaagcgccggtagagagagataaatagaccaccgacccgaacgctccgggttacgatactttcggacctggcctaatctacttgttattatatctatgggtagaagaacgggataaaaaacgtgtcactagcttgcagattgtagaaagacgaaacttttgtgcctcgtttattgtatattataaaaccgatatcgtgatatttaccatggaagtcgaggcattgattcaacaggtacttaaatatctttctcggcaaggacctctttcggtatttgctgtgcttaatcccgattttactgaccactttaccaagcaatttaagcaataaaatataacaatcagatcgtctttggtcctgtagtt

SEQ ID NO: 10481 - DNA, 706 bp, Diabrotica virgifera
  SmartBlast Evalue=6E-60; Info=DNA excision repair protein haywire n=1 Tax=Camponotus floridanus RepID=E2AW10_9HYME
cgattgggttgtgattatgaaagttttaagtgtttttatttagattagatatatctgcactataatgcctgttttgattaaagcgtaagtagtttttaaacagatagtcttttataaacatatacttttctaatttggtgtgtgcagtgttgactttagcctcagtttattttaaacggttacaatgggtccaccaaagcgctcaaatccatataaatccgacagtaaatcacagaaaaaacgtaataaaaaggaagacaatgaagaatggaactacgaagaagatgacaccaatgatacagacgtagttgaagctgatgtgccgggagctgcagctagagatgccgaaaagaatgaccaagcggtacaagaagatgaatttggagccaaagattaccgctctgagatgatactgaaacctgataacatgtccaggcctttgtggatagcaccgaatggtcacatctttttagaatctttctctcctgtgtataaacacgcacacgactttctaatcgccatttctgaacctgtctgtcgtccagaatgtatacacgaatataaactaacagcatattcgttatacgctgctgtaagtgtgggtctacaaaccaacgatattatcgaatatctgaaaagactgagcaaaactagtgttcctgagggtattatagagttcatcaagttgtgtacgctatcttatggt

SEQ ID NO: 10482 - DNA, 710 bp, Diabrotica virgifera
  SmartBlast Evalue=9E-89; Info=Mps one binder kinase activator- like 1A n=41 Tax=Euteleostomi RepID=MOL1A_HUMAN
gcctcttctcccaattgcaccacttcgctaaaatgttggtggtatatatgcgcgtacactctaaacagcctcttcagaatagtcttagcgatggattgaaaattttttggaaatggaacacctatttttgatggaaataatgtttcatcatctagttggtcctggacccaagtcattaaatagtcaatatactttggtgctgaacatttaatgggtttcttaactgtatgaccatctgcccaatggtattcatattttggtccggcagacattataggacagctgtcctctgtacaaaattcggttattgttccataaagcatattaatttgattaaagaagtccacagtattcactgctacccattcgtttaagtcttcgccctctggcagcatcacagctaatcttaagtttcctgatcccaacgtagcagcagcatgtttcatcaactcatactgatgggttccttctggtatatttttctttggtttaaatgttttttgacgaacgacttccaaacaagaaactcattgtgaatacataaaaacaacaattgattgtctttactttacaatcatacacaattgccacaacgttttaagttgagtaacttatttttaagttggaataactaataaataaatgcatgtaaatattttttgtaataaaattaatcttttcttatttcatttgtaggaacaagttcgttc

SEQ ID NO: 10483 - DNA, 707 bp, Diabrotica virgifera
cgctccagtaaaatcaaacatggtaaaatgggggaaaatcggaaaatagacaaagatgatgtgaactgtgactgtgtttcgagaaatacagaatatggaatatcttcctacatgcagaaactgtcatcatcggcgtaccctcgaagatttgtggctcgccaacaaagatggaaccgacgtagcccgatactaagccgaaatgacatgtccggacacgataaagagaaagaaagatattctcagacaatataatatctagtttggtagtggggacatctgtattgtggggatgtaatgaataaaaactgtgcgaaaatgacaacttgtaatatatttatcaggacatatcttagcgaatatttttaaactaaacattttgattaacatctaaaatatttcatcgattttttattgtttccgtgattatttggacgaggttgatatacaaaacacgaactggccaccctgcagccctgatctaaatcccatagacaatttgtggcatattattgattatcaactcgtagacaacaacaagcaactgtctctcttgatgacatagaagttatggtgagagaagtttgggatgcaattaatcaagatcacacttcatttttaagtgtgcctagtcttggtgaaaaattaattacaaatagaagcgggaatactcgttattaagtgtttttgacagagggaatttgttaaaa

SEQ ID NO: 10484 - DNA, 705 bp, Diabrotica virgifera
  SmartBlast Evalue=3E-16; Info=Reverse transcriptase-like protein n=1 Tax=Glyptapanteles indiensis RepID=B7S927_9HYME
ggttccaaagctacttatctgatcgtagactgattgttaaaattggcacttttctttctaaaattatccaagttccatcaggagtgcctcaaggctctcacctctcactcttgtttaatattttcataaacgacataaatgaatgcttcgcaatcagtttattttgctctttgctgatgatctaaaattaagctgtgtgattaaatccccagaggattgtgaaaaactacagtacgatttaaataacttgtgtaaaacgagtggtgtaaaagaaatggcatggaacttaatccaactaaatgtaaaactatgacttttcccgttccagaaatgctattgttttgactacaatattggtcactatactttcgaaagacctttttaaagacttgggggtcacccttgatacaaacttgcagctttctcatcatctggagaatgttgttaataaggctttccagatgcttggttttatcagaagatgcacccaggacttcacaaatattacagctttaaaaaccctctactgtgccttggtccgtccccatcttgagtatgcctcctgtgtatggtctcctttttatggagtgcatactaatgctctttagttagttgaacataaatttttaaagcaaattgcatatagacttaatatcttggacaactacaatgatgcagatattcttaatatcctaaatatggcac

SEQ ID NO: 10485 - DNA, 708 bp, Diabrotica virgifera
  SmartBlast Evalue=7E-62; Info="Alcohol dehydrogenase, putative n=1 Tax=Pediculus humanus corporis RepID=E0VWT0_PEDHC"
gtgaatgttctcataaacactaaaatatgttttttactatattgggggccggatatttagtatatctagggctttatacgattttattgtgcgttagtgattgtgatgtacaattattcttcttggaaaagctgggaaaatcaccaaggcgccttaagggccaagttgtgtttataacaggagcgtcgagtggaattggcgaattcacagcttatgctttggcgaaatgtggagttaagttggtgctgacagcacgaagaccctacgagctggaaagagtaaaaaataaatgtattgaattatccaaaggctctctacaacacaacgatgtactcatcataccgatggacgtcaccgacttcgcatcgcacagaagacacttccaacacgccgtcaaccatttcggccgagtggacatactgctcaacaacgcagggcgttcgcagagagccgcgtgggaatcaatcgaactcgatgttgatcggcagatgttcgacctgaacgtgttcggagtgatcaatcttaccagagtcgccttggaacacttcgagaaggtcggcaaaggacacgtcgctgtggtttcgagcctggctggagtttttggtgctccatattcgggaacttatactgccaccaagcacgccattcatggctactacaattcattacgaaacgaaaaaatgggaaaaaatcttcacgtcactctgc

SEQ ID NO: 10486 - DNA, 706 bp, Diabrotica virgifera
ctagttttttatcgagacgcggcttctttttaatatgtttacataaaaattttatgggagctttgttattttaaaccccccaaatatttgtatacattacaatcaaactactactgtggtaccattagttaaacacagtgtttccaaaactttcctgcctcttactactttttcgataaggcatctgttatcgagatgtggcttcttttttaaattggttcaaaacatacgtaaaaatgtaaatcttcatgttattaccaggtctcttatagtcatacgtaaacatatacaaaaatgtggtggatttgacaaatattcaaaatatctcgataaaaactggctttatgaaaaagtactaagaggcaaaaaagttcctgaaaacactgtgtttaaccaatggtatcacaacatcaattcaactggaacgcatgcaaaagtttggggggtttgagggaacaaaacccccaccaaatttttatggggtgcacaaacttcaccacaatttcctttaagaccttcccgccacaagaataccacatgtccactttcaacaaaaaatctcgaatagttttagatgtattggaaaaaatcgaccttcattttgcaacttcaaagagctgcaactcccttttgtgtgcacacttgtaccaaggtaagctaggtccaaccaacctatttttggcccagaatatgtggtacaatgcat

SEQ ID NO: 10487 - DNA, 708 bp, Diabrotica virgifera
  SmartBlast Evalue=1E-106; Info="Hect E3 ubiquitin ligase, putative n=1 Tax=Pediculus humanus corporis RepID=E0VFB3_PEDHC"
aagatcacactttgagtccagaacaaagaagtcatcaggtccagaatttatgtctaaatcattcctctgggcctgtgcttttagaagatcttgctttgacgtttacatatttacccagttccagtatatatggattttcggctgtagatttagttcctaatggtgctgatatagaagttaatatagataatgtagaggagtatgcagaattgacaacgacgttctggttagataaaggtatagctaggcagttagaagcgttccacaagggattttctttagttttcccaattgaaaagttggctgcattcagtccagatgaggtgcgtgttatgctatgtggtgatcagaatcccgaatggaccatggaagatcttcttaattatactgaacccaaacttggttacaccaaagatagtcctggtttccttcgattcgtcaatgtgcttgtaaatatgtcgcccgaagagagaaaagcctttttgcaattcacaactggttgcagttcccttcccccaggaggcttagccaatctctatccgagattaacgatagtccgcaaagtggatgccggcgaaggctcctacccttcagtaaatacctgcgttcattacttgaaactacctgattaccccaccgaagaaatattacgacagaggttattagcagctactaaagaaaagggttttcacttgaattaaacatgtc

SEQ ID NO: 10488 - DNA, 707 bp, Diabrotica virgifera
  SmartBlast Evalue=1E-77; Info=Importin subunit alpha-2 n=1 Tax= Harpegnathos saltator RepID=E2BX42_9HYME
atttgaagcttgctgggccctaaccaacatagcctctggaacatcagaacagaccgcagctgtggttcaggaaggagccattccccgtctgcaaggactcttgtcttcccctcgaatagacgtagcagagcaagctgtttgggcacttggtaacattgcaggagatggttcagcaaccagagatatggttttgtcctgtaacgtccttaatgatcttcttggcttgataaaacctagtacctctttgtcattattgaggaataccgtgtggactatttctaacttgtgcagaaataagaatccctctccagattttaaccttcttcggccagcccttccatttatagcacgtcttttgaatcacagcgacccagaagttcaagcagatacctgttgggctctaagctacctaacagatggaccaaatgaaaaaaatccaagctgttctagacactggactcatcgagaggttggttcagttactgtacagtgaacacggtacagtcctgacacctgccttgagagcagtaggtaatatagtgacaggaaacgatcagcaaacagactgtgtgatcaacgctggagccttaaatgtattggcagaccttctgcaacacagcaaactgaatattgtcaaagaagctgcttggacagtgtccaatatcactgcaggtaacagtgaacagatccagaaagttatcgatgct

SEQ ID NO: 10489 - DNA, 704 bp, Diabrotica virgifera
  SmartBlast Evalue=8E-17; Info=Zinc finger protein (Fragment) n= 1 Tax=Aedes aegypti RepID=Q0IG25_AEDAE
ctcgtatgtatatttttacgctgataaactttggttccttcttgtctgataatgggtttaagaggctcgattggcacttcttccacttcttcttcttcttcttcgccttcttttgactgttccgcttctgggtcgaattcgtctttcaaaaattctcccacaatctcctccgcagtggcagaattcttggaggtagtaatagttggtctaacgccggctgagggattgtttatgtcgaccattgtaaattgggatatttcagttccttcgtcttcctccatcgcttcatcttcttcttcagaatgcggccgtgtaatttgcataatgctttcagaaaatacttctttttcaatttgttcttcatattccatctcggcatgcctcagttcatgttcctctaactgttcttcagtttcgaagctgtaatcgcacttatcgcacgggaacggaagactagctaaatgcgtagtaatatgctctttcaccaaatccaccgtttcgaacgtagtattacaaatgacgcatttaagatttaccatagagtgtatggcactgtggtttatcaacgaatctttcctccggaaagccatactacatatgtcgcacttgtactgtcctatgatggtttctgtgggattggatgagtaatggctgcgcatgtgtcgagttaagtggtgactaagaaggaaggttctcgcatattt

SEQ ID NO: 10490 - DNA, 707 bp, Diabrotica virgifera
aagattaggggtcagtgttgctctttattatctttgttattgaatactttgaatagtgaattttgtaatacttttcactgctttatgtgaaatatttttgtttatctaatctataacattgcttctcacaaaacattttttctctttatatcttccgtaatttattcatgatgactccatcagtaattatttttttttcctctcaccctatttgttgatttgcctgatttgtccctggaagacttccatgagaacgtattctcaaaatacaacaaattatagacaaatctagaaaatttaatttagaaatttatttcttaaaatactctaaagcattaaacaataaaaagtggcataaaatatgacgcagactacaagaaatgggcactaacgaacaactatgtcaacaatacacatcaaatgccatatgtacatcaaatgccatatatttataatagtccattgaaatgttacatttagggttacatttcttaaaaaagtcaattttattttcttaatgtgtagggggggttagtagaagcttaagttcaagtttttggggtcgtcacccttgtcccacggccgccatcttggaaaaaatggggcaaagggctttcccacggtatctcgtaaactaccaagcctacagaaaatttaattacacataaaatgtagaaaataaaattttatacaatttatacaacgcc

SEQ ID NO: 10491 - DNA, 705 bp, Diabrotica virgifera
tttttagtgaaattgtggcttgtttcccatagaaaatacttaatctcaaaagtaatgtacaacctctagggccggttgttcgaacactaatcaggaattatcattgtcaagtatttgattgctgtcaccagctgtcggtgtcaactttgtttgggttgctgaaaacataattatggattacaattatgagattggttgatcaattatgttaataattgttatgttaattgattaactaatctcataattgtaatcaattatgttttcagcaacccaatcaaggttgacattgacagttgtgacagtgattgaatatttgatagtgatcattgttgattagcgttcgaacaaccggcccctaacctctgtaattaatttaggttcaaatcattttaaccgataacaaatacatacaatccttaattgctttaattggaaagatagtatggctaccaaactaatttatattctaagtcgcattttagtttcattttttataccttatcttagtatacttttgttagtaattgccataaataacattcgttacgccgacaacaccgcgataatcacagataacgagcatgatatgcagttgatgctaaataaaataaataccgcgggaaaacatatggcttgaagataaatgctagaaaaaccaaatgcatggaaataagaaaaggtgcacttttcatagtacaactg

SEQ ID NO: 10492 - DNA, 706 bp, Diabrotica virgifera
  SmartBlast Evalue=1E-80; Info=S-adenosyl-methyltransferase mraw n=1 Tax=Aedes aegypti RepID=Q177P8_AEDAE
ctctttgatttcggttgttcttcaatgcagtttgatgatggtaatagaggttttgcactttcacaaaatggaccattggatatgaggatggatggatgtagatttccagattcgccaacagctgcagatgttcttgcgagggcaacggaagaagatttgtacaagataattaaaacctacggagaagaaaaacaagcccgaaaaatagctagagctatcgttgaatctagatatatgtttaaaactttagcgacaacagaagatttatctgatttagttaagtcgatttgcatagaagattatcgtctagataaacttcaaagaccaagtcacgtggcaaccaaaacctttcaagcgataagaatttttgtaaataacgagctaaatgaaatgaattacgcattgttattggctcacagctatctgaaggtaggaggtcgaattgtcaccataacatttcattctttagaggatacaattgctaagagacatctgtctgggaacatgttaggaaacacagtaaatcctttgccacttaagtacagtagtcattctgcaaatctaacagaaggtctagtcaagcaaattatggaaccacaatggaagatgctccatcagcatgttataactccaaaatatgaagaggttgataataatcctagaagtaggtctgcaaaactaagggcagcagttaaaataagataga

SEQ ID NO: 10493 - DNA, 708 bp, Diabrotica virgifera
  SmartBlast Evalue=5E-63; Info=Peptidoglycan-recognition protein- SC2 n=1 Tax=Tenebrio molitor RepID=E2RYF5_TENMO
aatgtaaaaagtttatttttgtaaatatccctaaagctattctgaaaaattatatagtcgccgactaccaagtcttatttcttctcttatacgccgcaacactcaatttggatgtgcctcccaatgtggcatcttcgtaacctcttcatagagagcatcacctggacatttagtttgtctgccttgtcgatgacctattagtttgtagctagaggaaattttgttattctgtactccacaatcgatgagatttttcaaggcttccagttgacccgctgatggaagatggttttggaaatctccgattaaacatattcctatgcttctgctgttgtagttgggacagtgtgacccttgaagaccccatcctctcccttcatacacatttccatctccaccaatcaagaagttgtatccaatatccgaccatcctcgattgttaatgtggtcatactgaatgttctttacacgttgtttgcatttttcagttactggacaaggtggagtttccgagtggtggataactacataaggaggtggatttctggagaggtttgtcttactttttgctgcgctagctccccattgtgatcggctgattatcgttggacaagaagcagctatctgatccactccaattaaaactacaaacaccaaaacaccaactttaatcaccattgttaactctcagcctccagattctcaaca

SEQ ID NO: 10494 - DNA, 693 bp, Diabrotica virgifera
  SmartBlast Evalue=7E-11; Info=Reverse transcriptase family member n=1 Tax=Glycine max RepID=Q1AKH8_SOYBN
tttcgtgaactttccttgttagtctactaggttcattctcattagatgtccatactagtttaattgtctctattattttattcattatcggttcctgtttagttatccctcttattgcctcatttcttattctatcccatttggtctttccggctatagccgtagatgtctcatctcaattgcatttatcctactattatgcatttttctgtaaagtccaattttcgcttgtatacagtatcgtcggtatcacaatcgtattatatattttaatttttgtttcgtgagacaattcttttttcctcagaattggcgctagtgcgtagtacagtttgtttgattttttagttctgtttgttatttcgaggtctattttcccatcattggtaataatacttccaagataatcatatgctgtaactatttccagttgagtatttttgcattttataattacttcattttcttccttttcgccgatgaccattattttacctttctcgatgtttatttccatttttaatttctctatttcttctgtccatatagtttatcgagtttttgcatttttgtcacggaatctgctataaggactatgtcatccgcatacaatagggcttctatttttattggctgtaatctttggtatcctattgttgtctgtatttggttcaatcagtactcaactgtgaa

SEQ ID NO: 10495 - DNA, 702 bp, Diabrotica virgifera
tgaattgtcattgtgtgccgggtgtaccagtcaaactgtgattttttctacaaagttcaccacacctgtagaatttacaaaatactgaaattaaaacacaacaatatcctcaggttttcttaacattctgtttttgattcattcgcttatattggataataaaaattttagttacttaacaactagccatgttcttcattaatacagggtgttccaaaataagtgcgacaaactttaaggggtaattctgcatgaaacaataatgaccgtttgctttataaacatatgtccgcaaatgcttcgtttccaagatacgggatattgaattttttcctacaaactgacgatttatttattgctctaaaaccggttgagaaatgcaaatgaaatttggtaattgttaaagtagctaactttttatttgccaacacaagcgaatgtattaaaaattaaaaggttagaaaacctgaggctttatttgggttttaatttcagtattttataaaaatccacaaggaagaatttcctgtagttggctgtataccattaattacagaaaaaatttgacgaaatttttttttataaaaggtatatttatttaaaaaaaccctaaaaagggctaaaaatataagagaacgttttcgatctctaaaaagaaatctattttatagatctattttataaatgctagaacaataaaca

SEQ ID NO: 10496 - DNA, 699 bp, Diabrotica virgifera
aatagaataggtgccttgaaaatatgtaatatcgtgtatttaacgctaataattaaggagcaaatatttcaaagattaagacatcaatgtaacgatattttatatcggaagtagagtaaaaagtcatttaaaattttatttacttcatggtcatgccatcctagtagtattcatgggactctaggcatgaccacttaccaaaatcatcatcaatggcgttacattgtgtgttcactctcaatcttcaatctcacttctcaatcatcatcaactcttcgtgtgtctttgcgtcgtttactatttccttccacgtttgtctgtcctatgtcattacttccccttgtctcactcccattttctccagatcctgcaaaactttttgcataatttataaaaattattagtaattttcttatcacaaaatataataatcttgtcttcagttggttgaggtatatttttaaaataagtttttgagaatggataacgacagaacacctagtagaacgcttagcggaactatggtcggacgtcggccagtaggaacaccaaggaagaggtggatagggatagccgaagtgagaaccaatgctaaagagatattgagggtggacaactagaggagagcagacagagacttagagacggatggtgggggaggccagggcccgacttgggctgtagcgctataggagagag

SEQ ID NO: 10497 - DNA, 707 bp, Diabrotica virgifera
  SmartBlast Evalue=3E-55; Info=Chitinase n=1 Tax=Monochamus alternatus RepID=A4PID3_MONAT
aataactcaaatctgaaagtattattaagcataggcgatacgccagcacaggtattttcgacagttgcagcagatccagccaaacgtcaagcaatggtatccagttcactaaaatttgtcaaaacttatggattcgacggaatagatattgactgggaaataccagaaggaaaagataagcaaaattttataagtctgttgaagctgtttaaagaatctttaggaagagaatcgtatacgtttatggtcacagtttataattaccctgaaagtgcttatgacgttcctcagatttctcggtccgctgatatgataaacctaatgtgttacgatttttatggatcgtggagcaagtacacaggttataatgctgcactttttgcatcacctgctgaaagcgattttgaaaaaaatcggctaaatgtggcgaagtgtattcagaattggcttaatgcaggagctgctaatacgaaagtaaatgtgggagtacccttctatggacgcacttttaaattggctaatccgaatgatcacaaaatacattcagcttatgttggaactccaggatcggttacctatcagaaaatatgttcggactttaaagagtacactgaagcatgggatgatgtacaaaaagtgccgtttaagtattctggagatcaatggataacatatgataatgagagatcgattgcagaaaaggtaaa

SEQ ID NO: 10498 - DNA, 708 bp, Diabrotica virgifera
ttggttaacgtctaaactgaattattctgtttatttttgttaacgtggaaaccaacttttattagttacaattgaaattacgtgtacagtaagggaaaaaagccttactgtataatataatatgtatctataatttaagtataattaggtcgttacaaaagatgttgtctctacaattacaaacaaaacgaaggttgattgacggagtttgtttgtgtaacctcgcggatattcacgtatcgtttactttcaaagtccaaattataagaagatataaaaagcccacagagggattaagataagcattatagtatcattattattcatgttaagattaagatcgttactatgctagttagcagtcgtgcgagatgggtgtctgaaagactacctctcgaaacaacatcttagtaaccttacgttgatggacgtttcaacctgtaaataaagttataagttagaatcagtgttttcctaaggtccaatagttggctccccctttcgtcccgttgaggatccaacacgacaactcgacacggctccccttccaacgcgacatacgtttataaatttaacaaaccagcatcaggatcaaaatttttgacacatttcgtatttcgtggataaataaatttttaaaattatgttttaaaataaatataagctatactaaatttacactcaagatgcagtataagtaaacaaacc

SEQ ID NO: 10499 - DNA, 706 bp, Diabrotica virgifera
caatactgtcaagaaagttgtgttacagaatattttaatattttcaaaaaagtaacagtaatatttaattttaaagatttataaggatatgtgtagtgtttaattagatcttgttcatagtaaataatggcttttttgtttataacttgtgtagctttgggtattagtcaatgtcttactgcacctccagatttaaataatacgttatctgcaaagtcaagtccccttacaggcactattgaggaatgtgcgaatgttacagcacttaaggccaatcaaaaagaaattttagacacatgcaaagatgtgtttaaactcaatcagacacaaatcagagagtctagcgaggagactgtaattttgtgtactttgtataatcatactctcattagttactgtcgatccaataacaccataaattatccaacggtagacgagataaaattaaaaaagtacactctggattccgtttgtaaaagtgtcgtaaattcatctcaaagtatatttcctaaatttcaaacactttcttgcttgatgatatgcccaaatttgttcaaagaagaggagctgaagccagcatgcctatttgctcactattattatcttgaaactagcaatgttactgaaaagccagttattccagtacccgatcctcagaaccctcctgggaataacaaggcagcaccacatgaagcacagcccgcac

SEQ ID NO: 10500 - DNA, 706 bp, Diabrotica virgifera
  SmartBlast Evalue=9E-38; Info="Paraplegin, putative n=1 Tax= Ixodes scapularis RepID=B7QLH4_IXOSC"
ctacaacccagctgaagatgaaaaataaatatgtatcttttaaattctctcttttttcgaagggctgtttgtcatggtctaaaaagagcatatatctacagtaagtttcctcaatgttccaatttgtgtaatagttcgaagtctattaaaataataagtcgagaatatgctgccgttcagtctttactccacagatcgggattacaagatatttcgcagctttctaaacatttaaacgtaagggagtttcattcgtctccgaaatatgatcaaacaccaagccagagtcctccaggaagctcagggaggcctccggagaaagacgatgataaggataagatcccttctttgctggcaaaagcctttctatggatgctgacagcctatatgttaattgcaataatatctcttatgtttcctggtaccagtcaaccagaggtagtgcgctatgtgtcctggaacgaatttctataccaaatgttggcaaaaggagaagtggaaagaataatagtgagaccagacattgaaatcgttacaattgtactccacgaaggtgctgtagtaaaaggaaagagagttgaaaatagaacttaccatatgaatgtagtagacgtcaacaaatttgaagataaactgagggaagcagaaagacgcttaggaattaccgatggtgtacctgttatatacgaaagaaacactgacacag

SEQ ID NO: 10501 - DNA, 704 bp, Diabrotica virgifera
  SmartBlast Evalue=5E-35; Info=Valyl-tRNA synthetase n=1 Tax= Culex quinquefasciatus RepID=B0WNW4_CULQU
cctgaatgtggttcggacgctttaagatttactttagtttcccataatattaaaaatatgtatataaattttgatgtgagcgaatgttacacgaataaactattttgcaacaaaatatggcaagccaccaaatttacaaaacattggtttgctgaagtgtctggtcgccaagcattaaaaaccgttgacttcgatcaattggccgaggttgattattggatattaagcaaattgacacttatgattgacaaagttattgatggaatcgaaggtttcgatttttatatttgtacaaacgcattaaagaattttttgtattttgaattttgtgatatatatttggaaactactaaaagaggattacgatcatctgataatgctattgccttaggtcatttatggactttgttaacgtgtttagacgtatcattacgaggtctagcaccatttatgccagttttaagtgaacatttacattcacgtttaccagtatttccggaacaagaaaaagtgctggagtttccacagaagttgaactggcgtaatgaacatcttgaaagaaccattgaagatgtaatggatattgtaatagcactaagaaggttaaaaaagacatttaatattagctccaaaagtgaatcaaaagttcatttggtggattcttcaaaccttttaaaacaaaatctaagcataattgaagatct

SEQ ID NO: 10502 - DNA, 698 bp, Diabrotica virgifera
tattatcgttttctggtaaattcgacgagcctttctttcaaattcctgtcggatgggtaaaattatatttatgtatgtttattgtaaatggttacccttatactggtactgatcatctacgtaataaagatacaattgttggtgaacacaagtgaacacaaagatacaattgttggtgtagaggaccaaatgacgcgtctttatactacaaaagtaacttcaagacgatggcctatgtacgtgttttataatactcttgacttggaagcaataaatgcatggattatttataaagaaataactggaagtagactcagtcttcgtaagtttattcttcggctgtgtgaagaattatgggccccatacctatgcctcccgaaatctggaactacgcctagcaacaccaggtctaccaacaactatcactgttactatccaaaaacgacaaaaatatcagttgaaaatatgttgtagaggaaatcatacttcaaatcattgccacggttgtaacaaggcaatgtgtggcaaatatcaaaaactgcaaattgtatggtgttccgaatgttttttattggcagcgaatgtgttaaacaataaaagtaaaaaataaaattagattctaccgtctagagttgatttaatttctttaaactgagttttaattgattaaagaacgtggggccaaaatgatcccttcc

SEQ ID NO: 10503 - DNA, 701 bp, Diabrotica virgifera
aatttttttaagtagtatataatttgaagtaattgagtcctttaagttatttcaaaattgggtgaagcacctttaaaccacccaaaaaacatgtttttcattatttttaagagtttttgcgagtttttgttgggttaaggcagtggtttccaacctgtggggcgcgccccctacgggggcgcaagactgttgcaggagggcatgtagctattacaattgtttgttaccgttaggaaattgcaacaaaatgtgtgaaaattaatttaaaaatgggataaatactattaaaaagcaaattttattattttttgtatattttgacatgacattggatacgattttgtacctcattaaataaattataatgtcagttgagtatttatgaaattagattgttagaaaaattaaggggcgcaacaattttttgttcttttaagggggtggcaggaacaaaaaggttggaaaccactgggttaaggatattatgttttcagatcaatataacctgaatcaatgcttcttctaattcatattcaaaaacaatacgaaaaagaatcttcaggcctcaaagaagcaaatacctggtttatgattttcctttccgaatatagactctaactcgttattgtatccgcgccttaattcgtttgtcacgctgtctctgcaaaagccatatatcattcgaaggattttacgttccc

SEQ ID NO: 10504 - DNA, 706 bp, Diabrotica virgifera
  SmartBlast Evalue=2E-96; Info="Ubiquitin conjugation factor E4 B, putative n=1 Tax=Pediculus humanus corporis RepID=E0VKR5_ PEDHC"
gctgcaggttgaagttcaacatagaagctaatctgtctactaattccggcctcaagaaaggctcctttatatcaacagtcaaataatgaaacatatctacagtctccctagccagcgtcaaatacgacctacattgtctctcgtccgagttcaattgcctcattcggctctgttgctgttccgacggtaacttcgaccatttgtcgtcgtcgctgatcaattcctggacttcgtggatcctcttgagggactccagcgactcgtcgagcaggaaagtggtgtcgttcatcagcatgttgacgaatttgacgaattgcgatccttcgcgagattcgttgattagagtttggcgatggacgggagatgaccacatttttttaataattaaactaatgtgataccgtatggaaaacttatcgtaaaactcagaactggaccctgtagtttccacttccgtgtagaacttcatcagcgaactaggcagaatagtctgcgagatatggtggttcataaggcgagagtatatgagttcgcatctaggctgaattgaaggaaggatcacaaatactacttcaactagtttggcaactaaataggggttcttaaccatattggaagaacatatagttactaataaccacgtgatcatactatcttccatgttatcagctattacattcgggaaatattgtaatgcaaacagaag

SEQ ID NO: 10505 - DNA, 706 bp, Diabrotica virgifera
  SmartBlast Evalue=1E-21; Info=Protein Muted-like protein n=2 Tax=Formicidae RepID=E2B814_9HYME
tagatttaatataaatttcatcatcttcatctattaagtgatatactttcggtggtggtttatcatttttgtctgttttgtttttacctagtatattatttattcctattgacaagtcattacaattcttaaggtttttaatgtaggattttaattttttagaaggtctgattcttattgctgggtttacaattggagctgtattggtctgagtcattttcaactaatcaaatgagcagcttcttttctatatcctcataaaatttctttaattcttcttctctggtttcgaattggctgtttatttctgaatattttgtagtgataccgcccataaatttatcccaatcgagttttcttttattcctcgactgttccaaaggagtgctctgtttgtaggtttcttctaactctgaaaatttatcacaaattcgaagtgcttcctctaaattatcattaattttatctgtaagtttttcagcttgcttcagcttctcaatctcagtgtctttaatctctgttatttcttctatcgctttaaataagttatctacttccttatctttccgtctttgttcaaatgcttgtaatatcaatgatatttctccatttagaaaaggtctgtgatcaaatagtctatcccaaatcttgcctacatccttaactacctcagacatggtaaatacttgtcacatttctgaccctg

SEQ ID NO: 10506 - DNA, 700 bp, Diabrotica virgifera
cataagtaaaactgacatatcgacatgaaatcggaaaataaaaaggacgaactattaataatactcattgtgggtataaggagttgtataattttagtgactatttcaattaaagaaagaaaaataagtactggaaggcaatatcagagcacatgagacaattattaaaatgggaaaatgttgcgatgttctagcgaaatagagcttataaaagttgtatttcgttttgttacatcaatttttacaatagataagagtttttgatattttccgtaacctattctaaagtattgataaaatttgtcttgatgatcgatgaaatgaggaaataaagtagccaattcactttccgtgtctcgccttttactcatttttcttgcacgcagttactacgcttcctttttggaaactccaatttctgttgtttctcttccttacacaacaaactaacaataataatttttggatacatcttccctcaacggtgtaatcagaatgatccttaaggaagggggagtaaaactactggatggtctctggggtgcttcctgacatagtgtcaggaagcaccccagacggtcttcgtgtcaggaagcactcctagagcaaaatattggtatgaacattaacggagagttaatcaacaatatacgatacgctgatgatacgttaatagtaacagataacctagcaaatttac

SEQ ID NO: 10507 - DNA, 705 bp, Diabrotica virgifera
tattgtatccaatgtaggaatctgattgtttaaagagaacgaatgaacttttctccgaaggaagtcttctatgaaagtcatcaatttccattggttgttttccttcatgtctttttggctcagtaatatttcgttgtttcttccacttgaaaatctgttaatggtttctttcactaacacgtgggataccggagcacatagtcactacattaggtttgtttcaacccgtcacattgccattcttgaatggttacgaggatgcgcagtaacgaaaaatacgttactgcgcataattttacgttattgcgcatgcgcgtaacgatacaagaacggaaatgtgacgtgttggaacaaacctattattaaccgttgttaaagattgttgatgaagaagggagtcatgaacattaaacacaagagttttttctttcagagataacgcgcggttttttaacctctatttgaagatttgcatatgcagtgagctgccagttgtgaacaaatagtctttaatcattctaaatactactaaaagcttgcaaccagctacgatcctctctaaactgcgaaaagtatttttgggtatacaggtttaactgcgatattatgctgtacttatattcctaaaaagtattgtttaatagtttttaatagtggcagccctgttatgttatacatatatttgtgcacgtgtatactgtatat

SEQ ID NO: 10508 - DNA, 704 bp, Diabrotica virgifera
  SmartBlast Evalue=2E-60; Info="Crossveinless c, isoform C n=2 Tax=Drosophila melanogaster RepID=A8JR05_DROME"
cctgaccatgaactggaggtacctgaaaaagacgtcgaatttgaagtcaaagggccaaacatattccaattatgtgcttctcaactacaagtcttgagaaagttagctttgttgaagttgacttctcatgtggaaaaatactgtcctgctcaccgaacaggatggaactgggatctgcgcaagtttctcaaaaagaataagttaccggactataaagataaaaacatttttggagtaccattggctataacctttcgaagatctggaaaatttttacctgctcaaatagaagaagccatgctgtggcttgaagaaaacgcctcggaccaggtaggaatatttagaaaatcgggtggcaagtcccggatccaaaagttaaagaacaaaatagaagcaaatcaaagagttgactacagtgatcaacagtgttatgatgttgccgacatgttgaagctgtacttcagagagttaccggaaatcctgctaacgggtaaattatccgaaaccttcattttaatatttcagtatatcccaacatacttgcgcatggaatcggttatctgtgcgcttctgttgttacccgaggaacactctcaagtattacaggctgtgttaaacttcttattgaatatagcgagcaaatcagagcaaaaccaaatgaatgagtacaatttggcactgtgctgggcgcctacattgttcga

SEQ ID NO: 10509 - DNA, 697 bp, Diabrotica virgifera
actgtatatcgaaaactacggtcgtgctggtgcaaatttgttttcctcagagcctccttgaaaacaggtagacctagaaatagtactatcggaggatggagggagacagatttaaatcaaaacgaaaccgtagatttttttattttatctaagattaaagttacagtaaattttatgggtcttcgagtaggtttgtttggaaatgtcaaaatatcatctaatgcgacgtcacgctctggaacagctcccggagcgaaacatgatactctctgcgtaaagtttagattcgtgtacaaccgacgacagtgtttgtcatcggccatggttcgttccgggagctgtagttgcccagtcttagtaaaattgtatgcatccgcagccaataatacaatgtaatatttattcggtctcttatttccaccgaaaccgtgtctcctttctatatataaatagtacttattaattaaaaatataattatattcttattcacaatgatggtttacaacaaacttacacttgtataaaaatctgacataaatttgtaccttgcaattatagcaatatttaagtcaactgtttaaaaatatactttcaatctttacaaaagctttcttatcccttgcacggcaacattgcatatatgttgagaaagtcctctaacgaaaaacgcttggtatggttaactgcaaaatattt

SEQ ID NO: 10510 - DNA, 700 bp, Diabrotica virgifera
  SmartBlast Evalue=6E-38; Info=Suppressor of actin (Sac) n=1 Tax= Aedes aegypti RepID=Q171G2_AEDAE
tgatattataagcacacaatactcgggaaccggagctttaaaaacggattttactagaacaggtaaaaggactaaggctggagtttttcgagacggagtcaattcgcttaccagatactacaaaaataatttaactgacgggtatcgccaggatgccatagatttgttcttaggttacggcaaaccgatatctccactaagagtagacaaatcgtggcgatatattacttacccttcggtacttttagtcgctgtatccatgtttgtagcttctgctgtgtttccttcggaatactcaaccgaatctcttctgtttttgttgttttggggttctatggtctacgccacattgcacaccatattcagatacggcgttgagttcgtggacagacctaggctcacgcagtcttagcagttcgtctagtcaggtagtcagggggatgatgtagtagggaatggtattattcacgcaccaacactttgaagaagcttcctgtactatttatgtaattaataattaatatcgagattcaaaatttgtctagctgtattttctacatatattgtgatggtgtaggcagattatcggagaataggccatttttgggaaaagttatttaccagcaattttattgctggaatctcttatgattctatatattagtgatatgggtatgcaaggtccgcggatggtgtgctg

SEQ ID NO: 10511 - DNA, 705 bp, Diabrotica virgifera
  SmartBlast Evalue=1E-62; Info=Farnesyl pyrophosphate synthase n= 1 Tax=Tribolium castaneum RepID=D6WSE5_TRICA
tgatcattccttatatgtgcctttactagaactgtttcaagatatcacaataagaagtgccttgggcaaatctctcgaaggagagattaccaatggcaatcgacacgacctatcgaaaatgaccatgacgaatttttcgttgatatctaaatatagaaccggatactttaatctacaactaccagtagcgtctgccatgtatctggcaaaaatgggtgatccagagcaacacaggcaagccaggactatccttctcgaaatgggccactactttcaagttcagaaagactttatgaattgttttggaaaacctggattcactgacagaattggttcagacatcgaagaaggaaagtgctcatggctggctgtagttgccctccaacgagtcaacaacgctcaacggcaaatcatggaaaagtattatggaaaagagggagacgaagccattgaagctgtcaaaaatttgtatgtagaactggggctgcctgctacgtacgagaaatatgaagaacagtcatacaaaattatcaatacgcacatccagcaaatttctaaagggcttcctcataaattgttccttacattattagagcagatgtatgtttccgatgagtaaaaattagtgctatattattagggttattaagaatgtgatattaggctgcacaaggacttttacattccaaaatagtttgggaccaa

SEQ ID NO: 10512 - DNA, 707 bp, Diabrotica virgifera
  SmartBlast Evalue=4E-35; Info=Mitochondrial succinate dehydrogenase cytochrome b subunit n=1 Tax=Aedes aegypti RepID= Q1HRJ9_AEDAE
ggtgatagagattttgacatttgtattatgtcagaagtttaattactattttatcaaaaaattatattaaacaatattaaaaatgtctctaatattcaggttagctggtcaaagatgtggtagtcaatttttgaaaaataatagtggaataattacctgtgtacgacctgtaacattgaaagcctctaacgtctcaagtccaaaagaggaaggacacgatgaacgtaacatgaaattagggaggccccagtcgccccatttgaccatttatgctccccaactaactagtatgttgtctattactcacagagctacaggtatggcattgtccttttatgcaattgcctttggtcttacagctgctgtagcacccgaatcaatttcttcatatattgagactatcgaatgcgcaggcgtaggagcggcaaccatagctgcagcgaaatttgtattagctttccccatgacttaccacttctggaatggtattcgtcatctgttatgggatactggaaagttcctcactattggagaagtctatactactggatatataatgcttgctctatcaattgcttctgcagttgctctttgtatgatgtaatttatattagctgagaactttttttttgttatgaccggtattatattatattattttcgatgaaaactctgttattgtgttaatttttttcaaaatatacata

SEQ ID NO: 10513 - DNA, 700 bp, Diabrotica virgifera
atgtgcaaagtgtgcaatgcacacgggcgccatcctataggggtgaccaaaacccggggtacaaaaattgacaaaaaagacaaagaaaacaaaaaaacaaaaattaaattttcaaataaaagttgagaaattaaataagattcagtttaaacccacacgaaattgtattagtatattcaggtagtcaggcattttaattcattttgttatgcttttattctgtttgttttattttgatattttagtctactaataatagtccatttactcacggttttgttgtaaattttaaagaacctcttatattgacataaaacttgtcatacacatagctaacaagacaagaagtgatacctactgtaccgatgtgtgcttatactctgggggtaaaaggggtattctcagggggatacgcccgagaatacctgggggtattctcgggggtgagaaaacattcgttcaaaataaaaccggaattggataaactgactaattctaagcaacttttgttgtatagagattttcactaagtcaattcttttcgagttatttgcgagtgagtatgttcatttttcaacacaaaaaccccgtttctagacgatttttctcaattaaaaactaattattttatcgaaacaatactctcagcaaaaatatagcttacaagaaagtgaaaaaaaataatttatataataatatg

SEQ ID NO: 10514 - DNA, 702 bp, Diabrotica virgifera
  SmartBlast Evalue=3E-10; Info="Caldesmon, putative n=1 Tax= Pediculus humanus corporis RepID=E0VW31_PEDHC"
agagagtcgtcaagaactggctacacagctcgcccttagtagagaactcacacaaaaactaaaatcagtcaacagtgattctgaagatgaaggtgcagttgaagacgaaacctcgccaacaaatcagaaagtggatgaaagtaatccgtgggttaacggcataaaaccaacaaaagaggttgctgattttgttagtgggtacagaaaatactggaatgaagttaataaaaacaataataaaaatgaggaagaagctaaacaagcgcaaacaccgaactgttcagacactgatgaaagtgatatcaaaaataataatatgattgaccaagacgataataaacgtgttaagaaagtcaaaaataagggagaaaataagatcaaacgaaatgaagttagttccagcacttcctttctcaaaaacgaaaagcgaaaagtaaaaagaaagaaaaaataaagaaggaaaataaaacgaaagaaaaacaaatatgaaagaaaaccagataagaaagagagcaagaagagaaaatcattagacatgtcagaatgggaagttagctataataaatctggaaatgatgacattgaagatatgtttgattctttagaagacaagatgaacaaaaaattagccaaaaagtcactaaaattaaaaaacaaaccatcacaaaacctcgtaaggaaaagaaaacgaaactctcaacc

SEQ ID NO: 10515 - DNA, 705 bp, Diabrotica virgifera
  SmartBlast Evalue=7E-56; Info=La-related protein 4 n=1 Tax= Camponotus floridanus RepID=E2AFJ4_9HYME
ctcatttgtaaaatttgctgcgcggactgaaattttcaagaagttgcaacccataaattggttataaagttagtgcagtttgcagtaatttttattttccagagtatttcttgaatatcgtatgtccatccagaatctaaacacattcgacccatttgctgatgcaagtaagggtgcagatgatgatgttcaagacggccttgttcacataagaatacaacaacgtaatggtcgcaaaactctgactactgtccaaggactctctaaagaatatgacctgaagaaaattgttcgggcatgtaaaaaggaatttgcatgtaatggaacagtaatcgaacaccctgaatacggcgaagtcctacagttgcaaggtgatcaaagagaaaacatttgccagtggctgacgaaagcaggattggcaaaacctgaccagttaaaggtccacgggttctaatgtaccttagaggtgataattttaatctacgtaaatgtcagatgtcgcgcttttatttaaatcacggaatttttaacagcatgtgcccattcaggattgctagcagctagcagttagcaattttgtacaataattttataattgtgcctttccataaatacattagttctcagatattgtgtttttcatttgatgttgactgtgtttagtttttaatgattttcaagtaataataaatgtctggtctagtg

SEQ ID NO: 10516 - DNA, 705 bp, Diabrotica virgifera
  misc_feature (690)..(692): n is a, c, g, or t
  SmartBlast Evalue=2E-37; Info=U1 small nuclear ribonucleoprotein C n=2 Tax=Formicidae RepID=E1ZYW0_9HYME
atgagcagtaatgagtaatgtaatgtttataaaagttttccagaaattttaaaagcatttttttatagttgtgagttactgaagaagatttctggatataacctaaaaatgccgaaatactactgtgattactgcgatacttacctaactcacgattcacctagtgtgcgaaaaactcattgtactggcagaaaacataaagacaatgtcaaattcttttaccaaaaatggatggaagaacaagcccaacatttaatcgatgccacaacggctgccttcaaagctggtaaaattgcaaacaacccatttgctcaacctggaaagggagtagccattccaccaccggcacaacttaccatgggtcagagaccacctggagcacctggaggtccgggtatgatgccaccagcaggtatgggtccaggtccaggcccaatgcccccaatgatgatgggcccccatggaccaatgcctcctatgatgggagtaagaccacctatgatgggaatgatgccaatggggcctatgggtccaatgggtccagttcgaccacctatgggtccatcaatgaagaattagatcgagtattagaatttaagattcctttggtttatttcaaagtattcactgtaaatatgtgtttattttaaatacttaagtttagtttttgtacttttattttgtcaatannnggtttatcttgtc

SEQ ID NO: 10517 - DNA, 705 bp, Diabrotica virgifera
  SmartBlast Evalue=1E-28; Info=Succinate dehydrogenase membrane anchor subunit n=1 Tax=Glossina morsitans morsitans RepID= D3TQ85_GLOMM
cattgtgttgggggatttttaaaaccttgtaaaaacattttctcattaatacattttaaattacactcattatttttaaattttagacgtaaccaactaacatcagcttagtctacaatggctttagcaataattttgagaaattcgactagaattcaagcatccccaaatattttcaagactgccatcgctataaactcaaggaagtcattcacacaacttactactggagccaataaaaatttgaatattttaccaagaattaatttggctagctatgtgaaaaggaatatgtctgctgatcacagcaagctatggccaatagaaagggctgtatcaattgcccttttgggaatcaccccactagtttttatatcccctaatactgctctgaatgacatttttgctatcgccactgtagctcatttccattggggattggaagcttgtgtggtggattatgtaagaccaatcgtcgttggacccgttctaccaaaagtgactcttgctttgttgtactttctttcaatttccactttaggaggacttttgtattataatcaccactccgccggtattggtaacgctgttagagatttctggaagattaagaaataaagaataaatgcaatgcaccgtttttgttaactttatatttaatgtatattacagtatttaataataaataatatatagtttcttttt

SEQ ID NO: 10518 - DNA, 692 bp, Diabrotica virgifera
caaaatccattagaattttagtttactagggatagtgtaggctgtaggctagaggttttagttaagtgcttattgattgagcaatttgaaaagtattattagcttttaaattactaaagtatcattacggaaaaaatctaatattggactttctacacttgtttgtgacctttttttgtaattgagatgaatatggaaagaatcatattaaaaaacgcaccttcatattgggttgaagattataacgtatcaagccaataccctcttactaactataattcacctgaatacaaggaaatttttggagaggtgattatggctacaggtctgacgaattacactcgtattcgatagaaatcaaaatatttacgatttgggccagtttttcattagagaacagcttaaaatcgctttatgtaatggctccaaaaccttttacagagtaagacgatttatgaaaataaagaataagtatctacccgttgctctgcaatttaatgcagattatagaagatgtggcttgtcaaaccagacattcaaaagtaaacttcaagatctggcaccagatgaaatcattttagttgtgcaaattaatacagattcgccaaccaatgataacattaccccagataatagctctgattattttatagaatatatagtgtatcctcattaaatcatttacaaatgag

SEQ ID NO: 10519 - DNA, 705 bp, Diabrotica virgifera
  SmartBlast Evalue=5E-70; Info=Draper n=1 Tax=Tribolium castaneum RepID=D6W8W0_TRICA
gcggtagtagtattactggtcttctactatagacgacgagtgtctaatttgaagacagaaattgctcacgttcagtatattgctgatcctacatttgctccagatcgaaatcattttgataatccagtatattcttatcaaggtaatggcaagagagacaatgacaagttgctcaacaattcgaccaaaattcataacaatcttcataaaccatcgaatactaatttagaaagagcgcgcctgggaggttgttgttcaacagacgatgatgatttgtcaaaaggtatgtacgaaccgaccatagacgaattaagaactcttaaaaatagagaagcagatgcgacgaatccgaacatttatcagagtattgaaaaattagatcacgtttatgacgaaattaaacaaaaagatgtaaatatcgaaatggaatacgaccatctcgactatacgaggcctgcgagcagtttaaaaccacattaccaaaggatggctagtcctttcggttccagggatttaacaaaagacgataagctcggacctgccgagtagataatcatccattagtagcttctttatccacctatttattactcaatattttttacgcaaattcgataatatagctagtaaaataatacttcctattaaaaacacttcaatggaaaatataaaatatcaggaatgtctagtttaactaatttaaac

SEQ ID NO: 10520 - DNA, 706 bp, Diabrotica virgifera
  SmartBlast Evalue=8E-69; Info=Derlin-2 n=2 Tax=Aculeata RepID= E2BF68_9HYME
ggaagataagtaaataatctgatgtggccaaaaaattaaaatttagtaaactctagtttttttataatgtcttgatagaaattgaatgataacatggcgtaccagactttaaggaatgagtacatgaatatgcccccggtaacgagggcatataccactgcttgtgttattacaaccctagctgtgcaactggaattggcctccccgtttcaactctattttaatccaattttaattgtgaagcaaggtcaactatggaggctggtaacaacattcctgttttttgggacatttggcttcaactttttttttcaatatgattttcacatatcgatactgtagaatgttagaggaaggttcatttagaaataggacagctgattttgtattgatgttcctctttggagcagcttgcatgattggttttgctattttttgttaacttattattcttagggcaggcgtttacaataatgctagtgtatgtatggtctaggcgaaacccatttgttggattgaatttctttggactcctgaattttcaggcgccatatttgccgtggattctcttggcattttcgataattttaggaaacgcggtgtatgtagatttaatgggtattgcggtagggcacatatattattttctggaagatgtgtttccaaaccaaagaggaggtgtcaaaatattgaaaacgccaagttt

SEQ ID NO: 10521 - DNA, 702 bp, Diabrotica virgifera
  SmartBlast Evalue=2E-79; Info=Glycogen debranching enzyme n=1 Tax=Camponotus floridanus RepID=E2A7S3_9HYME
tcggactgtcaaaatcggtcatctcctggttagccaaattgagcgaagacaacaaatacccttacaagggagtagaaagggtgtccaagagcggcacaaagaccaactggacgtttaaggaatgggctctaaagatacagaacaattttgaaaaacacttctgggttaattccaaaccgacagatggagaaattcgacccgatttagtaaacaagagaggcatttacaaggactctcatggctcaagcttagagtataccgatttccaattgagatgcaacttccctgtcgccatggttgcggcaccagaactgttcactccaagccgtgcttgggaagctctgatacaagcagagaaatatctattaggtcctttaggaatgaaaacactcgatcctgaagattgggcatacaaaggtgactatgacaattccaatcaatcagaagatccttcagtttcacatggatttaactaccatcaaggccccgaatgggtatggcctattggattcttccttcgagccaaactcattttcgccgcacaaaaggagcgttgagagaaacgtcgctagtacgaaattgatcctgtcgaaacacttcgtcgaattacagacttctgattggcgaggtctgccggaattgacgaataaagatggtgcctattgcaacgatagttcaaggactcaagcgtggagcatgtct

SEQ ID NO: 10522 - DNA, 696 bp, Diabrotica virgifera
tgccaccagaaactcctcctggtggagacgccggtatatcaggtggcgtatcagcaggtggttcaggttcattagaaggagctataacacccaatgagccaacagaagctcctcctggtggagatgctggtatatcaggaagcgtatcaaaaggtggttcaggttcatcagatggaagcatatcagcgagtggttctggtttttcagagggagctataacaccgaatgtgccaccagaaactcctcctggtcgagacgctggtatatcaggtggcgtatcagcaggtggttcaggttcattagaaggagctataacacccaatgagccaacagaagctccttctggtggagatgctggtatatcaggaagcatatccataggtggttcaagttcatcagatggaagcatatcatcggctggttctggttcatcagagggagctataacacccaatgtgtcaccaaagtctcctccgagtggaggtggtagtatatcaggaagcgtatcagctggtggttctcactcaactaagggaaaactaactagttctgggtcttataaaacagccggtgtagatccgagaggtaactcaaagcgatgcaaatgcaaaataagaataacaaaaacacataatcttatagaattaaaactattatattatctttatccttcaaaagtaaaactgatctgatttg

SEQ ID NO: 10523 - DNA, 674 bp, Diabrotica virgifera
aaaacatcgaatttgatcatacgcgggtgcataaaaacatatcttacactgaatattttatttctgcacctaatacctacatatttaaaataatctctcctctactgctcggtcatgtccagtggcggctcgtggccttagagacaaggtcggcaaggtttttttgtctcctcatataggtataccatcaaactaaaaggcttaaattcatcataggagattttgttgtttttgtttttttttatttgatgtacttgacattctctcttgtttcatggtgtttcgacaatacgtgttgattcttttgagacaagataaatcccgtttatttgaggcagaaattggtggtaataagaatattgatgaacagtttgttgtaatgaattgcagtacttactacatagaattatacatacatattttgtaacttatcccactttctgaaaatatttggatcggcataatttataagtacctaacttgtaataataaatatcttggaaattctttggcgaagtaacttttaaattttaaatcgccaaagaggtcaaaaatttgcaaaatcttcaaaattcgaaaaacgagtatctatttgcatatattagtaggtatccaaaatttcaagatatacctattcgtttttcgtagatatgtatcatgtcgtttgtcttttt

SEQ ID NO: 10524 - DNA, 705 bp, Diabrotica virgifera
  SmartBlast Evalue=2E-13; Info=Nbs n=1 Tax=Tribolium castaneum RepID=D6WJM6_TRICA
gagaatagcagcctcatcaaaagaatttctcgttatgcagagtcgtaaagacgttgatgacaaggcatataaagacattattaaacttttgtcgaaacaaaatagacgtaccattcctattcaagaaatcgccatggctattatccatggatcgtgcgaaaaggattgcaatgcagaatttaatagagtccaacaggtgttcgctaggactaccaacaaggaacccactcagcatgtactactagctaaaaatacccaaacacaagattctaccgctgaaccgacttcatctaaggttattgatgagactctggatccagatcagccgaatgtaccgccaattcaaaagagagttgtttcagttcaagaaaaagatgtagagactgaaaaacgagagattcgtacagaaaaagatcatgatactgggaagagacttgctgcagacccagatgagaataatccatttaagaaaataaagttggataatagggacaacactaaaaggtcagatggtaaaggtgatgccgaatttgctaaaggcaaaaccagcagatttttgtccaagaaaccaataacagaaaaaagaaaaataatagaagacagtgattctgacgactcacagccagcaaaagtcacaaaaaaagaatccgtttagtagcatcacattaacaaaaaaaagcaacatcgaaaataacccatttgcat

SEQ ID NO: 10525 - DNA, 702 bp, Diabrotica virgifera
  SmartBlast Evalue=1E-107; Info=Proteasome subunit alpha type-7- 1 n=4 Tax=Endopterygota RepID=E2AC20_9HYME
aaaattttgaggttgtgtaggagccgattgttctgaattattttaaagtacaatttaaattttgagaaaatgtcttcaagatacgatagagctataactgtattttcaccagatggtcatcttttacaagtagaatatgcacaggaagctgtacgcaaaggatccactgcagttggtgtcagaggtgccaatgcagtagtacttggtgtagaaaagaaatcagtagctaagcttcaggaagaacgtacagttagaaaaatctgcttattagatgatcacgttgttatggcatttgcaggacttacagctgatgctagaattctaataaatagggcccaaattgaatgtcaaagccacaaactcactgtcgaagatcctgtcactttagagtatatcacaagatacatcgcttctctgaaacaaaaatacactcaaagtaatggtaggagaccatttggcatttcttgtttaattggtggtttcgattatgatggaaaacctcatttatatcaaacagaaccttctggaatttattatgaatggaaagcaaatgcgacaggtcgttctgcaaagactgtcagagaatttttggaaaaattctataccgctgaagaggtagctacagaaaaaggcacagtgaagttagctatcaaagccttattagaagttgtacagtctggacagaaaaacttagaaattgct

SEQ ID NO: 10526 - DNA, 701 bp, Diabrotica virgifera
  SmartBlast Evalue=2E-27; Info=Dfg10 protein n=1 Tax=Culex quinquefasciatus RepID=B0WNT3_CULQU
tggccaaaatttcagtggctttgtactgatgccaccaggcccacaagaatagaagtacagacagtttctctatatatgtaagggttgaaatatctacgttttcaaactcgtatggagaaacatatgcaaatttcggtgcttcgcataaaatggcaagtgccgttgctggataatagacaatcccaacaaggtattgaggaatgttgatataactatgtttgccaaaaattgaaacgaagtgtgtatcataaaatcgtcttattacttgcagtgacatcagacaaactactacataagtttgagttggtgtaacaaaagaaactctttcttgtccacccaccagatctatcagctctatgacaaaccatggaacttcatacttcaacaggtatacagcagtaaccatggcgaataccacagcgtagcagttcagagccaccacataaaaatgcttgaaacatgctttaggaatctctatgagaaattttgaaaaacgtttactcttttctttgctagcaaacttgccatatctaagagcttgtgaaaatacggttggcaagttttcttcgaacaagtttactatattggagaagagtatcatcagggttgaagctaaagaaaagccaaggagaatgtaattcattttgttttgttgttttgcagttctctgtttctaaagtatcatgccggaaacttgacag

SEQ ID NO: 10527 - DNA, 704 bp, Diabrotica virgifera
  SmartBlast Evalue=1E-11; Info="p31A, putative n=1 Tax=Aedes aegypti RepID=Q16XW9_AEDAE"
caaactgagatgtaaaaaacatgtgtaaccaaatttatttaaacttaaacttattcaaaagcacagcttatacaaaacaaatcattttaaacaagtcagaggaacattgccacaaaacttacaaaccaatgttttataaaaacataggaaacctaacataaacccttttacataaaacgcaacaaccaatttatcaaaatataactaaacaaacattaagtataaaatcaaatgcacttttttgtaactgcaaattcctcgaaaacatataggtacatctaaacatttttcttaatagcttcatcaacttcgtcaacgaaacccttgaatttctgccactgttccatggttagcatgattccttttttaccaggtttaagttcaccgtcagcattgtagtactctctaatattaacataccaggtatttttgaactcgctcaatttaacgaacttatttttacccagactccaggaattctcttcttcgcctgatgacttcgaagactttgactcaggctttttggtcttctttgctggaacatcatcgtctggtccggaatctgaatcggaagtatctctctttggcttatttttaggcattttgaatagatcgaataatagacagtaaaattaaatttaaacaaagcttgtaactagaaaaactagatcgaagcgaaagttaagccggctgccacctttgag

SEQ ID NO: 10528 - DNA, 704 bp, Diabrotica virgifera
  SmartBlast Evalue=2E-45; Info=Choline/ethanolamine kinase n=1 Tax=Aedes aegypti RepID=Q16UX5_AEDAE
atacatttcctgttctattttagatttgggagtaacatttttcatataccttatatgtttctcgggatccgaaaatgtgtctggtatcaaatctaaaaattttctaatcttatcccataggaatgttttcgaaggtccattgttgggattcactttatgtagaagtgccagctgtttagctactaatgtgtatattgtcggttctctcacagatttgctagttaatgtacaacctggtagatatctataagccagaccatttttgaatgttgcgtagaggtttggtgctaatcctgccttgtgaagtagaataatgtttcttgtttctgcttttctatctataatcagatctgtcttgtttccatatatcctgacgaggactatttcttcatcatctgctccctcgggcttgcatcctaccagcttattggttatcccatctgtcaacagcttaaacgttatgctactttcttcccaatttggtctaataactttcaaaatttgcaaggccccattttggatatcattttcacttatttccacatttacgtgtggtggtacttctggagttttgaaattcatgtggactgtaatattcagctaccttacttattatttagtcaaaaagtgttaatatttctggcctcgaatgttgacaacgacaaccaagttcatacgttcattcactacaaaacacacttgtt

SEQ ID NO: 10529 - DNA, 699 bp, Diabrotica virgifera
tttggttattatagtcgtgaaaatttttttatggtggtaaccaaggtgattcctctccaattattcctctcaagttattcctatccaatttttgcacagtatgaggttgtcttttttggaaacttaataatgttacctttttccagtccgctggaatacggtttgtttcctacagctctcggattacgggagcaaaatttcagcagttgagggtctttttcacgctacgtcttattgtacgttttgtgtgtcatgcaggacctacgaagaaacgtacgttttgtcaaatgtatagatacatattaacgtttttaaaaccatgtgttcaatcttcgagacaaaacaatcgcgcgactacaaatcgtaagtggagtccggcgcctatgcttttcccatcatagcttcgatctgaccttggatttcatttcgattcatttcatttcttgttctacacttcacaagagcgtacgttttttcgtacgttttgcatgaaacacaaaacgtactagttgactagttattttcagagatttgatagctgttattatctccccttttggaaggttctcgcaagatatatgcaagtctatattctgcgggctttcaacaatttcatataggtatctttatattataggtactctatcggcaataatcgcgtttttgcaattttgtataatgtttatataaacgcaaata

SEQ ID NO: 10530 - DNA, 700 bp, Diabrotica virgifera
  SmartBlast Evalue=4E-63; Info="Nicalin-1, putative n=1 Tax= Pediculus humanus corporis RepID=E0W2G8_PEDHC"
cttggtaattcatctttccaccccggataaacaaaaactatgttatatcgtccacgggttttttgttctgcataaagagtagaaaatattctgactaattccaaaaggattgcaactcccgatccgtttgaatcagctccaaatgacaagtcaggtgctaccccaaaactatcgtagtaggcaactacagctatggtaggaatttttccatcggcgctataaccagacaactgtccgtgtatggtagcaatcctagcatcagttcggacagtgggagtactagcagaaataattatctggtatccattacctgctatagagtttatcatagcttcagttgctgacttgctcagattgtcttcaatgttgctttcaacgtcttctattatggattttaattctggagaatattttacgaaatatactggaatcgtgacctcttgtgccaaaattatgttttctaatagaagaaggtgctgatactcttctgctgataaagttgataaatgttctggtaacattgccaatagggctccagctttcgatttgatatttttaaaactatcaacagtcaatgacttaaagttagttactacacaatgtctagcattattccaattagtcagcgatttggcttctaaatttatacccgcacttctacaaccatgaggtattccatgtaaatcataatgtggcattc

SEQ ID NO: 10531 - DNA, 703 bp, Diabrotica virgifera
aaccaatacgtaaattactaaaatttaattacactaggaaaatatgtatcaaacttaatttgagtgatacattcaagaagaagtaaccttgaactacaaataggtcgaatctctctgcgaaattttacttaataatatggtaaatagacttggaagcgtacgcgagttgttggctccatatggtacccttgggcgttaatgggtcaattggacattattctatacatacatatatacaattttagattatttatttctaatttagaaattatgcgaatattgaaagttgtctatactttatttcacgttaagaacagcacgtttggcctatgcagatcagtgttgtcaggcatgtgttgctactagactgccgatataagattcattctcgataagatagaagcggcatcatcgctctcttatcttccataagaaacacagcacagtcctatctacgcaacctttcgttcttaacgtaaaacgctgtatatgttatcgtttctgagtatttagctttttgatctatcgcttttatgatgaccaaaacgatagttggtgaattgtacctttgttgtactaagttttaggttatagcctcgttggttcttcgtgcaagtgatattttattatacagaagaaattagtcacgatagagtatgtgttatagaaatagtttataatattttgaagctattgctcgagg

SEQ ID NO: 10532 - DNA, 702 bp, Diabrotica virgifera
gaaaatcgtcttggagagatagatcttctaaatcgtctaagaggaggtgtcactgatcgtcttcttggtgacaatgatcttcttgggctacgagataaactgcgagaagggcttctagaaaatgaccttctaggagatcgtcgccttttttcaactatcgctttattcttcataacgaaagccgcacttctaggagataaaggcgccattgtggctgtagtcagagattccgtgttaatggctagaggtgataatggtctctcaaaataaggatgaggagcaggttgtgggatcatgttaaatccttgaggtataaatattggttctggtacgggtggaataaacggtaataatggttgctgaaaatgttctgggggtataaaaggcatcataggctgaggcggtaccataggtgatggaaaaaatttgggttgtcttttacggaaacgatttcctctaaacggcgatcttgacctaggacgttttctcatagttccaggtggtgcagggtttgaaaaatgttgtcctaaccctggtatttctagacctgggctaataataatagggttagttttgttcatatttacaactgtaattgcttggggctgagattgttctggttggtctccctctttgtttgtcttttctaagagatcctgatctgatctaatcctgataagatctctggttacattaggttca

SEQ ID NO: 10533 - DNA, 704 bp, Diabrotica virgifera
  SmartBlast Evalue=1E-46; Info="Riboflavin kinase, putative n=1 Tax=Pediculus humanus corporis RepID=E0VUF1_PEDHC"
tgggaagaagaggtccaggaaagtgattttataactcaatcaaaatagaaacacagagccgtactcaagttagttaagaggaaagagggcacttacttccgagtcggaaaataaactaaaattttaggttagagttaagagtcgtaagacgtaagtgaactgcaatttaacaagtggttttaaatttaaagttgtgttttgtttgacaaattgagaatgcccttaccacattttgcaaaaggtgaagtggtacaaggctttggtcggggctcaaaggaattaggatgtcccacggcaaatctccctatggaagcagtcaaccagctcccagacgatttggacactggtgtttactatggttttgcttcagtggatggtggagaggtttataagatggtaatgagtattggctggaatccattctataaaaataaaacgaaatcgatggaagttcatgtattacacgagttcgactctgacttctatgggaaggagattaggatagttattttaggttacctacgtcaggagaaaaattttaactctttggaatcattaatcgacgctataaaagacgatattaatcaggctagagaaaagttagacgcagctaattatatttcatacaaaacaaatagttacttttgcagttcgtgaataaggaataaataagtagtaaggacaaggacttttttatttctcac

SEQ ID NO: 10534 - DNA, 698 bp, Diabrotica virgifera
tttatattgctgaagaatggggctatggcatgttgggggaattgcttgaatcggacattaggtttaggaaatgcaagacattgaaaatggcccattttttggggtggcggttttttgtgctggcgagtgtattttgtttgactatttctgtccagttctctctctcctgtgcgggttgttttgcttcgaagaatgagtaaccagtcatgatctttatttagtatgaccatcgtactgaagatcttcctctggatctttttcccactcgttgtcttcatctatcattcgttccatgccttctgttctgctggttatatttccaaaatatctcagtacattttggttgattgttgtggtatatagtatttttgttaagttcttccagtattgaattatttatgcgatgcgcaatccatggtatgcgcaacattctacggtagaccctcatttcaaatgcaataattataatacgcttcactacatacgctgactatatttgccacccaaaacgaatgatattaatagtatcgtataatataaatcaattaattttttagaattttttaatacataaacatacgtttataatttagagtgaatagctttagtgataaattaaataggtgcgttgtatcattcaggaaattatattttaatgtttttgaatactctattattacagagtaaaatgcaataca

SEQ ID NO: 10535 - DNA, 703 bp, Diabrotica virgifera
  SmartBlast Evalue=3E-58; Info=Fork head n=2 Tax=Tribolium castaneum RepID=D6WMG3_TRICA
gatctctgataacgtcagcatcttttgcgggctattttgtatcgccattgtgattagagaaatgtatgagtatggcggttttgcgtgtgtgtaagatctcctgtaggttttatcggctctagctcgttgtaacgcactattcggcgaagtatcaccaccacctaaatcgccccggcctatagtcgcattatagttattaatagatgacattgtcgcacccatgcaagcattcatattagaaatcggcgaacctatcgttgaatatcctaattgaggaggctcactcatcggctggtccattcggggttgtattcgattcattgccatattggacgtcattcccgagttcagcatacccgatccgaacatagaagtctgcggggaacaactcatctgggccatcgccatagaattcatggagtacgttgttgtcatgggagacatcgcgttacttcccgtagacattgtatttacgtcaggatatagtttttgcgtcaacatattgcactaaagtattattgcactaatagtttccactcgtcgtatttgtcaacgattccgctctatcaattgattctatctcaaacgtcggttttgtttcattgtttacatcacgatcaaattcacaaacaacttaacactttaggtattccaaaacctacactgattggaaaaacaaatacctctggcagcctgtttactt

SEQ ID NO: 10536 - DNA, 694 bp, Diabrotica virgifera
ctgctgacaggcaaatacaagattcaattaaaaacttagcttgtggtgtggaggcttcttccggcactgtcctaggttatctacagctccagatctgcttcgggaggcgtcaggcgttaaaatttgatgtacggtggtttcctccggagctaattaactgttcgtcgaacccatgggtgactgtctcgaggaagtgctactttactattcacgtgattacttatctggggaacatactaatctctgacccaaaactgacgtgttaaggctagggccacgcccttctcctgggtgccaattaggtctgcagttacttgatgctacttacttggcggatattatagaaatcaaccagaaaggcaccagcatggtatttatgaaagtaaaagaaattaattgaaggtcagcattagctgattacgaaaaagacactcttattgaaactggtaaagttgaacgctttaaaattacgaaaaagttaatggcttgataaataccgttgcttcggaataaaatatttagaaagaacgactactggaaataattaaacggtttaaaatgaaaatgacaatattttgtcaataaatactatctgagagaatagaaatattttttctaatttaaatcgggcatcactaacttcattttaaaattgaaaatgtatatacagggtgcacaaaaagagtatagatgg

SEQ ID NO: 10537 - DNA, 703 bp, Diabrotica virgifera
  SmartBlast Evalue=4E-16; Info=Endonuclease-reverse transcriptase n=1 Tax=Bombyx mori RepID=D7F158_BOMMO
gtccttcgtaagtcgtcttgccatcgtgttggtggtcttcctctggtacgtttatcggctcttggtctccattcaactagtttacgagtccatcttccgcccttcattctggcaacgtgtccagcccatttccattttaagttacagcttctttcaatgacatctatgactttggtctccccgccccccacgggcaaaaattgagttatttttcttcactttacatattttcttgccttagtaatgaaattcaccccttattttcaacactttctttggaaacacaaagaatctacatatcgctacctacattctagtaccacgtatgagagtttttggtcgaaagcattagaggttgaatctgagtatattgctcacgctctaccgaatgattcttatcacaagtacgagaaaacattatttctcgtacttgggattagaatagttcagtggagcgtgcgcaatgtactcagaaccaacctctaactcttttgcctagaaatcctcatacgtggtgttggaatgtaggtagcgatatccctctttcactatagtgtttacaatccggggcaaagcacattaccatttttattatacaaaatacaatggttcacaaaaattcctaacctttgcttggtgaatatcactcggtgaatatcacttcatagaaatttaagaccggattatggtggtattatcttaa

SEQ ID NO: 10538 - DNA, 698 bp, Diabrotica virgifera
aaatttttttttaatatcgagtagtaaaatatgactaaatttcgggacaagatttaaagatttattatttatagttatgaccaaaatttcatatttatatttacatatccgaccccttgtatagatttacttgagtgtatcattcatgttaatcttactctcaaattactttttccagtaaaatgttgaataaaaggcacattacattggcaattacggtggcaaatttttatagacgcctaaaaaatggattatgtggtggacatcagaattcgtcattaaatcgtgcgaaacaaaaaattcaaaaagatttcattagcttatgagtttctcgaagtaacgctgtcgagtttttttagttttttttttgcatcactcagaagtaaaaatatcgaaatttcttctaaaaaaaaaagggtgaaaatcaatatatttattattgttaagcaaaaactaagcataaaaacaaaaaatatctcaacagcgttacctcacgaaatgtataaagaaaatctgtgcaaaatttcaggtgaatcggtcaagtagtttttgagaaaaacgcatttaaagttttgacaactttattttcaattttgtttgtccgtcaaatgcgcaccggaatgtttttgaatcgcggagtaatttacaaaagagaagaggaacagctgttaaacgtttctcactacgctcaagcgtgc

SEQ ID NO: 10539 - DNA, 679 bp, Diabrotica virgifera
  SmartBlast Evalue=9E-15; Info=Reverse transcriptase n=2 Tax= Ostrinia nubilalis RepID=A4KWG0_OSTNU
ggaaagattactctataatggctgtttgattcatttttgattcacatggaatttaaatctgcgatattaccgagtagttttctcgaacgaaagaattgatgcagatcatcaaatgtaggagaagtcggttttaaatatcatcatttacgtcctctgctggacttaagtctcccttaattgtttccacacttcatggttttatgctaattgttgccagtttttaccaatctgcctgaaatcatctgtccatcgtgtaggaggtcttatataacatccgtgatacctgttctttttttaagatcttcatttcttattttatcccgtagggttacgaccagcttgtatctttccatacgactttgagcaaacctcattttcgacgctgttgccatagttagagtgtctctgcttcataatgtcattaccggtaacacagattgatcaaacgcttgtctttttaaactaatcgtatactgcttctaaatacgtctctcagcgcttcgtaagctgcccaatcaagagacttaaacttttgcttgggcggttttcaatatatcatgacaaaattaagaagaggggggtatgatgtgaaagttttgaaatttttgatttcttattatttgaaataaaagtgcataacttcaaaaatattttgtaaaaatttcagattgatcggagc

SEQ ID NO: 10540 - DNA, 702 bp, Diabrotica virgifera
  SmartBlast Evalue=3E-92; Info=Muscle protein 20-like protein n= 1 Tax=Anoplophora glabripennis RepID=Q4PLJ5_ANOGL
ttttaactgttaaaaataaactttattgttataataaattaaaaaataaaagttacgtatacaaattaaaaaatagtgtaaaagttaaaaaaataaataaattactttccaaggataattttgcgaccagcacccatgttctgtccggcttgggaagctcctttgttttgaccagcttggagcccaatcatagtctcaccagctttaagttgttcttcagtgaattctctcttgttttcgtcagcgggtttgggtccaaggtaaggtcctttccattcagggtgcttgtaggtctgtctgccaatagcaaagagggtattggttacttgggcgatgtctttcttttcccagaggtcgacggtttggaaaacatcaatgtcagctacaccgtatgctttgattgcggcttggaagttgttgatgttttccatcattttgaattgtccaccagatgtgttgattttggcgactgatcctggagccaatttgttgatgagttggcagaggacagttccgtcacggataacatcttcgtaggcttcacctggagggaatttggcgccaaggatagtctcgatccatgcttgagcttctttgtcttgttggggatcgcgtttagcggcgagtttgttacggacttgacgttccagagacatttttgttagatattttgaattcactggtgttgaaaattttccaact

SEQ ID NO: 10541 - DNA, 703 bp, Diabrotica virgifera
  SmartBlast Evalue=4E-40; Info=UDP-glucose pyrophosphatase n=1 Tax=Aedes aegypti RepID=Q17M97_AEDAE
atgaaactttcatatcgtcagtaacttcacagtagaaggcagtttgtagactggcagaagtgcctacgccagatctataagatcctattttttgcatgctagaaacagggacatcatacccacattcctctaaaacctcctccttggctatctctgcttcggatttgttcttgtctataattccagcacataattcaatcgtaatacctaactctggtgggtatttcttagtgtcgagctcctctcccataattctatctttttctggaatgcttccataataaacagcaggcctaaattgtttcacaaggattaaaacgtttcttgaaacgttgaataaaattatggctacactgtcatgtactgttagtaagtcccaggttcttttagtgccattctggacaaaatgcatagtatagggtttcaaataaatagattcccgtaaaggttggataacaatttttgagacatcgtccattttagattcttgtaatatatttagaatgaatcaaaggatattaatgtaataatcaatgtacttgttgacaccaaattatactgagcatatgcactcagtagacattgaacaaataatatattcctatgaaaatacgcaacttcaaatctgaaagtaaacttagataacctgataaaattattcccttaattccttcttaattttaattcatacataaactttaat

SEQ ID NO: 10542 - DNA, 705 bp, Diabrotica virgifera
aataatggtgcattatggatcatatgtttttgtgaatcaatcagtggacaaaatacagcatcgcataaaaacacaagagcaagttgaataaaaagggaatgagtgtcgctagtaagtcggggagcttagaacgcttcgtctatggcagatccagctaacacactcgctgccgccagcactagccgccgcaagcgtgtgctgccaacgcagccacgttctgaggctaagcgcctccggacttcatctcaagacgacaagattcctactgacaaaagtgcccacagttctaccagaatttcacataaggttaaaacttccaaatctggcaattctcaaactaagaaatcagacaaaccagacccccacccatcaaaaacgaagtctcacggagaaattccctctacttcttcgtctacccataaacactcatcaacgcaaaattccaaatcttcaaagaaacacagtaagaccgattctgaacaacccggtacagagattgaaccgaaggttaagaaaaattctaggtatagtttagatattaaccatagacaagatcatttagaatatagtgtaagaaacaacaacacagactcttctagttcattaagtaatatatctgctgacgttaaccgacattcaaggaagcacagaaagggttcatcaacttcgacaagtacaaaagatagaccaaccgaagataaaagt

SEQ ID NO: 10543 - DNA, 702 bp, Diabrotica virgifera
  SmartBlast Evalue=1E-70; Info="Liprin-beta1, putative (Fragment) n=1 Tax=Aedes aegypti RepID=Q17AZ4_AEDAE"
acggacaaaccagatctccatagtcgccctctcctttcgacttttttctttttaaagaaaactgcgatttctttgttacctttaccttaagtttcaacgacggagtcaaaggaacataccccatcgtcgattccgcttctcttttctcttggataatatccttacccagaagttctttgaaatgcgtattgagatgccgcctcaacagagttttgcctggaggtattgacaacagcgccgccattaagtcggcgttaaatttaggttctagcaccatgagaccgccgtggacaccggccccacgtaaattgggggcgtattccgccaggtcgaccgccctcaaccattccattaccctgtgcgtggtccatagagaaatttgtttaaatgtcggcggatctgggtcatcaggcaaagacctcctttgcaaacacccagcctcgtaattattctcccgtaatacttggattcctctcttaatactggcaacgtgtagcatggacgtgacgtgcaagagcgccaaatcgtccatggtcagtctgtgaaggactctgccgtccaccctattgatgaggaagttttctttgtgctgcggcaagcccgtatcgtccaaccatcgcaagacccaagctgtatccagttttcctgcttgtgataaataaagatcactggatccgttcgcttgggtatcgatcagcgcca

SEQ ID NO: 10544 - DNA, 702 bp, Diabrotica virgifera
  SmartBlast Evalue=1E-112; Info=Dynein heavy chain n=1 Tax= Tribolium castaneum RepID=D6WRL4_TRICA
attatgagagataacttcatcaacaccgtggttaacaacttcaacactgaagatattagtgatgatgtaagggaaaaaatgaagaaccgctaccttagcaatccagattacaacattgataagatctaccacgccagtaacgcttgcggtccacttgtcaaatgggcttgtgcgcaagttcaatacgcagacatgctcaaaaaggtcgagcctctccgtgaagagctcaaatctctagaacaacaagctgaaaccaaccaaaagagaggcgaagatgttaaagcactcattagccaattggaacagagtatcgctgcttataaagaagaatatgcacaacttatagctcaggcgcaggctataaagactgatttggaaaatgtacaagctaaagtagacaggtcaatagctcttctgaaatctctggtcatcgaaagggaaagatgggaagccagcagtgagactttcagatcccaaatgtctaccatcatcggtgacgttcttctatcggctgcatttatagcatacggcggttactttgatcagcattaccgtcaaaatctgtttagcacttggtgtcagcatttaactcaggccagcatccaatatcgagcagatatcgctagaacggaatatctgtccaatccagatgaaagacttagatggcaagctaatgctttaccaacggatgatttgtgtact

SEQ ID NO: 10545 - DNA, 703 bp, Diabrotica virgifera
  SmartBlast Evalue=5E-41; Info=Vesicle transport protein SFT2C n= 1 Tax=Camponotus floridanus RepID=E2AGK8_9HYME
gccggttattaccgcactcattgtatatttaaattggcaagctgctcatagatgaacgacataatacttttttagtaaaagaaagtccacttgttccaccaggtataatcgctattaaactccaaagaagtgaaactatttgtaacacagcaaaaagaattgtaaatggtaaattctgaagatgtagagcgcagaataaagtggcggctaaacttcctccataagttacggttactagtagtctttctcttgcaaacatgtatcttataaatgcaagcggaccccataggaaaaagaatcctaaaacaaaaaatatgctccctagggtaaataacaatgcaaattttctagctttaaacacaagtacaggaatatatattgaggacatcaaaaaacataaaaatccaagtccaatgcacactgcaaagaaaactattcgttgaaatctactcaaagtgggaaaacactgattggtaatcctttgacaccaagtatggtcttcctgttgtaaagattctttcttaaaccacctagttatacttggtgcttcaattgacggcatttgcaaattaaaagactttttttggtcactatgtaatagcaaatattcgtccaagtctttctttaaatcaaccatgttttacctgttaattattcttattatcacttatctatatttttatatacaataggtcaatatttt

SEQ ID NO: 10546 - DNA, 702 bp, Diabrotica virgifera
taacaatttataggttgtggttaactactcattttttgttaatgtttcctctcgcgtaactttcaagaagtgataagacgaattaaaaatttaatgaatgttgatttgagcctaatcgttgttgggaagattacatttacgactgatgtgttgatatcttcactgagggttacctataatggatatcatagagaaaaccttatcgtataataacaaactaatagaacccccacctgataacattgtggtccaaaatgaagataacgaagaagttcactatgtaaatattcatgaggtgcacgtcaacaaagtcatcgagaaaaactgggcaccaatcatttcgttctacttaattatgagcttaaacctataactgaccgtcttggtcttcttggagaccacagttattttgttcgtaacattcctcaataatattggatccaaagaacatttgcaatttttcgttaagtattttccttttactgaatctcaagcacaattcgctgatggcatcggagcatttgaaaaagaagcactagtttataaattgttcaaagagttttataagcaaggtatcactcaagccagtaatgttgtcccctactgctatgtagtagctcccaaaaaatattttatattaaatgatcttactctcgagagttatcaaattttaaataaacatatttgcttagaatacgatgt

SEQ ID NO: 10547 - DNA, 699 bp, Diabrotica virgifera
  SmartBlast Evalue=8E-30; Info=Ligatin n=1 Tax=Camponotus floridanus RepID=E2AXJ4_9HYME
attatcataactatccatccgaagccatgtaggagaaccaagtgtagctattggtaaattaggcaaaccttcaacagtacaaagatggtcgccataaaaatgatatatatttacacattttcctctacaatttgctaaattcatggctccagaactttgacttgccacaccaactgctacagctgccctattgttagataaatttacataaactacttcattctctagaacatttccatatttcggcaaattagtactgggatgtggggttacaacgcctgctagcataagatcagcacccgatgtgatgaagctcatgacttgttgatgtgttgtaaaagcatatattatattaggaaatttccataacataaatattgtggggaagagtttgtcttcatattcaaatactattggccgtttttgaattgtatacacattcaatattgtttggttatgtgtaactacttttaaaatgtttaaaggttccttttttggtagtaattcattaatatcattttctgttaagttcggaaacgcttttagtattgaatctctaaaattgttcctttcagatcgttttgtttgtgtattgcttttaattttaatgggcttcttaaacattgtgactaaattttagctattataatttagtttcatccaacaatttaaattttgtgtattcacagcttaaaagtg

SEQ ID NO: 10548 - DNA, 702 bp, Diabrotica virgifera
tgagcgagttccatgggtagtgaccgcaggcgagtggacattttggcgatggtggtggtggtggtggtggtggtggtagtagagtagagttactttgccacatgttgctagtcaccagtgttctcagacctcctgaaatttcaggagacctactgatggcgaccctcgcctactgatctactgatggcgtccttaaacctcctgatgaagtgatgaaattctgaaaatcatctggttttgttccaactcgatacaaaaccgttcttggacgattacgaggatgcgcagtaacgaaaaatgtgttactgcgcagcattattcgtcactgcgcatgcgcgcaacgattcaagaacggttttgtatggagtttgaatttttcagaattttatcctattttattttttttatttttatgctttagccgccatctagcgttgccacagccgtcccttacagattttataaagttgcatttcccccaaaagtcaacagatggaacttaatcagctattttctgtgtattgtacctatgtataagtataaactatggagacctacacagaggagaggaatcgagataggacgaccttgaaatttttgtacacaattttgcctgtttgcttggtttctcgctagggcggcggtggcgtagaaatagatgctacttttgcattggagtgaatgtgaaaatttcgaaaataa

SEQ ID NO: 10549 - DNA, 699 bp, Diabrotica virgifera
  SmartBlast Evalue=9E-21; Info="Transmembrane protein, putative n=1 Tax=Pediculus humanus corporis RepID=E0VV13_PEDHC"
aagaagatagatatagcatttacgcctgacttaacactgtcgaaaatttctcgaatgctacagttaggtaccagtctgaacatgccggtgaattacaccctgtatacgactattccaccgttatatctatcgttgtgctcagatctgatagcaagaccgaattgggaggtctatttaagttatttggcagtggtcgccatgtcactgctactatttattatcgtatccgtagccactcttgacgctgagcgtattaagagacaagctatggattccttcatcttccccagtaattcttcagtccaacccgttctcgatttaaggttggtggggcagcagatcagggaggaaatacagtcgcagaaacctgtgaccgttagtaaagaggaaaccaaatcggaccaagtggagaaggaggtcacgaaggaagaggttccggaagtcaattctaagcctgaggtggagagatatacggtgctggttcctacgaccgggaaggccaagaagaagttggccaagaggaacagcaacgaatcgtcaccggtggaagggagctatatgcaggtggctgacaaagtggagaagaaaaaggaaaggcatccggagcccaagcataaagttaaagagactaaagacgaaaaggaggttgtgaaagtagacgagaaagaaaagaaacatgtacaaaataatattaaggaa

SEQ ID NO: 10550 - DNA, 701 bp, Diabrotica virgifera
  SmartBlast Evalue=4E-47; Info=Leptin receptor overlapping transcript-like 1 (Fragment) n=2 Tax=Formicidae RepID=E2AP43_ 9HYME
caacaaattggttgtttagcaaacatattcaaatatactgtcacattgacgtaggattccatggtggcagtaaaataataattaaaatattataacttaaatcaactttttcctttttcctgaatcctcgattctctatgtacagcaatgaaacctaacagcagtcttaaattatccgagctatgatatcattattattttccatacaccgaattaccacatgttgtaatcagaatcatcttgatcgaaagttaggaaaaatcctagtaatgtcaggtataccacaacatttcctgctatagtcaagtagcacgctcctgcagctatggtcccagcacgtgaaagaactattggtaaggcgaatgaactaactaatatgcccattgtaacaaatatggacgcttccaaacaaccattgctagaaccagagccatcgttgtatcgttttgcaactaaagtaggtatcggtgccataatgtagaatagtacctcgaaaaatggccaccataatttgtactgaggtaaagcacatgccaaaatcacaaacgtcataccaatagaaccaagaaaggctaaggtaaccaatgcttttattcctgccattttaatctcaaatatattatagtttttccgaaatactttgattaaaagtggaaataaataattaacattatctgaaaatgttttcttcacaatcacac

SEQ ID NO: 10551 - DNA, 701 bp, Diabrotica virgifera
  SmartBlast Evalue=3E-79; Info="Titin, putative n=1 Tax= Pediculus humanus corporis RepID=E0VZZ8_PEDHC"
tcatcttctatagtagttttatgtacaaccaatcttcttaccctacgatcttcaaagatagagtacctggaagatttttctatgcgttcattctttctgtaccacgtaacttcaacgtcttccttggaaagttcaacttcaaattcagcgtcggtattaattggaacgatggtgtattctggtaaagatctgatgaaggtacaactgggtacttccaccgtaagtctagctttggatgattgagttccaacttcacaagaatatacaccttcatcttcaggttccgttttgtagattttcagtttttgcctctttccatcaatagacagttgaacgtgttctgaaaattggatttctttaccatccttataccatctagccaaggcgtcgcctttagagagttctatttcgaagacagtcttgtcgcctttgttaaccacttggtctcttagtggtgttataatttctggaggtaattctatcactgttacatcagctctacattcttcgtctacaagtttacagctgtactctccttcgtcatggattgaagtactacggattagaagtcttcgtaatccaccgtacctctcagtatcaaatttgtcttctgtttctctcagaggagtaccatctttgaaccactctacattagctgtgtcagaagtgatttctacttcaagcacagctgtatctttttc

SEQ ID NO: 10552 - DNA, 695 bp, Diabrotica virgifera
  SmartBlast Evalue=1E-16; Info=RAB-interacting factor n=2 Tax= Aedes aegypti RepID=Q1HRE0_AEDAE
gagaagtcaaccccgcatagggataatggtaaagagaatgacgaatatggtggcactaagatggatttatatcccaaaaattaagttcatagagactttgaagtttgaccccctatttttgtatgaagattggaggtgttaatgatgataaattatgattagaagaaaaaaattgttttttctataaatacttccatagttaaccctccaacaggtaggtgagacctgtcagacctcacctgtatggaaatacaatgtaattttatttcacctgttagctggagtgttaagtagagctatttaatggtattttttcttaaacactttctttcataaatgacaacaatgtaacctataccactttggctataacagcccaaacttatgctaactcataatgcccaataaaactttctaaaataaaaaatgctatttcaaataggattgcccaatattgatctctgaagatgttaaagaatagctctacctagctatgtaacactcttgtaagtgcaacataactcattttattcgacaaatcatgatatcctattgggcccaactcacagtctgcacatgtaagatattttgttgtacccactgtatttgaaaaaccaacattttgaaaagtaaacatgtcagtcactgcccagaaaagggaaacggtttctttttctggattatcctcgctgttc

SEQ ID NO: 10553 - DNA, 701 bp, Diabrotica virgifera
aaaatcagaatgtcgacatcaaaaataattctgcacttgttaaaacgtttatccacaaagatattacatctaagatattttcgattctgcagaaccgatcattttgattttatccggtagaggcgatagaacagtaattaaaacgattctaaaaaaaggtttattcgtagtatgtacgatcagcaacctttgccgaccatcagacgcaagcgcagttaacagttagcgatgcgcagttaacaattagcgttcgtagaatacgaacgcgcatgcgtctacataccggtcattatgcaagcatattgtccggtaataatgtaatcctgcactgaaatagtggtctctttttcattcgagctcgcgcatttcagcgctactggaatagtgtggactgtcaatccagtgtcaactgtcaatccagtaattgattaacctatcttttgaatgactggaatcgcttttatagtttttgaatgactggaatagtgtgtgaacagcacttgactggatttctggactttaataatgttaaccaggtgttaagctatatttttctatgcaaataatttggatctccgtaatatcctcgtgagatatggtattcacagtagttaattactgtatttgatagtattttaattactgttctaagaagacaccctgcttcatcgtttcattacccacgattagttgtatgtcca

SEQ ID NO: 10554 - DNA, 700 bp, Diabrotica virgifera
  SmartBlast Evalue=2E-51; Info="FERM, RhoGEF and pleckstrin domain-containing protein 1 n=1 Tax=Harpegnathos saltator RepID= E2BXI0_9HYME"
gagtggcttgcgatcgtgatgtgtataataaaatatcggagaacaaaaagaacattcgttgttgatagccctttcgcgaatgcttcaagagacacccgtgcctgatgaatgttcttccaggttgtaccagattgtcaaatccgactatatctctttgcagctcgcacaacgtcgcaaggttcttggattgttcaagagtttccgaaactggcagcatcaagtctttcaacgtatctatggcggttctacagtcggttctatcggggtggttttcgtcgtagtaattaagaagccgttttaagagggactgatactggagcagcctgtggagaggtttcaggacgaacgtggtgagcggaagataacatactttttgagtttcgaagtcgcggtatagctgctcgaagcggttgttttgtttgaaagctgcatcgagacgttctaagactagcatatggccatcgaggtactcttcataaatcggcaagagtggcggaagatgggccagaaggacatcagcaattttttccgccataggtactgccctcggaccgcctttgatgtcccaactcttcagcctcttctctagatctttcaccaggagaccgtgcgcctgggccaaaggtgctattagtgacaagaggatctggcattcttcgggctcttcttttcctacttcatctctgaaccaaacattgat

SEQ ID NO: 10555 - DNA, 701 bp, Diabrotica virgifera
  SmartBlast Evalue=1E-35; Info=Wd-repeat protein n=2 Tax=Aedes aegypti RepID=Q16IG2_AEDAE
gaacacacgtgtaggttatgttttgcacaaaaaacaagaaaaaattggcataaaattaaaacaaaatgtctgaggaaatggacgttgcggaaagcaacgaaattaacgacagtgaaatggcagaaagtagtgaaacccagaacaattcaaattctgaagtgtatttacctgggaaacctttagaagaaggagaagaactagtgatggatccctctgtatatgtaatgtatcatcaagcacaaaccagctcaccatgtctaagttttgatataattaaagataatttaggaaacgataggaacacttttcccttgacaacttatttagtagccggaacacaggctccacaatctcacgccaaccatgtgattgttatgaagctttccaacatgcatcaaactggtaaggatgaggaagaagatgaatcggatgaagatgatgatgaagaggacaacaaccagagtcctaaaatggctggtgcattaattaaacatcaaggcacagttaataggataagggctacttgtatgggtgaaaatactattgctgcatcatggagtgaactaggcagagttaatatatggaacctttctgctcagttacaagctgtagacaatcgaagctgccttgacaaagtataataaagaaaatactgcaaattcagttacacctctttttacatttacaggacaccagaaaga

SEQ ID NO: 10556 - DNA, 703 bp, Diabrotica virgifera
  SmartBlast Evalue=2E-13; Info=Apolipophorin-III n=1 Tax= Tribolium castaneum RepID=D2A4H7_TRICA
ctgcgcctttctagttcaagttgagttgccttgacattgccttctacactttcaaaatgaacaaatacttcgttttcgttgccattgccttcttggctatccaggctgttgaatccaaaccaagggcttcccaacaacaacgcccagctgcccaaaatgtagcagaagacgacctcgccaagaaagctcaagatttgatcaaaaaagccgatgaagtcgttactggaaacctccccagcaccgaacagatcatcaacaatgtagaggaaaccggcaaaaaattggttagcaacattaaagatttcaacgactaccttaagacccaactcactgcaaacaaaggtgatgtagacaaaatattgagacaagtatctgacaatttgcacgctgccagtgaaaaaatccaaaaagatgttttgggaccacaaggacaaaagaaagcttctgaaatcagagaaaacttacacgcacagatcaaatccgctgccactcaaattgaaaaacttactgcagctgtcaaacccgaagcagagaaagtgaagaatgacttgttggctgctgctaacctcttcttggacaaagccatcaatgttgccgatgacttgaaaaaagtagtcgctgaacacaaaaactaaatgatctagtattttatatttatgatgttttaaatttttatgtaatataaacataaaacaataaaaaa

SEQ ID NO: 10557 - DNA, 701 bp, Diabrotica virgifera
  SmartBlast Evalue=9E-29; Info=Peroxidase n=1 Tax=Harpegnathos saltator RepID=E2BCE2_9HYME
ttctcgccaaagtcttctttttaatttcctgtacctgttgttcagtaaatcgggcgctgggaaactcaaaccaaaatcggtcacagtttttcgttcgaagtaactgatctagtacaattttttggaatgttggtccaaagatgctgcctggcactggtatttccaaaattccggcgtgaagttctacatcatctacgcagttgtaaattgctgagagtttatcaatattcttttgcgtcataacatcgcataggtcactgaatgctgctgcccttggcttcccttgtatttctctgatatcattatacgatggcattcccagtagtctgtttctgtgaatatccgtagccagccagtccgaagcaacttttaataacttcatatctaaatggttcactaactcaggatttacagtacctcccacactattaaccattcctccgcaaaatcctctaattgtgttgtccatattagagtgttcttctataaaccctggacgtgttagacgatctcttagaaaatatgaaccaataatatgcatatcttcatccataaaaagtgtgctctcttgagccatcgtatgtaagcctttgagagctgcatgggagtattcgagtggagcatttggagaacaattacaatcgtaggtgttggcagtagtgcagtacgggtcgattaatccagcatcaatcattattttg

SEQ ID NO: 10558 - DNA, 683 bp, Diabrotica virgifera
tatcattccgaaaacatttactaaatagggtcatttgtagttcataaacaatttgaataactttgttaatattgactagattaaaaccacttgggatttgaaaagctggcattttcatacgaattttcaaaaaaacaccttttgcccaggttaactagtcaaagtcagccacttttttattcaattgacagctactttgtttgtaacaattaagcaacccaactagcgccatttcgaagttgaaggtgtatagtttatgtgtaaaagtttaagtaaactttaaacttcaacatagttgttaataaagctttaaaaataacgttctaacgaaatcgatttgtggtcggtggaaatgaattattaaaatccgtgcactcaaaaaaatgaaactgattcttcaaacatatgctgtgattaatatctccagagcttgttgatggattttgatcataatttttttatgttatttttttaatcaaaaatgttagggggagttccccttatcactcagggatatgaaaaatagattacgaccgattctaagacctaccgaatatacatatgtatataatttcataaaaatcggtcaagcggtctcggaggagtgacaactaacactgtgacaggagaattttatagatgggtattaagtattaacaaattgggttggtgatggaaagtgt

SEQ ID NO: 10559 - DNA, 700 bp, Diabrotica virgifera
  SmartBlast Evalue=0.000000002; Info="Circumsporozoite protein, putative n=1 Tax=Pediculus humanus corporis RepID=E0VS47_PEDHC"
gtgagaagaatgaattgcagggctagttgcaacccacaagctaaacacgaagaacgaatttgcaaaaattttcatcaagttacaataatctggacgactttacaagaggaagcagaaacatttcacagcgaaattataacacacaacaaaacgttttagacaatcccataattagttcacaaagaagtcctattttggcgcaacatccaatttccaataataacatagacacttttgatagcttcgtaaagcaaagaaatcctatgagtgaacataatcagcgagaattccagattgtagatcgtcctcgacacttagagacagcttctaatcctacatctaatcctgcttcgaatcctactagaaatacaataggtttaagcatgactgaatcaaccattttgcatacattgcgttctgtgaggtcgcctattgttaattatcaagaaagtcggggagttcctagaaatgaacaggtttcattcataaacctcatcacctccctatgcacacacgcctacacggcggtcattacgattttagtaatgttatggaacttagtaccgctgcttgatggttttgtctattttgcccgttttgcggtcgacaaactaataaacatattcgaaaccagagattcgaaagaaaaaattatgaaaatggctatttttgctggagaaattatagttatattatttat

SEQ ID NO: 10560 - DNA, 697 bp, Diabrotica virgifera
  SmartBlast Evalue=2E-35; Info=Glutathione S-transferase n=1 Tax= Glossina morsitans morsitans RepID=D3TPR9_GLOMM
gccgtttatagttttaatgattatttaactattaagattagtaattttttctaccaagattgttaatgttgataatttaaattaagacaataaataaatgacgtgcaattagtataccaaatacataccattttgtgttgcaagtctttgtgcttttcaaaagatgctcctgttatatcagaatggtgccccaccatctagggctgtacaattggttgctgaagcgctatctgttaaacttactctgaaatatgtggatgttttaacgaaagaacaattcgctccagaattcttaaagctgaatccccaacatacactgccagttttagatgacgatggttttattttaatcgacagtcatgctatcatgtcttatttagtatcaaaatacggaaaagatgattttttgtatccaaaaaatttacaaaagagggccatcgttgatcacagacttcactttgactctaatatcctcaacgttagaggagctgttattgtgaaaagagttttcttggagaaaaaacgagacattataccagaacaactgaaagcgttagaagaagcctatgaaattgtggaaaaatttataggatcgaataaatacgtagccggtgatgaactaacaatagcagatttttgcttctggactacaattacaaactggaatgcgattggactgtgcaccgaagaaaagtat

SEQ ID NO: 10561 - DNA, 687 bp, Diabrotica virgifera
ttgaatataatcaatagcctattaatttaatcggctgtggccaagatactgagagggtaaactcaataatgggttaaatgcatttaaggggctatcccagtgcaaaagcacgaaattcacacaccctttttgggaatttctgaaataaaaagtactataataattgttttgaaaatttgcacgagcattcattataaaaagtagtacatgtaaaacaattttcataaaaaaatattaaaaattcaaccatccatgcgccatccactggaaccgtgaaaataaaaacacggccccaccgctgcagtgaccgggaccaatagaaatcgtgaaacataaaatttcaaagtgatcactgaaatataagttatttaatataccatcaactaggatatttgaaaaatattaaaatttggaaaaaagtgttgaaaaaaatttttaagttagttaaaacattttcagtttcaaaaaccgccaaattgacatttttaaccgatcataaaaatcccctagttgatggtatagaaaagaacttatatttcaacaataactccgaaattgtatgcttcaggatctctatcagtcccaatcaccgcagcagcggagccatgtttccattttcacggtgccagtagatggcgcacaattcgtttacctttcaatattttttttatcaaaattgctttacat

SEQ ID NO: 10562 - DNA, 700 bp, Diabrotica virgifera
  SmartBlast Evalue=3E-26; Info=Transcriptional adapter 1-like protein n=1 Tax=Harpegnathos saltator RepID=E2BA55_9HYME
ctttagctcgcctataaccaaagaacatttcgacagtgaagcaagaaaaatattaataaccactgaacagatccgttgtcataactatttcatactggccatccttgcaaaatgtagttctaacaataaaccaaaacatacgagatcttcaaatgagaagggtggtttcgaaaacatcaaatattcagattatttgcaaccgttgagtcctacaaatgtagcaccgtctgaatttgaaaaccgcagtgcggcagcagaactattcttgccagatagtaattttgttggttgtaaagtagctatagtggcatgggaaaatggtatgaagggagcctctgataaagttacggatttaatggttcatgcttgccaggtattcgtaaagaatataataacagccatgatttctcgaaagaaaggatacaaaatcagagataacaaacttcaatttggtttcaacttcccaattccagatccgttcatcagaaactccaacaacataatcgatgatactctggaatgtaaagtagaagtagttgaagatgaagccatgtttaaaccgaaatgcaaattatcattagaaagtgctgaacagaaaacggcgtttgcatactcgtgtgccaagaaaccttgtttagataatagtttaactgtgaaacttttgtatgacacgattagaaacaatccaaatatattgggg

SEQ ID NO: 10563 - DNA, 699 bp, Diabrotica virgifera
gaaaacgaatcaatattattgaagagattattgtaaattttgttgtgtaagagcttagggcaactatgtggatactatagggtgctataatatgaatttccaggttattaaaaaatatttatcagaaaataaaaaagaaacacttacgacgtaaaaaagacgacagagaaaagtaaaaaaagataataatattaatcattttaatataccgggtggtgaatccttagatgggctataggaaacttaatgggaaatactgaattattgaattcctgattccataattattttaccctaatcaaattccctattattccttaatcaaaagtagtgagaaactatttgtagacgactgaaatctgtttggaaaacaaaattgttctaccaattaaacacattccaaaattatgctaaaatttaatatatttgtttgttactgctattttctccttaattgactatcattttatcaactttatttttttttaagtgaatacttcttatcgatcggtatggaattttgacgggcgtaaaatcgtattgggcgtcaatcaaaattgtgacgctagagcgtcattcaaattcgtgacgcgagaagttagcgtgcagttactcctcgcggtataggtacgttacttaaacttatttatgtaggtacgttatattaaaataatatgtttaaaattgaaaaaaggaatt

SEQ ID NO: 10564 - DNA, 690 bp, Diabrotica virgifera
gtaattctacctcgacgacggtgggagggccgagtaaccggtcgtggtccctaaaaaaaattgtgaggggagcacgaccgatgaaaccaagaacagttccagcgtccagcgactgtgcaccgggtggcgccggacaccgccgctggacgctaaaaggcgtcgcaactgaggcgagcagttgcgacgccttcgccttcagcagtcgtatttcaccctccaacttccctgcgactactctaattcctaaagttaatctcgcccactccagcattgtggccgggggtcgatggtggagccccacgcaccatgcgggggctctgccgtcgaactccgatcacaaatctctattcgaaatctttttcgacatacccataacgagtagccgccatgtcttaccccgccaaagtacctttcccaacacacatccactcccaatcccgcgtaacagtggaggcagcagttacgcggaaattccaggtagcctgtgaatacaggctgctactgcgtccggaggcaaccgtgataaaaagcctagaggagtaaacctcaataaaataatccccactatcacggtggaaggcatcgtgccaaagatatgaaagatgtgagggttagagcatcacaaacgatcccttcgggatacctggcgacctcccgaagtaacttagccttagcgcggcaagggcgcac

SEQ ID NO: 10565 - DNA, 696 bp, Diabrotica virgifera
gttaattaaattgaatgaaaagcaatttatgttttatttcgattcaaaaaaagttgtttttgtctttcgtttggcccctaaagacgattaaaatcgagagaaaactattaagcagacgacagacattaaatacttacattaaaattattttcaagcacgtgaagaccttgagaatgaataaaaaggtctttaatgtcctttcaacatacatgtaacaactttattaaacgccgtttgttattgactggtaagctaataaatattttattgggtgttttaatggttgtactttaacagaaacaaacacacacaattcaatactatctcttcaaaaaactgtatcaaacaccaatgcaaacaaaatggttttatacgaaacaggagaaatgtcattacagaatataacttggtgacgtcacatgtgttcgcgctcttttcgatcgtttgaaatgatttaaatacacaaacgattttaaatttatattgtgtatataagttatgagtttttaagacgtgaaattttgaaaatcttattttttaaacgaaacaacattattatgtaataaaaaaaatgtgcaacttccctattcggctagataatttaaaccgaaaatggcggcttggtttatgattttctcaaatttgaagtaatgttgaatgtagtagccaagtggaatatgaacaaaaacaaaggcc

SEQ ID NO: 10566 - DNA, 680 bp, Diabrotica virgifera
  SmartBlast Evalue=0.000000003; Info=Endonuclease-reverse transcriptase n=1 Tax=Bombyx mori RepID=D7F178_BOMMO
agtgttatatattcttcttttatttcccttagatatgtttttatcctacagtacgctgttaagtaaggatatacctttccttccctgtatatttcgttccttattagctgcatctaatttaccgtcttgagtgatctttactcccaggtatttgtagtcttcacataattttatttcttgattttcctctactcggaggctatgttgttctcctccgatactcatgtattcagttttttccatattcacttctaaaccccactctgtaaactcttctaatagttttcgcatcatgtaactaagatcttcaggagtcctgtgcgatgatcacctggtcatccgcaaagcacagcgtgtacatagttgagtccgttagtggtatgcccatattcgtacattttttcttccatttgttgagtgctgcttcgaggtatattttgaatagtgttggtgagctacagcatccttgccttagtcctttagttactgtgaatccaggtgttatgagattttccgttttaattcttgttgtttgttggtagtacaacgtttttacggcttcggccaattttatatttacatttgttttcccagtgcctttcataatttaaccagcgggacactatcatacgcttttctaaggtctacaaacatcagatgggcttcttggccacgtagca

SEQ ID NO: 10567 - DNA, 699 bp, Diabrotica virgifera
  SmartBlast Evalue=4E-42; Info="Dolichyl-phosphate beta-D- mannosyltransferase, putative (Fragment) n=1 Tax=Aedes aegypti RepID=Q1HQV4_AEDAE"
tgccctggaacccattgagatcgccagcttttcttctacttttgaagggtctttttgataatcgcaattgattaaatttaagagcccatcttcaacctttgttatatctgcaaaagtagtagctccatctgcatctgcaaacaataatacagcccctcttgcactttgcattcccaatcttacagctccaccctttcctctattttgttccagatgtaacactctcagcttctcatttcctactattttttttgcatagacatgagctacttcaacagtcttatctctactgccatcgcttactactataatttcatatttataatttggtaaatctttacatctattttctaagaattcaatacattcatctaacatcagaggaagcctttcttcctcattataagcaggtactattacactcaaatggactgaagatttttcattaattgaaggaaatggtacttgttttcctgttactggatcaatgaaatatttctcattcttacttctaattactactggatatgtacttgatgtagctaccatcaaaatacaaataaatagaaggatggaaactgcaaaagcagatcctacaaataatataattccaaaatccatcctgagtaattcaaattcatatgttcttcagattatttaaaatatacaaaaaattatctcttattttcttgcatggtt

SEQ ID NO: 10568 - DNA, 697 bp, Diabrotica virgifera
acgtcgcagcgcaatcgagtaaaagcctgtctcaagtgagcgtgtgcacgcatccgaactgtcaggttaagcggtacaaaacagtcgaccagttcatttttcaccaaaaaaactattagaaaaaacagtttttcgattggattactttaattcaccgagtttcgcggacacttggtgatcgccaggatgctgctgcaaggctacaacgaccctccaggacgacaaatgcaacgtcctgcaggaatcctggactcccccacgttggctcgggttgaaagggctatgctgagacatgaagaagggactaatagagaaggacaagatgtattgagggctcaatatacacagtcgcttcttcccagttttggaaaggagtcagcacatgtgataaaaagagggcttatgtggcaacaacgcgacagattattcagcagatggaaggagcgatatttcatcctcactagagactatttgcacgtatttagaagggcttcaggatcagatcgaatttctgagatggggcaattcctcttcaaagttaagctcatcgatatcgtcaaaatcgaatgggagaataaaaaatcttatagtacagttgccttagttcttggtagggatggaaagatttacctaaggtcatctgaggggctcgaagactggttcgaattgctagaagaatgtatgttcactagtaagg

SEQ ID NO: 10569 - DNA, 696 bp, Diabrotica virgifera
aaaacacatgataaaaatcttactaggtacacgattggaattaaattattaaaaaataatcgctgaaatttttattttgtaggtttctattggtcaaaatctctatgaatgaaagaatcaattaaagccttaatttaataagtggtatctatatcaagccaagaagtgtacaattttgatagcattacatattgagttaattttataatttataagtcaccaatgataatactgattccggcaaagctgaataaacacttttgtcagactgaatcaaatttcagactgaatcaaattttaaacttcaacattccccagttctgggttaaagcaatggaagaatattatttatttcgtactgtccaatttattgtaatttctgtactaaagttaagtccggtcgtccggtaatcattcttttggctcaaagacagttagtcatttaccgactcgttttcattttcttaatcaaataattagtaaaaacttcgataatattttagaacatttttaataaatattttataaaacagaattaaattagataaaaaaatatttaattgtggggttgaatctcttttaatttaccggcatctacagtataataggtttgttgatattcagttgttatgatgccatacatatcatacgacctatttagatgggaaataccagtgtaaattttgaagttattaa

SEQ ID NO: 10570 - DNA, 696 bp, Diabrotica virgifera
ttacatctacatagcgacatattgttgcctgtaagtaagggtattgagcattatttactaaaactaatcactgtatgtcgacgatatgtctaaaagttttaccataagagtttgttattgttaaaatcaacacgcacagtaaactactcccttattaatactgtttatgttttagtaaaaggaacttagagaatcagagtaataaaatcatagaaattaaataaaaaagtatctacctaaacctaaaatatgctacttatccccgtgtgttttatatttgtcactttatgtaccaattttgcaagaacttttaaaataaattgaaaaattattgaaatcgataataacaatacctataacacagaggtgaaataagtaggtgttatgtaatcatataacctggattatcatcattatctttggctctacaacccaagctggtcttggcctgttctagagcttccattccttcctgtccttcgccttgtttttccaatttcgtagtcttagcactcgtaggtagtctttcaccgggtacttaaccttcagatgaccaagaggggtaaatatggaccccagcgtatgtttttctttaataaattcaaaagtattttcaatttttaactcattatttttttattggactttaatatcattctagatatcctcatattttaaaataaaataaaattctct

SEQ ID NO: 10571 - DNA, 698 bp, Diabrotica virgifera
gtgttgaataaatttgtgttatgtttagtttctgcggtttttctccgtgaagcctcagcttctggcgaatatgttccaaaatctgtatatctaattgacgaagatggttcaacctccctaccaatccatgttcgtaataggcgagatttagaacaaattctttcaagaatcagaagaggtggtggtgcttattcttactcgggaagtagcagctcaaatgattttagcggaggattcgccggtcctccgccagagttagcacaacttcaatcagatattcaagatattgctcaaaggacatcaaacatccaacacgaggttttatctcatgtccagaatatcgctgcttctcaccctgcaggagcaaactctggatcttattcctattcaggatcctcaggtaattcgggaggatatggaggcggatctgggggacatggaggttcaggaccttctggaggatatagatctgcgccatctggaggctatggttcaggaggcagttctggacccagcttattcagcaggagtggtgttgagaaaggatctggaataaaggtgtcatcggctgcccagggaccaaatgcagcatttagttattcatcgtcagcttcagatggtcaaggaaatgtgaaatataacgttaaatctggtcaatattaatgatagtttttataataataaaggtaataatacac

SEQ ID NO: 10572 - DNA, 698 bp, Diabrotica virgifera
gggcaccgaaggcaaataaaatcaatcaatggtcaacggcatactaatgtagaaggcagaggaaccactgcattacagactcatatactagccccaggagaatcaccatgcaattgacacttcaattgaaaatctcatggaaagcagaggccaagattcggcaggaaaggaggaacatattttaacacaaaacctcttaggtagtaaacatgcgaaaacttcgtgaagaaatcccacaaagaaaatataatttgagaatttacacattgaatgtcaaaagtgtattttcggcttcggctggaaaattgacgacgcaattcaggaaataaaagggagtcattcctacttacggcatgattagtgctgttggcttgtactcttgtatggagcagaactgtccagcctaaaaacatcaagcatgaatcgaatttcattcagaatcagaatcatttgaatcagattcattgtaggaacaaagcaggtttcttgacacattcgtgaataaactcaactagtacatgcatttcaattattctatgtggcagaagatcgaaatggtgataaccaacatcggataattccgattggagctccattttctcggtgccttttgatttcccgagaatcgagaatcggtaatttggatttcccgggacttcccgggtatcgggaaattgaaaaataaaaagaagaaattg

SEQ ID NO: 10573 - DNA, 698 bp, Diabrotica virgifera
gggcagctcaacaggagtaataaattatatacacaagatgcaaagcacttgtatcgttgtgagaaacttctatagtttaattgtaggtttcgaggcatttgttggatacggtcagtcagtacataatatttaatgtattaaaattaatgtatggcacattttcgatagtttagtttgtattgtggcctttaaaactagctaaattttagagtaaaatactattttatattatctaaatagtaatgtcaacaacatcagatatgctgacgatacagctgtagtagccaacaatttggagatctccagagactcttcgataaagtgtctattgttagttcacgatttacatattaatatcgggaaaaccaaaaagctgaaacttggaacaggacaaatactgatccagcctatagtaatcttagcacagttccaaaaaaatttgagtagtactacagggcttaaaaaccaaggactataacaataaattgaagaattactggacaatctacataattttgttgaaatctcaaaaaaatccagtcaaacgaaggtgataaataacgtctgggaaacatcgcacaagaaaaaggtgaaattaactaatcactccataaaagtggccaaagacattaaagaaaacattaatcctatgaaaacacctgggttttacttgccagtgaaatgttaaaacaactccc

SEQ ID NO: 10574 - DNA, 698 bp, Diabrotica virgifera
  SmartBlast Evalue=2E-12; Info=Nose resistant to fluoxetine protein 6 n=1 Tax=Harpegnathos saltator RepID=E2B2R6_9HYME
aacaagttggaagcttttaatataccaagggcagagactgtgtataacatgaaaaatctaaggggaaatccgcattttcataaacagcattgttcactcgttggaaacacatgtggtcctcttcttggtgttatctttggttatatcatatataaaacaagaaatgtcgagatgttcaaacaaaagaaaacaatgtggaaaatactattctattttttctttttggttccggggctatccattataataattccaggttggtatatatttgtactcaaacctgaatatgatccatttgtggcttctttcatcactgtgattggcagacctatatttattttatcaataggatttggaatatatggatgcttacacggtattggtggaattagcgaacatgtattaaaatggcccccagtgtatattctgggcagattgtcgtatagtgtttatttggtacattttacaataattatgtccagagcagcaatggccagatctcctacatatatttcggaaatgcagattgcttatcatctgttgggagatgttgcagcttcgtttctggtagctctattagtgacattattcttcgaaatgccaatctcagcttttaagcagtatctattgccagaactttcaaaagatactgaagagaagaaagaacaataatagtagtaatgtgattattttgtact

SEQ ID NO: 10575 - DNA, 697 bp, Diabrotica virgifera
  SmartBlast Evalue=3E-14; Info=K1310_HUMAN Isoform 4 of Q9P2N6 - Homo sapiens (Human) n=1 Tax=Gallus gallus RepID=UPI0000ECBE2A
gcacgcccttgtctatcactgttcttcttaaaagtggttcattttggcttccactatatgccaatttagaaagattgaagtaattgagaatgttgaccataccattaaaaaccttattttgattactcgtccaatttgattttgacaccaattcctcccagtctacctctatatctgttcttgcagcaattgcttggttttcacattcattcattagagtttttgccttagccacatcataattagggactggcacttcaacttcagcttcaacatctatcagttcttctgtttcgggtattgctggtttcgtaggaattagtttcggcataaataatgtcttggtaggtcttaaaaagcttgcttctggtctccaatcccatggtctggcatagcaatgctcagtagatatggtccagttttctctatcaaaactgttagtgagttgagttggataggtgtatcttgcttcttcgatgaccatggccgcttttcaacttatgttggtttacaaaaatatcttaagattgtaacctataacaaatttgttctaagtagtagtaaaaaatattttaaattgattccttattcaattctttggtgatcgatttggaaaatctctttataaatatcacattatcgcctaaattttcttgttggttttctaaaacttcacaaccttatattaaaatatttt

SEQ ID NO: 10576 - DNA, 692 bp, Diabrotica virgifera
agagacgcctttgttatgtccagggcaaggacaattgtgtgttctttcgtgaaataagttcaatgacctaaagttttcgcccagtttgtgatagtgacattccgaaaagtaggtcatacttttagtatgaagttgatgattatcttttattttaaataggtgatcatttaaactataaacatttacattatgtagatatttttctgagtattattagagtgttattaagtattgttagataggtataaatataaacaaagagctctttctttttttgttgtaagtgaacggtaaatttctagtttttatttagagtatggtattttttattttttcgagtaacttcagttctattttttttgagttaataattaatagttatattcgttcacttacattccattttttagtattactgtgttggtgaatacaccaatttatatgcagtgattgttattatgtcgccaacttttgtcttatagattaacggtttaggtattttttgatttcttaattttgttgttggcgatcttatactgcgtatacactgtacgtattgtgtaaatagtgagatttcgtagagtattttaataaatgttacattgaaacttacgatgtcgtatttattaattttttacagctcaagattagtacattgatgtcttatcgtagcattcttgctaatttgttat

SEQ ID NO: 10577 - DNA, 698 bp, Diabrotica virgifera
  SmartBlast Evalue=2E-97; Info=Ribosomal protein S7 n=4 Tax= Endopterygota RepID=D1M806_9CUCU
acgaatagctggattttgttagtaaagagaccagaggtacagaagaagaatgttttgtgcctaacttttcttccttttcaaattttgtagacaagatggctacgaaaattataaaatccggtggggctgagcccgatgcctttgaaacacaagttgcccaatctttgcttgagctggaaatgaactctgatttaaaagctcagcttagagaattgcatattacaaaagctagagaaatagaattaaataataagaagagcgtaattatctacgttccaatgccaaaattgaaacagttccaaaaaattcaaactaggctagtacgtgaattggaaaagaagttcagtggcaaacacgtagtatttgtaggtgaacgtaaaattttacctaaaccaacaaggaaaacccgtgctgccaacaaacaaaaaagaccaaggtctcgtactttgacttcagtatatgatgctatcttagaagatcttgtatttcctgcagaaatcgttggcaagaggattcgtgtaaggttagatggatcacaactcatcaaagtacatttggacaaaaaccaacaaactactattgaacataaggttgatacttttgcttcagtttacaagaagcttactggtagagaggtaaccttcgaatttccagagccctatttgtaaatgatcagttaataaataattgaaaatttt

SEQ ID NO: 10578 - DNA, 696 bp, Diabrotica virgifera
tgtgtaacgtttcaattagccgattgaacgctacaccaagctccgcttggtatttgtccctcggactatatatttctagaagcgaccctactatcgtcaaatcaattagtacatctattcgaaggtatttaatcagatacaaatttgtacttgctcttttgccattgccacgtaaatcaggcacaatattggcatatattatcgtgtttgtgtgtaggccgttaaacaatggcccctacctcgggaagaagattttaatcaagcacctggaaaagaaaaccttctaccgctaccttggagagcgaattagcttacaaccgcatcctgatgcagtagaataaattaaacaagacagccctacagagacaagacagcccaacaacgtagccctagacttcccttaactaccggcgacgacaaattctacagggattggggacctcctttaggaactgtaacggaaggacttaaagctgagtaaattttacctttataacttttgtaccgattaccagcggggtctcggtcacgggcttagaaaattaacttggttatcagtaattagtatacaataaaaatgatttttgttaagttttttttatatttcaataaatagcgtatttaaaaatgattaggtagactttttatttcctgtaccttttctgggatgggtgtgaaggaagaatgaacagggaa

SEQ ID NO: 10579 - DNA, 698 bp, Diabrotica virgifera
  SmartBlast Evalue=4E-35; Info=Chymotrypsin-like proteinase 6D n= 2 Tax=Tribolium castaneum RepID=D0R8R5_TRICA
gtgccattttgagctaaaggaccaccagaatcaccagaacacgggccttggccttgcttaagattttcgctacatacatttgtagtttcattaaatatattaccaaattggcctaaacaagtttggccgtcggatatttgtgttaactcccattgtagattatctggttctagttctttatccgtatttccccatccagatattactgcttctccaatggtttcaaaattttgctttggaaggtttattggtttaactctctcgttaaaaatgaaaggttcattcactttcattaccatgatgtcattgggtgctggacctccatgataatcttcatgaatataatatttagcgatagttcgaacttgcatactttcactagtttcactgatctttatgactccagccacgattctaacatcaggattagtattttctaaataacagtggccagcggttacaatccaatttggagaaataattgagccaccgcagaagcttttgtaatcttcgtctctacgttcttgaatggatacttggtaaggaaattgaccttctaatgcatcttgacctctggctatttcgtaattacgcagggaagatcccttaatttcacagaaaacaactcctagaaccaaaaaataagccaataagttcataatatttgaaatcatcatagcaacaaactagtaggtaac

SEQ ID NO: 10580 - DNA, 695 bp, Diabrotica virgifera
aaacgtaattatagtaaatcaagtgtccccgcggctcacaattttctccaccatgagaagcactgtcgaaatgtcatatccactccatgtcaaccctcctagatatattctctctagctattattcgctttgtgcatgactgacgcgacatctagcgtcgtaacttgacatttttgtcgaccacaatttgacattaagcatatgacatatatttgactttaatatgtaatatttatttaccatttttgacaaaatttgttgtacaaacaatgacactgacattacaaagagtcgtcaaaattgtcatatttcggcgctacaaacgctggcaacgtttcgtgtatccccaccattaactgtggcgacggcaatctaatcgatatacagaatactaattatatttgtcatctgtttttcaatgtgtctccattaagttgtcgttccatcgttttcgcggtatttccactgatcgtcttcttattggggaaccgtctctgacccccttacttttctatttgttagttgtttctacatttttacatttattttagaagaaaattacatttaagatcatttaaaaaaatggagatcgtcctctgttttttattagacagagcaaaataatgaaagttaaatattctttttctcatgatcatctttcagtgcgtcacagtttttcgatttctctctaacgc

SEQ ID NO: 10581 - DNA, 698 bp, Diabrotica virgifera
  SmartBlast Evalue=4E-30; Info=Chromodomain-helicase-DNA-binding protein 7 n=1 Tax=Camponotus floridanus RepID=E2ARZ4_9HYME
tcgtccagcaaatagccgacggagttcatgcgagtgccctgccgatatatcctcctgtaacggagcaattacctagcgtgtggtgggatgctgaatgcgacaagtctctgctcattggcacttggaagcacggctatgaaaattatacggagatgcgtgctgaccctaccttatgcttcctgtctcgttgcggaccgccctccgaccgtgaccttcagatggctacaaataacgcgcaaccccaaacgcccgcactcaacgaagatgacgccgaagacgacgatactacagaagaatccagcttcaagtctaaaaacagagacgcttccgaagctaactctgaaattgcggaaccatctcctggtccttcggcttcttcagaaacccaaccgctcgatagcgaagatcgggtgggagaagagggcgatgataaaaattggccttctataactgatctcaatacaaggttaaggagagtgatcacgtcgtaccaaagaaactgccgcaaagaggaacagaagttggctgcctcgaaatcgaagaccccccagatagatactgctctgtcctcccccttggccgcgctggcgcaggtgtcccagcagttcgatccaagagacgcagccgctctaggcctccagggatgggatctacagcagctggccctttacttattgatggagcgacagggcaaacaa

SEQ ID NO: 10582 - DNA, 695 bp, Diabrotica virgifera
  SmartBlast Evalue=2E-61; Info=Glycogen debranching enzyme n=1 Tax=Harpegnathos saltator RepID=E2BPT9_9HYME
cggtgaagtagcgatacaccaaaggagttttaaatcgtgatgtctttgaatttaggcccgtcgtgttgaattctgtagtatctaatcccggcgataacgttttcaatcgcagcacttaaatgatcgttgacttcgtcgatgacccggttgttcagttcgtctagtttgttcttcaactgctcagcgcactttttaagcctggaatcttcgtcaaatgtgtcgctccagtaaatgttgtataatttaagagctagtttcatgtccacggaagtttctaaacgtctgtattcgggatcttggatgagcttcagttcctcagtttcgggcttggaatctggagattttggaggattcggctgacctgaacgggctaaagataagaaatttgctatgagctttttggtatcacaagtaaacagctcgtgaattttcagttcatccaaaatgctggcgcggaagtgatagcgaatagcattgagatggtcttcgctggtaacatctggtggtatacctctgtcctcgtacactcctcttttaacttcggaggaaaagaaatcaaaagcagcatctagtaagtatgcgggacgcatataggggcagttaacacagttatacgttacttcgggatgttcttgaatccatttgctctcgtttgcagtgtggtttagaacaatatcgcaaatagaagttacctt

SEQ ID NO: 10583 - DNA, 696 bp, Diabrotica virgifera
  SmartBlast Evalue=5E-66; Info=ATP-dependent RNA helicase DHX8 n= 1 Tax=Culex quinquefasciatus RepID=B0XDJ1_CULQU
aagaagtggaccgagctgtgaggttgctaaacgaacacgccaatttgatagaagaatctagaaagaaggaaaatatgatggtactgcccatgtatggttccctaccacatcacgagcaactgaaagtctttaaacctccgcctaatggttacagaaaagttgtagttgcgaccaatgtggctgagacttcagttactatacctggaatcgttcacgtgatcgactgtggatttgttaagcttaaatggtacaacacagaaactcacactgatagtttggtagtactcccaatcagcaaatcctccgcggctcaaagagctggtagagctggaagagtgagatctggtaatgtgtatagactctacacagaagaagaggcagcaaaactagcagacaacactccacctgagatggttcgcagtaacttgacttatgcagtattacaaataaaggccttagggatagccaatctactcaaattcagttttcctagtccacctcctattgagaatttaaagagtgccttagaaattttgtatgctttagatgcgatagatattgacggagagttaactaaaccgataggttataatatggctgaatttgcgcttgatccactatactcaaaggttctacttagttcaggagattttggctgttctgaagagatcctcaccatcatcgccatgcttcaag

SEQ ID NO: 10584 - DNA, 696 bp, Diabrotica virgifera
cagctccaacagttgagcaaccccaagaagctgcaccagtggtactgtctgcagctgtcgaagtttctgatagtccacaatcgaagatcgaatcacccacagcagtaattccccctcctcaaaccccacaatctgttccgtctgaatcaaaagcacctgaacccacagaagcagctcctaaaatacccctgtacaatcggttcccgatcagccagaaagtcaacagcctgttgtcgaaatactttcggcaggagttgcacctccagcgacaggagctacacctcaaccggcaggagctgcacctccagcggcaggagctgcacctccagcggcagtagctgtacctccagcggcagtagctgcacctccagcggcagttgccattcaacaggagagtcctaaatcagaaacgcctattcaacaaccaacattacctggacaagaaagtcaacaggtacctgtagagactagtcaagctgtacaaccttctgaagttaaagaaccaagtacaggtgcacctagtccagctactcaaacggtcgaacctgtttctactgagctacccaaagtagaaccaactgtagttcctgaaagtcctaaacaagttcctgaaactcaagccgatctgccaaaagctgtagattcgtctaaagaatctactggtaccgtaactgctcagtcagtaagtgaaaaacc

SEQ ID NO: 10585 - DNA, 697 bp, Diabrotica virgifera
  SmartBlast Evalue=7E-29; Info=Rad21 n=1 Tax=Tribolium castaneum RepID=D6W9B8_TRICA
aagtaggctggcgtctacaggtgccaaagcaaagctttcctcttcattttgtaggagagtcgtttggtcagtggcaggaggtgctggttcttcctctggaggggcttcctcgatagctggttcaggatggatggaaggagtaggtgtaggagcaggaggagggacgggcagatcgatagggctaggtggacgagaacctccagaacttgtacctcccaccgatggtggtccaccaaaattgtccatttcatcgtcactaggtggtggttctggaatatcttggggtgttggttctggtatgctagtatcaacaggtggaacatcgggcattggtgcatcatcaaataaaccaccttcaaataaacctccagctccaaatgcatcatctctaactcctgcatctatttccataggaggttcattttgtgtaccggaagttgagggcactggttcaggttccttgtctattccaacttgatctagcactggctcactaaagagcaaattgctctgatccatagaaggtgttaaaccagatgcatgcctcataagatcgggaccatcagtatcaaaacccatatcaccaaaaccatcatcatgattgactaaactaatgttaccataatcttctcgcatggttatctcttctgctcttgattggttaagactgaactgaacttctatgtcaacatcattt

SEQ ID NO: 10586 - DNA, 693 bp, Diabrotica virgifera
  SmartBlast Evalue=3E-39; Info=Cation transport regulator-like protein 1 n=1 Tax=Harpegnathos saltator RepID=E2C8V6_9HYME
cgtagcgggccgcacacgcacaggcaggcgacctgactggccacagttctcgctgttcgttcattcgcattcgtatcgttgcgggttgtatctgatgtaccgtacgtttccacggcgtctatcataaacgtaaaacgtgatctcgcgtagttcgaagttgcgtcagataattcccgcaaatgaaaaataaatatgaatattacggagctgcagactgaaatttccaatgaggacacaaaggccttatgggtttttgcttatgggtcgctttgctggaaacccggatttgaattccataaagcaattactggctttgtgaaaggatatgaaagaagattttggcaaggaaataagacgcaccgtggaacttgcgatcagccaggacgagtagcaacattaattgaagatgaagtgggtaaagtacatggagtagccttcgcgattagtggagaagctgcaattccctacctttcccagcgcgaatgtaaactaggaggttatatttctcattttaccgatttttatcctttgcaaggagaatcatttaaagtattagtgtacatagcaacccccaataatccgcattggatgggccacgcagatgcaaagacgttagcagaacaataatcaaatgtaaaggagccagtggccacaacgtggagtatgttcttaggttagccaattttgtgagag

SEQ ID NO: 10587 - DNA, 688 bp, Diabrotica virgifera
aaagcatttatttgtcaacatataatacaaatctaaaaatttcagcattcagtctttttttactgtaaatctagcttatagcacatgaacaagttctaatattgaaacttttacttatttcaattcaaacaacagtatattacattgtttcagataatttttcatatacaggcaaactattcataaacattggtaaaatctctttgaatatgcaagtgaaagaagtgttaacgccgtaccaaagagggcgctgaggaacagttttctttttactttatgtttatgtgtgaaaaaataattatgtataccaagaccatttcctccataatctcttctcctcattaatcaatttttatgcataatgcatttttttggagatttttctccaaaagaaaagtaaagaaaagcaaccaattattagaacttactcataaaattgtacccgatgttactacaatatggcataggattttgttttaacctttacaaaatgactagtggaattttttaacaattttccgctttattatcaatattacacttacagttagaaataaacaacaaattaacggaagagaaagaacctaaacgatatagtgtttattataaatagccggtgacgtcaatgacatgtgacagggttcaccaataatgacttcacaatttgtaactattacataaaattgca

SEQ ID NO: 10588 - DNA, 691 bp, Diabrotica virgifera
gacaatttttttaattattcctgtaattaatatctctctgtcagataacatgtataatcttaacgtatatctacgtctaaagtagtataaaatccaagtgaatctactgcttaaactcgcatggtcaaaaaatgacgtggtcctatggatgagcagaacggcaagaaatggaactgttccgatggtaggttacggaatcaattaaaaataagtgtaaacaacgaacagtaatatttattttatttttggttaaaatgcgtgcttattcatctcgtaagagggttgtttattgttttggtgcagcgagggtgcgtctgaactgcctgcctgctgtgacgatactgcctgagaccacaacacggtcatcatgtttgcggttttacaatatggctagaaaaatgcaataaattactacatctggcgttttaaaagctcagaacctttctgtagcattcccaaagcgcgttgacataaggtctgataaagtaattaatttatggggaacagttcgttaaactcacaccaaaaacattagggatacatttcgtttcgtaaaatttcttagcatctggtttgtatattaaatgtgaattttatatgaccgttttgagaaaacttattaaaaaaattaaaattagcaaaaaatagtaattaaagcgtgtcgccacagaacgttgcgactcggtgttac

SEQ ID NO: 10589 - DNA, 691 bp, Diabrotica virgifera
  misc_feature (503)..(503): n is a, c, g, or t
  misc_feature (561)..(562): n is a, c, g, or t
  misc_feature (634)..(635): n is a, c, g, or t
  misc_feature (637)..(637): n is a, c, g, or t
  misc_feature (639)..(641): n is a, c, g, or t
aagaaagcattatattataacaaacattttcaaacaagactattaaatgtagttttagatttcaattaataatagtaaaatgtttctttcttaaatagtccgtctctaagtatattttgagtaacattctatgaataaattttgcaaaaacaccttttttaaaccctaaatgtttttttagttttaaagtaaaatacataatgagccaccatgggagttaaggtttttatgttacggtttgcactactgtttggaggtaacaaggccttaagtgcaattttttatgcccaaaaaaagccaagaacaatttttttttaacaaaacttgttttttatttatttttattaaattattaaggcctttaaacgtacattttaaagaaaaaagggtgggaaaaagtatatttcacgttttattgaatatctccgtttcaagtaaattggagttaaggctttcttcctaagcagggcagtactggctctgatctttttgggaatctacantcggcggtctaccaatacgcaatcgtgaatttctttcacgtttcccccttggtagccnnttgaggagcacttgggcgtgacttatcaaaaaccgacgtgaaatcacgttgaaacttggtaaaccaatttgnntngnnnggcatcgaaggaaaagagagacagtacacagcagtctagcgctctttgat

SEQ ID NO: 10590 - DNA, 695 bp, Diabrotica virgifera
gtatcagaacgtctggggttcctccggtgagtaccgatcccacaaggacagaaactattttcatctattaatttataataaacgaaaaattcctgaccctgcgaaaacaggttatttatttatttcgaatatatttttatttaaattaaacttgtgttttactaagactagtgtctattaagctacctgttacaacatcgacacaaattcagtagtttaactaaagtaccgagtgattatttcttgttattaatagaaataaaagaaacaaaatgccctgaaaacaccctgtatataatttaaacgtaatatttcaaactttccttaaaggcgccagtacaaacaaacgttattaacactcgtgtgaaaaggaatgactaaaaatgttgatttccgttaattccagcatgttagaaaataaatactaaattctaaaatattacgaatcactctaaaataaaaagtttacaacttattactaaccttatctattcaatatcacaattaaggtcccagttaaattataagcgtagacaaagtttttataacaaaaccttaagagcctaggctcaaaatttcattcatttttttcgttgtcctgaaaaaccaataaatattttagaaaaatgtaaacacagatcgaaagatcgcattattaccgaggaccgaaagtgccttagtataaacaaaagatt

SEQ ID NO: 10591 - DNA, 698 bp, Diabrotica virgifera
gctcagctggcatccaacctgttttaacactgatcatgattttttaataaaatcaaaaacattttgtgatgtagcccttaaagggatttttaataaaattttgtaccttttacaaaatattttttaattttgtaattgatggtatacagccaactacaagaaaatttttcttttccatgtggtttttaaaaaccgttaccacacacaaaaatgacagttacagggtgattgattagtggggcaaagctcaatagctccgctatagtaatagatatcaataaaagtttataaccaagatgtcagccacctttgagcttcacattacaaaactagttagaacgttacagggtgttcgataacacagtggcagaccacacctatgttttttttttaaatagaacacaccatatttcattttacattcgaaattctgttaacctctccatcacaaaaatagaaaggtttgccatgctatacagggcatttacaaagttataaccaattttgtatgaaaatcgtaacaagctcaactccctgtataaacaaaaataagcacagcagcaatggtttatttatgctataattttttatttattgtcaaaattttcaggaattattgacattgctagttttctttatatcaaatcacagggtgagtcaaaacgcaattacattattttctcagcaatgtcaaatgg

SEQ ID NO: 10592 - DNA, 697 bp, Diabrotica virgifera
  SmartBlast Evalue=2E-39; Info=Apolipoprotein D n=1 Tax= Camponotus floridanus RepID=E2ABN0_9HYME
cattgtgttggggccaaggaagttgtctagtcgattgaattagaaaacgcaatatgcattcagaattgtttgttgtaagtttgttcatgccgatgatactggcacaaatacctgtattaaaatgtcctaatgtaaaagtccaacaacattttgatttggcagcctatttaggtaaatggtacgaacaagaaaagtatcctttaatattcgaaataggtggcaaatgcattacagctgactactcgaaaagaagtgatggtaaagttgaagttttcaaccagatgaaaaatattttaaccaattcagtatcctcaattaagggaacagctgaattagcatcaaaaacaggggaagcaaaactatcagtcactttcaatacacctgtaacagtcacttcgccttattgggtactaagtactgattataaaaactacgcagtagtgtattcttgccaaacagtagtgggtttctctgcacacactgcatggattcttactcgagatcaacacccctccgaagattttatcaataaggctcgacaagtacttaaagataataaaattaacacttctttcttgttcaaaacggatcaaaagaattgttaactgtcaaagaattacatttgttattttgttgattattaaatattaagttgtttgtttgtttaatatatacacaagtaggttgtgtaaacatg

SEQ ID NO: 10593 - DNA, 692 bp, Diabrotica virgifera
  SmartBlast Evalue=7E-55; Info=Mrna capping enzyme (Fragment) n= 1 Tax=Aedes aegypti RepID=Q16P62_AEDAE
caattgaaataaaaacaatcatcttctaatcattctggaaggtgcaggcatcaatttcgactgaggcaggcactgatctatgaaatggagcagatattggctagtaacgggattcttgatactctcacatacacctaatgcagtgtctctgtggtttggaaatgatttatcagttctttccctcataaacttccatcgattgtcttcaaatttacattcaataattttattatctaaacctttcagctctttcgtccatttcgtaattgcaaaaggttccttctgttgtaagacaaataataaagctactttcttcgggatttttccttcacctttatctgtggtgatttgtagacgaaaatcgacagaatttaaactaagaggcttccacttgagaacttcatcacatctaccaggcacatagtgcttatgtgatggttgaaaaataagtccgtctggctcgtgagacaacgttctagcgaatttttctcctagcaaattaccagcttggctgatgtcccaaaagtctttttttcgaacactgaatggttctttgttcttgatgataataccttttccattgccatataccgtaggttttattatatcatttttcgatgcattgtagtctctctgggtagaaacgtaattggccaactttcattattttcgaatacaattacatcatacac

SEQ ID NO: 10594 - DNA, 696 bp, Diabrotica virgifera
gaagtcataaccctcatttttaaagaggcgctagaagttctacacatgacacaaatgatagatgctgaaagtaatctcagcccacattgtgtaaaggacggggctagaatgtataagaatgccacaaagtgcacgacagataatatgaaagtgatacaaattacataaccaatgacatgtaaatatgacgttacaacaaccatttcgtgctgggcgaaactaaaatgtatatgacaggcattacgtgacagatgacagtcattacgtgacagacgattgagatgacatgcaaatcagctcaacattcattggttagtgttggggcgcaatttatactccaaactacctgacaatgagtatggcctcatagccatcattttgtaaggggtggaactaagaatgctaacagaatacaaatacaaaatgttccagtgtgttagtgtttcactgcctacgtttactaatgatttggtatgttgctgaattttctgttgtgcacaactgttctttttagcgtatgtttttgcattttgctaaaacttgtaacaacctgtaaattgcatgaatctgattacgattagtataatgtagacccaaacaatagctgctttttctctctttgttacattcatcgtcgtttctgaattattgcacaagactgaaagtatcttcatgttaaaagtaatcctgtttagg

SEQ ID NO: 10595 - DNA, 697 bp, Diabrotica virgifera
  SmartBlast Evalue=1E-120; Info=Cyclic-nucleotide-gated cation channel n=1 Tax=Culex quinquefasciatus RepID=B0X8G6_CULQU
ttctctcactagacaatatatttatagtttttattggtcgacgttgactctgactactatcggtgaaaccccagtgcctgagaacgacgccgagtatttattcgttgttgcggatttcttggctggtgttcttatttttgcaaccattgtcggtaacatcggctcgatgatatcaaacatgaacgtcgccagagtcgatttccagaaccgcatggacggcgtcaagcagtacatggcattccggaaagtcgggcgagaattagaagctcgggttatacgatggtttgcgtatacgtgggcagaaagtggcgccctggacgaggaaagggttttgtcggcattgccagataaattaaaggcggaaattgccattagggtgcatctggacactctcaggaaagtccggatatttcaggattgcgagcctggtctcctggaagcgctcgtccttaaactcagattgcaggttttttctcccggagattatatctgtaggaaaggtgacgtcggtaaagaaatgtacatcgttaagagagggagattacaggtggttgctgatgacggttatacagttttggcaactcttggcgctggctcagtattcggcgaagtcagtgttttggatattgtcggaaatcgtacgggaaataggagaactgccaatgtccgctctttgggctattcagatctcttctgt

SEQ ID NO: 10596 - DNA, 691 bp, Diabrotica virgifera
taattccataattggactattattttagtaagcaataaataacatttcatacaacaatccattgccaactatttcgttctttgaatattgccaaaaattcatgtatcagatagaatcaaggaactcaatcatgtattagattagaagaccaatggaaacaatgtttgtattgataaattcatcataaatatgcagatttttattattgttgcagttctttcttaacaaccgtttttaatttttttatctattgtttacgtgtacggcatattactgtcatttatcaaaatatatatccaaaatatcgttttatgcttttgcaaaacatatttgaagtagatcaatcaccaaaaaagcttgcacttgacaataaacagcatttaaagtgagtcaaatattgttgtcccttaagtgacctctgtaaataattatttaaaagagtaattgcgttataaaaattagagattacactattttttcttattatatgaaagagaagtctgaaagctcaacatggcgataagaaaaacttttaaaacgtgttccaaacagttgcaaacatgtaagcgttgaatcaaataaaagagggatataaactttacttatttaaagtatttatggaattcttgatggaaatttatgttcaacagtaaaaaaagcataaaacacaatactgcttttatttccaaag

SEQ ID NO: 10597 - DNA, 694 bp, Diabrotica virgifera
  SmartBlast Evalue=1E-39; Info=TATA-box-binding protein n=2 Tax= Formicidae RepID=E2AA44_9HYME
gttatctggtcatagaaaatagaaaacaaactgtattgaaaagtattactgtgtagtaacatggtaattcgaagttctaaattttgtttattgtagttctacttgttgtcttaaacacaaaataaacaaaaatggatcaaatgctccctagtccgggatttagtatcccaagtataggaacacctcttcatcaacctgaggaggatcaacttatcttaccaaatgcccttcaacagcaacagcagcagcaacaacagcagattgcgaccagcaattcccaagtacctcctttggcaccaatgggcggattgacacctacacttggacttggcatgggccatgccatgtctgtaccacaaaccaaatatgtaactggtttcgcattgcccatgagttctatgaatgcacaaactccccaacacacaatgagccctatggtgaatttagggggttcaataactacaggagctggagtgactccaacgatggcaccttcaactccttcacctatgacgccaatgactcctcattctgctgaccctggcatcattccacagttacaaaatatagtgtccacagtaaatttaagttgcagattagacttaaagaaaatcgctctccacgccagaaacgccgagtacaacccaaaacgtttcgcagccgtcatcatgaggatacgtgaaccacgtactac

SEQ ID NO: 10598 - DNA, 695 bp, Diabrotica virgifera
  SmartBlast Evalue=3E-66; Info=Rabconnectin n=1 Tax=Culex quinquefasciatus RepID=B0WP13_CULQU
aatgttggacaggaatggcggtattagctttccaaacgcattgccatgaagtttgttcttgctcttgcggtttatcaggttcatcatgaggatcatcaccatcttgatgacctcctcctagagtaaatgttacggatgtttgtttaatatcttcgtctgccgtctgtgattttaaatgccacaattgaacataagtaccagctgtcaataaacgggtaccttccaagttccaacttaatgcacgtgttgcagaatcagtttttaaggtacctgtttgtacccacctatagtctaaaccatgtagagaattgttatggattaggggtgttggttcgtatatacaaacaacttcatcataggaagcggctatcttcccagtatcactagaacaatctatagatgttattcttatgtagtcgtgtatggcacctggtattatctgcactctttcaaagtttgaggctagaatgactatgttacagcctgctgcatacgcagtaaaaggaacaccttcaactgaaccaacagcgaagcatttatcgcctgcattgcaggcaccactaacaatttgatgtagattcatcttaaatattttgatatatacaattacacatatttgcacactattttaacattaattattccttcttataacattaaaatgttagtaaaatcaatttattgataagttgcac

SEQ ID NO: 10599 - DNA, 696 bp, Diabrotica virgifera
aaaaatatcgttgttagcctggtgatcagtcatgctagtgtgaccaactagcccgaaaaatccgggacatggcccggcgtcccgggcaaggcttccgggccatccgaattttcaacgttttggtaaaattctattgtgaaattttgaatacattattcttctaagaatttacatgaaattaaattggtgggacgaaaaaaagtcgacaatttctagagcagcggtgctcaaatggtcgatcgcgatcgaccggtcgatcgcaaaagtttttgaagtcgatcgcgattcacgaaaaatatacaaaaaatggaaaagatgggaactgcgctaacttacctcacgcgcaactttacaactttttataaaatagaaatttgcaatcaaaatttttattttctaaattgattttttattagcagtcgatcgctggatgcttgcaatttatgtggtagatcccatgcagtttaagtctgggcaccactgttctagagtgtaataataatatcacatccaaaacgcttgcattttatatcgtggtattacagttctacaaaaagtcaaaccctggactttttcccgtttctgtattttaattatcgtcttctgaaagacgattcaaaaacatgaatatcaaataatgataattatattttgttattaacttaaggttctatttacatggaaatccaacatcag

SEQ ID NO: 10600 - DNA, 694 bp, Diabrotica virgifera
  SmartBlast Evalue=2E-38; Info=Vitellogenin n=1 Tax=Anthonomus grandis RepID=VIT_ANTGR
gtcatgacattgaagatggatttgccaaatgtacagtttacctaatggagaaattaaggttgaagtacatggaggagatttctacgttatctacgatggaaaccgtgttaaaatgtcagccaccagcgacaagcttagaaatcgcattgttggaatctgtggacaattcacagaacaagagtctgacgatttccttacaccacaagcctgtgttgctgtcgacgaagaagaattcttaagaagcttggaagtagaaggacaagagggtaaacaattaagagatgcctttaacggtaactcaaagaaatgcttagatcgtgaaattccaaggttcgtgaacgtcattaatgctcgtgattacagaagccaaaactcgcaaccatccaaatccaccagatgtacacactttcagacccaattccacgaagagggtgacaagatctgcttcaccatccatcctcaacccacctgcagtagccactgccaaccaagaaaacaaatcactaagaaagtacctgttcactgcgtacaaaatggcaaggccgccaaaatgtggaaacaacaaatccaaaatggacagagccctgacttcagtgacaagtcagaacatagagctgtttccatgaagatccctgaaagctgctcgcagtaaatttgacgactgtgttatgtattttagatattagaagcatcc

SEQ ID NO: 10601 - DNA, 689 bp, Diabrotica virgifera
  SmartBlast Evalue=2E-74; Info=GPI transamidase component PIG-T n=1 Tax=Harpegnathos saltator RepID=E2BTC6_9HYME
ttaaatttacctataaatccttttactttttccaccagcgaagcatctttcttgggtttaaccacaagtttcctggtggtgatattatgtaatgggccaaaagccaatgccactacagtgcaagccagacatataacattgtagggcatactaaagtcaggagttgggagggttatcactatattctcagtcctcactctcactaaatatccacttcttgaagcattaaagctatctgaaattaaagtaccatcttgaggaattcctgtatagttcctggctactggaaggtagctggaaacaacagcagatcctatgtaaaagcccaagttggcatctggtggatactcttgccatttcaaaaatacgtagtcaaaatctactaccactgaagtagctgcagaaggtggaattcttattagaacctccaaataattgggtctttcccgttgcctagcaggtatgtatctcaactgtaaaggtttgatgtctttaccattagctgtcactttcaaagtatgtagatagataggaatgaaccaaggaatattttgcattaggacaacaccattcctgccagtggttgttgaagatttttgttactatacctccacgttcttgaccataacccgacaagtactggttagcatgtaatggtggtggtaaatttagagataaagtatcaggat

SEQ ID NO: 10602 - DNA, 696 bp, Diabrotica virgifera
  SmartBlast Evalue=2E-46; Info=Chitinase n=1 Tax=Monochamus alternatus RepID=A4PID3_MONAT
ttttgagaaaaatggatggatattaagtatcactgttcatccagtaattgaacagcatggttacgacgctaaagaaatcagcaggatcgtagattgggtgactattaaaacttacgacttctatggaagctggagcctctacactggaaatcataatgcattatatccttcctccaaagagaatggctgggagaaacaacgttataaccttgatgctgttgccaaaacttggcttaaggcaggtctctacaagaacaaacttgtcttaggtgttgcattttcaggagtcggattctctttgaaagataaatcggaaactggtgtacacgctccaataaataaggctccttcatttggagaaatacgatactatacgatctgcacaaaatacgccgattttacaaaagtgtgggatagcgaaacgaagacaccatattcgtacaacgacacattttggattggctttaacgatccacaggcagtgcgacttaaaggagaatatgttaaaaatgaacaattggccggtctaaacgttttctcaatagacggcgatgacaataaaggagtgtgtggggaaaaatacgttctcctgaagaatctaaatactggcatgggacatagtttaacatggttgaaagacaattgactgaaatcataaataaattttaatttttgtacgaaacttgcaatcactga

SEQ ID NO: 10603 - DNA, 693 bp, Diabrotica virgifera
  SmartBlast Evalue=3E-47; Info=DTW domain-containing protein 2 n= 2 Tax=Formicidae RepID=E2B059_9HYME
caaaatgaatattacttttatttatggtatatactttatatataaataatactagatgcaaaagtttacatctttccatataatatatatgttaatgaatccttttacaagtatagccttaaaaatcagtcatgattgaagaagaactggatgccttatcagacttggcttcaattcatgcagatcctccggtaatgagagatatatgctctaagtgccatcgtccttccacagtttgctattgtaaatggataccagttccacctatgtgcccaaaaagtagtattatactgttacaacatccagcagaagaaaagaggtgccttagaactgccactatgttacaattaggtttagattcttcaaaatgccttgtatttaaagggaaacgcttcccgggaaagtataacattctagaagatatattaactgcttcaaacacactattgctttatccaagcaaaacagctgtagatattagagaagtgcttagggaaaattctcataagttttataatatagtacttatagatggtacttggccacaagcaaaagcaatatatacaggtagttcgattttacacaacattaaacagattaagattctgaataatgatacaagtaattacataattagaactcagcctactgatggttgtttgagtactatcgaacagcagctttaacattgag

SEQ ID NO: 10604 - DNA, 694 bp, Diabrotica virgifera
  SmartBlast Evalue=1E-104; Info=Ribosomal protein L13A n=2 Tax= Cucujiformia RepID=D1M822_9CUCU
ttttaaattataagtcatttattaataaaaactttaattataaccataagaattgataagacttgtgaatggttttgtttgcttggcaaccttctcagaagcttgctgtgtgagcttcttaagtttgtcacgtttgcggatagccaatacagccttaactttacgtttgctttccaatgtacgtacaacagattggtatttccatccaacttcatgtgaaagacggcctacatgacagaatttacggcctggtttaaggcaaattactctaagtgcaccaggcacaacaacacgcttcctgcgatcatatgggggagggataccttcgtatgcctttagtctacgaagagcttgctttcccctttctgatttgtgtggcaacattcctcttacagttttccagaagatccttgagggagctctgaagtggaatggtcccctagctgggttaacattacacctctttcggaggaatgacataaacttcaatttatttctgtaaaaatttccggagatatttaactgttcacatcttactactgtgactttgttaccttctaggagtgctttggacacgatagccgctaaacggcccaataaatggcctctgccatcgattaggatggctttttcactaaaacctgtcatgcttccactgaaaccgaaaaagagcgacagggaagacagccggatg

SEQ ID NO: 10605 - DNA, 695 bp, Diabrotica virgifera
  SmartBlast Evalue=1E-100; Info="Isovaleryl-CoA dehydrogenase, putative n=1 Tax=Pediculus humanus corporis RepID=E0W349_PEDHC"
ttttaactttgcacaaaaagagttagctcctatagccaacgaaattgacaagaaaaataaatttgaaaacttaagaagtttttttaagaaactaggcaacttaggagctctaggtatcactgtaaatcctgaatatggaggtaccggtggaagttacactgatcacgtcattatcatggaagaactgagtagagcttctggagctataggtctttcttatggagctcattcgaatttgtgtgtaaatcaaatccatcgaaatggtagtgattatctaaaaaagaaatatctgccaaaattgtgttcgggtgaacatataggagctttagcgatgtcagaagctggttccggttccgatgtagtgtctatgaggttgaaagcagaaaagaaaggagaccattatatgttaaatggaaataagttttggataactaacggaccagacgcagatgtcttagtggtttatgcaaaaacagatgctaaatgtaagaaatcacaacatggaatatcagccttcgtaattgaaaaacattttaaaggttttaaagctggtccaaagttagataaattaggtatgcggggttcaaatacttctgagttaatatttgaagattgtgtagttcccaaagaaaacttgttaggttcggaaaataaaggagtgtatgtgcttatgagcggattagatttggaaagac

SEQ ID NO: 10606 - DNA, 695 bp, Diabrotica virgifera
  SmartBlast Evalue=3E-34; Info="CG8360, isoform A n=4 Tax= melanogaster group RepID=Q9VLR3_DROME"
atcgatttagttcacgtgtagtggtggattcaagaatgtctatctgcgtctgcaccaaaaaaggaaaagaaaatcttgataatatttacaaactaaaagccttagatccaaaaatacagaatctgatcaacatagctacagaaggaaggctcaatgcctactgcccttacagtaatttcaaagttggagccagcgtgatgtgtgatgatggaacgatattctcaggctgcaatgtagagaacagcgcattcaccgtaggcctatgcgcagaacgatgcgcctacgtaaaagctatcagcgaaggaaaaatgaagttcaaggcggtatgtgtagtggcgcagcaagaaaattcattcaccactccatgtggagcttgtcgacagttcatgagcgaattcgggaatgtagatgtctatatcacgaagcctagtggtagtgatgttttagttttaagtttagataaattgctaccatatcagtttgagactgtagaccatacttttacttagaacatgggtggccaacattttcagcaggcggacaaaacaattttatttattttccaaagcaaacaagaacaagaagtaactgtttttttttaagaagatataacaaaaatgagaatcaaacatatttattagacttacacataataaaacataataataataaaaaataaacgaaatataataaat

SEQ ID NO: 10607 - DNA, 692 bp, Diabrotica virgifera
  SmartBlast Evalue=4E-65; Info=Draper n=1 Tax=Tribolium castaneum RepID=D6W8W0_TRICA
gttgttgaaacagcgtgatttagtttattagtttgttttttattttccgatttttcgagggtacatttttttaacgataatcgtgtaggtgtttaagttttagtgttccttttattaatgtcagctggattttagcagtttattatgtcttaggacctggcaatcactcccaaggagtttcaaccccgatacatccacctgataatcacagtacaaaaccatttaacaagctcttcatgaaccattcaaaatgctagccttatccgtagtcatcttattctcctcattatccctgactttgggattgttggaaggaccgaatgtgtgtacaacacaggaaacatatacagtgacagtgcgagtatcggaagaacaaccatatcaagttagggagtacgtgtggtgcctgaatttccctccaagatgctcaaaatataagattaagtttaagacagtgtacaaaattcaaaatctggtcaaaactagaccggtcgaagactgctgtaagggatatacgagaagtaataccggcgataaatgtataccggtctgttcaaaagactgccttcatggaacttgcacagctccagatacttgccagtgcgaaacaggatatggaggaccatactgtgatatttcttgtcctaaaggcttgtggggtagagaatgtcagcacaagtgcgaatgccaaa

SEQ ID NO: 10608 - DNA, 690 bp, Diabrotica virgifera
  SmartBlast Evalue=2E-57; Info="Furin-1, putative n=1 Tax= Pediculus humanus corporis RepID=E0VJJ3_PEDHC"
tgcgatcagtaatgataccatctaacatttttacagctccaactctggctccaaaagctattccaacaccacatttccggttattagccatcatagatacctctccagcgcatcttgtaccatgattattggactttggtgcatctagtctaggatatggatcattatcgtcctcgttacagtcccaacttatttcaggatcatagttttctcttaaatcgtcatgtgtatattcaattccatcgtcgaggattgatattcgaattcctttaccagttatacccatataatatacaggaagtacatttaaatctaattttggaaggtctaaacgagatctagtatctcgcaggtaccattgttgtgaccacaattcatcgttaaacgtttggtcggaggccgttactaacgttttcctttcacgaatttgaaaatcttgcactcttttaactcgctgtttggggatatcttcttctgccatgacgtcccttttttgtcttaatttagaagaatttaatctttgagaagttggtatatcttccactcttttaactcgctctttggggatatcttcttctgcaatgaagtcccttttttgccttaattttacatgttgttcttctgcccatagtaccctttggtatttgcaattatcttcggaaaaaatccacgtttctgatgattttcgta

SEQ ID NO: 10609 - DNA, 697 bp, Diabrotica virgifera
taactgtcaaacagtaaaacgttcagttgacctatttttccgcatgacaaataatgagtaattggatgagtgagtctaggcttcgattacgaatcaaagcgtccccaaattcgcgggttcgaatcccgatgcaagcttttatttttttatgcattttatgattgtaagtatatttattatataactttttttttcagaaaatgcgtatttaaaatttttgccaacaattattatcgttcagaaatcattttttctttgtggcatttttcaatgtgtttgtgtgcgttttattcttttattttttttttaatttttggtattgtcttaataaaaatttttggaaagtagtaagtattaaaattagtttaatatttaaataaaatataaataaactgtttaaagtacattatatcaatttcgttaaaatcacataatatgtaatagaagtataacttcttacgtgcgtacaaagtacacacacattcttttttttaacaatcatctgcacatttttgctaaagacacaatccttgttagtcatatcaatcatattgcttttaattttatagatgtccttacacaaaatcaaggatttacacactacatggtacttactgcgtttcttcaggttcttaaccagtccctatttggaaatatggtgggaaatatactatgagcgttgattacaatcacgggt

SEQ ID NO: 10610 - DNA, 695 bp, Diabrotica virgifera
gttggggaaaatgaaaatctgggaaaaagtagcccaataggccaaactagtttgtcctgaaatcaggtttggccggtaattttatatatttttaattaactattataaatagttcacctatttgtaggatgagctatcctgtctcttatatgatcaacaatcataaaaactgtttcctttggtacacgaaatctattcaaaaactcattatctggccacttatgaaaatggttttcttttactcgaaaaacaggattttttcgtagaggaaaaaattatattaacaacagctaagaactcttcgtcttctgtgatatctccatcttcaaaatcgaagacaccattatgagcaatagccataattattagactctaaattatattgaattattttaaatcttatctacgatttaaaagtagcaataacaacacaatatattatagtgcaataactatggttgtttcaatctggaattttcttgacaatatttaatttaaaaccataaaataaggttacaaatctctagttaacaccgttaatccttcgtttttgggcgattaagataatctccggttaacagatggttaagtgttaaacttgcattgaacaacgcaatattacgtttaattgaagattatttttaatctgaagatcctctccaattgaacaatcgggccttatagtcatttatccc

SEQ ID NO: 10611 - DNA, 693 bp, Diabrotica virgifera
gtcgaaagatcgtggcgaagagattgcaccctcacattttatcaccctcacccaacattttatcaaatatcatataaaaattttatcaagttgcacattttagaaattttgattttggctggttccaactcgttgatcattctctgtaaatacttatatgcgctgttgccacgtataaaaaaattcattaaactctcataaaaaaaattaaattttgttttgatatatttttatcaaattgttcattacttattagaaagaaattttgatttagaaaataatgtgtggcagttaaagtgatcataaactactttatggccaaacccagtgatatatcgccaaactatctagctatttgtaaaaaatgttttatatttgtgttggacgtttttataaatagtatacacataaataatgaataatcatcatttgactcatatacaataaaaaaactagcgcgatttttttattacacaatttactatcaggaaaaattgtacaaaaaatcccgatagatgttcattgtgtatcgaagaacatttttggtaatgttctatagtttttttttatattttatagacttaatattttttacaattaaatttaagccttgaaagaatcaagaaacaacttaatgtgatgttacgaattatttctatagaatatgtaatggtaagttacttaattgtaaaa

SEQ ID NO: 10612 - DNA, 695 bp, Diabrotica virgifera
taatgccatcgaggggcctttcaaacgaataagaaatttcgatgtacctcacacactacatcacatgaaacaatcaatcataccagaaaaccatgtgctttccttttggccaacaacgctaatgaaactaagtatctcggattttgtgtatagatacaagtatacaggatagttaaattcacaataagcattgagagcaatagtattgctgccaaaagattctaccggatacctacactaagcatttattttcacaagtttagaaccgttcacaatagaataacataacgtgtgatccaaaattattgtcaccataggtggctctgaacgacagagatatacagtgcatgtcaattacatgacagagatatacagtgcatgtgcaattcagttaatatactttccagtttacgtcaactttgcagtgtacgtccatagacttaaataatgatagacggagtgtcattcagagcgaagtgacgacaccatcttttttctttggattagtgctgttttattcttacgcatagtaaagctgcgacagtagtcctccccttccgtgcctatactcacacttaatgtcatcttagttcttgatacaatgtggtagaagagataccgcaaaccagtcgaagatatcttgtcgtcaggaagcacagagtgtaagctcactctatgttaattatacctctatg

SEQ ID NO: 10613 - DNA, 695 bp, Diabrotica virgifera
accgaaagtaactagtaccgggtattgatagttaaagtaacgaatctttacaaatattcaaaagtaaccaaaatgtacatcactactcttatgtattgttttacacattgttgatcgaatattcggacattttgaacttaattgtcaatttaattattgtacatagaaaaaagtggtatttttacatacaaatattttcataaaatgcattttaattcgcaaataattctacgaaccagtgatttcagaagacgggagttggtttcgagttcgatgcaagcctttattttttgtgtatatgttaatttttgttcattgttacaaagtgatactttttattattttacattgtttttaacttatagaatcgtgtttttcgggcttgagcagccgagaaatattttgtattacgtagcttgatttataataatgatggtcaatattataaaccaatttgtgatttgcttagatacaattaagatgatacgtagtcattgcatatttaattctgtcacagttcacatgaagtgtaaggagagtagagaactaacatttctaatgaaagtgtgcacttaaaaataaaaaaaggaaccatccaaaatgtgtccttaatttgatcatttttcgtttatagcttgattaatcacctatcaatcgataaaccaaatatactgcttaacaacaaattggtatag

SEQ ID NO: 10614 - DNA, 694 bp, Diabrotica virgifera
  SmartBlast Evalue=1E-15; Info=Endonuclease-reverse transcriptase n=1 Tax=Bombyx mori RepID=D7F170_BOMMO
atagctgctcggggagcaaaactcgcttttgccgatgacgtagcctaatcaacaacgcagttctaatcaacattagaagtaaaatattttctcgagctttggagaagctgcataaaatatcgggctaaaaataaatgaagacaaaacaaaatacattgtcgtctcaaaacaagaatgatctaggagcaacaattaccaataacaacaaaatagttcgagaaacgcgaataatggcaggatacagatcgttctttgcaatgcaacatccaatgaagttaaaacttctcccacgaggtgcaaaaatgcaggtatataaaaccataatatgtacgaccagcagtcgcgtatggaagcgaaacatggacgctaacaaaaagagaagtaaataaattgctgaggtgggaacgtaaaatccttcgaatgatatatgtcccttgcagagacagcgtgaccaacgaatggaggcgcagatacaataacgagtctttcttcggaacggaaaatctagtcagatatataaaggcaaatagactcagatggcagggcatgtgatacgcagtagcggcaatcgccttaaaaacaatgtgttttgggaaaggccagatgggagaagatttgtaggtcggcctagaagaaggtggaaatatgcgtcagagaagatctggaaaaactgggagtgagacaatgggaaata

SEQ ID NO: 10615 - DNA, 694 bp, Diabrotica virgifera
  SmartBlast Evalue=1E-33; Info=Ddx52 protein (Fragment) n=1 Tax= Danio rerio RepID=Q6NWF8_DANRE
gtgaatgtgaaaatgaaaatcagagtacattgtagtatgtatgtatgattttaaataatatttaacataataatggacgcttacgacatttttaaaaagttaaccagaggtgcgaagttttctagaaacttcaataaggagcaaataaaaaaagaaaacctgtgagtagtgttgtaaaacatgaaactccaccagccgtaaaaattgagaaagtacttacagtcagtcaagacaatccttccattacattaataagtggattaaagtacagaaaacagagccaaaaaaacgcaaatttaaggatgaagaacacatactaaagggtttggagcaggaaaaaatcaaccactacagaaatgtaaacaatataactgttgtgggccgacaagttccagaaccctgtaaatcatttcaagattttaatgttgattctgacattattgacaatctaaaaaaatgtgggtatgaggaacctaccccaattcaaaaacaggcagtacccttaatgctaaaggaaagacagattctagcttgtgctccaacaggttctggaaaaacagcagcatttttagttcctataattcattcacttcgtggaccacaacgtcagggtttccgggctttaatcttatgccctacaagagaattggcgcagcagacacagagagaatgtgatcggcttgctgagggccga

SEQ ID NO: 10616 - DNA, 692 bp, Diabrotica virgifera
  SmartBlast Evalue=1E-41; Info=DNA2-like helicase n=1 Tax= Camponotus floridanus RepID=E2A0A1_9HYME
cttctaaaatatcatcgtttttggacaccttgaaggtatcagtgtttttggaattaccacacgaataaatgatcacacttttgtcttttccttgaaactggtcgacagtgttaatgtctatacactcagacttaagtaaggtggacaactgctctacttggtgtcgataacttgcaataacgcctatatctttggctggaagaccagctttgagtaaagctttgacaagtttgaaaataatagctgcttcatggatgtttactttagaactagtgtcctctgtgctaaagctcttgtgaattttccagctagtgtcttgttctagattccacacagggcctgtatcaagaaactgtacagcactatctaatgactcgtctagtgctttcaatatccaactatcaccactatacgagtctgttaagacttgtttatttgggaaacttattgtagcgttttcaatagaactattaccaacttgcagttccccattatatgttagatgattagctaaagccgttatagtcttgttcattctgtaatttatgtttaaggatgtagcagcgtctgttgcatagagtctttcgaacaaactttcggacatgcctaactctctagctttactgcttttaataactgctggcaactgatcaggatcacctattagtataaaagttttgcaggcatacagt

SEQ ID NO: 10617 - DNA, 695 bp, Diabrotica virgifera
attgaaagaaaatgctgccaaacgaaataagaattttgtacctgaacgtttacagtgtatatttttaataactttggtacttataatgtcgaaatatcagaagagatagtaatatttttaagacacattattgctagatcgaatcttatctttggttcccggaatatatgtagagaaaatctttgagcgggtgggacaatcggtagtaaggaaagaatagattctgcactatcagtagtcaaacaatttccagatatattagacagcaaattgtttcttcttctctaagtgccgtctcccaataggaggttggatatcatcatcactatctttactctatctaccactgctctgaagagttctatggaactgcattcaaggacggatccagatggcccccatggtcccctccgagaatttaaaaaatataaatttaaatatttgctagacaaataaaagtactttagtaacgataagttttgaatgtctttatggcactcaaaagtgtgtgaaaagtgccttaaaactcaccattttatccctaatttttaaaatgttctccagacccccacacgaaaatcggccctggattcgcccttgactgcatttaaaccagtcccttaagtttttcaactatgacactcttcttcttcctgtactacttcctcctcttacctttcccagtattatcagtc

SEQ ID NO: 10618 - DNA, 693 bp, Diabrotica virgifera
  misc_feature (662)..(662): n is a, c, g, or t
ccatataatacagtttatgcagccgccatctacagggatattttgaagtatactaaccgagaccatttctaccatttgaaatgtacttctatatgcgtctatattcgctgttataacactgtaacgtttttaggaaaataaaagaagaatcgtcggcaattcacaaagttttaagtttaatattaagataatatacatacaaacaaaataaaagaactgtgccagatataaaatttacttttttcgtcaaataaatagaaatgtgtgacttttaacacaatttgttctatagtcttttcagccttttcaagtcgtgttctttgcacgttaaatatttccttctagatcaattttaaaaggaattaaagtttattcaacgtgagttctgaatagtataaaatcataaaactactaaaagccacagttacaatgcagtgcaggtagcatagagcaatgtatttcttacgggagaacggccgaccacgttgccgatttgtcctgagcggcgcatcaggacaggtgatttctcagtctaccgccaaactaccacgcacctaccactgtgccgacatgagcgacatcgctgagcgtcataagaataacactgcattctaactgtggcttctacatttagtctcctaggcttttaaagatgtcttcgngtaataagagcggattgggtgtgtttcgtga

SEQ ID NO: 10619 - DNA, 694 bp, Diabrotica virgifera
ctagacttgaacttgagtggttctccttttctattgatgattctttatcagccatttctgaacctcatttttcgtagcatcattagtgatgccacagaaaggttctggaccttcaaaagtttccctcgagccatgtttattccatatatacatacaaaagtacagtgtaccatagtatacatatacttttaagaggaaattttgaaactttgtttccttaatatttttacaattcattctacggttgatataggtcagtctccgaaacatcaaataaatacattcttttcagttttcatatgatttattttcattaaaattgtcacaaattttttattaatatcaaaatacaaaaacaaccaatgaggtgtacataaataatatacgctagccacagtcattattgtaagaatgctacttaaagttaaaattaaatcatttgaatgcaaattattgtctggaattgttgaattctggacattattttcgttctagttgaacacattttttgcaatttttttatgcaatcattatgttactacatgatctcttgctcttgtattggcttttaaattgttaactgtacttagttttttacaaacttaatgtctgtattttacatttctcaatggttcgtttcactagctgctttacttacaacttgctagttgcattgctttttttctatggatgt

SEQ ID NO: 10620 - DNA, 693 bp, Diabrotica virgifera
cgtgtcgctgttaaaccttatcgcattgaattgaaatgcgatgtctgggtctgaaaatgtagatatgttgattccgcgtagcgagatatactttgttgcacgttaataatagaacgttacgcttatggaaatcagtgttgccaagcctctcgggcgcgggtggctaatcgaccgccgatatacgattcattctaatcagtacggcgtggcatcgacgcgattctaaattcataagaaatacatggggctatctccgcaatgttctattcttaccgtgaaacgctccatagttattgtatatattgtgtggtgtattggatcgttttattatttctagtatgttcgaatgactgtggcaagcataatgttattttccctttgtagaagatagaattatattttattttatttattttaaactgtatataattatcttaaataaatttactttgtttttaacctgcgttttactgagtctgtcgtcctcaaagagctacccgttacaagatgctattgatgccgattcatgtacagagggtttaacaaattgtgttcttgagtcatttaaaagaaaccacctgtatctatgtccttctacagcgtcttcaatggacaggccatgtattcaagatgatagaaaacaggcttctaaaaacacgttgaatttaggaaaagagacctattggaagaccg

SEQ ID NO: 10621 - DNA, 694 bp, Diabrotica virgifera
  SmartBlast Evalue=2E-10; Info="ER lumen protein retaining receptor, putative n=1 Tax=Pediculus humanus corporis RepID= E0VNS8_PEDHC"
ccagtctcctcggattcctcggaactacatttttgcattgttttggtctacattttgtttgtgacacatacagagaggttaaggtcaatatcggaaaatggattttattctttgcagtcttcttgcgattgcgacattatatttaatatcagcaatactcaaacacaaatcatatgtgggtgtctccgcaaaaacgcagttactttacactgtagctcttgttgtacagggtgaaatttccatattgtacatattgcttatagcatttccctcaattgtggcttttactttggcttttaagatgagagatacttatgaaaaagaagtcgacagtttttgggcagagattcttcttatagcagctttcattttatccgtttacgtccaacctcatttctcctcatttggggtactatctacttttagcgattacctagaaactgtagcgtttattccccagctatatatgatctggaacagcaaaggaactaccaaacacatgaaagtatatatccagcttttattcttgtataagttagtaaacttattatggctaatatacttaattctgattcataatttagactggttaactcgtcagtataatataaaatattccacagttgtgattctaaatttcttagtcctgtccgttgctgtattaactgtacgctctaaaaggatcctacactgc

SEQ ID NO: 10622 - DNA, 683 bp, Diabrotica virgifera
  SmartBlast Evalue=3E-16; Info=Zfp617 protein n=5 Tax=Murinae RepID=Q91WM0_MOUSE
ttttccgttaaaataacactaagtttatttgggttataacataatagtaagagataggaatttttgtgtggtttccaacaatgaacctatcaaaatattaccaagctaagccaacagatcgtatcaaataatttatagtactatgaaactgtatttgttgtaaatatttcattacttatgtcaacctcatagagataaagcacatacgaataatacaagaaaatggaaaattcaagaaatactgggcacataacaaaccaaaaataattttaactatcttgtttcatttctacttccagatggtggacttccttaagatggtttgccaaatattcatctccagcaaaattttctgaacaaatttcacacttcttagtttcgtgtgacctttgatgtatactcaaagcgtgatctgtagcgaaacatttctcacaagttttacaaatgaattccttggcttcctctattccatgctttgatttcaaatgagatcgtaatgaaacccgctgtctaaacccttcgaaacagtgctcacaaacgaacggtttttcattggtatgttgtcttttatgagttcttaaagcatactagaaaaaaagccagtaccacaatattcacaaacataaggtctcattttttcgtgggtcattcgaccatgttttaataaagatttattggtaaag

SEQ ID NO: 10623 - DNA, 691 bp, Diabrotica virgifera
  SmartBlast Evalue=9E-67; Info=Mitochondrial ornithine transporter 1 n=1 Tax=Harpegnathos saltator RepID=E2BJ07_9HYME
aatactcttctggtgttgtaatttacgtgttaaaatggagaatcaatcggactctccaattgttataaaaaactagtggaaaacaacacgttaaagatggaataattgattttacagggggctcattgggtggtgtggccttagtgtatgttggacaaccattagacacagttaaagtaaaaatgcagacatttccaactttatacaaaaatatgttcaattgtttcgcaaccactttaaaaacagatggtgttcgaaggggactatatgcaggaacagtgccagcattagctacaaatgttgcagaaaacgctgttttattttttgctatggtttctgtcaaaaattcatgcaacatattacaggagcacaatctatagatgaactaagtactgtcaccaatgcaacagctggatttttagcagcctttttttcttctgttgctatatgtcctacagaattagtcaaatgtaggctgcaagcaatgcatgaagtaaacaaacagcaggctcaattaggaaaagctgttaaaagtgtgggacctttgcaattgactgcagaagttattagaactgaaggagttaaaggcatgtttcgtgggttagtgccaactattgtgagagagatgcctggatatttcttcttctttggtgcatatgaaggtactagagagttattaaggaagccagac

SEQ ID NO: 10624 - DNA, 694 bp, Diabrotica virgifera
  SmartBlast Evalue=2E-41; Info="Protein max, putative n=1 Tax= Pediculus humanus corporis RepID=E0VI32_PEDHC"
cttatttgtgacaacttcatttccagaaattattgcaactcttgatggttcatttgtcattccttattaattgaatggtatgatacaactttcatcttcttgggcctcctttgctgaatagaaccttcaaaatctgaggtatctgactctgtttcaataaatacatcatctttaatatcccctgttgttttcgccttttctaaggtgcgtatttgagcctctaacaaattgttttgcctctttagatcttcaatgtcctgttgatgtgaactattctttttcctcataaaaagaatatactctgcagccttttttaatatttgagctcggctagccaccttttctccgttcaatgcaggtacagaatctcttaaactactaaaactgtcttttatatgatctcgacgctttctctctaaagcattatggtgggctctcttttctgcctgtgaataatactggcctcctgcattttgcctgcttgttgcttgacgcgaatccgagtcatcaccttcatcactctccacatctatgtccctatcatcatcactcatcataacaattggggaaattagaaattggactgcaaatacgattatacgacggtagaaatagttaccgatctttaatttgtataagtaaagtcgaaaacactttcacaaaaatctaaagtttttcgtccatgcaatctgcg

SEQ ID NO: 10625 - DNA, 693 bp, Diabrotica virgifera
  SmartBlast Evalue=2E-66; Info=Peptide-N(4)-(N-acetyl-beta- glucosaminyl)asparagine amidase n=2 Tax=Gallus gallus RepID= NGLY1_CHICK
tgttttgcaatatgaagataaagatcttcaagatcgaactcgaaacataatacccgttgctaaattagaagaaaatgctcaaaaacgcctgagagtgatacaaacgcatatcaaaaaaataaactggtggacccagacctttccatacaagacatgcttattttggaattgttgcaatggtttaaagaagagttttttgaatgggtcgatagtccagcatgtgaacattgcggtggagtaactgtgttttcacatatgagtacggatcgtgagttactacgatatacagatcgtgttgagttacataggtgcaagagttgcgagaaatttacaccgtttcctcggtataatgatcccaatattttacttgaaacccgtcgtggacgttgtggagaatgggccaacacttttactttgtgttgccgtgctatgggatgggatgcaagatacgtagtagaagaaggagatcacgtgtggacagaggtatattctattgctcaaaaacgttggctacactgtgatccttgcgaaaatatctgtgatacacctttaatttatgagtcgggctggaagaagaaaatttcttacgtgatggcttattccgcagaaaatgttcaagatgttacttggcggtattccagtaagcataaggaagtttgtaagagaaggaaaaaatgtacagaagaacaactt

SEQ ID NO: 10626 - DNA, 694 bp, Diabrotica virgifera
taaaaattagttacgttttggagttacctggatgtactaccatggcttttacagtattatttttaagttttctagcagtagctttttctaattgttatacaataacgcaggatttgttaccaatatttccgacgcaagaaataattggtaataacttagttcgtcatcttcctaatggagaaaacgttactataatttgtccagatgataccattctcaacaaggatacattgacctgtgattttaaatcacaagcagatagtcgcaatttagtaaatgaaatcaaaccttgcgacaacaattgcaggcaatatgaactatgcgatggaggatgtgtagacaaattttgccctccgcctctactctttaataaaattttggaagtctgcgattatccaggacgcgccaactgttgtgaatttaatgcgaagaacaacagcaaaattttacaaggctcctagtagtttattttattttaatgtttccaagttgtgccctaattagactaaacaagtggcgaacagatttaacaaaaaatgtgtacatattttgcagagaaatttatacaatatgtctttgtttatatttagtataaagttgtattcataataaggtagtgaatatgtcaaatattattgtgctatatacctatgcagtttatatttatgtattatacgttttacctctaaaaaaa

SEQ ID NO: 10627 - DNA, 692 bp, Diabrotica virgifera
caaataaatgtccgaaactggtaaatgtttgatgatatcgcaaaactcctaattgaaagcgttgatatttcctagaaccacatacaataaccaaaactaaagacataatccaagactttgatataataatatagacctacataatatattacttcggacatgtaaagaaaaagacgaagatctaaagaaaaaaaagtcatgaagtcgataactgacataatcaagcgatatgatgatatatgaatcttacagtaacgtatttttatccaaaataattgagttgtaaagaaaggagagtgatatgagattccaacattaatttgttaaagtaaacaaaaaagaaatattgggaccgtgcaagttcggaagagcgacacctggtgtcatagctcagcaacatttttagcacttttaattatactactggataaggaaatcattaaaccaataaggaactcatttccttatccagtagtataatggactcgcattggcaacccttttagcacttttaattatattggccaattatattagtcctagttactggataattgtcaaggccatagcccaaaaaaataataagaaaaagtaagattgaggttatgatattaaaagataaactttggtatacggtagggtatgtagtaaataaaattaattattaaaatgcggtactacaagcaaaataa

SEQ ID NO: 10628 - DNA, 694 bp, Diabrotica virgifera
  SmartBlast Evalue=1E-109; Info=Ubiquitin carboxyl-terminal hydrolase n=2 Tax=Tribolium castaneum RepID=D6WV88_TRICA
gccccattgataccctattactacatatttctgttaacctaagttttccagtaccacaatctccgacttgctttttcgcctcttctaagagatctgccacggttccacctttatttggatataatatcagttccttttcttccttgaacttcgagcccacgtaaacgcatttgaattgcttcttattttctaattcattgactcgaatactaagttgctgataaaatattttcttcgggacttttggctttgaatatactagtaggtctttgagagtaccttcgaatgtacacctcaacgggtgaccaggactatctttataactttgacatttaaagaattgtaacaaatagggatcggttcctaccctctgcgctacggctctggcgaactgatcgtatgtcattctctgtgacagctccattgtgaatccctggtcgttgggtatgcacttgtctacaaaagtcacttcaacgcgacaatacaaatctttgaaataatctacacatgtcggaaggtcggaaagttcctctctttcttccttttcaaacactattatatcaccatccattaattcttctaataccttttctaaaggatcattaaaatttgtaattttctctatcatattcggtcgtatttcctcataaagtaacaattcggtatctggcggaaaatcctgctctttcgttca

SEQ ID NO: 10629 - DNA, 693 bp, Diabrotica virgifera
  SmartBlast Evalue=2E-20; Info=Transposable element Tc3 transposase n=1 Tax=Lepeophtheirus salmonis RepID=C1BSK0_9MAXI
atgtctctgagactgacgcctgaacaacacttccaaattatgcaaatttattttgaaaatcatgcttctgttcgaaatacgtatcgcgcactacgtccattttatggtcaacatatcgtccatcagacgattaattcgattaaccatggaatgtttccgtaccacgtttactctaaatgctaatacacttccatacagacggcgtacagtgcgtacagaagaagttgttgctgctgtggagcgtagcgaagagcaagacccgaatcagttaatcctccatcctgtacagcagttggatatatgtatgtccatccactttatggaaaattttgcggaaagatcttggtttgcgttcttacaaaatcaactcgtataagaattgatgctacacgattacctagcaaggcgtagattcggtgaatgggcccaaaacgagattgccgttgatccctattttcaaagcgaattttgtttggcgatgaaactcaatttttgttgaatggctacgtcaataaacaaaattgccgtacttggaatgaaaataattctcaagtgtatgttgagacaccaaacatgactgtttggtgtgttccgtacttcttcaaaaacgatgctggccagaaagctacagtcaatggtgaccgttatagagccataattaggcctactactgactttttcattcctcaattg

SEQ ID NO: 10630 - DNA, 692 bp, Diabrotica virgifera
  SmartBlast Evalue=1E-70; Info=TRPL n=1 Tax=Tribolium castaneum RepID=D6WWW5_TRICA
tacgcttataaaggatatgctgacttagacaaggcgattggcccctactcttacgccaatgaagacaacaccatgagtgatatggtattgtgtttgaatcaatataaagaaggtactatattcggttttaatgaatcgtatatatttaacagtgaaatagttacggagtgttttaatatatctaaacctcttagtggacttcttgattcaaagttatatatagaacaacaacatattgatgtgaacttttctgccctagttaacgcagagttaatatttcctattaaacagtgaactttaaagcagctggaagaataactcctccgaactgctttctttttaatatagtcattgcctttgataatgcagatcatgatggtcagatgttagttgcactggaagctgaaccaatacgcttaacctgtcaaggtgacatttcatataaaactgataatgaaatagaatcgattctaagaagtattctgaactacctagtgatcttcatatgtattacttcgtttattttgtgttcaagggcggtgtggagggcacagcaacttaagacgatcacagacaaattctttataaccaggtttgagcaaccgttaacccataaagacaagctgaaattcttaaatctttggtatattatgataattataaatgacgtatttattatagtagggtctatt

SEQ ID NO: 10631 - DNA, 691 bp, Diabrotica virgifera
  SmartBlast Evalue=1E-110; Info=COP9 signalosome complex subunit 2 n=6 Tax=Neoptera RepID=E2AUH0_9HYME
gaaataccagatgtatacagctcagaaaaataataagaaacttaagatgctatatgagcagtctttgcatattaaatctgcaatacctcatccgttgattatgggagttatacgggagtgtggtggcaaaatgcacctgagggaaggtcaatttgagaaggctcacacagatttctttgaagccttcaaaaattatgatgagtcaggaagtccaaggcgtactacatgtttaaaatatctagttcttgcaaacatgttaatgaaatctggtataaatccctttgattgtcaagaagcaaaaccatataaaaatgatccagaaatattagcaatgacgaatttggtgactgcttatcagaataatgatatcagcgaatttgaatcgattttaaggcaaaatagacaaaatattatggatgatccattcattagagaacatattgaagacttactacgtaatatacgaactcaagttttgatcaaacttatcaaaccctatactagaatacgaataccttttatttctacagaactgaatattgatgtttctgaagtagagagtttattagtatcctgtatattagataataccattcaaggacgaatagatcaagttaaccaagtgctgtttttggaaagagaaacggtaaaccaagcgcgttacagtgcgttgatagatgggccaatcaac

SEQ ID NO: 10632 - DNA, 691 bp, Diabrotica virgifera
ataggaatttgtttctaatttataatataatattatttatttcgcacatatttgtgcggcaatatcaacgtcagtatttgatagtagagctatgaatttataagaaagtatcaaataactgtacgagagcattttccgtaaagttggttgcctgtcaacggtgcagaagatttctctttttagatcagccagtcaggaggtcaatctaacaatgttttttaagctattgtaattagttgcttgattgcaattatttttacatctatcttcttgtgtcttattgatttttccgccaatgcaatggatgttgttcccttctattattcacctttaaataatttctgtaaacttataaaacacgaggagagacagcattgagccttttagcgccagatctctttatacctgtcaggcatcttttccaagaccctaaaagtgtttgttataacataagctacaataatggtgcatgtatttaattaacatatattatatcacgcattggtccctctttctacaccaaaagaactaattttgaatgattaaatgcctaatggacttattttgtcacactggcatttactttatttggttctgtattatattattaagcacaataataattattaaagaatttaatctttcagagtgttatgaaagaaattaacaataatgacattgagatattgtt

SEQ ID NO: 10633 - DNA, 693 bp, Diabrotica virgifera
  SmartBlast Evalue=1E-15; Info=Exocyst componenet sec8 n=1 Tax= Aedes aegypti RepID=Q177C5_AEDAE
tgcaaagaagcatagaacttagaagatctggtagaaagaagtcttcaatatccaaaaatttattcaataatgataattctggcaatgaaaagaagtctatattcggtgaagatttccatgtggaagaaaaattagaaatagtaaacccagaagaaaatcgtagtaattttattgccatacttgttaaaagtctgtgtttattagataagttgccatatgctgttaaggaagtaatgcaagaaatgcaactctctctaacacaaattgtcgaaagaacaactaacaatattaaaaacttagtagatgtaggtgaccaaagactaattttaaaagaactggtacaaatcttgtttgagcaatacaaagaagtagccgattcacattatgtattcatgacttgcgtagaacaggccaagaaggcacacaaactggaaataaattcttatgacaccgtgtatttctggtcacaggttcaagttgtgatgcaatcatttgtgtcggactatttagacatccagtatatgtcaagtgatatgcaacttagtgatatgaataatgttaacgatatatcttcatatttttcaagacgaaaacaggcaacgaagaaaaatgtacttttcaaattcgaaggctcatccagtgctctaagtttaagtagtacgttgaaacaagtccagaagagcaaagtttttg

SEQ ID NO: 10634 - DNA, 694 bp, Diabrotica virgifera
gcgcgcacgtgttctgtgtcattgttacagtttttttgcagtaatatcataatattaatgctagttaacatttataatgagttccagaggtaaacaaatgttaaaactagtgcaggaacaaataaactgtgaacaaaatttgccaaatgatgaaaatgaattcacagcaagttctaacctcaacattgaaatttcaaatgtaacaggtaagtgcaatcctgttgttatgaaataattaagttttattatattttgggcaataggtatttagatcataatatttatataaaagtgtaaatgagctggttgaaatacataacccaactatcatctgttataaatatttacacttgattgctccggggattcccctatcttttcaaaagtaatttttaaacaataataattaagaagaattaaaatataagtataagtaaatagctgtttttattttcagatttggaggggacccaaccattcttgtcagacagcagtggtgatgctgaatactttccgagtaatgaaggaagcagttcttcaggaactagtgtcacggaggacgaagaaagagcggaccacagtcatgtaaaaaaccttgttggaggtacattcatttctggagacaaagaaggaagcgggattattcaaaagcctataattaatccttctaacgggtctaacgaggttgaccaag

SEQ ID NO: 10635 - DNA, 687 bp, Diabrotica virgifera
gtctacacattttttgtctttatggctatatgcaaactaaaaagacaaccctttgttgcaaataagagacaaacgttcaaatgtacgcttagtctgttgaatgcatatacgtaatcgctactattatcacgatcatgctacgaggcaaacgtatacattaagtgtaattagaatcattgaatgcgatagatgaatcaatattaagctttttagtcttttaaatcaataacatattgccttaaagggaaaaacactcgctactctttgcaaaaaaacgtttttcgtcaaaatctgtgacatctgtgctcaaccatttctttactacgtcatcaatatcgtcataattgcgattgcatatatgtgtactttactttaagctatttgggacactgtgatcattttttagtggtttgttgcacatttttagaataattagtttgaggtatactacgtaaactaaggtgatgttttttcacaattaataactaaggttcagagaggctatgttttaatcgatttaactaacaaataaaacatagaagcttaaactagttatgataagtaccactgtagaaggtagcggtaggacaattaaaaaataatttaaatgaaagactggtgggatgtaatgtaatctttcaaaattactaattgttaattgtgttgttaattgtggactgtaaaatg

SEQ ID NO: 10636 - DNA, 691 bp, Diabrotica virgifera
  SmartBlast Evalue=5E-25; Info=Rab3 GTPase-activating protein non-catalytic subunit n=1 Tax=Camponotus floridanus RepID= E2AI70_9HYME
aaacccattaacaatcttttcgaagcgtctgttgttaatttatttttcacggacctacagaaaaaagttcaaatatcctgtaaccgatcagatataagactaaatttctccagaacacagtttctgtttaaaataatatcggcaacgttagaaactatcacagttaacgaatcaggtaaaatatacttcaccgatcacgtaaactggatggccaagtgtatcaatttggggaaactctggaacctggacgttgacgagttgcgcaggtaccagatcgtccaactttattccaatggttatgacagcatagctcaagaacttgttccggctgtaaacgaagcaaaagagctgggaaagtgtcttctgaacgttgctgctaaaaggctctctcagttcttggtgtcttcaccacaacttagtgaaaacatcggtgctcttagtactgttctcactaactacatggaaactttgactgaagaatggtgcgccccaagtgcgctgaaggacataacgctactggcaacccatacaatacattgtttgactgaagaagacagtgaatacaagttggcatcactgttactggaatcgtgtaaaacattggaagatttgcaatcatagacgaccttgtatattttaaaaatatattttattgttaaaaatagcatttacaaagtatctgtaactaaaa

SEQ ID NO: 10637 - DNA, 680 bp, Diabrotica virgifera
  SmartBlast Evalue=2E-37; Info=Retinoid-inducible serine carboxypeptidase n=1 Tax=Harpegnathos saltator RepID=E2BXB0_ 9HYME
aaataatttatatttctggtttcatttaaaaattttgtgcatattatttttctcaacaattattttacaaacagactaaaccgtaaaattgtttgtgatacactcgagtatgtagtgcatggcagatggattgtctttttgtaccatatgaccagctctatgaacccagtagaagccaaagttttggtattttttaacgaaaccttctataatgccatttacaacaaatggttttctttctgattgttgccacaagtttttatctttgaaagagatatggttaatccattttaaagttcccggtgtatcagtaattaaatccaattgtccattgtaaacagtaacagtaatatttgttgaatttaagagcgtctccaccaaatgggtaacgggtttcatgaaatccgtatacagagcttcaaacactttatctgactctgcgactccttctgatttaagttttaaagtattttttaccttagccagtattttattaagatagctgtaatctaaatcgttatttacaaaattaggatccgtatgaatcttattaagaatattgtaaaagtcaacattggccgtctcgtttactatttgaacttcagttagtgcccagtagactgttgacatattatagtcccctttttcgtaacttttctgagcttttagggctatactat

SEQ ID NO: 10638 - DNA, 690 bp, Diabrotica virgifera
  SmartBlast Evalue=1E-103; Info=GMP reductase 1 n=1 Tax= Harpegnathos saltator RepID=E2B9Y1_9HYME
gtcatgtccagcaaacatacctccagccataacaaaatcagcaccagctccgaaagctttggcaacatcgcctgggcaagtacagcctccgtcagatataatatgaccttggagaccatgggctgcatcagcacattctataacagcggacagttgcggatagccaacaccagtcttcatccttgtggtgcaaacagatccaggaccgattccaaccttaatgacatctgcaccggacagtatcaattcctccaccatttctccggtgacaacgttacctgcaatgatggtatggttggggaaagccgatctaactcttctaacgtagtccacgaaatgctgggaataaccattggctacatctaaacagatgaacgtaacaccgggtacggcgttcaaaatatctgacagtctaatgaagtcggcatctgacattcctgaactggcagctacgtttttcaagcagtctgggtttccttggcaaaagattgccattcctcaacgctgtagtatttatggatgcatgtgaacaaaccattcgaggaaagagcttttgccatattgaatgttccgacagtgtccatattggaagccattacgggaattccattgtaattctgtttggaatttcggaaagtaatgttcctaaacaaattaacatcgttccggctttttatagtggaccttttg

SEQ ID NO: 10639 - DNA, 687 bp, Diabrotica virgifera
gccgtatactcgtataaacctttttaaaattgttgataaattattgctttcaaaatatactcaaattgtatttttgaacatcgtatttattttatataataattaaattcactatcaaaaatatcattgatattttattaatatttaatttaaaatttagtttgacattcatgaagtgtcaaactcaaagtaaataacctatgctttgcttaaacaaaaaattaacgatttcagctgacggttagtgtgtcggaagaaaataaaaggattgtgacgtcacattttagactttgaggtcgattatctcggaaacgattagagatatcgaaatgccgttttcagattttgattcagaagacaaaactacataagaatccatcgataaatctgctccaagtattgcagaagcggcaacgcaataacacacagattttgcgaatttataaacgaaaagttttcgttcaaaaaacgagcctctaccgccattaagaagaacaaaaaaataaactttcttcaaataaacttttttatcccatgcctagattttgtgtaatcttggaactactaaaattctcgttattgttgtttcataggaaagtagtgtttattgatagttaatttattatatttttgttgttgttgtataagttgttggtctctttgaaagaatagattgttgttaattgt

SEQ ID NO: 10640 - DNA, 686 bp, Diabrotica virgifera
acgaaacgaggatgaaattattttacaaaaaatgcaaccttcagacgtcaacaattgttttactataaaccagcggtcctcaatctgtggtctgtagtacatgtaccactggtggtaaatattattagcggtggtacgaaaaacgcaaaaacacagtcagaatcagcaccaccattacatatagttaattagattacctaactgaatcggtatttcagttaagtggtaccaaaaaaagtattttgtggtacatgactcaaaaaggttgagaatcactgctacaaactataaatattcaaaatgtttaacgatatttcaacatccatcggtaccgataaaaatgtttgttcgattatatttatcaataatactggaaatttctcgtatttttctgtatgtaccttgttcgataaataatagatattagagatgtttcaatggtgccagctcgatgatgtagtattaaaatgctacaaatgctgcaagtagagacgggaaatcagaactggcccgagtcaaacaacggaagtcagtaacaacggaacgacgtcgtagttactaaatgaaagctaggtgtcaatcatgaattttcaggtagtttgtgaattatgaacttactgataattataccgctaaaattataggtttgcatattgttatgattatgatccctgttgaccctcctg

SEQ ID NO: 10641 - DNA, 693 bp, Diabrotica virgifera
  SmartBlast Evalue=1E-27; Info=Vitellogenin receptor n=1 Tax= Periplaneta americana RepID=Q8MP02_PERAM
cctaaattaaaacgacctgcctatttaccaataatttgctaactggtcgtactaatactaaaaagtaataaaaaaacttgattgatattgtagaaacccgatattctattggaacgctgatttttgatatacattttggtcagttcgtcctttaaaactgtgcgtgttaaactttttgaatatcttgtaaagtatgttaattttgttctttgtgctttcaacgttattaaatgcagtcgtttcaacgaataataatgattgccctccacatcagtttagatgcacaaattcaaaatgtatagactttcaacaaagatgtgatggttccgacaattgtggagatggatcggatgaactggattgtgatcataaatgtcatgaacattttttcaattgtcgaaatggaagatgtataagcgaagcattcctgtgtgatggtgaaaatgattgtaataactttttggatgaaaaagactgtaagggtcaaacggtgctaactctcgaaactgatggccattgcgaagatggtcattggaagtgtgccgataaattgtgtattccacttgacatggtatgtaatggcgcacctgaatgtttggatggatcagatgaaactattggatgcagtaacaagatcgtttgtgatggatttaaatgtaaaaatggccattgcataccaactgaatgggcttg

SEQ ID NO: 10642 - DNA, 691 bp, Diabrotica virgifera
  SmartBlast Evalue=4E-71; Info=Probable ubiquitin carboxyl- terminal hydrolase FAF-X n=2 Tax=Formicidae RepID=E2A416_9HYME
ctttgcacgtcatcatgccgttgctcttttctctcatcaataccatcgtagtcgaacacgccaacacgtcccacgagttttttcaactgttgtgccgtttagtcaatgtagcgtaccttaccggatgtcccatcaacggtgtggagaccctactgtcaaatgaggttgcgtggttacgaaaagccagagacaaacacgaagtactgatagaaggccatctccttctcgccaaagagctccttttgctgatctcctcagaacagaagtgcgaactgggtagtgctgagtccggcagtctgattaaagaattgctcgaagacttcctgtttcccgccagcaagttgatgttgagattacacaaaacgggtcagctgggcgaagacccggccattcctatttgtgatactccccaaactcaggccgcagcattcgatctgttggtatcactgtgcatgaactgtgtacaaaactacaaacagctggttaatatgctcacggagatgttttacaacgatcctgacactgcaatctcggaatgggactaccttccggcagtagggccgcgtccattccaaggtttcgtaggtttgaagaacgccggagctacttgttacatgaactcagtcttgcagcaactctacatggtcgacagtattaaagaaggcattttggcagcagaaggagcagctac

SEQ ID NO: 10643 - DNA, 687 bp, Diabrotica virgifera
tactggttctatcaaatatctatttacatattttaattgcaaatgagaatgtagttagtacctacattctacaatattacttaaatagtaagtacatatttataaattttagttatttatataaatcattatataatatttagctaaactaaactatgcataataagtaactaaaatttatataatacttatatgtatacttacctatttaagtaatattgagttatcaaaatagattatatgtattttgaagcagcgcaaacaaaataaacagattatgtatgttatttagttctagtactacatcattcgccttcatccttaacactgcatagatccatagatgatacaaataatgaaataatgcctgtgcactgtagatatctacagtcgccttctatcgatgtcacgtgtcacgaaaatattcgaatttttagctttaattgaattattttctagttttgctaggttatactctaattgatgctgaagtgacacttagtaaaacaagaaaatatttgaattaaaactaaaaattcaaatattttcatgacaattgccatcgacagaaagcgactgtagacatctacagtgcacggaatctaggcccaggccctgttttctttttcatattttacggttttttcctatccctgatccattcaggtaagaatagaaatggtcaga

SEQ ID NO: 10644 - DNA, 689 bp, Diabrotica virgifera
aaagttatagaacagctcaagataaaccttttaagatttgctaaatgtttctatattaattttttggcgagatattgaaaattgatttacgcgcgcctgcatatgctgcgcgtgcgcctcagaacgcgttattaaaagttctatatcttggtcaaaaattaacatagaaacacttaccaaagctaaaaatgttcgtcgtgagttattctataatttctattaaccaaattttcagtttatagcttaaatttgtttaaatctcttataaacaaattaattcgcaccattttagtgaaatttttaagtttaagtttaattgttataacttttttattacaaagataaagtaatttagcaaaagtttttttggggctgacattattacgtttaaaatgaggggcgttttgaaggttaatcgtgcgtatgaaggctgagttgtacttggagggatcccatcgaatgcctattttgcaatgttttttcacgaaatttgttaactccggttctaacaatcggatcatagtttattaaactccattttgttcattttgtcaaaaatagcaattttcattttggcaaactaaataacggaaaattaaataaatggaaaacgacaaggtaccaaggggacatacaagtgcatactcaacccctttgctcctagagtaacatggttcatttttagcaga

SEQ ID NO: 10645 - DNA, 688 bp, Diabrotica virgifera
  SmartBlast Evalue=1E-43; Info=Tyrosine-protein phosphatase non- receptor type 23 n=1 Tax=Harpegnathos saltator RepID=E2B5Z6_ 9HYME
gcggcaaaatacagggaggctcatactaaagcgaacgactcaaaccaaactttacacagggcgatgatggctcacgtggctaatctgaaaatactccaacaaccgctaaagcagctgcaacatcagctgccctttgtcgagtttccaaatccaaatatcgacgaaaaatctttgaaagatctggaagcgctagttgcaaaagtagacgagatgagaacccaaagagccatgctgtgggcgcaacttcgagaatctattcatcaagacgatattacaagttcccttgtaacgaaacaaccaaatcagtcgctggaacagctgttccagcaagaacttcaaaagcatcaaaatctgatttcgttgattgaacaaaacacctcggcacaagaaaacattaagagcgccttagtcgattcttacgcttacgctgtaaattcaagaaaatacatccaagatatactccaaaagagaaccacaaccataacgtcactgatagcatcgttcgactcttacgaagacttattagcaaaagctaacaaagggatcgagttttactcgaaactagaaacgaacgtatccaagttactgcaaagaataaggagtacctgcaaagttcaacaagaagagcgagatcagatgatgtcgactgcgcaagtgcctcaatgggagagtcatacgtcacctgccg

SEQ ID NO: 10646 - DNA, 691 bp, Diabrotica virgifera
  SmartBlast Evalue=5E-72; Info=GPI transamidase component PIG-T n=1 Tax=Camponotus floridanus RepID=E2ANN8_9HYME
taatgatgtacaagacttatctctgcatacaggacgtaaatgcaaacctatggaatggtatctggtgttgtgtatataacctgagtttagtaaggatgcaagacctgtctttgagccacaaggaagaagttttttccaaggtgtcagattttctgtacagacaatttcttgtggtagagtagcatatctcacatgagtattatttaaatgactagattccacaactccctttggtctcaacgaaaattccggactaattgtatttgaactatcaatgaaattcagagaagcacacaataatcctgacaaggagttggcaagaagcttccagtttttatcaacttcagttacactaggcttgaaccacacccagacttctgccccacttgcagcatcttccactgggtatccccaactctcatacctccagagaccaccagttagacttatgtgcaactcttggataccaaatctttggataagttctcctatcggtctaggaaatattggactatgtcgaaaattttcttgatctggatctatatcccacaatgtagaaaactgaaaatgagtgtacacctgctcactatgaagaggttttataagcagttcttctgttatttttccatcataactgaaaaccgaattaaacagaaatatacaaaatataagttttatatgcttcatttta

SEQ ID NO: 10647 - DNA, 691 bp, Diabrotica virgifera
tgttgttgcgttttaggggtgtgctacaccatcaaaataaaataatttaattgattacagggtaatgagcgtgaatttgtgaaaattattgagtgttatacgagtttgttgatatcctgaatcagtagtgtcaattttaagtccccggaaagtgagaatttaacacacgtggagtggaaaacagtaataaaggtgaatgatccaaatacctacatgtgggcctgaaaacagtagttctgcgtgttaataactatgagtgatttattgttagttattattttaacctagatttggtttaatttatcaatgtgctatgcgtgcacatttgttattgttttgctcagtagtgcttccgagttttttcttgtgtacagtgaagtgctgtgactgtcttgtcgtcaatcgagaacgatcagtccattccttgcgacaaggggagtgaactttgatacattcaatcaggtttagtcggttggttttcaattcatataaaattaaatatgtgtatatcatgcggcctaagcaatataccccaattgtgccgcaatatttcttaagtaccagagagaatcgtataatcgaagtatgttgtgtccctcagattgactggttgttgtttttctgtcttcgtctctctcgaaacggaagtggctgtgtctgtgaaagcataatatcggctggccttggaaag

SEQ ID NO: 10648 - DNA, 691 bp, Diabrotica virgifera
  SmartBlast Evalue=2E-10; Info=Alpha-tocopherol transfer protein- like n=1 Tax=Camponotus floridanus RepID=E2AUQ1_9HYME
ctatagtcgcaaataataatttcgctaagacacaaatcttcgtatattcgtagttcataaatattcataatattggcaaaatatgaagaagctacaaaatttgatgtatttgaggtaagtttgacaatagatattctgcacaagtcatctgtcaattgtggtaatggacaataacaccccatattccaagagtttcccatttctgctagtcggggattagaatcttcatatatttcaggtacttgttttcttattgtgtaatatgtattgagaacatctttagtagcatcaattttatatttgcagttggtaagaaaaaattctatcatatgattcgttggcatttccgggaattttgttccttaatccattcttgaagatctttaacaatttcacatacatcggactccgactttccccaatattttctaaccccttctctatttatcaccaacagcggtggtgaatccagattttccgcgtctattattttggacttcatgattttgaataattaaaggtcgtaaaatcaaggttacgattcaattggttaactacaatttaactcaatgatctttcacgtttgtatgtcgcacaatttcgggttaactgggtgatcgtgttgcaagtaagatctgtagtatttcttaagacacgacacacagattgaaaacgaaatcaacgtgtttaa

SEQ ID NO: 10649 - DNA, 690 bp, Diabrotica virgifera
gttagatattgtgaaaaatcagcatttactacgtttgctgttaaagctgctgatcagaatgtgtttttctgaatataatatggtaaatgaacccaataattatcttcttcatggtgcaaaacaagcagagcaacattatctgttacataacaattatattccggctgagacgtagaaaacagagtatacttttctgaaggttttggtgcgctgaatacgaatctgacttctaaattgacgaatagctctggcttctgagagatcccaatttagaaaactaaaaaaatagtacacataataccttaaagtgtatgtctttctctttcaaatgaggttgagtttgctcaaatattttgaagttttcattttcgtgaaatttcctatacctgaaaattattaagatattaagtgtgatacaatcgatgagttttttgataattaaaacatagtcacagatcgtagtcgagttaaacaaactaaccacacattttaactttcctaacccctaaaaactctgtaactaagtaactacgtaactctgaaaaccgcgaaattactagcttatctttcgtgtagaattttaacccttacaacacgctagcctattgacctttccacctaaactctaacctactttacccctataaaccacccctaaaatacgactcccaccaaatcacaagcatggct

SEQ ID NO: 10650 - DNA, 684 bp, Diabrotica virgifera
cgttcaacatcatgtgcgaccatttgaggctataattgaagtgatagttcacgaattagggaataaaaaagttttctgaacaaattgcgaaccatacatcgatttctatacctttgaactacctgaagatctgtctttcaatggtatatacaaagataatatcataaaatatatcgagggtctcaaaaacaaagcaagtgatgaaattaacgaagaaaatagtgtggaaaatgtgatctacagatgtctattcgccatatatcgaaataccacgcaacgagaaagattcttgtatcttcacgatttgttggaatacttatatcaacagttagtacaaaaaatcattcaattacaagaatattctttaataatatcaaaaaatgatttcattagaaaagttagagtattacttccgcatgtcaaagttcataatataaaatcagtgagtgaagcatccatagaaaatgagggatttaaagaagcccttattgagctgtgtgaagccgccctatacccaataattttaagagaagactgctacgaaattattcaaagtaaagtatgtattgaaaagacaatatttgtaaactttgaagtgaaaactgtacaggtgaaaaacggttttttgtgtgactatttaaagctacgaattagcataataagaagtgaaggtgatcatgaaga

SEQ ID NO: 10651 - DNA, 691 bp, Diabrotica virgifera
  SmartBlast Evalue=8E-35; Info="E3 ubiquitin ligase triad3, putative n=1 Tax=Pediculus humanus corporis RepID=E0VXZ8_PEDHC"
cctcacatcttcgtcatattctatttcgttacaccttttaggcacatgcgattcatgtttgcactgtctgcaagactctttgaggcattcagggttttcacatttaaaaattttgtcctcatctggtaatattgtggcgaaatcacaaaatgggcaaacttctagaccatcgacgttggcttttcttatttcttcagaggcaattttttgagcaagtcgttcaaataatttgttaggtagaaccatctgcagtgtttgtaaactaaattcagagtcacaatcggccatacagagaaaccttgtatcacctttgccaacgccaacttccacgccttttttaacgcagtccttgcagaacgaacaacctctcatacaaaagtaaatttcttccgggatcagttcatcgtcaaagcaacactggcaggtttcaaagaggttaaactttctagcttcttctttggcatgacgatatgcctcattttttaactttagctctctttctatttgtttgcggtattttaagaacgatatcatttggagcaatgtaacattggtagaatcctcggcctcattctcagctggtctcggcctcagcagactattatgcaacttatctaatctgttacacacagcaactaaatctttcttctcatatttaaaaactaaatcgatgtattttctcctaatacgc

SEQ ID NO: 10652 - DNA, 689 bp, Diabrotica virgifera
  SmartBlast Evalue=4E-43; Info=WD repeat-containing protein 55 homolog n=1 Tax=Aedes aegypti RepID=WDR55_AEDAE
cagatttctctctcatatcccaaagttttatcataccatcatcatcccctgtggcaaataagttttcatctatgacagtcaaacaatatacaggtacatcatgggaattttcgtaaaacttaaccagttgtccactgctcacatctgtaatcattatcgacttatcttttgatgtagaaaataagagttttccatcacaactgaactcaatatctctacaagctttcgtgtggagttctattgtgttaaccaactcgtttgtctcatttgaatatttgtaaatcagaacatcacctacgatatttgcaatggctaataaatcctcatgaggatgaaaagagatgtctgttatgaagtcttcgcactgtatgttgggtggacggtctctttcttttttactttcatttttaattgcttttatagtttcatcttcctcctcttcttcatcgtcttcttgtaactcaacgtcagaatctgtgtttaaatttgaaacatcaacaccatcaccattatcagttcgctaatttggttctcagaatcagaatcggtcatggacacatcactgctatctgagctgtcctccatttctactatactttcttcagcactctctttgatatgtttcctgtgacacatattttaatgcaattctttctattctaaacacatttttctcattttttaaattg

SEQ ID NO: 10653 - DNA, 690 bp, Diabrotica virgifera
  SmartBlast Evalue=1E-112; Info=Cytoplasmic FMR1-interacting protein n=4 Tax=Apocrita RepID=E2AEJ6_9HYME
aacaattagctgcaagcatatttcttgataaacgatttcgtgtcgagtgttccgcagttggagcttatttacttccttatcccagagccaatcggtacgaaacacttcttaaacaaagacatgtgcaattattaggtaggtccatcgacttaaataagctgattacacagcgaatcaatgccgatatgcagaaatctttagacttggcaataagtaaatttgaaggtggtgatattacaggagtcatagaactagatggattgctacaggttaaccgattatgccataaattattaagtaaatggttagctctcgatgatttcgactcaatgtttagagaagcaaaccataatgttctagctccttatggaagaattactctgcacgtattttgggaactgaattacgattttctgccgaattatgtctataatgcagcaactaataggtttaccaaatatcgtgggatatcttttggaactgcagtctctagagatagacctccacaaatgtctcaccattatctctggggcaccaaacaattaaatttagcctacacaacgcaatactcacaatactcaggttttgttggcccccaacactttcatacaatgtgcagacttctgggataccaaggaatagctgtagttatggaagaacttctaaaaatgttaaaagtctgatccaagg

SEQ ID NO: 10654 - DNA, 688 bp, Diabrotica virgifera
  SmartBlast Evalue=2E-75; Info="POSSIBLE RNA METHYLTRANSFERASE, putative n=1 Tax=Aedes aegypti RepID=Q16ZN4_AEDAE"
tgatacttttaagtgcatgtgttatggcaaaccacggatgaggtaaatctaaaaacacggcatcagctttaccatccaaatcttccccaaaaccattttcacaaacgtctcgatgtttaactgtaacatactccgaaaacccatgctctgaaaattcgtctgaggctgttttcgctctatcttcatgaaaatcgaaagtgtatagatgtccatgaggtttcactgcccttatcaaagcatgcgaaagggatccacttcctgtaccgctctcaataactacactaccgggggatagctctaattgtaaaataatcatacttatgtcgggtgtataaataatttgtgtcctgtgtggtaaagttattgtccatagttcaggagtaggttgcagagcatatccccaacctttactaagggatattttagttccgtaatttttaccgatgagatctgcacattttagggccccataagaggtttggaacacattttctacttctacacctttcttgtttatagtcttagattgcgcttttattggatatacctggcttattgtgagatacaatataactgtatcaccctctttgattatattttgatacccgttaaaactcatattcaaattatttgattatatttttagacatgtgtttacttttttaaataaagtttcttaacatgtttc

SEQ ID NO: 10655 - DNA, 688 bp, Diabrotica virgifera
tttgtatcaattggaaggtaaaattttgatcaaaattttttgatcagactgtcatatcgacaaaaatcaaaatgagttttgaaggtgaagagtgcagcttttgtgtgtaatttttgcattttgccgcaaatcgctggtcgcttcaagcgttgtttctgagagaacggttcattctagacagaaagtgctaaaaatttttgttcaaaattatctcagctacattcctgcttgaaacatttttgttttctcccacatcccagatagcatggaaacttgtggcaagtttgattcttctttgattttaaattgctgcgtcaaatatgacgaggcaagtttgtgtcaagtttgctgcaatattgttatgacaaagatgatgattcaagtttgtagcaactttgctgcaagcttagatacagttgcaaagccgtcatctattatttggttgacttatgtacacgttacggtcggttcggttcggtttcgttcgttaccctcaatgatgtcacgcccacgaaaacggcagtgttgccaccggagagaattttcaacataaaagggaaaaagttaacttataagggaatctttattctttgttccagtccaaattgtaaaatatttaaaaaaatcaaaatatttgaaaataattcaacatattttcacagattttttaaataggagcataggaggg

SEQ ID NO: 10656 - DNA, 691 bp, Diabrotica virgifera
  SmartBlast Evalue=5E-64; Info=Zinc finger FYVE domain- containing protein 1 n=1 Tax=Harpegnathos saltator RepID=E2C9Z7_ 9HYME
agctatcaaacgatgactgataattcctggtccagctatttgaattacgtatgggctggttacgtgatagagtgtcctaaatgtggagaaattttcagaagcagacagcattggtatggtaacaaaaatccagaagatgcagctgtaagggcagaggtagttcatatgtggccaggggagagatctttgttcggatcactcaattcagctcaaaaagtcttggacggagtaagcatgttcactgatgtgatatctcatgtaggatctcagcctaaaaagttactgagcgattgggcagctgataaaatagcacctagttactggaggccaaaccacgaaattaaagtatgtttcctgtgtaagataccgttcctgccacacgccaaaaaacatcattgtcgctcgtgtggtgagggtttctgcgatggctgttcttccaaacggcagcctgttccagcgaaggggtggctagaagacgtaagggtgtgtgacagttgctacagcgatcaacctccaactctctccaatatgggagatccctcagaaaaccgcgctcgccaaatcggcgaaacagtcatcagtaccatctctgccgtcacctcggtgctagatatccctaaggaatacataaaagaatctgctcgacctacatactggactcccgacaacgaatgcatagaatgttgggttt

SEQ ID NO: 10657 - DNA, 691 bp, Diabrotica virgifera
  SmartBlast Evalue=3E-83; Info=DNA replication licensing factor MCM5 n=2 Tax=Formicidae RepID=E2A7N9_9HYME
tggcatttatctggcataatgaaaaatggatccaacggacattttggtcttccagcttgttctgtattgcattttcttggcaaaatatatccttcaagtcctggcttaacagataaattaggaataacatcactacatgtacgacattggattgatatttttgtagcttttgcttttatgccggatgcactaatgacaattccgggaattttttaccaatttggaaactacgtcagactttaaagatctaagatctgaagggtgtgcatcagaggacaacataatttgaatatcctctacttcttcttcaccttctggcctgggagctgtaagttcgtctgctacttctttggctgcttcctcaaaaagtgccaaatgttcagaaggctgcttgtataacttgtcagcaagatattcatcaaaacttccaacatcttcaacattcacttccaagtagtactggcggagattataatttctttttaatgtatcccgatatttgtagttgaagttgtctgtgtgatattgccgaataaaatctttaaacttctttttaacagcctgtaaattaatctgatcatttggagtatctccttcggcaaaattggaactataataggttcctacatcgtcgaaaccttccattttattatattgaaaataaaaatttagtaaaataagcgaaagcaca

SEQ ID NO: 10658 - DNA, 686 bp, Diabrotica virgifera
tgttgacacttcagatttctttttattctttaccataagtattatttttgaccccctccgtggctcagtggtaagagcgcctgcctttggatcgaaaaaatccgaaaggttgtgggttcgaatctcaccagggtcagaaatttttcatttattataaattaataaatgaatatagtttctgtccttgtgggatcggtactcaccggagggaccgcagacgttcggatacaattagcgtctctttgcaaagacaatgacgtcgactttgcaaagtaacaagacacttactcaacacacacactacacatgacactaggtacctaactgttcaaaattaccgtacctaccatgccaatggccattagttgtcgaggcattagctaaataaaaaaaaattctgaatacaagatactaactcttgataagacaagtcttgaaaagacggaaaacataatacgttgtaaaataaagagatgaaactagtagaggtgggaaagtattaatagaaacctataaatttacattatattgacagcttcccacgtttagacgtatcgaagtcaaactgccacgggagaattttataaaattctcctgtcacactggcagttgccgagctcatccgattcgtctaaatgtacatttataggcttctattgataatttcccacctctaacagtttgca

SEQ ID NO: 10659 - DNA, 687 bp, Diabrotica virgifera
tgtgttgggaatcgagtcagtgatatagcaccatccctatataaaaaatgcggattagttttgtattattcattggtctagtcacgtttgccgccctctgttcagctcgaccagctgagaacgacgctgactacgatgaagaaccagcacctccaccaaaaaaaccagcgaggccattaaccagcagaaggaatccactaagcggtagaactaatggaaaagcggcaagtagcaccactacaactacgcaagcaccagtggaagaagaagaagctgcggaagaagaatatgatgaggagttaccgccagaacaagaaccaagttcgacgacggaagcccctaagaaaaattttcttaaaactggagtagttaggccatttagaagcaatgacgaacttctggcagctttaaaaaagagaagggagcaagtagtccataataagatcacaaacccagtgcaatcgaattcagaagtacaaagtgcccccccagcagccgccgctgagaaagaaacttccaagaagagcagcacatcatctggtaggaggaatagattcaatgctaaagaaaaaagcccagaaccagcagcagaggaatctccagcaccagcagctacaccttctagaacaggaagaagatttggtggtagaagttaattaatttctcttttatagtcttagatccagc

SEQ ID NO: 10660 - DNA, 690 bp, Diabrotica virgifera
aaaggccttactcaacaacaacgatataataggttcctataatctttggtaatgaaacaccattacagaaaactgtttaacatttgatttgaagactttcgtcttttgtccgtcagagatgaatgtcctgtaggtcgatcaaaattggttgctgttccgccaaagatcgatgctgtgcacaacatgtgtaaataagatcgtcatgtgacttagaaactgataggggacatcttttggcatatatcagatgtgatacaatcgattttgcaggaacacttaggtgtgaggtcaggtcaaattggtatccatataatttgtacaaattacaaaaacctcaactcaaaactgaagtttttcttttacggagaactttcaagaatattttcgcttgtttcttctattgtactggacacatcacaacaatttatttagaggattgacgaattgctaatgctaagaatggcatataaaaatttgtttgccaatagtgtcaaaataaggaaaagcgtcgcatcattcgttatcacgacaatgctctcatttttttttcaaagagaaaactaccacggtgtagcggaaacaatgtttccagaattggtttgatcttattatgtaaaaatgtattgaccttaaggagcgaatatttccaaaagcataaaacactttgtttcgaacttgtccatttccttt

SEQ ID NO: 10661 - DNA, 689 bp, Diabrotica virgifera
ctaagtgtaacatcaggattgctattcaatttggagttaaaaatgtaatagtaaaatatcatctgagctgacagggagatttgcgaatcgaggatcaaaactattgtttgactttgctgatgatctagatgcagttgctcattctgcaagagacgtgagagagatgttttcacaactctaggaagacacaggtagtctgaaaaataactattaatgaccacaacttcaaagtagtaaaagagtttaaatatctaggttgcttggtagtaatcccagatgacaaccacaaataaaaagaggtctgagcatggttcttcttcttcttaaggtgttgagaccgcttgccgatcgttggctctcatgttgcccagcatattaacaatcattgctttatttacagccgcacgaaatagtccagtgctagttttcccaaactgttggcgtaggtttttaagccaagaagttgtacggtggcccacacttcttttcccattattttaccttgcatgacaaggtgaaatacctatgtcatatgagcatggttagctgcgtgtaatagggcattatactccctatcatcattaataagatctaagctgctaaaaagtcaatccaaattaagactgtatttgccaattattcgcccttgttgcacatggaaatgaaacatggactctacatcagcagga

SEQ ID NO: 10662 - DNA, 686 bp, Diabrotica virgifera
  SmartBlast Evalue=4E-62; Info=Troponin C 25D n=3 Tax= Bombycoidea RepID=B1ABS9_BOMMA
gtgaatcatttaacaatgaatgacgaggaacaaaaaatggccattttgcgtaaggccttccaaatgtttgataccaaaaaatccggatatattgaaacgatcaagattgccactatccttaacagtatgggtcagttgttcgatgagacagagcttaataatctaatcacaaaatccgatcccgatcgttgtggtcaagttaactttgatggcttttgtgacatcgccacacactttctggaagaagacgatgatgaatctacgcagcaggaattgaaagaagctttcagattatatgacaaagaaggaaatggctacatcaccacagctactttaaaagaaatccttcgagctctagatgacaaactaactatgcgagaattagatggcatcatagctgaaattgatactgatggatcaggcactgttgattttgatgaatttatggaaatgatgactggtgattaaaaaataattattgagaagaagctccttacaactttctggatctttttactctggatcatttacctactgaaaataactgcattttaataagactaataacataagctgttatgcatcttccaaatgactgataaccttgaaactttactttttgatgtttcttacatttaatacaaaacaataactgtctttattttgaaaatactacaataattata

SEQ ID NO: 10663 - DNA, 689 bp, Diabrotica virgifera
cgtaacatataggtacaataagaattctcttataattaaagagtcgttcttttttgtataacgtgataattttctaaataaaatgttagttattttgtataaaattttctaaataaaatgttagttattttgtagcaaaggtaagctactactttggaaatttattgaagtggttgaccgttattctttacttcaccatcgattctttgatgttaaatattacttagtttccattctaatgtgtgtttccctccatattgtattgtttagatattctgctgcttcattgactttctgtattggttctttttttacctcttcttctacatcaccgtaacttgatactgtgatgcctaaatagttaatttctgtaatctgttcaatgctggatccgttaatttctatttttttttatctgtttaatcctttgctgattccgtacagctatatgagcagtttctgttgatataatcatcaaaggaatacatttttagtaccatgaaagaataaccaaagaatatgacacttgctctattaaatcctaataaagagaaaaagaaacaccaaacaataacataaaaaacaaatttattcaataaatttaaactgaaactttaataatgttatttgatttttaatattgccacatgtacataatatttaatattttatttatagtaggtattgga

SEQ ID NO: 10664 - DNA, 690 bp, Diabrotica virgifera
  SmartBlast Evalue=9E-85; Info=Phosphatidylethanolamine-binding protein n=3 Tax=Culicini RepID=Q16LF6_AEDAE
gtcatatgatgttgtcaattttgaggagaccggtggttgcaagattatattcaactttaagcaaaagtatggaaaaacacggtgttgtgcccgatgttatcgatgttgcccccgaacaacaagtggaagtgtcgtatcctagtggtgtaaaggtagactttggtaacgaattaactccaacacaagtcaaagatatcccggcagtaaaatggccggccgataaagattccctttacacactttgcatgaccgatcctgatgccccaagtcgaaaagaacccaagttccgtgaatggcaccattggctcgttggaaatatcccaggaggagaggtctcaaaaggcgaagttctttctgaatatgttgggtctggaccaccaccaaatacaggtcttcataggtatgttttcttggtgtacaaacagaatggtaaattgaattttgatgaaccaagattgaccaatcgatccggggataatagaggtggattttctattagaaagtttgcagcaaaatataatcttgggcaacctgttgctggcaatttgtaccaagctgagtatgatgattatgttccaattttgtacaagcaattgggaggttaaattgtgatattatcctgttcctgttgtgtaaaattagtatataagaaaatactctcttcatttaataaaaccttattaaattttt

SEQ ID NO: 10665 - DNA, 686 bp, Diabrotica virgifera
  SmartBlast Evalue=1E-70; Info="Lethal (2) 44DEa, isoform D n=7 Tax=melanogaster subgroup RepID=A1Z7H2_DROME"
cgcctgcttgtagttttactaagtctttcttgcgatctataattctcatagatccgtctttgtcaatttcaccaatatctcccgttttgaaccacctaaccccgttttcttcgaaaaactcttcgtgagttttttcttcgtttttgtaatatcctatactaacaatatcacctcccacgataatttctcccctgggatttggtttgtctgtgatgtagtagcgcccttcgttccagttcgtcagtcttataagtgctgtcgtcattggaggaccaactcttccaaacctcatgtcgtaattgtcttggttagttgcacatgcggtcgtttcagtcaatccatatccttgaataagatctacacacaaacaagttttaaccagctcgtgggtgtcagctgttagaggggctccaccagctgcaatcagtcgtaatttacctcctagtagattctttgtggctttaaatacaatcctatcagtcaatggtgtgctaaatcctctgttactccattttgttttataattgtatccaaaggtaaaaattgcttttttcactacattacttttgttcactttgtctttaactgctttcgatattctgtccaatattaccggtacactggtcataaaggtgggctgcaatatcgacgcatcacccttcgttcctctcttaatcttactcgaa

SEQ ID NO: 10666 - DNA, 688 bp, Diabrotica virgifera
tttgccggtacccacttgggctggaccatcgtagtcacggctcccagggccgggaaagcttcagaggagcgctgttgcaacgaagatgaggcacttgtggtgatgtgagtggttatgcttccgttggggcggtggttcacttgaatggatactttcggcgtactagaatcttgagcattgtttacgctcaatctaacggtactactagctccagaactgccgccagcaccacccaaagcaggaaaattctccaacgttttcgccaggcctttttgcctcgcactgttcttatcgtcacctccggagctctgctattcctaacagaagaatttgtcgtgatagtgacacctggtgttgattttggacctgtgttagtaggttggacagctcctaatgtaggaaaatccgcgtttgtgaagtttgaattaaccttcgatgtgaaattcacagatgcaggtctcgaatgcacagtgatattgcttgaagcaccacccaatgcaggaaaatcgttgggtgttaaagggttaacgaatactcttccccgttcttcctccatacctccgcctggtccaccaggctccatgttatacgtgtttaaagaagaaccttcgtccagcctgtggctccgatcgttatatttccttaagctctcatttcttggccgggtctaggtctcggtgttaatgtg

SEQ ID NO: 10667 - DNA, 691 bp, Diabrotica virgifera
tttgattgtgcaattttctagactgttaatttatataactaaaaccaaataagtgatgttttcaaattttaggctgtagatatctacaacatagtatatatttattataccatggaaacaagaaattgtgtaacaaaaggttttctcttcatttttctattttctttttgagaaatatattattgtttataacagtatctacgtatatagaaatgcagagtgttgaataaaaaatataagacggaaacataatggatgtgccttgcgaatctacaggaatattattaaatatgctataattttacacaatttccttttgtcacacaatctgcttgatccttaaatttaaaaacatccccgtaattactaagaaacaaaaaatgttagtaaataaatctttatattagaaaccaataataaaaaataaaaggcgtttagattgcaataaaatgttgctattttgggctagtcgttcgatcatcgtttaattatagaataagctaaaatatggtatttttttatatttgatagctttttgccactaaaaatgttccagtgattgttatttagatttagtgatgaaccttcctatgcattttaacttcattttcatatcggttactttggtttggttattttattatgttacttttaatgtataacaagcacaatgccttattaaaattcttgt

SEQ ID NO: 10668 - DNA, 688 bp, Diabrotica virgifera
ttgtctattttttatagggccgtagattgagtgtacataacctaaaaatgtttttttttcgacaaaaggatataactttttttttggagatgtatttcacatattcagagatgctagagatttcttgaaacatgcaaaaatctcggttttcaagttttggatgtttccgctggattttttttgcggtcatatgccattaaatggcacgtttcaaagtatgttcttgatatgcaacctcatcttatacctatccttatatacagtgatgagcgctctaaaaaccggcaaaatgacgcaaaagagggaaaacgtaatgcattgtgaagtaaaaaagtgaaactggtggaggtggaaattatcagtagtatttgcacaagagctctaaaattattgaatttttcccgagtgacactttgtgtcacgagggcaaacattctatattaattttagagatcgagttcaatttgttacgattatttcatgaataaaactgttcaaaaccaaaattttattgtaatttatctatgtaagtataaattagtacaattaaacacacagttgttataaatatttgacggttgaaagtcatcacttttataatttttaaaacattaattgtcattaatgtcaccgaatgtattttttcataacaacgaagggcatctgacgtaatatacttgacgacggg

SEQ ID NO: 10669 - DNA, 689 bp, Diabrotica virgifera
  SmartBlast Evalue=1E-43; Info=Cytochrome P450 315A1 n=1 Tax= Tribolium castaneum RepID=D6WKZ9_TRICA
gttccgaacgtatccataatagtagcacagttgaataatatgatcgttttaaatttgtttaggcgaaaaaatcgttgatcgattgtgttcatgttaccgcgtgaacaaaacaatcccaaaagtaacaatacttaggccaactggtctcatctttattgttgctaagcagcaaagtgcggtagtctggttttagtcatctcggaataatgttcgcaaaaaaattgataaggtttctgcagagaaaccctcgacaacgtcgattctattcaataaagagttttggggagatacccacgcctagaggactgccactggtgggtactacattttcgctcatagctacagggggacctaaaaaacttcataagtatatggataggagacataaggaattaggaccgatcttcaaagacaatgtaggaccgattacagctgtgtttttatcagatcctgatgcgatgagagaagtcttcgcaaaagaaggtaaatatccgctccatcttaaaccagatgcgtggcttttgtacaatgaaaaatacgactactctagaggattattcttcatggacggggaagaatggcttcattttcggagaacaatgaacaaattgctccttagaggcaacctaacttggatagaagactcctgcaatgttgctgcagatttgctggtccagcgaatatctgaa

SEQ ID NO: 10670 - DNA, 681 bp, Diabrotica virgifera
atactatttaattaaacaaatcgatcagtgcgacaccgacttatttaaaaaaaattgtaaagtggtcaagtagagagccggtacttacgaacgacagtctggatatgcagcacaggatctgcgtactattcgttttcttaataggtttttctttcgtcaaaatggcaccttctccagcgctggtgctggaatgcctaaacgaagattgtgatatggactcaggcccggtatgtgcgatagatgagtctggattacctcaaacgtttgacaatcgatgttcggcgaggctagcattctgtagatttggctcattttatgccgaagtaaaaccaggtgaatgctgacagcagcttaggctagtggcagaattccagcaacttttaagctttcccagtattgtttcaacagtagaagaatgattgttctgttcaaattttttgtatacgatttatacccacacttagttagtagaaaaaacagtgctgaagaatactctaacatttacgcaaatgaaaaataaaaatataaaaattaacaaaaacatatttattgaattagaactaaggattgttttcaaaaaagtagtttttttatttaaattatttttttaagttaagatgtatggatgtacctacaatgtagattttatttaaaatgcaattcagtatcataaatataaga

SEQ ID NO: 10671 - DNA, 687 bp, Diabrotica virgifera
aaaaatatattgtatcgccaaccgtcactaaagtcattcattattgtactcatttgccctcatttgcggcagtaaagtaacactttattatactgaaagaagaattttactttacctgccgcgattaatcaaattaccgagattgaatgtaagtggtcgatggcagttatcgaatggcgagtatttgagtgaacttaaaatttatttactttaattattaaaaatattgtacacaattggcgattattcaatttcaaaaaggaaaattctgtagtattttgtaattatattcatataaaataaaacaaaactttaccaatttagcaattattcaatattgataactatcgattaaaaatcgaaagcggccatcttgcaaaagttatctgtcatcattataataacgtctagaatttaaaaagtttttaaattgtaaattgtaagtgagtgttaaaaccaatatcaaactgttggcgataaaattttgtatgtaccatgtcagtaaagactctatcgaactcgtctgttattcgcctcgctcgctctgctcatatcagactcgttcgataaagagtaactttactgacttggtacataaataactattagaataaaacttatcgggaactgagagaaaaagttttgaacttgaatttagctacttgatgattacaaaaataaaagaat

SEQ ID NO: 10672 - DNA, 684 bp, Diabrotica virgifera
  SmartBlast Evalue=9E-79; Info=CCR4-NOT transcription complex subunit 1 n=1 Tax=Camponotus floridanus RepID=E2AFR3_9HYME
gccaataattactttcagaggatttacaaccatccacctaatccaaccttgtcaattgaagaagtgttaaatatgttgaagaggtttcaagattctcataacaaaagagaaaaggaggtgtttaactgtatgttgaaaagtctttttgaagagtacaaattttttccacaatatcctgataaagaattacatgtaacagcacaactatttggaggcataatcgaaagaggtatagtcgctagctatgtcgccctgggactggccttacggtttgtccttgaggctctcaaaaagccagagggttctaagatgtactattttggaatagcagctttagataaatttaaaacatgtttaaagcaatatcataaatactgtgaacacgttcgagcaattcctcacttcagtgattttcctcaacatcttcaagagtacgtagaattcggattacaaggtttggaaccacctcataagccagacggaccaatattaccaccaagtctagcagccatgttagcgcctcctagtgctgtcactgtgtacaagactactaccacggcaagtactgttcaaaccaaagtcaatactacaccagcaggtacaatgagtagcagaccttccatagcaaatgctacaaatattgatacacttttggtagccactgagaaagaagaaaaagccact

SEQ ID NO: 10673 - DNA, 689 bp, Diabrotica virgifera
  SmartBlast Evalue=3E-60; Info="Pre-mRNA-splicing factor cef1, putative n=1 Tax=Pediculus humanus corporis RepID=E0VYT5_PEDHC"
catccctagggaacagaccttgtcctttcggagggacgcaaaaaggcggttgtcaattgtcagtcggtcgagaagagagtagtgtggtcgctttagatttagagggaataacataaacgagacttttttaaaacaagctagaaacacggcgtgtgtttttcgtgggtgttttggccccctaggggtcctacaaggatatggcagaatattaccttaacacaaacgatcacatatataaacaagaaatagactcggatatagatattagtggtaacgaagattctgacgattctgccggagctgaacccaccaggttgatcaaatctattaataaaggccggtggagcaaagaagaggacgcaaggttgaagcaattagtggaagaatatagtgaaaagtgggatgtcatagccgaacacttccctgacaggtctgacgtacagtgtcaacagcgatggacgaaagtcgtcaatcctgatttagtgaagggtccttggacgaaagaggaggacgaaaaagtcatcgaattagtaaacaaatacggagccaaaaaatggactctcatagcccggcatctcaaaggccgaatcggcaagcaatgtcgagaacgatggcacaaccacctaaacccgaaaataaagaagagcgcctggaccgagcaagaagacgacatcatctacaaggcacac

SEQ ID NO: 10674 - DNA, 689 bp, Diabrotica virgifera
ttgattgcgacttgttttgagtcgaaatttgaattagaattaggggccaggttgagttccgtttcagttcagtacactgattggaactgcctttacgatcctctgctttcttcaaataaactctcggcggccctccttggatccctaggagtggaagtggaacttagtggggttgcgttggtatcgatgcgcgttcggtactctgctgacgagccgctgaatgccgcgcggaaggcatatcgttacaacatccaatcactaggagacacttatcttgggatacctgatccaagaatagaagtgtttggtactggtcatgcgcggtcatggttagtttatttttgagaatgttaagaaaatgcgttagtaacgtaaaaataatttagaacaactaagcggtttgtaaattcttaagaagtaacttgctaaatattttttcaaatttcataggattctacttaattgggacatttatgatttgtgaaatggctgaattgaatcatttaaacgtaaattacaaaatatgctctaattacggcatacttggtagtaaaaattttacaatactgataacgagaccatccatgacaataaaaagacaatttgatggcaattcgagtttaagtattgttgataaatgtcgcacttttgatgtattaacatttttatagtctctaggagcaagtccc

SEQ ID NO: 10675 - DNA, 685 bp, Diabrotica virgifera
tgacttttgaactctttgattattgttataatttattttttgttgatttctttcgaattctctaattttgtcgtaaataaatatttccgtgacgtcatacttcggtgtacggaacgtactctacgccaattagtgacaaatatgacctcgcgttccgagagtttgacgtttaccttgtcggagaagcctataaaatgacaagaaataacaatagttacctatcttaatatagatgtaataacaataatgttagaggtaaaagaaattagtacctcttattgggaccgtgcaagttcggaagagcgacaccgggtttcatagctcagcaacatttttagcacttttaatttattggccaattatattagtcctggttactggataattgtcaaggccatagcccaaaaaagaataaagaaaaagtaagattgaggttatgttatttaaaagtagacatggtactacaagcgaaataccattaattaaattcactttaataattgcatatcatatcaatattgtggagcaacatataatttttacaattgataacacaccatttgcgaaataccattttctttaatgacactaggtatgaaatatacgtcaatttgacaatttcaattaaccatttgtaattatttttttaagaagtacgttaagacagttgcaagatttctccggt

SEQ ID NO: 10676 - DNA, 687 bp, Diabrotica virgifera
cggcatggcatcgtcgcgcttctatcgttctattcttaacgtggaacgctgtatagacagcgaatattactatagtttatttttaaaccaagaggagtaattcaaaattcccgcgccgtaaagcttgtttgtaattggtccaacctcaggtaagtttactccactgttatcaaattttgacactaatgacatttatataattttgacactattggcatttcataggttaattaagatattttataaattcttcaaaaaaaaaggaaaatggttatttatccacaatcttataatttgattatcagatcatgatcagataagatcaacaacgagaccatactgttctggagaccactgtataaatgcttgcatttggaattatctataggatataggattttatgcaaatataatgtttactaaaagattcttatcaatcaaacctacaacacatagtacagttgagtccgccagtctttacccgtgagtcattaatacctggcgagataaaacacatactttttatctagcatcattatcttccacgcatgaaactaaagaaaaaccagctctgttatgaagtaaaaacacatgttatttttatgaacgatttagactcagtgcgttgaaaagagataggtacaaagaaagacgattagggatgttttcacatattttaagtacaat

SEQ ID NO: 10677 - DNA, 687 bp, Diabrotica virgifera
tctagttgtcgatagattgcgccataataaaaaaataattatttttaaattagataataatattacaaatataatctgtataatttataagactatacaaatcaaagaaaataccattttataaatacaagaaacacatttgatttgtttttattccaaattgcaaataaaatgtaacaactgtcagatttaactaaaatgtcaaatgtgtattatcacggacttacccttttttctatcatttgttacgcactgaaaaatgctcatgaaaagaacaataacatacttgtcatttaatcaatttttattagttttgcgtgtaggtttgcatattataggtgtatccaaataaacagtttaatccaagtatacctttgttgggctaaatgttgaaacttacaaatttaattttaaatatatgaaccatgacatgtattttttataacgcattaactagttgtctttctacgtgttgcaaatatttattaacttagcaaaggttttgattaaaacaaagcaaaatgtcgtacttgcattttttgctttcttttgtttttgggataccataaaaatttatagctgtcacatagcctttcagaaaagatgaaaattaaaagcaaacaggcggacactaatgaatttttaaaagttcatcaataaagcaaatctttaagttgatttgctgct

SEQ ID NO: 10678 - DNA, 686 bp, Diabrotica virgifera
  SmartBlast Evalue=3E-52; Info=Importin subunit alpha-4 n=2 Tax= Formicidae RepID=E2BLZ6_9HYME
tgagcaattttctaaatcataagaagagtcagtattgtaacagaggaatttcccgtgaatttgtgattactaggattttatacctacgacaactatttatgtaccttcttcgaagatcatttcgatagtttaataaaactttaatccggcgtttcctcgtgtttggcattgtcaaaatcataaaaatggcggacccaaccagttataagaatcgtctgcaaaattttaagaacaaaggaaaagatcaagatgagatgcgaaggagaagaactgaagttacagtggagcttagaaaaaataaaagagaagaaactctacagaagaggcgcaacgttcccattgttgactcgacagatgaagacgacatcgaaaaatctctatcaaatacaaacttagaacagttagtccagcaagccgcagctgatgataatccagcggtacagttaatggctgtacagtctgctagaaaattgctctctgcggacaggaatccacccatagatgctttaatagacagtaaaattttacctgtacttgttaaatgcttagaaaggcaagataatccttctttacagttcgaggcagcttgggcactgacaaatattgcttctggtacctcagcccaaacaaataaggtggtagcagctggtgcagtcccccctcttccttatgttattacattcacc

SEQ ID NO: 10679 - DNA, 684 bp, Diabrotica virgifera
  SmartBlast Evalue=4E-44; Info=Fumarylacetoacetate hydrolase domain-containing protein 2 n=1 Tax=Xenopus laevis RepID=FAHD2_ XENLA
cattacacttgttaaatattccacaagagtgtcaattctttgtagcatattttctgaatgaccactttgttttagttctccgttaacccaagtttttagttttacgttatagggatcccccagctcttcttttgttacaatacaaggacctagcggacagaatccatcaaaatttttgcacataaccagttggccgttgtttctcattacccagtctttggcagtcagatcttgagtgattgtgtagccaaagatgtaatccatagcatcctttgctttaacatattgggcttttttcctataattgcgacaagttctacttcccagtcaagcgcgtttgttgcatccgatttgggaatgggatcattaggtccgattatcacagaagcaaatttactaaaaaccatcggttccttgggatatggaatatttctcatgttgcagtcatccttgtaattagacgcgactcccaatattttatcaggcttggtaattggagataaaagtttaatattcgtcaatgtatgctctttcttcggatttgaagcaatacttttaattttatccaaagcttttcatcttgtaagaattcaactaaagaattcggaatagttggatcactggcattaacgtctattacattatcaccacttagtacacctattctaactttgttatcgttaa

SEQ ID NO: 10680 - DNA, 687 bp, Diabrotica virgifera
tgaaaacaatattttttacttaagtttttttcttttaaatggtttgtttattgtattcgtttacaatgggttaaagattgtaattttttctactttgttgttttctttttttaaattctgctttggcagcgctgtgctgagaaggccctgcctgggacatgaagtgggttgttcgcgctatctcgctttgccggcgtatgtcttctggccctttttgaatgtataataaatgaatgtctctttgtcgctctcactggggacgcatccaaccatgagaaatttctcaatcggtatgagcgccgtgtcttcgaattctttaattaatcttggtaggtcgtcttcaattgcggctgttattatggggtcgtcggcatagaatattatctttatttcttttttaccttttatatcctcttctgtttttacgttattcgttcgtttattttggtatagcatagcggcatagcatattatctttatttcctgctctcccattctatatcctcttctttttgtaacgttattcgtccgtttatttttgtatgtgttttaaacacatctctcatgtttacggatgctgctcgatctaaatttactcttgtgagtagctcatttgttcgtatgtctcgcgttaatatttcttggcccaaatacacatatctttcacaaattctatgagcgatttct

SEQ ID NO: 10681 - DNA, 685 bp, Diabrotica virgifera
attagaaaagaccagcacgcatacgtcgcgtgtagaacagatcaaagaaaaactctccagcaacgagaaactcaacactctctcagcagcttctcctaccgtaaggttcagaagtccttccccgtctttactgaggaagactcaagccgttattgctaaggaacaaagcaacgagtactatgttagtaaacatggcaagtatgttccggatcagcaatctcctactgtgaataacaaagataaaccgaagagtgacagttttaggaaagctgctgccttttggaactctaatacctagtttatgtaattgcgacaatatcttgtatcaaaaaaaaagactaagtataacgaattttacaaaaaaaaagaatctcaaacgtctgcttgtacaaagtagcaaacaaaatattgattctgtgttactgtacctttacccaaactacggttttaaataaatgttaaagccgaatgaatttatctggattttactgttttttggcatgtttttatttaaatgtgtacatatatgttttatctataccaaataagtgccttaaatgatgttaatgtaatgtataggctcaaagttttatttttgtgttatgaaagaactgttataccctccaatatttatgattttatgtatatttgaccttgatctaatgaaaattataattcattgttc

SEQ ID NO: 10682 - DNA, 677 bp, Diabrotica virgifera
attgtgaatgtaaataatttgaaactgttcactgaaataatgattatgatccagaaggtgaagtgcttacgtagaagctgtagaatcttcttctatccgtttgtcaaaagttctgccagtttgaccgatgtaagtttttttgaacagtcatcacgttagtttgtaaacaccactctgtaattgctttttcttttggctcttattgtttttaatgtatttgctgaagttgctgttagttctgaaacctggtgttattcctttcttttttatgaatttgtctatttttgttcatatcttgcgtgtatatgtgataaagcagaaagtactaggttttttctatggttatggaaatattaatttcagggctctgaatgactatggagtttttggtttaaaattttgttaattgtttgttcgttgtagccattgttttctgctatttgtttaatgatgttcagttctatctggaagttattttttgacatgggaatttctgttgatttataacagatctatagaaaagggttaatcagttgatctatagaaaaatagcttctacgtacgcacttcaccttccagatcataatcattccttcagtgaacagtttcaaaccatttacattcacactaaagaccttaggctaactttttcgaatttgtggaaattagtccagtcg

SEQ ID NO: 10683 - DNA, 686 bp, Diabrotica virgifera
  SmartBlast Evalue=3E-10; Info=Surface protein n=4 Tax= Firmicutes RepID=C7HT13_9FIRM
aaaaagaattttaatatatttaaagtcatactcaattattgcttgagaagttctagagccttcgccgggtcgactggggaactagagcttatcgcttgctttaatatagagtacaaatacataaaaaatggtggatagtgataatgattacacctcagaagacagtaaaaagagaagtctagagatagatgcagacaatatttttaacaagagcaagaaactatccagaacaccaaccaaacaacagaaagatgaaaacaaaattgatcagcttttaaaaatgatgcaaaatttaacagatcaaacacaaagtttaacatcggaggtaaaaggaataaaagaagaacaacgagaatatagaaatgacctccgagaattaagaaaagaaataaatgaattcaaacaaagtaaccaacaactacaaaaagaaaatgatgaaatgaaacaggaactaaagatagtgaaaatgaaggtagaaaagttcgagaaagagagaaaagctaacaatgttattgtccagggtctaccgatggatacaaataacccaaatgtagtcaatgaggttatggcagatttcgtggaaagagaattaggtattaaagtagaaatagaagaagcttataaaataggggacaaaacatgtcttgtaaaactaaaaaacaaaaatgaaaaaataaaaattatga

SEQ ID NO: 10684 - DNA, 688 bp, Diabrotica virgifera
tccccatctatacattcttctttgagaggcagcgcactagaatcaggtcctggaacacttaatgagtcctctgaatgcacctcaggttttcgatccaatgttgtttgtaaagaacctgtattcgttgaaccaacaatacccccatttttagtgataggacctgtacagggttctttcttaacactagtctcttcttcctttttaactcgcacttccgtgctagcagtctctttatctgaactgccagcttcatcttttgttgtttccgaactcttttcggctttttccttgatcatttcgcacttttatcacataccccttcctttcatgctgcactatcactactaccattcactttactagtctctttccagtattataatcttagcccctgagatcaacactatttatttatagtcattccttttattttaataccactaatttatgtttcacatcacatatgttctaatgtttttatttgcattccatcattttttattttcatctcttaaccaaatttgaagagacgcatacaggctattttggacctccatggcatcgcacaggtatccgttttccgatatttcaagttaatattataaaagcttctaaatgacatcaattgcttttgagattttctctattaatccattaaaaaaactttcaacaaaaatcctcacatcac

SEQ ID NO: 10685 - DNA, 687 bp, Diabrotica virgifera
  SmartBlast Evalue=3E-84; Info=Lesswright n=1 Tax=Tribolium castaneum RepID=D6WVB5_TRICA
aagcttataatttattacgaataccctattacatatgtcttaaatgaatttattaaaaaagaaacgtcacacatacaattaataatttaactttcttggtggctcatggctcgagcttgagctcttactctcttctcatattccaagcgattttggcagtaaatggtataggcttcggcctgtgcgggatccttcacatttggctcgtttaacaagtcttgaatacccaaaagaatctgtttaattgtaatagccggtctccagtccttttcttcatccaatagcgacagacaaacagtacccgatggatatacattgggatgaaacaatggtggttcaaatttgcatttgggtgggctagtagggtaatcttccttgaacagcattctcaatttgtaatgtccttcttcccatggtgtccctttttttccaggaatggagcactcccaattcattaggttaagtgtgccatcttgatttttggaaggtcgggctacaaaaccaaatggatgatcttttctccaggcttttctctcttcagttaaacgggctcccgcaataccagacattttggatatgtaattagtaaagctaccgattacactaaattcgaagattctttattaatttccgactacaaccaaaaatcacagttaataatcacagagcaggagccggagccgaggg

SEQ ID NO: 10686 - DNA, 688 bp, Diabrotica virgifera
  SmartBlast Evalue=2E-42; Info=Beta3 protein n=1 Tax=Culex quinquefasciatus RepID=B0WQS9_CULQU
gacgacatcgataatccagcaccagttatcgaccccttctctaggcggtttcttcagcccatcaactccattagatgtgaatactagtattcagattgttcaaccagtatttctaagtacaaagccagtagaattactcaataggataaacgggaagggtctatcggcgacgtttcggtttacaagaacgccacatctttattctcctagtatgacaaatattaatctgttgttttctaatactactggtgaggatgttgatgatatccgaataggaaaaaagaatttggcattcggaatgaacttacacgattttgcctgcatatcaaagttgccacctaattgtgcccttcctgcaacattgggcattgacttcaatgatactacacagcctgcaaattttgaaattgtgtcttccttaggtaaatttaatgtatctcttaaaccaaatattggcgagttgttgaggccagccacgatgagcaccgctttgttcctgcagaatcagaccaaattacgtggtatgacggaacattccaaagccgtacctaattgtgttccagacattgaagaaaaaataaaggaatgtacaaatttagggccttgcgatcgatccgatccaaaatactttaggtttggaggacaaaccatgacctcttcatctttggttctagtatctattgaatgc

SEQ ID NO: 10687 - DNA, 687 bp, Diabrotica virgifera
  SmartBlast Evalue=2E-21; Info=Serine protease H164 n=2 Tax= Tribolium castaneum RepID=D2A6A6_TRICA
gataccagtttctatgtctctgcatacggttgtcgggactcgtaataattcttgatctttggtaagaacaacaggcaccggtgagaccactccttcagctgtacaataaatctcttggacacatttcaaggcggcagcacaacctgctggggcttggacttcgtctcctccgttgtctggtggaggtctcctagtaggtgtcttaacaggtctggttcctcctttcgtagaaccttcggtagtaggttttattaagacgttgttagttttggaagattcagcgttttcttctttgtgatcgggtaaccgtattgattctttgattttggaatccataccttcatgttcggttgttggtccgggaatagttacagagctatcagtgccaggtagctcaaagggtggagaaggtctgtcatagtggtaaccatcatcggtcgtgggaggctgcgttgttacaggtggtaaataatcccggtttggctttgtgcagctaccgtcaggttgtctcactgttccgaagggacaggggggccggagttggtcgttgacatgatccatctggttggcgaatagtacctctaggacaaggtctgggtgtaggtttctcgcagctaccgtcggggttgtctgatggtaccaaatggacatggagcaggtgttggacgttggcatgatccatctggt

SEQ ID NO: 10688 - DNA, 684 bp, Diabrotica virgifera
  SmartBlast Evalue=2E-22; Info=sarcoplasmic calcium-binding protein n=1 Tax=Nasonia vitripennis RepID=UPI0001A46D40
gcagggctcaaattgggctgtaaagccataggatggatcggatggaagttaactactatatttatttccaaaataaatcttaaaaaagattataaaccatggttactttgtaaagccatatgacaacagtgtaaatacgacgtacgtcgatttttaatttaagttcattgtattatctcttaaaataaaatgaatatttttatacacagcataaaaaattttcaaatggaaaatacaaataaacaattaaaattagctaaaattaaaaagctctttcctaaatataaatgcaaatattttagaccttaaagtaatgtttcacttgttttaacgtcactggtataaaatatcttagtggtctactaatggtccccagaagtatttgcttatcctttcttggtcttcagtcaaaaagaaatctcttccgtgcttcacgaactcttttttgggtaatttttccatttccgtttgagtctattgcccggaaagctaagatggcgtcttgttctttgaggcccaatacattgaaaaataatttaaattcttccacggagatttctccggatctgtctttatcaactgccttgaataagtaaggcaaaaaggaatgtgccttcctgaccagtcttttatcgttgagcacgtggtgcatattttctaaatatctttccactgagactaagt

SEQ ID NO: 10689 - DNA, 684 bp, Diabrotica virgifera
ccttaaataatactttaaatctactggtattcaattattagattattgaacaaatcctttcataaaagagaaaattctcagatacagaattcagcataataataaaaattaaaatggcaaataattatttaaatctgaaaacttttcttgttggaacttctttctggtgcatctttaatctgtgacttttacaatttataagacaacagacgacgaatatagaaagcgaaaaggactctacaatatgcagttacattccgctttcattcgtctaggaaaaggtcagaaagaaagttcctagttgagtaaagatagaaatgaaaaagacagttttgctctgaaacaaaacgaaaccaatgaaatcctttcatatttgattttgaaattacctgcagcgttataataatgggcaatattaacaagatcttccgaactctatataattccatcttttatagccttatttatacaaaaatactaactcactttgataatacatacatataagtatcttttttcggtaatataaatgtaactttaaaatattttaccacgaaatgaggacctcaaagattgaaacgtaataaaatattttaattgtaataatatatagtcatataagtaataaaaatacgcaaatatgaataaaaaaatataaaaaacgattttaaagttgacctatga

SEQ ID NO: 10690 - DNA, 687 bp, Diabrotica virgifera
  misc_feature (632)..(632): n is a, c, g, or t
  SmartBlast Evalue=2E-52; Info=Myo inositol monophosphatase n=1 Tax=Culex quinquefasciatus RepID=B0W8L8_CULQU
tgggaaaaaaattaatttgtccactcttctaaatgtagcaataaaggcagcagaaaatggtggcaagagggtagtagaaagcaaagaaaacatgaatgttcaaagtaaaggtttaaccaaagagggtatgcaagaaagtgtaactaatgctgatattttatctcactgtgatatgacaaaaacaattaaatatttcttccctagagtgaaactgatttcagaagagaatgttaaaaactgtgatgataaagctaatgttgattattcgttaatgaatgctgtggatataaataataatttaattaatgaagaagatgttacgatttggatagatccattagatgctacacatgaatatacagagaaattatacatgtatgttactactatggtatgtgtagctgttaaaggaaaacctgtgatgggtgttatacataagccatttgaaaaaactacctcgtgggtttgggtagataaggccaaatcaaaagatttaatcaatcaggaacctgaaaataaaagtcctaatataaaagtaatagtgtctcgttcacataaaggtgatgtggaaaaaattcttcaaaataattttaaacaaaaagtagacattataactgcagctggtgctggtnataaagctttagaagtagcaaagaagaaggtagatgcttatatacatacaacagc

SEQ ID NO: 10691 - DNA, 687 bp, Diabrotica virgifera
  SmartBlast Evalue=9E-34; Info="Calcium-regulated heat stable protein, putative n=1 Tax=Pediculus humanus corporis RepID= E0W0K3_PEDHC"
ggaggatattttaatttttaatttgaaattttgttttaaactaataatttctactttttgtttttaaacattttaaataatatgtcttcaagtgacgggttgccgccaaagtcgtacttgattccaagtccaataattacaaaaagaacaagaacaccatccgtttgtgaacgtatcgttaagaccaagaatatttatggggtaatcaaggaattttgccgtcagaaagggcatggttttatcactccagaagatggtagtgaggatatatttgtacatgtttcagatgttgaagatgagtacgtcccaataccaggagatcgtgttaagtatcaaatatgtcctatccctcctaagttcgagaagtttcaagcagtccacgtgaatatagtggatttgaagcccgaagtgcacaagaaatgggagaacttataaatgtccttgccagaaaatatataaagatcttcaattctcccttcttactgttattgaatgtatatttggttctattgattaatgttctgtatgtatatatgtaacactaattggatgtctataccttcccagactcgagttattattttttaagttatataatcttttttcacttctttgcataaggtaaaactgtagatttgcagagttgctgtgatcagtaaactgtttaaaacgcagtatagaccaggg

SEQ ID NO: 10692 - DNA, 687 bp, Diabrotica virgifera
gtgccgctcttattcaaagaagcacatatcttttagtttagacaagtacacgatctgaatttttttagaatactgtcgaaaatccttcaaaagtcaagatttaaattttgatgtttatgatatcgattacattatatataaacctaattaagatgtatataaaagtaacttatatttcataatacataatacagtgtttttgatcatttgagatatgtttatttttgacaaattagacatttgacattagaagcgccatcttgaaaagggcgtgtctcactcttaaataatagccaatgctgtgtgatttttggacaactattttttatacagttcactcagctttaaaatcaagtccaacttaggaatacatcagtacgagtcacagtatacagcagtatatgagcacaggtaaatgactatcagataaataaaaaatgtatatgttgtacactgcttttgaccatttgacaatgttctttgtgacaaattagacatttgacattagaggcgacatcttgaaaagggcgtgtctcagtcctacatgctaatcaatgatatgtgtgacttttggacaactatctcttatacacttcactcaacttaaaaatcgcgagaatgtatcgcgattaatgtatcgagaaatacagcaagcagtaccactcacatgagcacatgtaaagaact

SEQ ID NO: 10693 - DNA, 687 bp, Diabrotica virgifera
  SmartBlast Evalue=7E-29; Info=Ankyrin repeat domain-containing protein 54 n=1 Tax=Harpegnathos saltator RepID=E2B9T8_9HYME
cggacacattagattagagtgcccttattttgctgattgaaaataaaagttttgtttaactctgatatttaaaacgttattttagatgtcccacagtgacagtgaaatcagagatgaaaaaagacacaaacccagaacccatcacctaataaacgtcaaatttaaaaaggcaaaacaaatacggaaccagatagaaagggaagaatttagaaagcttaaaattaaattgggcccagttttagaaatcagactaatagatgctgtaaacactaacaatgtcgacaaagttagagatcttttagaaagaggtgtaagtccaaacagtgcagattctgaaaaacgtagtgctttacatgtagcagtgagcaagggatattcacaaattgttgaattgttactaaagcatggagcaaacccgaacagcagagatatcatccaaaatacacctttgcacttagcagcctgcgttcacaatttctcaatcgtaaccatgttgatcaatgcaaaagcagacgttacttgtttagatttacacggtcgtaatccattccaacttgctttgagtaagttacaaatattgaggaagagttggaatgatgggaccattgaaatgatcaacttaaagcaggaattgaaagatgttgtggacttactattatccatgctcttgagaaatgttgagcagtc

SEQ ID NO: 10694 - DNA, 685 bp, Diabrotica virgifera
  SmartBlast Evalue=1E-55; Info=Sorting nexin-13 n=2 Tax= Formicidae RepID=E2C230_9HYME
acattatcagagattatgttttaacttggtataatcttcttactagagatgttgagtttacagacactgcagtgcgacgtacagctcaaacgttggctataaatatttcaaatagggtcaaagaaatcgactggataccttatttgactcaaaagtttgtggatgatgcggcatcacatttaagactatataaacaggccagaacaaaaatgaaactacaagaagcagcgaaagaacagaagagctcaccacaaagagataaaacatctccgaaaaagactgttcataagagaaataaaagtgaaactgatgttagctggtatagtgggagagctacagaactgaaaaaggatcaagagaaaattatggggcattctaagtttgctgtaaatgatgacaaaaagaatttctcgttagaagaccattttttttatttagaacgccaaatggaaaaggatacagtttccagggactcgttgtgcaggaatttagatattgagaaagagtttctatgtgaactcaccgaaattattttatacatattactgccagatgaagattttcaatgcaaacctttacgatatgtacttcgagaaatttttgtaaacggcgtcattttgccactgttcaatttgattgctgacccggattatattaaccaagctatgatttggctgtgcctacg

SEQ ID NO: 10695 - DNA, 684 bp, Diabrotica virgifera
aaaaaaatgagatgtgaagatattttgattttattaacctaatattatcttcaaattacttttttctgatattcatattcgcaaaacatttgcacaaattttgcgaatattcgcgaatgcgaatattcgttacatcactagaggtgacattttcaaaattactgattcaattattgtaacaaatttcacatttgtaaggtttttctccattgactatgactatttatgctaatctccactgtaaatcgtttgttacacgtggagtacatttaaggtttttctccagtgtgtactctatatacaatctgttcaccgtgcttcggagggcacgtagtcgtcggtccccgcggcatttttatttttaaaaagaaaacgaaccgttcactgtgcttcgagagcacgtaatgtgtcggtcccctttagctagtgtgcatctgcactagccacatgaaacagggttaaagatgcaattggcgccggaacaatccgaagggatccctccggcaaaaatgccatacgatattgtagcgaaagagcaaccgcaagtggcgggttccatctcggcaccgcagaaatatctagatggaacacgtcacgattggaatgaggtggtcgagaacagacgcgaaggacgctcggaatacctcacttccctcaccacgtgttccatctagatatttctgc

SEQ ID NO: 10696 - DNA, 685 bp, Diabrotica virgifera
  SmartBlast Evalue=2E-37; Info=Craniofacial development protein 1 n=1 Tax=Camponotus floridanus RepID=E2A6J8_9HYME
tattatcaaatcaagtagttcttcccaatcatctagtacagaatcaaagccagctaataaagttaaagtcacacaaatttttgaatttgctggagaagaagttaaggtggagaaagaagttagtgcagattcagccgaagctcgtttattaggaacaaatacagaacaaaatgtttctggtggtaaaagtaagagatctgctggactgggtggcataggtaatgttctgaatcagctcactaaaaagcctaaaattagtacattagaaaaaaccaaattagattgggatagctataaaagggaacacgatatcgaagaagaattacagacttttaataaaggcaaagatggatatttagagcgacaagactttttacaaagaacagacgttagaagatttgaaattgaaaagggccaccgtgaagttgaaagaaataaacgattcaacagtgcacaataagcaatttagaacgccgcgccgttctaaagttaacttgcaagaagcaggtttgagaaagttgagaggcagtttattattaattatgactgcaactttaaataatttatctttttatatcgtgattaagttttattatacaatactttatgcatgatactgtatcctagttaggtactagttatacaaaaaagtttctgaaaataaagtccaatacttcagaaaggt

SEQ ID NO: 10697 - DNA, 684 bp, Diabrotica virgifera
ctttagatccactttagcgtcaatattaaataattattagcagtaggtgtcatcttttgccaagtaatgtttagaagtagaggatcttcctcgggtgttggattccgttttcttactaatatgtccaaactgttgggaggttcgactggtctaattgaattaaaatcatacagcaagggtagttcgtcaccgtgagcacaatttccaagtcctttaagtccatatgtactaaattgtttccaaaaatttatcccatttatgggacccaaataaccaaattggtagaaatatacatctgtgtatttagacataagcttggcatttgtcattattggaattccgtacaatatatcagatagaatcttggccatacctgttgcgttttgtgcaaatctattagtattgcaatatatattttttatttcattaaccataggtaaaatattttctttttttaaaggaacaacaggatcaattaataaagaataattactatccactaacaggccagctcgagtcaagtttccatagtctttgaactcttcatctgtaattccaatcataactggaacttgattgaaatgtcccttcttaaaattttcgtgcattgtgtcatctgttaaaaatgcatgctcatagtttggatcttctttagtaggagcccaagttgatctgaattcaact

SEQ ID NO: 10698 - DNA, 686 bp, Diabrotica virgifera
  SmartBlast Evalue=7E-53; Info=Apolipophorins n=1 Tax= Harpegnathos saltator RepID=E2C0B0_9HYME
ctcaaagttgaacctcgttgaattagccatcgtacaaagagaacattccatgtaggaaactcctgtattaggagcagtacactcgcagtcgacgcagtgtgtaggcatagctctcctcgctaaggactttgctaacacagtagcaaacttcttggcatttttcttctctgtttcgaggaatttagcactgtatattgtaccatttgtttccagagaaagagacatacaaagacccaaagtagatttaggaggcatgattgattttctgagtgtctgatccccgacaaggtttttcacgtctcgtttggtatacgcgaatcttctgtctataccaaatggaattttgatttctctttccttttgcatcgcaaaatgactgttcattaggatgtgcagggagatggaactttctgataggaactgatgaagtgttgagtagtcatgtagcatgttgttcttgttacattcagaacaaggcaccaacacaaaatttcttgaaactccgggccggaatataagattatttgcaaacataatgccgttgaatatatcagtattcccttgccctatttgaatttgatcgaaataagttaatatagatttagcatcagtaaatgtttttccatcgacaacgatacttcttggttcctcgaatactccatctccaccaaaagtgacaacggcat

SEQ ID NO: 10699 - DNA, 686 bp, Diabrotica virgifera
  SmartBlast Evalue=7E-88; Info=Calcium-binding protein p22 n=4 Tax=Apocrita RepID=E2BDM9_9HYME
taataatacattcctacctttgctcactaaaatactaaataaacatgggaaatagatcgtccctactcttacgtgaagaagaaatagcacaaatccagaatgaaactggatttacacccaatcagattgaaaggttgtattcaagatttacttcgttggacagaggtgattgtggaacattaagcagagatgactttttacgaatacctgagttggctataaatccccttggggaacgcattgtgaattcattttttcagggagatgactttaatgacagagtcaattttagacaattcatgcaagtgcttgctcacttcatacctatcaaaaagaataaagaaaatagattgaattcaagagaagaaaaattaaggtttgcattcaaaatgtatgatcttgacaatgataatatgatctctaaagatgaactccttgcgattctgcacatgatggttggaacaaatataagtgaggaacaattaaacagtattgcagaaagaactatagtcgaagctgatgaagatggagaccagatgatttcatttgaagaattttgtaaagctttacaaaggacagatgttgaacaaaaaatgagcatcaggttcttaaattagggttgtgtaactatatatgtttgcttagagcttctagataatatgcatttgtaaatattttgggaatag

SEQ ID NO: 10700 - DNA, 666 bp, Diabrotica virgifera
  SmartBlast Evalue=8E-25; Info=Retrotransposable element Tf2 155 kDa protein type 1 (Fragment) n=1 Tax=Camponotus floridanus RepID=E2AX00_9HYME
ctctggttctaatactggatttctgctcagacagtcagcttcttggtttgttgcccctggattatatttaaccctaaagttgtactgtggtaagtagtaagccaaatcacctaattcttcatcagttctagctttaaaattcatattttctaagggtttatggtcagaatataccttaaattctttgcccattagcaatgttgccaatattttacagcttcttttatggctaagcattctagatatattgctttcttcttttgtgcttctgttaatttttttgaaaaatatgccactggtctactattaccattttcatcgtcctgttttagcacagctcccacaccaatcatgcatgcatctgtgtagattttaattgggacgtttgggtcaaatatcttcagaattggttgtgaacacaaccaattttttatcttatcgaaggcttcttgacattcttttgtccagatgaacttaacatctttccttaataggttatatagcggttcaagtataactgctctgtgtggtataaatttttgatgaaaatttatttttcccaaaaattgacggatatttttctcttttccggaactggaaaatcttttacagcggtcaggtaatctttaatggtctcaccgaattcttttcgattatgtgacccaa

SEQ ID NO: 10701 - DNA, 685 bp, Diabrotica virgifera
  misc_feature (659)..(659): n is a, c, g, or t
taatagtgataaggagaacaataaaatcgaaactaatcaaacagaagttaacaaatccgaaaatgagtcagatattaaaatgttagcaatggcagtgtaatatgtaacgaaaaaagtagaataaatcacgaaatggaggataatcatatccctggagaagtacacacagtttagaacgtttttcaaccatatggaatcttccgaatctacaacttcagataagactaatcagttcgatatcaaaccttatttgtttctatccaagtcacagaaaaatttatatgtggttttggtatttcaaaaagagtaaatgttttctaaatatttttttatattctgcaaatatgttacgcaaaatttgttaatctataatgtttagtttcaggctgacgcttattttgatgaatcggtttattataggtttgttcctacacacaattttgtaccgttgagaagtagtcacgaaactgcttgagccgtttttatgtgcatgttgcatcatttgtaccatccagtgacggcaattcaaaaaccgatcctagagcgcaagtcaggccaaccagtacttgcatttatccgtgtatagcacaaccactggttgtgctgtaaaactggttgtgctgtactgaaatgatcgtcacgaaactgttacaaacgancacaatttttgttggaacaatcggga

SEQ ID NO: 10702 - DNA, 685 bp, Diabrotica virgifera
  SmartBlast Evalue=2E-26; Info=Four wheel drive n=1 Tax= Tribolium castaneum RepID=D6X462_TRICA
tgatcgtgtcgtgtcagtttgtgtttgtcgttcgtttgggtgttgaaaaatagttaaaacaaaaacaaataatcaaaatattagtgtctggtgtgtataacaaaaataagtgcaagcagtgatatgcggattactctatcgtgaaacaacaaaaaggacgtgcgtgtttatcgaagtaatatgtggatttgacagctagattacaacttgtagtcagtcaacacagtagaaactcaaaaccatttcaacgtagccaacaaaccatcaatgtgcgtccaaaaaaagatccgtctctaaaatgaggaggtagagataaaggtaacgatgaatggagtgtctcccgccggggggctggtgcaaccgcagccccagcccaacgtaacgacgcatttgaaacgccagaaattgaccagctgtagggatagtgttccgtcggttcatggtaggcctaacagttcgctcaacatcaaaacgagattgagcaaccatcagagaaatttgagcctcgactttaggtctatgggaattcttttgcctcctgtcactcaagtcaccacttcgacgaccaaccacttaactcaccaccaccgcaaccggagtctcgattccgcgctccaacgcatcccagaggtagacgtcacaccgagtccagaatgcgaaaccgtcaacgccatcttatgttcca

SEQ ID NO: 10703 - DNA, 685 bp, Diabrotica virgifera
  SmartBlast Evalue=1E-94; Info=Protein MON2-like protein n=1 Tax= Camponotus floridanus RepID=E2AXI0_9HYME
gttatttggagggaacggataatttccattaaacaagcatatgctacagagataccgtatccatctggaactattggcggctctattttgtctagcatttccaaatatgtagatttggtttgccctgtggggaatgtagtaacaattggtaaccatactcctcttaaaaggaatccgggttgaggggaaactcctggacctgctgatactcctaaatacatgggagcttgtccttgtccaacttgcatacctgctcccatttgcaactgaggactaacaaagagggactggacgtaagctcctaaagagtttactatatcttgaaatatgctagttgtgtgccggtttaaatcataacattgacagaacgaattcagtaactctggctggatcgtcattttgtgtaatacttccaaggcaagggatctctgccatgttggcttgtcaggatccaaaaacttaacaattaaagatagaaatatttcacactcagtcaccaacaaactatggtatttctgtattaaaatagacacaaccctgagtaatctcatacttatgggaaaatatggcttttcaaatggtgttgcctgttgaaggctactgggaacattgcttctgtatttaatatttggcgaaaataattttataactaaagcacacactctttctttaagtagaaaactaa

SEQ ID NO: 10704 - DNA, 681 bp, Diabrotica virgifera
cttgatgagacaaaaaacagatcattaataggcagccgccacaaggaaataaatcagcacgtggctatagcccaaatattgtgaggtttatacatgttttacaatgctatgttaaataaaattatatactatggataattcatttaaaactggaataataatcttcaaatggcgctacaaccctttgtgtgtcttgggctgcttaacaatgttattccattctgccctgtcaaatactttccttcgagactgcctgatgtccatggttttaagatctccctacatcttttacgggcttgttctatttccatggatcttccatttctggattacttttacacctcgattatctggcattctttctaagtgagctggagtaacaatagttcttcaaaattcaactggcttgttgtttattatttataatatatgtaccatgtatctatttgctcttgaaatatattgttttcgtttctttttaaataatccaaatgaattcgagatttttagttccactgacagtttattaaattgtctgaattaatttgtggcactagttgtgatcccactctgtatcttgttgcatatgagtgagcaaaggtatcttcttggtgtttgtttttaaattaacggattaatgacataatagagttgtcttatatcaaacaaatttgatttttg

SEQ ID NO: 10705 - DNA, 683 bp, Diabrotica virgifera
gctgatgaaattacgtttttgttggcaaaaaagccacaattttactttaaaataagtttatttgacgtttcgatttccacttcggaaattttttttgagaaccttttccgaactggaaatcgaaaatcggaacgtcaaataaacttatgttaagtttacaacaaaaataataaattaaaagcggcgtatccatctcgcgaggctgccgcgcgcggcgttttcgttgtcgttgccgcagaaaaaggatacaccaaatagtatatagaccataatacatcccgacagaaatctggcagcacgttgcttctagcgccacccccggctggagttgataactacattttctcaacgtaaacatgcaaatttaattttgctgatttttcgataaccagctcattttgctaaattttgtttcgacttttatacaaaatgttttataaaatgggttcgatgtgcgctatgtacggctgtaacaattttaaacagcaaaaggaacacaaatcatattagagaatgccagaagataaaaatgtgtaagtagaaatattgggaattctgttgattttaacacttgacggacagaacgtctatagacttctaatttcaattgatgttatgtgacacaacgtctatacagttaagtccccgagtctttacccgtgcgtcatcatttaaagcatacg

SEQ ID NO: 10706 - DNA, 686 bp, Diabrotica virgifera
acataataaataacatcacataatataagtgtgaatgtagtatgtatatgtatgtgggtatatgtgtgtatatgtgtatacatgggtatatgtgtatatatgtgtatatttgtatatcaattgccaccgctccaaccatagaatttttctcctaatccttgttcgcgcattgatcttctaactcctcatcgagatttctttgttcctcttcgttccctgtggtgtagaggtatccattttgctacttttgttggtagtcgttcttctggcattccttgaacatgcccataccatgtaagatggtttctctctatgcagccagtcacagttccttagacccatttcttcctcattgtgtggtttgaaccctatcatgtttcttttctagtcgatcttcttaacgcatccatttctgtggcttccattatccgtattgatatcctttaagacgccacatttcagatccgtacatcagtgtgttttaccattgtcattattcccaatgttgtcctatttcagtactccataattccatttagaggtttatcatgtaatatccatcattaacattgcgttagattaccatatatattaatatcattaatatattcaacccatattcccatttaaagaaatcaaatatttccgtcatatagatcttccgaccgactaactattcaacgacc

SEQ ID NO: 10707 - DNA, 686 bp, Diabrotica virgifera
  SmartBlast Evalue=4E-66; Info="28S ribosomal protein S15, mitochondrial n=1 Tax=Culex quinquefasciatus RepID=B0W5J5_CULQU"
ttccagaaatgctggctgttcagtttccaattttaacctatattgttttagcctgtcctctttgattccatcacaatacttatctgtaagctttcttaaggactcctttcttgtaatccagtggaaatggttaggtggtggtttatacactatatccaacgtttccagcaaccattcaaattttttataatcccaccgccttaaatatttcaagtgcttcttcctcctgtctattagttcttttagagtaacctttgtctttttgttccttggaaacctctccattacttcttgcatggctcgaataataccagtccatctagctattctggtctctacggtactataatcgtgatcatgcctcctaactttttccatcatatcgtattgaaacaatttggaactacagctccttggagcaaactctaaagtaaacaatttcttaacattatcatctgcagtttgcagctctttggaatcgcggaactgcagttgaaattgctttttatctacatcgggatatccttgtaggtctccacttttctgaggcttgaaacaaggtattttttctggccgaacccattttatttttaaatcgctcttgaaagcgtaattcctagaaaaaatatttggtacattgttaatacatatcgataaaaatgaattggtatttaaatattttaaac

SEQ ID NO: 10708 - DNA, 683 bp, Diabrotica virgifera
cgtatgtcgtaggagcacgatttgtcagtatatgtatatataaattgttttagagaatgcatagcataaaaatagttttgatatgtaatagtacctaatttttttgtctggtatgttcgtgacttatttcgtgcaaagcacttaaaaatgtcgacgttgtaaattgtatgtgttaaaagaatcattgtgtgtattaactgtagtttagggattatggcgatcagaaaaaattaggtataacgaagttattcatactaaaaatgttaatataatattaggtatataaaattatgtacatgtagaaattacaaaagtctacaatctgctattttagatgaaattataaagatgtatataacaaaagactaactaaatgccaacttaaaaatgtttcaatgagttgttttctggagattagatatttttatactttttaaactggaccaattatctttatagtgtgctttgaaatttgttaaaaatgttcctagatggtctgcattaattaccgaataaaactagtactgtaaatcaagaagtactgaaaatagtatcatacagttaagggttaagaagaatgtctacatttttatactttttggattttgtcccctacgtcattttgatatatctatggcaatcacgcattccaattgaatattatcgaaacaaatttcagttaa

SEQ ID NO: 10709 - DNA, 685 bp, Diabrotica virgifera
  SmartBlast Evalue=4E-89; Info=PR-5-like protein n=1 Tax= Diaprepes abbreviatus RepID=Q5I208_DIAAB
tgatcatcgtaagcgtagctgtaagcatctgggcattgagatttaaatacgtcctgaggatagttacggggccaagttgaactcttacaagtatctggtgttccaaaagcacctctacaacagtactgatctgtattgaaggcaagacaagctgatttacatgctatggcgaatccatttgggccttggactttgagttcattgggacagccgtcgttgagatgtttaaggcactgagctcttttgcaactgtattggccgccatctccttggcctccaacaggttcaaagctaatagcaatgttatatccatcaacgaaagaaatatcgtagaagtcaagtcctccagctcctttcattgtaatttcagcaagagaagctggaggtactcccccagctccattacattgtactctattaccacaatcacctgttaggcaatggtttgaaccttcgtcacaccaagttctgccccagaaacgtccagcccagttgtcgggtgctccaattgttctcgattgtccttgtcctagcttgaaccctccaccttccagatgaggatgaccaggattcccttggattccaacccatactgggccgccttcacggttcctgaactcgaactcagcggcagagactgccccgatcacaacagctagacatacgaactgcaacatttcactta

SEQ ID NO: 10710 - DNA, 682 bp, Diabrotica virgifera
  SmartBlast Evalue=9E-72; Info=Pseudouridylate synthase n=1 Tax= Aedes aegypti RepID=Q17C60_AEDAE
ggctctacagagaacaaaacttattccagatagagaatcttccaattaccacagatgtggcaggacagataaaggagttagttcattcggacaagttatttcattagatttaagaactaatgtgttgaaagctgatccttatgagtcaagtagtccattaaactattgtaaactgttgaacagagaactgccggatgatatacaatgtgttggttggagcgctgtagatgagagttttagtgcaagatttgattgtaagtccaggacctatagatattattttcccagaggacagttaaacttagagagaatgaaaatagcaacagaaaaattgattgggtcacacgacttcagaaatttttgtaaaatggatgtaggtaatggtgttgtagaatttataagaaatattgaagatattaatattgaatcaattagtcaaaatgagagtgattacgatatgtacgtcattactttaaaaggaaaagcatttctgtggcatcagattcgatgtatcatgggcgtattgtttttaattggacaaggaaatgaagtacctgaggtcattgatgaattgctgaatgttgcaaaaaatcccagaaaaccagcatattcaatggccagtgaaattcccttaaatttattttactgcagtatgatgatttagactggaattatgatcaag

SEQ ID NO: 10711 - DNA, 685 bp, Diabrotica virgifera
  SmartBlast Evalue=6E-30; Info=Angiopoietin-like 1 n=1 Tax= Tribolium castaneum RepID=D6WEJ6_TRICA
atgattttgaggaatcttggctttttaagtgttgtgtgtgtgttagagtttattgccatttggacagatggaatcattgccgaaccaagtaatttccttcgaaatacccttttggatcagttagatgatatggaagaatatggaagacatgggagtatgtttaaacgaaatgcaattgaattggctagttttacaccgtatttcaattgtaacgaagtctgcacaacattagtgggattaagtaaaggactttactgtcccattttgaaacaaacagaaacaatgcggactaaatttcttccaaaaagctgtaaagaaatttttaataagggaattaccatgactggtatttacgaaattcgtcccaaaggtaaatcgattcaagttctctgtgatatggaaacagagggtggcggatggacagttctgcaaaagagatttgacggttcagaagaattctatagagactggcgagactacaaatttggatttggtacattacaaggagaattttggttaggtcttgaacactttaacatgattacaggttctcaatcgactgaactattaatcgagttgacagacaaaaatttggtaaaacatgttgttcgctatcgacaatttgaaattggacctgagatagatggatatcctctaaaaacggcatctggttttagtggtgctg

SEQ ID NO: 10712 - DNA, 685 bp, Diabrotica virgifera
  SmartBlast Evalue=2E-86; Info=Trafficking protein particle complex subunit 4 n=2 Tax=Formicidae RepID=E1ZZF1_9HYME
gtcaaataattgaaacaaaactaatcaactaatgtaaaatggttatttacggtatttatattgtatcaaagtctgggggtttaatttttaattacgacaatgttgtcccaaaaatcgaatcggaaagaaagtttacttaccccttagatatcaagttacgttctgaaaacaaaaaaattattgtggaatttggtcaaaaagatgggattcaagttggccatgtattaaattcagtaaatggtataccagttactggactacaaatggataatggtgttaatgctttagaattcattgagaaggaagaaaactatcctgttactctacaattcgctagacctaaaatgacaaccaatgaaaagatatttttagcaagtatgttttatcctctctttgcaatagccagtcaactcagcccagaacagaagtcctctggtatcgaagttcttgaagctgacacattccgattaaactgttttcaaaccttaactggtgttaaactaatgattatctcagatagaactcagactggagttgatgttttacttagacgaatatatgaattatatgcagattatgctctaaaaaatcccttctactctttagagatgcccataagatgtgaactctttgatgttaacttaaaaagtttgttagagcaaatagaaaaaggtgtaaataatat

SEQ ID NO: 10713 - DNA, 685 bp, Diabrotica virgifera
  SmartBlast Evalue=2E-69; Info=E3 ubiquitin-protein ligase Bre1 n=5 Tax=melanogaster group RepID=BRE1_DROME
agtccgccgctgatctgaaacttcatttagaaaaatatcattcccagatgaaagaagcgcaacaagtagtagctgaaaaaacaagttcgctcgaagccgaagcctacaaaaccaaacggcttcaagaagaaatagcccaactaaaacgaaaggcagaaagaatgaagaagatggaattggccggcaccacgttggacgaggtcatgatggaagagatccgcgaatacaaagaaaccctcacgtgtccctcctgcaaggtcaagaggaaagacgcagtactatctaaatgtttccacgtcttctgctacgattgtcttaagactagatatgaaacgaggcagaggaaatgtcctaagtgtaattgtgcttttggagctaacgattaccaccgtctgtatttatctaactagtggaataccaggactattatttgtaatttattaatttttaagccaatgcgcagatattcctttaattttcgtgcttggttttaattctaaaaaagtttaaaagttttgtatatctttacgatgtcattgattttatgattataacaagagtttttgcataaagaaaatgaagcagtaaaagtaaaactgaaaaaatgcatggtatattctgtatacattaattatattgagatgttcgtactaaatttatttattaactttatttaaacacttaa

SEQ ID NO: 10714 - DNA, 686 bp, Diabrotica virgifera
  SmartBlast Evalue=5E-37; Info="CG4288, isoform A n=7 Tax= Sophophora RepID=Q7K2N3_DROME"
tgggcccaacacaatggcaaaatttatgaaatacgctctcaaatttaatctcagtgattcaggattcgtatcagcattgccctatttagcagttgcgtttgtaatccaaattgcaggtcaccttggagactacgtgcagtctaaaaacctcttcacagttggtcaattaagaaaaatttttcttggagtcggtttctcactgcagtgcacattcatgataatctctgttcattgggtttccacagttactacgactttttgtctcgtcttggcaattggatttggaggttttgcaatggctggctttacggtcaacaatttggatctgagtccaaattttgcgagtgtcatagtaggcattgggaatacatttgcaactttgccaggaatcattagtcccattttaactggatatctggtcaccgatgaaacgagcattgaacaatggaggataatgttttatattgctggcggtatatatcttgtcggaggattgttctactgcatttttggatcgggtaatctacagccttgggataaagtgccagaagatttaaaggaaactgagaaagaaacgtacgtcaatccaaattttcagtctgaagaggtgatccctaatacttgattgttataaagaaaactaacaaaaaagcataactaataactgtgattgtagtaggtttact

SEQ ID NO: 10715 - DNA, 685 bp, Diabrotica virgifera
attatctgtcataaattttcaaatattcaattcaagaaaaggtagtaacgtaagtcacttttcacttatatattatttaactgtatctaacttattccgttagtattttgcataattaggaattgcaaaaaattggaagttcattcttaatttttgatttgtaataccctggaccaaatatcaaaatcatgggcgccaattttgaaacgccttataggtgtatattattaatagattctccagaaacgtctaatactgtctttgattttgcctaatgtattgttattggaagcaaagctaggatctaacgccttagttacgggatcccttaaagctcaaatgatgtcaatatttttttctaagatactttttaaaagcttattgtggagtaaaggtgatgaaagagacaaatgttctagctctgattccgattttgtcaaggacagagataacccatattaatataagtttagtaaatgttttgaaagcagcacatagttgtagtttctgatatattagcccaagataatactgcgggaaccatttttatttacggaatttcattcagcggattgttttttgttgctactatatagtatactattctgggctataaatataaaattctataagctgggacctctcaaaaaaatctattagcttcaccataattattaaatgaacc

SEQ ID NO: 10716 - DNA, 663 bp, Diabrotica virgifera
aatgaatcgaaaactaccaattttatcaaaaaaatgtattgaatgttttttgcttggaatgaacgttttaccaacttttgtggttaaagtataagaaaggatttgcacccacgagattgggtggctaccgcccccatggtaagggcgccttttggcatggtatagattttgatccttggactgtccactgcttgttttcacattttcagggaaatcgatccattctgtaaaaattgcgaggttttttcctattttaagcttcattacttggactaatttaaaacttttaattttgtaactagatatgtaatcacctcagggaccgcagacgttcggatacaataagcgtctctttgtaaagacaatgaagtcaactttactaagtaacaagacatttactcagcacacaccacacattacactataatctgattgcgactggctgaatgattaataccattaaagccattaagaaaactagtgaaacttatgtaaaaatgtgaaacttaaatattcctacaattaacttggtatcataacttggcaatcttagtaacttatttaagggatctattgggatatgtaagagataggtatgtttaaggaattactgacctttatcacgctaataaattactttgcacatgaatttgatttttatag

SEQ ID NO: 10717 - DNA, 678 bp, Diabrotica virgifera
aagagagagccaaaggatccaaaggaacctcgggttaaacgaaaatatgtcagaaaaaagaaaacccggtgagtccgaggaaagtgctactgatgaatcatttaataaatcttcagaaagtcttgaagaagtatctgcatctactcctagccagactttaaaaacatctgaagctgaagccgaagctgtcataccttttgaagcgaaaatagatgatccagattcacaagctttacccgaaagttctgttccttcagatacaacgactaccgataaacctgaagaaatgcaggctgattcccaaactccggccgagggcagtatttcaaatgaaaatgacgataaaaaagacgaatataatttcgatgacgaaccgagtccagaaattgtcgaattgccaaaaagaaccaaaaaacctagacctcaagcggcaaaagcaaaaaccagtttccaataaacgacctaaacgaagtgccggagcaggtcgcaaacgtagaggtacaatcgtcccagaatctgatggagaaaatgaggatatgatctcaactcctccaccatcaccaccagacgatggtgagagttcttctaaacgtagatctgcaagaaacactcagcgtaaaaagtacatagatgatgtaatgttaagattttctgatgatgatgcacctcctactccta

SEQ ID NO: 10718 - DNA, 684 bp, Diabrotica virgifera
  SmartBlast Evalue=7E-37; Info=RNA-binding protein 1 n=3 Tax= Endopterygota RepID=E2B790_9HYME
atcttccttcgcggccatcgttctgagttatcgacaaatttaagctatcattaaaattcaattatttgtgttcaacacccgaaaaacccttcaaaatatccagaaacaggagaactatggctccacataaggagtgggacctcttttgcaaagtgtacgtcggaaatctcggttcgtcagcgagcaaacatgaaatagaaaactctttcgggaaatatggaccgttgagaaacgtttgggtggcaagaaatcctccgggctttgcttttgtggagttcgaagaccccagagacgctgaagatgccgttagaggcttggatggcacacgttgttgtggctctagagtcagagtagaaatgtcaagtgggcgttccagaagaggaggaggtggtggtggaggtagaagaggaccttccagatattccaggtcgaggtcaccaaaacggtcgaggtcaccgaaacggtcgaggtctcgttctagaagccgagattccagagcacgatctgattcaagagacaggcgctagtgcatttcgatttaagtattacactttaagttaagcagaagatatttctgaatagatatattcccattaacttctacacatttacacatttattcatctctacttttattttcctattatgattttataattaatataaataaagaatattatccct

SEQ ID NO: 10719 - DNA, 676 bp, Diabrotica virgifera
  SmartBlast Evalue=3E-56; Info="Phosphorylase b kinase gamma catalytic chain, skeletal muscle isoform n=2 Tax=Aculeata RepID= E2BJJ3_9HYME"
ggaaaatactcgttttcttctcctgaatgggcagatatatcagatgcaccaaaggacttaattagaaaattgttagtcgtaaatccgaaagatagaataggtattaaagatgccttgcagcatcccttcttccagacggtgcaactatgggatcaggatataggtgtattgaaaacattttgaaagaaaacgtgtctgatacgacaccgaaagtagaacaaactaaatttaatgcaaaacgcaagttccaatcgattatattactcgtaagatcgatgataagattacaaagacttaggttcacgccagaaccgttgagtgtagatgtagctaggactgatccataccgtcttaagatattaagaaagattgtcgacggctgtgcattcagagtgtatggtcactgggtgaagaaaggagaaggtcaaaaccgcgcagctctcttcgaaaacgtaccaaagaccgaattgaagcatatatatatgacaaaccttagccgatagtaatttttctttagaattaagtagacaattcattcatatagtgagttaacgacaaattggtttaatgcactctgtaacaacatgtttttgcaactagggcatcaaaaattgggatttttttaacgattctcaagattggtgtgcataaatcaaatttgtataggcttggtatt

SEQ ID NO: 10720 - DNA, 684 bp, Diabrotica virgifera
  SmartBlast Evalue=2E-43; Info=Survivin (Fragment) n=1 Tax=Aedes aegypti RepID=Q16M36_AEDAE
ctccctctggtaattccgttatcatttcatacgacagaaattgtaatttcttcattatcgtcaaatactgttcttctatagaaactataatttccttatcaatagaattctcactatcattcgaactctctgagtctactaaaccacttgtaaccctagataccaaatttgcagtatgttgtatatcaggcatcaaggtggctaaaccttcaccctgctctaattcttccaattgctcacccaatttatttttcgatttacttttagtatttaaccttaatttagaagcataagtatctacacaactcttcatattttttaataaggaactaacagaggggtcgttattcttgctgttcttttgaggtaacagcaaactaactagttgtgaactgacagcaaccgcccgcagcaactgaagaactcctttatacagaggaatgtgtcgagccatatctaaaactgaatcattccttaaatacgagcttatggctggcagcagagcactttgtgtcagtaattcataaaaagctcgaggaagaacgttttcagttagctcatcttccgcatcatcgtttggattgatataactggccaaaacttgcagaagtacagtaacatgttcctcttcacttttttgtttcagcaatgcttgttccacgttccaactctgttgggtggagc

SEQ ID NO: 10721 - DNA, 684 bp, Diabrotica virgifera
  SmartBlast Evalue=5E-79; Info=Ribulose-phosphate 3-epimerase n= 1 Tax=Glossina morsitans morsitans RepID=D3TNS0_GLOMM
cacgtaaactagcgatcactgccgcttggtcgattgactcaattattgctgtacctgatactatcatatttgcacccgcctctgcacaagcagttattgtactcagtccaactcctccatctacttcaatatctaaaagtggataattatgcctcaaccattgcaccttgggcatcatatcactcatgaacctttggcctccaaagccaggctccacagtcattaccaaaatgatatctgcatggtctatgtattgcctaacatcttcaattcctgtgcctggttttaatgctaaaccgactttcatacctgcttcttttactttcctacacacttttataacgtcatttattacaggttctatgtgaaatgtgtataagttaacattggcttctgccatgggttcaatccacttttctgggttcgcaaccatcatatgtgtttcaaagaaggcatttggtattttttccttaaacattttactactgggtgtccaaaagttaggttaggaacaaagttgccgtccataacatctaaatgtaaatagtcagctccgctatctaataatttttgtgattctacgtataattgggatagatctgcgtttaaaattgaaggccctattttgcattttaatttattttccatgttgttgatcactaacctacaaagatatgaatgaac

SEQ ID NO: 10722 - DNA, 685 bp, Diabrotica virgifera
tagtagtttccgaaattgatagcggtaacatacaaactaatgaaatttcttcaaaaaactggagcgttaaaagttggcgagatcagtttaccaccagaaatgatacagcaaattatacaaacgattcaaagcagtcaagcttcagaagaaaaaccacaagttgaccaagatggacaaaaaaaaaactccgtttgatttttgccccgacgtagaaacatcctctgcccaattacctgtaccagaatgtctcgagaaagaaaaaatagcagatttagcttcatcagcaactgaacctgctgcagaaactgaattttcggttgcagaaactaaagacacagtttcagttgagactgtagaaactgaaagaatagaggatgatattgcttcagaagtacctgctgaatttgcagaattgaaatctgatatagcagaagctttattgaaaaatattatcctaaatgaagctaaacccagtgttccagaagtatttcccgaaaatagcgatatttcgatagaagtactgcctaaagaagaaactataccttcagaagaatcgatactttctcttggtatactttccaacgaagacatttctgttcccgtagaagaagagaaagatagccctcccgtagttccccctagagcagtttcccaagatgcaaaacctagtacgccaaatgatccc

SEQ ID NO: 10723 - DNA, 683 bp, Diabrotica virgifera
  SmartBlast Evalue=3E-35; Info=Probable RNA-directed DNA polymerase from transposon X-element n=1 Tax=Drosophila melanogaster RepID=RTXE_DROME
cactattaagatcccatctgacagatagattttttcaagtcaaaagaggaggggaaattactaacctgttccaatatgttctggagttccacaaggaagcatattaggaccaacactttacttaatatacacatcggatcttccaaccaccattaatacaacaattgctacatatgcggatgacacagttataatggcttcaaatcctatagcaacagaagcatccgaggtattgcaaaaatcatctgactgaactagagagctggcttaaattgtggcgagtacaagtcaacagtttaaaatccacacaaataacatttactttaaaaaaaggtgtcgcgcctccggtttctataaataacactccactaccagtcaataccgccgtaaaatacctgggaattcatttagatagtaaacttaattggggcacccacatctggaagaaacgtcttcaactcggcctaatctacaggaaaatgtattggtacatgagtaggaaatcaaatcttagcctggagaacaaaattatgatttataaatgtattttaaaaccggtgtggctatatgcagcacaaatatggggaacagctagtaataccaacattcaaaaacttcaacggttccaatcaaaagtgttgcgccagatctgcaatgccccttggtatgttacgaaccagaga

SEQ ID NO: 10724 - DNA, 684 bp, Diabrotica virgifera
  SmartBlast Evalue=5E-38; Info=Lysozyme n=1 Tax=Harpegnathos saltator RepID=E2B2U7_9HYME
tgggaaaaaccgggttggtaaagtttgttgtagtttcagtgatcttcattttgaactctttttttttcaatatgcgaactacgtactttacattagttgtaatattagctgtagctgtacaagaacatgcatctcaacaattaccagtaacgcaagcttgcttgggatgtatatgtgaagctatttccaactgtaatgtaactagcggttgttctggtgaggtttgtggaccatttcggatcacctgggcatattgggcagatgctggaaagcccaccgtgaaaggagtatcaccagaagacaataatgcatatggatcttgtgctactgatacgtattgttctgcattagctgttcaaggatatatgaataaatttcaacaggattgcaatggtgatggtaaaatagactgtgacgattatgcaagtattcacacgcatggtggatatggctgcaaaggaactaatctaccacaaccttttggaaatcgatattatcaatgtaaagagatagttggacgtagaccagagtaatgttggagtaaccccaggattgagaacaggaagattgatagaaacgcatttactactctatgaattttgttggatgattattgcaacttaatgtaattcaatatgtttaagggctgtaattacaattaaataaaaataactgacatcatag

SEQ ID NO: 10725 - DNA, 684 bp, Diabrotica virgifera
ggaatcaattaaaataagtgtaaacaacgaacaataatatatttatttattcttggttaaaaggcgtgcttattcatctcgtaaaagggtttgattgtttggcccagcgagggtttgttgaccgaccaacgcctgctgcgagtgtgtgaagcgacccgtggtcaactgctgtggctgaaaagaccacaaacgctaatatgcttgtgtttctaccatctggccagaaaggcgataaattatttagatctggcgtttaaaatttgaaatatttctgcagttttaataaacgtcttcgaatgcatttccaaagtgagttattgacataaggtctaataaggtaatttttatggggaattcggtttgttaaactgaacacaccaaaaacatctggttagggatacatttcgtttcgtaaaacttaacgggcccttcttagcatttggtttgtatattaaatgtgaattttacatgacccatattatttcgttttgagaaaagttactaaaaattaaaattagcaaaaatagtaattaaagagtgttaacacaagttaaacaaggataaacaatacggcatgtctttgataccttgtttactatgaattttgacgttatcattttcagtgacagtgacatttgctcagcgcatttgctgtattggtttatttgcatttcttgtttattt

SEQ ID NO: 10726 - DNA, 683 bp, Diabrotica virgifera
  SmartBlast Evalue=3E-76; Info=DNA-directed RNA polymerase I subunit RPA2 n=1 Tax=Harpegnathos saltator RepID=E2B687_9HYME
cttggtactcgatatgtaaacaagctagcttcttggcctttttttgtccaaagtttgcgcataacttgacactatgtacataacattcttctttgcctttaaattgtttaactacgtacattgaccgatcagcatcaaaaaaacaatacagaggttcgttttctgccatttttctaccgatgaatggtaaaccatcagaatccaataaggctgataagttggtgttttttgtatctggatctctagcaaaaaacgaatctacatggtccaattcgacaaattctgatttgtaaatcattccatgggccagtcccctttcttctgatgctttgttaataatcatggcgtcttccatatcgtaaccagtataactgataacagccacgatagcattcgtgcccattgcatagtcgtctaacaaaatattatcgtgatgaacgggcctaaatagcggagttccaggtgtttgtagtcggtagagtttggtttctgattgtaaatcccatgtatggcaaggtgtacccatcgtctgtttacccatctgacactggtacatattacgaggtgactgattgcaatcgggcattggtataagttgagctagatttgaaagaaacgctgtttggcgagctccatgtgagtggtaactttgtcatacgccttcctctggagtaacacatata

SEQ ID NO: 10727 - DNA, 678 bp, Diabrotica virgifera
  SmartBlast Evalue=1E-40; Info="Organic cation transporter, putative n=1 Tax=Pediculus humanus corporis RepID=E0VD76_PEDHC"
acgtttctgtgtttgacttgtttagggtgccatctttaaggaaaaaacattctgtcagttcatgatttggttcagcgtatatttggtgtattacggattggtgcttaatcttggaaatattggaggaaatctatacattaactcggctctacaaggcgtagtcgagatccctgcaatagtaatcagcatctattttcttctcaagaaaggtagaaggtggccactttccctaacaatgattacatctggaatagcctgcatactcaccttccccatatacttcctggacagtaatctccagtgggtaataacttcactaacgatgattagcaagttctgtatcagttcgtcaaatgcgactacgcctgtttttgcagccgaactgtatccaactactatcagaaatattggcgtaggagctgccaatgtctcagctgggattgctttaatgttggtaccatatttgtggctgctgtcttccttccacccaagtctgcccatgacagtcttagcagcattcggcatattggggggtctttgcgttctgcttctacctgaaacaaaaggtgttccattaccaactacgattaaacaagaaatagaaggacggaagatgtcactagctggacccaacaagaagattaacaacaactgttcagcatagcggctactgcaggg

SEQ ID NO: 10728 - DNA, 682 bp, Diabrotica virgifera
  SmartBlast Evalue=2E-70; Info=BTB (POZ) domain containing 2- like n=1 Tax=Nasonia vitripennis RepID=UPI0001A46D3C
tgttcgaggcgatgttttttggaggaatggctgagaaagatcctattgcgatattggatgttcaacctgatgcatttaaagcccttttagagtatatatacactgacaagatcaatctcacatcatttgaccaagcatgtgaattgtgttatggagcaaagaaatatatgcttcctcatttggttgaagaatgcacaaaatacttatggtctgatttgtatcccaaaaatgcatgtagagcatatgagtttgctaagctcttcgaggaaccaatgttgatggaaaaatgcataaggataatatgcaatcaaacccaagaagtacttcaagacagtagtttcgatgaggtccagttaaccactatactaacagtattcgatcaagacgatctacacattttctccgaattggaccttttctttgcaatcacccgctatgctgctagacatactcaaacttcaggtgcgaaagtacccagactagatggtatagcaaatgcaactagtgaagccaacagcagccacccaaccatcagagacgccataatgaaaattcggtttttgaccctctctccacagcaatttgctgaaggcccagggaagtcaaatttgctaacagaatcagaaaaattcgccattttgatgaacatctgcagccctagctctgcggtttctatgcctga

SEQ ID NO: 10729 - DNA, 677 bp, Diabrotica virgifera
cgcgtaactgacattcaaaatcactggtgtcttcaagcattgtttctgagaaaacagttgattaacacagaaagtgtcaaaatttttgttcaaaattatctcagctacatttcatgtttgaaatttttttctacagcatacagattcttagtaaatcgatgttttccgtgttccctccatatgtgggaggggcggttttaggggaaaaccgggggcatgagttggcccggtttcatcttttgatattgtcagcaaaattcaccttgttcgtataatttttagaggtcaaatatgttgacgactggggtaacataagaaaaccttttatagtttaactgttacagttccatactttgaagtttctatgttgttagaaaaaaaaaacgtctattttgtcctcatttgagatcataactcaaaaaactgtaacctgttgcgatatcatttcgttgatattcacatttgttgcgatatcattaccaatttcgtatctcttttgccgattttggagagaggttttagaatacttacagaaatgggtaataatgggaacgatgtacaaatattaataggaataaacaaaatcggcataatcgcaactacagatcatcccaaaccaattttttcagtgcgtcatagattatcgaattctctctaacgcattacagttggaaatg

SEQ ID NO: 10730 - DNA, 681 bp, Diabrotica virgifera
  SmartBlast Evalue=2E-45; Info=3-oxoacyl-[acyl-carrier-protein] reductase n=3 Tax=Culex quinquefasciatus RepID=B0WCC9_CULQU
caaggacaagctgaaagtgcatttaagatggagcggtggtcagggcaaattgctgttgtcacaggtgcaagtgcaggaatcggtgctgccattgcagaaaagttggttgaacatggcttgaaggttgttgggatagcaagaaggaaagaacgtatcgaggaattggcagataagctgaaagataaacagggctctctgcatgccgtaaaagctgatgttatgcaacaagaagaaatcattgaggcattcgattggatcaataaaaatgttgggccaataagtatactcattaataacgctggtgttggaagaagaacaaccataatagatggagacattgaagaatggaaaaaggtgctggataccaattttctaggtacagcaatagcttcgagggaagctataaaaagtatgcaggcaaacaaaatagatggccacattgtgaatattaacagcacagcaggtcatcaagtgccctccttgccttataataacgtgtatccggcaaccaaattcgcagttacagctctttctgaaaccttaagaaaagaccttattacacttggaagcaaaatcaaagttacgagcgtcagtcctggatgtaccatgaccgaaatcttcgaagcaaatggatacactgacgatgagcaatgccgagaattattgaaagttgtaccatcg

SEQ ID NO: 10731 - DNA, 682 bp, Diabrotica virgifera
ttttaacggtagactgatttttgtcccactcttctttcgtcatcggcgccatcgccttacttttctccatcaaacttattggtatatccatagattcatcctcctgtttgggctttttctttttggacgagcttttggaaggtttttttgatttgtcgtcacttgataagctactgtcactagtactagatgaagtagacgaactagttgattgctttctagggcgttttttggtaaggaccttctttttctttttactgtttagctcctcctcagataattcacttgaacttgaggtcgatgaagtagatggtgacgatttcctctttttcctcactttcgttttgattttcttttgtgaagcctcttcatcagagcaactggtgtctgtagtggagctgctactagaactgctggaacatgaggaagatgacgaagaactagaagttgattcttctttatgccgctttttccttttgttttccaactgttcttcttcgctatcagatgtgtctgcttttcttttccgtttacccttagttttttcatgtttcttgctttttattttgattttattcatttgttaatattatcaatgttaattattcgtcattattaatgcatttatgcacaaattaccatttaatgttgtgtggatgtaaataaaatcacccaacacaat

SEQ ID NO: 10732 - DNA, 681 bp, Diabrotica virgifera
  SmartBlast Evalue=3E-17; Info=Inter-alpha-trypsin inhibitor heavy chain H3 precursor (ITI heavy chain H3) (Inter-alpha- inhibitor heavy chain 3) (Serum-derived hyaluronan-associated protein) (SHAP). n=2 Tax=Gallus gallus RepID=UPI0000ECADFF
aagtcgtatactccttcaataatagaagcctccaagaaaaatattgaaactatgaaaaaatgcaattaataattttaatgctaagggtggtacgaatactataggagcgttagaagttggattaatggctgtatcagcgacccagaaaaaatacccaaataaatatctacccattatcgtctttcttacagacggagagccagaaattaggtctaaagatgcagataatgtaacttatataaacaaagtgataacaaaattgaacaaagctagttttaaaactccgatatattcgttatccttcggagatgacgtaaaacctttatacagaaggttcctgataaacctaagtaataataattttggaaaggagcataaggtttttgtcgacttggattcatcgcaatatcttcaaaaattctacgaaactatttctgtgcctttgttaagaaacatttctttgaataacttaccaccatcagcacaactcacaaaaataaattttccaattttttttaacggatcggagatagtgattgctggaaaaggggttggaaagaacaaagccttgccagtaacagtttcagcaaactcaaaaaaaggcctcaaacacttcgaaccacagataggcgttcctttggcaagactagaacgaatttgggcgtatttaacagtgaaaca

SEQ ID NO: 10733 - DNA, 683 bp, Diabrotica virgifera
  SmartBlast Evalue=2E-58; Info=40S ribosomal protein S14 n=41 Tax=Eukaryota RepID=RS14_DROME
attaaagcgccctctaaaatttaccttcttttgcaaaactattgcttgaacagttctaaaacatggctcctaggaaaggaaaacaacccaaagaagaagtccaactatctcttggacctcaagttcgtgaaggtgaaatagttttcggtgtagctcacattttcgccagtttcaatgatacatttgttcatgttactgacttgtctggtagagaaactatctccagagtcactggaggtatgaaagtcaaagctgacagagatgaagcttctccctatgctgctatgttagcagcccaggatgtagctgaaaaatgcaaaacattaggaatcactgcactccacatcaaattgagggctacaggtggtaacaaaaccaaaacccctggaccaggagcccaaagcgcactcagagctttggctcgttcaaacatgaaaattggtaggattgaagatgtaactccaattccatctgattccacacgtaggaagggaggtcgccgtggtcgtagattgtagacagtgtctattttatctatcgatttattgcaatttttgtttatatatttaagtatataacatgttcattcaataaaatttgactgagcaattacctgttttgttagtcctttatttttcatattgattataaattttcagaataaaaattaaaaatacattcag

SEQ ID NO: 10734 - DNA, 683 bp, Diabrotica virgifera
ataatgaacaaaatgcggcaagtgttattagctgtagtactagctactttatgttcttccggcttttgcaccagaggcagtgaaagactagacaaaatacggatcgaaccgcaagacttaaatgacatattttcagatggtccatattttgaaggaaaagatgaaaggataaatgaaatagaagtcaaaagacaagatttaaaatcaaatggaccattctttgaagacaaagaattttctattgacgaaagagcagaaattaaacataggtcagggataatcaggattcttgaaagcatgacaaccatgatgcagacaattttatcttatgtagatggtcatgccaaaatggcagacattgtaacgtctgttcaagaattcgtaaaagctatggagtctttcattaatattaaagcaataattaatgaagtaccgtttgtaggacctacagtatcatggattattaccccaattttaagtttgatttcatctcttgtcaaagaaactccggtatttggagaattattatcacaaatgcttatcggtccagtatatcccgtcactttgccaccaacaaccgcacctccaccaacaaagtcaggatggatttttggttgagacaaaataatttaaaaacatgtaaaatcaattttggatctagtaattaaatataaattttaacc

SEQ ID NO: 10735 - DNA, 683 bp, Diabrotica virgifera
  SmartBlast Evalue=3E-27; Info=T-complex protein 11-like protein 1 n=1 Tax=Harpegnathos saltator RepID=E2C017_9HYME
tcgaagtagtagttgcaaaaacggtgctgttgtgtgatacaattcttagaaattggccagcaatttcagttagttctttctgtaaagctgataatcctgatggcaccttctggggagcagctgtcgaggattctattatatccaaaaagaagtctttcaccctttgttgaactattccttttactttgtgatctgttttcttccaatatctaaaatttgttccctgatattagattcggccgctaatggcatttgtggaaggtcgtacttcttctgtgcctcttttaagtctattagtacctgatcggagatattgggtaaagtagattgcagttcactttcattcttaacattttctagtaaaatgcaaatatgatccttcaaagactgcttgaatgctgctatagattggagatccgttcctgcattactaatggtgactagaagaatagttgcaacatatactagacgaaaacaccttacatgtaaatctttaagtctatccacgtctaacatgaaagtttcaggatattcctcgccgcttggccagtcgattaattctacacaggcttgacagaaggcccatttgaaaacaccttttataaatttttcatattctacattctccggtacagcttggccactatttatatatcttaataaccatttacgagtttgctcaa

SEQ ID NO: 10736 - DNA, 679 bp, Diabrotica virgifera
  SmartBlast Evalue=6E-57; Info=Short chain type dehydrogenase n= 2 Tax=Aedes aegypti RepID=Q16F48_AEDAE
gagcaacatgtaaattattttcaagggaaggagcatcggtagttgtagcagataaagttcctaaaactgtggaagaaactttgaatattataaaccagattggacaaaatcaacatttgggggtagaactagatgtcagcagttctgatagcgtaggaaatgcattgaagaagacattggagaaatattcgaaacctcccacagttattgttaattgcgcaggtattactagagataattttcttctaaagatgtcagagaaagactttgaggaagttctggatattaatttgaagggaacttttcttgtgatgaaagccttcgccaattcaatagtagaatcatggactcaaaaatgcttccatagtaaacatttccagcatcgtaggcaaatatggaaatataggtcaagccaattacaccgcaagtaaagctggagtagaattgttatcaaagacagcctcaaaagaatttggccagttcggtattagggttaatacaatttttcctgggatgattaaaacaaggatgatcgagacagtgccagataaggttcaggatcgttttagagcaatgattcctatgagtagatttggagaaccagaggaaattgctgaagttataacattcctagcaacagacaagagctcgtatgtaacaggagcatctattcatgtta

SEQ ID NO: 10737 - DNA, 676 bp, Diabrotica virgifera
cgtcattttttcgttttcatttttttggtaggaattaatcaatttaaaaacttcaaaaaaaattcacacgcctagttgaggcttttacaaaatatgtctatttttataggtctgtaggttgagtgtacataagctcaaatgcatttttttcgagaaaaagcgtattactttttttggagatagctgcagatctaattttgtttatttgtctattatatcaaatactatatttctgattgtttccagacaaagaaagtttatagactttaaaatagatcaaattacgattaatttcagagattatagtatataatttaaagcaactgagtaatttaggacattcaaaaattggacaaaacacgttcaaacccactaaaaatccgtaacaaccagtttttcaggttgttggagttgcaccttacggaaaaatcagaaatatatacagtggaacctcgataacccagattaatcgggaccgcggccgatccgggttagccggagaatatggtaaaaattaataaactacggtatacttacagataaactccgttataagtgaaataacatgaaatatacatccacagtacctacacatctaaattactaaaaacacgcaaacataaacctaagcaaacggaagcgaacaatacaagactgtactacacacaatacagtc

SEQ ID NO: 10738 - DNA, 681 bp, Diabrotica virgifera
ttgttaacttatacgcaaataaggaaacactatcaatctctcaactaggtacttgtgtcatttccaaaagcttattatgacgatgttacagtcttggtgacaatctttacagacaatggtctgtgataagcaatatataaataatgtatgggtggaacttcacttaccaggtcatctagagttcgaaagataatgaaaacaaacaagtaaaaagtccctaaagctcaatttttatgatacctgaggtatctgggatgggttaattttctctttgaagtgacagctgtgtagcttaaatatgtatcgaaatagcaatgcattattacttataacgttagcgccactggcttgccagtgctgacacaatcgccaaaaggtgttgactgagctaaaaacgggtaatttttttcatgttttactttttcttcaacttttgaaataatagggaggcacgatctctccaaaattgtttacttttgttttagaagatgtacctcaagaagttaaattgaaagacctagttgcccacacaacacgcaaactagaagaaatgtataccaccttctcaaacgtctcgaaaatatgggcctgaaagtaaacgaggagaaactaagatggtggcatcaacgcccaaacaatagagccagaaacatcggttaccaattttttgttgataactct

SEQ ID NO: 10739 - DNA, 680 bp, Diabrotica virgifera
  SmartBlast Evalue=1E-32; Info=Endonuclease-reverse transcriptase n=1 Tax=Bombyx mori RepID=D7F170_BOMMO
tccctctttgttaggctcatggtttctgccccatatatcaccactgttcgaattgctgttctatatactcggattttcgtaaccctgctgatttttttgttgtttaaaatacttttgtacttataatatgctctatgacccgcttgtattctgttggtaatttctatgtttctttcatttttgttgttaattgtgactcctaggtattgaaaattactgactatttcaaaattataattcccgatttttatatttctttcctctgtatctttgtttttcctctctattttcatgtatttagttttctcttcatttattgttaagcctcttttcaccgcttccttttcaatttgtctggttatgtcatctaaggttcttttgtctctcgccagcaccgctaggtcatcagcatatgctactatctggactgaattgttggtgatcgtcccattgagtttgcacgtcttaattatggcgtctaaagttatgttaaagagcgtagttgacagcccatctccttgtcttactcctgcattgtattcgaattcttctgttgctccttcctgcgttaatacggatgcctttgattctttcatcgtcatttccacgagtcttatcatctttccaggcacttctatattcctcatatcgtttactacttctggcctcttaatactgtc

SEQ ID NO: 10740 - DNA, 675 bp, Diabrotica virgifera
aaaaattctgatgatagaaggtaacatgaggatgggaggccgctttcctataaaatcaccgggctgcttgaaaagttccagcacgccactggatatacatactattcttcctaattgcttagaatatacccatacagagtgagtgttgtgtatggagagctcaattatctcggaagcggcttgcacgattttcatatattttggtgtgttaaggatcttgtggtgcggccgacgttatggtgttatttacattgttgtcagatcttccaattttctggaaacctaatgaactttcttatttcaaatgtaaaacccagaaatgtttttgtctattaaagtccttgagaaatacttattatttttcatgtaatgtaaggaacattacatgaaacataatccgtattgcttaggaacttcaaaatacaaaatatacagggtgtccagaaactctaccgacaaacgaagacaggagatttctaagataattttaagacaacttaacccaattcacctagtccgaaaatgcttcctaagggagctagagctctttgaagatggcgtcatgtaattagtttttcttaaatacctccagaacgcttctatttagaaaatcgaaaattggtatggatatttactttccagaaatgaatcgattccatccattgtgaatttcta

SEQ ID NO: 10741 - DNA, 679 bp, Diabrotica virgifera
gccctgttatctttaaacttaatttttccttagcttctttcagagaactttcctcatttcttcttattttgctaaccgcacctattaaagcccttttctcgtcatcgcattcaatcaccaggttgtcagcatcacctgctaagaaatttatgtttggaatggtactttctttagtcaaatccatttgagtatacttgcaaattaagtgaatatgtttacacatgttccattttatacatgaatccaagcatgtacaagtatagcagtgtagacaagcttcgcaatcttcacacactaacctacatggacaattttcttttaccttctgaatggtatacatttcattccttgaattagagggcactaaccaaccattatcagatttaattactttactcagatcaagagactgactatgacatgcctttttcttaattcgttaatttttgtagagactttacctttgtgaattacaataagtctctcaaataatttgtctttaacaaatttcataatagcacctattgccttatctaatctcttaacgaattttccatgtaaataaatgtgttttatcgttcggtacattctttcaatgtgcatattggtatttattggtacaatgcaacctaaaacaatatgcccactgctctgctttacatgcataatactagctcga

SEQ ID NO: 10742 - DNA, 681 bp, Diabrotica virgifera
  SmartBlast Evalue=6E-38; Info=Farnesoic acid O-methyl transferase (Fragment) n=1 Tax=Biston betularia RepID=E3UKK4_ 9NEOP
ctgcttactgataagccgttttactttacttagcgttatgaaaagttaactcagtaaacaacggaaagtgtagcatttcaaacgtggttaattataggtgttaaattgattgaaaattgaaaatggctgcctactactgggtggattgtcatgcaaggggcgcactaccatctacagcacttcgaggaggtgtggatatagatggagctgaaatatttgttggtaggtcttaccacgaaggcgactggcttccagctaaagttattccaagcaaggatgttgcttatgtagcttataacggaggcgaacacgctaaagatcagtttcaggttctttgtgaacaacgctttgattgggtaccttcaggcaatggtcacgttccctttggtgctgtagaaggaggaagaacttcagatggagaaccactgtacattggcagggtgtatcatttaggatctcacaccgttggaaaggtacatccaagtcacgggacatgctatattccgtttgatggtaaagaaattggatatccccattacgaaatattggttttgagatcttgatgagattaacgttttctcatgtgggcaagtgttagcgggaaatgagcttcttttatatgtaaaagaaagaacaaattaattatcttatatgtttaagcaatataataaacattttaaa

SEQ ID NO: 10743 - DNA, 677 bp, Diabrotica virgifera
caagtacgagtgaaaacacagttgttttcctatataattatctgttatgtgaggcagtggttttcaaagatttcattacatatttactaaaaaacgcttcctttacttggttgttaatcttggttgttacgtaaaaagtattaccatctatctaagagactcattaatgttcagtccagcgggatactattgttcgaggtgtgaaatatttattttcccttgtttatggaatttcacacctcgaacagtagcaccccgctcagctgaatattaatgaatctcttatatgttagacaatacaacaatttgtacgtactttattttaaaaatattaattaatggagacaacataacctgtcattaaaactgtcaagtgagtaaaactgaatttagccaatcaattctttcactctagatatcacataaataatcaaaaatcattgtcatcattctaggcattattaagaaaatactacgtttctaaagaagctattagattatgaaaaacattactttgaaattcactaaacattgacgcatgtccacaactaaaagaattactgtctgtgtcattttgatttgagtacctcagccgcgattcttgtgtaggaacgttgttgtttaaaaaattattaacactaaagtcagttaaggaactatcacaactgctcttttcg

SEQ ID NO: 10744 - DNA, 680 bp, Diabrotica virgifera
catatctcttgaatcatcattgtaaaggtacgtacccatacgttggtgctcgtgtagctgctcaaatgaatatgcgctcccctacataaaaccacaaaccggttgaatcgaagagagtgagcggctagcaccaacgtatccactttgtggaactgctacacggagcactaacgtatggataccttaagacatggtttacctaatataaccatccatgaaaggctccagtacacaccactgagagagtcggctgtgaataagaccagaaatttcttccaccaggccacaagaagactccttaagaccagagatatcctcgccagaaaaagaatgcaaaggatacatcgtgatactcataaaccgattaaccatccaaccagggtccagccaagtggttgtcgaagacagccaagcagtgtagtaagtatgatggtacctacaggtggtacctactatggtaccggtagtacgaagaggattctcatcgaacgatgaacagagtttaggcaagaggatccattatccacggtggtttttaatttgtatttaaacaataatcagaaatagccgagttaaaacgaccggaaccgttttcaacaatatgaacatcaatgtctggccttcgctgatgatcttactatgctaacgaaaacaagaaaattaattaagaaatgttatag

SEQ ID NO: 10745 - DNA, 678 bp, Diabrotica virgifera
  SmartBlast Evalue=2E-24; Info="UDP-glucuronosyltransferase 1-8, putative n=1 Tax=Pediculus humanus corporis RepID=E0VMM1_PEDHC"
aagagaaagatccaccgaagaacggtagctacaaagatgtagttctaactggaatttttgacatgatgagagagttgaatccacctcaatggatggagtttggagcaatgaaccccgtagaaataatttaccgcacgcacgcccctggacacgccaccaccaactttacactgagacacccaaatttccagaaattgttaaactccggtcagaacttcgacgtaatcattttggagcagtttgtaaatgacgcccttaaagccttaggttgtcatttcaacgctcctgtcatacctctatccacgtgcacacccagcatgtgggtaaacctacctgctggtaatccagaggtaccatcgtatatgccagacctttaccaagattttcctacaaagatgaacatttggcaaagaggaatgaacagtttgtttatagttgcaagacggatcctgaatgacttcgatttttaccagtacaggaagagtttgtaaaatggaacactttcctcattgtgccaaaggtagagagttctattacaacgtatcactgacactagtcaaccatcacgagactatcaatggagcaagacctttcgtaccaagtatggtagctattgcaggattccatcttaaccctccgaaaaagttacctaatgaaatgcagacgttcctggacgaa

SEQ ID NO: 10746 - DNA, 682 bp, Diabrotica virgifera
aacaccgcccctcacaaaaaagatcattttctacagttctacagttttaaaataaagaaaatctcttgaaactgttgaaaaccaaacaaagcaaaattgtctagtactattgatcaatactattgtaaaaagcgttaaattttaaaataaaatgtgaaagattgatgattattttgacaaaaaatatttcaataaaatattgaaaattaacacatttaaggtacctacacatattttcatgctacaaaagcccataaactatgtagctctagatatgctgtttgacagaaactttcgtagcatcacttacgatactacgaaaaacgaggttcagacatggctgctgaggaatcatcaaaagaaatggagaaccactcaagggcaaatctagactgacaaaaataatcaagaatatcgataaaaaaactatcgaacgatttgatgaacctcaataaacgagagatcaaaacggtgactggatattgcaccatctatgtatacaaactaagtaagatgaatgaaccatagtgcagatatagacggagaggcagcgctgaaaaatctctttgaatttaccaaagctaaacttttcacagttcactactgtgattgtgtagagaaacacactgcggtcggtcaaacgaaacgcagaacaggggctactgagagggtatcaaagttg

SEQ ID NO: 10747 - DNA, 679 bp, Diabrotica virgifera
  SmartBlast Evalue=3E-31; Info=Luciferin-regenerating enzyme n=1 Tax=Luciola lateralis RepID=Q8TA68_LUCLA
aaggaagataggtggaggtgccttaaagctccaaaaatttgttttactattggtcatttccacaaatcagacatataaatgcctatggggattgaatatataattatttaaacaatagcaatcgactgtcccctactgattgtaaggaacttcagatattgcagatcgaggcacgactgaaaaagatatggcgcctataatagagaaagtattagatggctttaagcttgcagaaggtcctcattgggatactaaaaagcagtgtttgtattttgtggatattgttgaaggtaccattttcaaatatgtgccatccacgaagaaactcactaaagccaagattggtaaccacaacgtttcaattataatacctctcaaatacagaaataacgagttcatagtaactttgaacaattctatagctttaattgaatgggatggagaaagtacaaatataaattcagtgaaacaaatctatgaagtggatgctggaaccagcaatgtattcaacgatggcaaatgtgataaaactggaagaatttgggcaggtactatgggtgcatcgcccacatcgattggagaacttgttaaaggaaaaggaacattatacaacttctttaataacaaggcaacaccccatagagatgggattggtatatcgaatggcattgcatttgac

SEQ ID NO: 10748 - DNA, 681 bp, Diabrotica virgifera
aaatggcagaaaacggtggtgatgttggtggtatcccgaatgtgtttggaaaagatggaaaaattcccacaacagacgaacttctaaagatgttggaagggatgtcggaacttagtgaagaaaataaacgggaattaagagagagtattctaagcggaggactagctagagaagcacaaaatatggctgattctgtaaaagaaaacgttgcatctggtggtattttaggagaattcacaattttattcattttcctttcaatagtttttttgattctagtattctttggttataaactgtattcatcgctgatggaaaaagaaagaagaaaagaggaaaagaaacgacaaagacaacaaaagaagaagaaataagaaaatgtattgtgtgttgtaatatatacaaatttgactatcacaaacattccattatgtacctgttttttgactctttactacgtaactttgtggcagctgaacatattataaagtgactttccttgtattatattaaatatgacgtgacgtattagaaagtctaaaaaacagagcctatgagtataagagttaactgtacattttatgtcattttaagaaaattgtgttcaaagtttcttgtatgtgaaagtatctatgaagtctattttaatgttgtattgttgtaatattttatgctatatta

SEQ ID NO: 10749 - DNA, 667 bp, Diabrotica virgifera
  SmartBlast Evalue=4E-46; Info=Aprataxin n=1 Tax=Camponotus floridanus RepID=E2A087_9HYME
acaatatcgactacgatactcagtgtgttaaaagttaaacatattttgcagacaatggctaaatctactaaaacctcttggcaacaaggacttgttaaaagaatgaacgatcctgatgcagtagtcacttctgatgatttagtaacagtgattaacgacttatttcctaaagcagaggtacactggttagtcttgcccaaagaaaacattagttccctgacaggattaaaaaaggatcacatagacttattaagacatatgaaaagagcagctccagctattaaggaggaaggacacacagaaaaaattcaaaatgggattccatgccgaacctagtatgtccaggttgcatatgcatgttattagtgatgatttcaattccatgtgtttaaaacataaaaagcattggaattcatttacaacagattttttcttgaaaccagaagatgtaatagaaagtttagaaacccatggaaaagtttgtatacttactccagctcaatgtaagactcttatagcagctcccctgaaatgccataagtgtgactataagccaaaaaatatgccggatttgaagaaacatattttatcacacatataaacgaatatttattattttaaattattgtatattatactttgtatttgtaccgtgataccaacttta

SEQ ID NO: 10750 - DNA, 678 bp, Diabrotica virgifera
gaataagaagtctacaataaatcctgtgattcgtacacaagcagtaattgagcaaaccctaccacaaatactagtaagaatgaggtcgacgaaggaccgagtaacacgaataccgagacgaaatcatcttcacctgaaaaaccttccaccatggcccagaccctgaacgaatcagtggaagtacacagagaacctaccgttgaaatagcagttctggacttcatcaacgttctaagccggggagcagatagtgaggaagttgaggaagaaaatggtgaaccgcaaggtgaaagttctcagccaactgctgaacaattaaatgaaagcggtccgagtcaggaaagagttctagatgatgttaaaaagaataaaaaaagggagaaagttgatagtggcttgggggatgagatagtcgaaactcacagtgtttcatcagatgacgaaagcgttgatgatattcattcaagtagcgacgacgacgaagatggcgctcacaaagaaaaacgcaacaaacgtacccaaaagtccgaaaacaaaaatttgtcgtcgttaaaatggcgccgtatcgaaaccaatataaacacaattgtgactaatagcagcagcgataacgaaaccgaggaacctaaagacaacgagatgaagatgtatgacagcccctacacggaacacataaag

SEQ ID NO: 10751 - DNA, 678 bp, Diabrotica virgifera
  SmartBlast Evalue=3E-17; Info=Nucleic-acid-binding protein from transposon X-element (Fragment) n=1 Tax=Harpegnathos saltator RepID=E2C731_9HYME
attttaaagtagcttctacttgtgaagtgagtttctgatattaacattatatcaatttcgtgactaatgatgaaagtttttacctcaagacaatgtttggcaagcccgttggcgttccaaagtgcaatttttagtaacttattcattttgttaaattattgacgactatcgttaggaggtttagcagtgtggacagttgttccgcaaatcctttaaacatcgattttagttcagacaggtcgttagcaggagtaggatgcgttaaatttggtgcttgcaaagtattctgagatgtgcttgcttgaggtagttggtttgttactgcttgtgagtagctaatgcctggattgatggttcttccaatattactcgttagtggggttgtaggttgtttttgccgtagggttggatatgttttttctgcagttccttatatatagtacatcctttataatttgccgggtggtttccttcgcaaagaatgcactgaacatcgtcagatcttacttttcttgcacagtgttcagtagcatgatctccggtgcattttacacatctgggcctatgttgacagtatttttttgtatgcgcatatctttgacatctactgcactgtggaatttcccctccttgtgtatggtggttcaaatttaattttgtagtttagcaagtgttcaa

SEQ ID NO: 10752 - DNA, 681 bp, Diabrotica virgifera
  SmartBlast Evalue=2E-30; Info=Pol polyprotein (Fragment) n=1 Tax=Drosophila buzzatii RepID=A1BPH1_DROBU
ggagagtatcaagcttcttatcaagactaagggaactgaatggaaaattttagttcccaaaccccaaagattagaagtaatgcaatcttgtcatgagccacctacgtgtgctcactttggattctataaaactttgtcccgtattcaagaaaggtactattggcccaaaatgcgttgtgatgtgcttaagtttgtcagatcatgtaaagtttgtggtgctcagaaaacaccaaatcatgctcctttaggtaaaatgggtaagcagagagaagcccaattcccctggcaaatagttgccattgatctgataggtccctttgttcgttctaaaaaaggttatacatggttattagtggttgctgattggtttagtaaatataccttagtccatcctttgaggaaggctacggctaagagtattactgaatttttggaagataatgtcttcctgatgtttggtgttccccagtatgtgatttgtgataatgcctcaaatctgaacaaccctcttctaattaatctctgtagtaggtataatgttcagaaagtatggtttagccccgtgtatgcaccacaatgtaattttgtggaaaggataataaaactattggaacagcaatccgtatgtatgtaaaaaaccacgtagattgggacaagaatttagcaaagatcagacaagct

SEQ ID NO: 10753 - DNA, 679 bp, Diabrotica virgifera
ttaatgcccaggtacaatcctcagcacaagatgttctaacattaactgaaagcttagctccaaaatacgataatggagtagaagtagaagatatagatgtaactataagatctgaagcgacagtagatcagaatagtgccaaaagtgaagatatttcaactaaaaatatggctgcaaaacatcaacaagataaaagtgataacaaaattgattctcaagcaccaattgaagacgaagcagtagaaatggaagatacctacgccaagatgttgtctggaaaagaagcagctagaatgatagctgagataaagagaacagccactgacctaacaccaatgttacaaacaatgaaagagtataatcacaaccaggaattcgacataaaaagtgtggaacagcaactaattaaatgtagggaacaacagaggattgaattgctcgaagtagaaaatcttttgacagcaacatactcaatgtttgaaaggttgggtaccgaatttaccttcgactcaaaagggcaagattcgcttgcttttagtgattttttggatgacaacatggatgtggccacatcgtctcctttacctaatagctagttatagtgaaaagaagtatttagagctgcaaaagctatttgtgatatatgtcttgtctgtttaagcgctacatttcaactgat

SEQ ID NO: 10754 - DNA, 677 bp, Diabrotica virgifera
  SmartBlast Evalue=4E-51; Info=Survivin n=1 Tax=Culex quinquefasciatus RepID=B0W6D8_CULQU
tggctgaggaacagtggattttaaatgaagatggttatttaaatgtagatatagatgtaaaagaaataatttaccatccatatcttaacgtcatcttaatttgcacacaaaccggagtggtaagcgtcctagacgtaaattctggtgtaatccttcactccagctctctctcagcccaaaatctatcgaatgttaagtgcaagtacattccatctttggacaaagtgttattcacagatgggcaagcattgggtgtgaggtctgactacaatggtgttttactccttgacagtattcttcagaaaaatatcacagatggaaaacaggaagttaaaattgaattgccactttcagaggccataattttaaaagaaagtctatcgtccagcaatcttcatggacttgaacagataatcaacgaactcactgaaattatttcagaggcccaagcacatcataaaaaaggcataaaagcacaaaaatggaatactgtctgtctcaccacacctctagaagatttgcgatatgcaacgtctactacagtagcaaacttattgaccaacaaccagcacattcccgaactaggagtcgcttcggcagtacaagaacgactgtcggatcttcttgcagaaaaagtaaacgcctctgataggaaatctatggcgagcgaatggagg

SEQ ID NO: 10755 - DNA, 680 bp, Diabrotica virgifera
ccatatttctaatgtaattacaaacaaaaagaatgaagtaggtaatgaagtgaaaataaatgtttatttcgatttgaattagaagaagcaatgcgtatctctttctggcaaataaagtggagagatttctttaaataaaatttgaaatcttttatttttgttattacagtcacgtgatgctataagtttgtttgttgtagagtcgacaaaaaacacatttatcatcacatacgtttatggtttgcagcagtggatcatagcgtaagaattggtccttatttgtttttccatactggtaagctatcatgtcgctatcagtatctgaacagccccaactgtgatcccatactaagattgtctcgtctgcaagatatatacgataagtcggtgttggtgatgcagaatatgttaaattacaatcaggtacaagtatccaatcatagtattttaatccttgttttgcgtataaattgttaagttgatttgcggacaaactgtcaaatgttccatttgtaagtgctgtatctactccaatcaaaatatttgtttctacattcataatttgtactatcattctaaagtcaatctcatcataatattgtgcagatgcacttttagctagggaaaggccaacaaaaattataaatgctttaatagacatgcttacaagtggttgtaac

SEQ ID NO: 10756 - DNA, 678 bp, Diabrotica virgifera
  SmartBlast Evalue=5E-67; Info=PxPhosphoserine phosphatase n=2 Tax=Plutella xylostella RepID=A0JCK1_PLUXY
ggtagtgatataacagaaggaatattatgtaaataattttacaagttcactcaaactccattgccgttcaaaatacacaaattttccaaaaatatggcagtggaaattcaaaaccttgtaaggaatgcagatgcattttgttttgacgtagattctacagttatccaagaagaaggaatagacgagttagcaaaattttgcaataagggtgaagaggtatccaacttgactgccaaagctatgggtggtgcaatgacatttcaagaatccttaaagttacgtttagatataataaaaccaagtatatatcaggttagagattttctaaatttgaaacctccaagattgtctcctggaatcaggaaattagtggatcttctgcacaaaagacatattcctgtatttttaatttctggtggtttcaaatgtataataacacctgttgccggtcagctgcaaattccccttgatcatgtttttgcaaatagactgaaattctattttacaggtgagtttgccggatttgacgaaaatgagccaacgtccagaagtggtggtaaagctgtggtcataaatcatataaaatctgtttataacttcaaaaatgtcgtattgattggggatggcgccactgatcttgaagcagctccaccagcagatgcttttataggatatgga

SEQ ID NO: 10757 - DNA, 680 bp, Diabrotica virgifera
  SmartBlast Evalue=3E-17; Info=Juvenile hormone-inducible protein n=1 Tax=Culex quinquefasciatus RepID=B0WB13_CULQU
atactttttagttattagttttaaagtagttttaatatcattgccgaaatggagattgttgaagaacacaggtcattgttggaccgcattgctagtgaaaatgggtttaccaattacgagataatagccagtcctggatcgaataaaggagataacttttcaggaattattaccgccgttacaatcaaaaacaaggaaaaaagtttggatttaattttgaagtcgtcccgtacgttctcagaacaatctaaagagcaccatattcatgtttataaaagagaaatatttatgtacgaacgaatttttaaggagtttaagaagtatcaagaggaacacaatattcaagatcctttcgagagtgtaccaaaatactattcaagctttaccgaggaaggacaacacagtttagttttggaaaatttaaaatcacaacagtaccagttgtgggataaaaaagtcccaatgaatccagaacatatcaaaacagtactcattgagtatgctaaatttcatgcggtttcattagcaatgaaacacaaaaatcctgaattatttgaaacactactgggagagactaatcttgataatccaatgcacaagctctttgatggtgataataatgaaggccgcgagaacattaaatcattttttagtgctactttatctatgggttacaaggc

SEQ ID NO: 10758 - DNA, 678 bp, Diabrotica virgifera
ggagaatacacatgtgtggggtgctagacccactagtataaagtagtacatggtttgtaagtgtcacttctgtgtacatatggtgtattctgtactaataagtatatgtattttttataataacggttttcattgtcgtactacctctaagtgtacacacaaagcgttttttatcaacttgacagattttagacatttatttacataaaaaaacttagatatcttttagtgtttcataattttaaagtttcacagttaatactgttgtattttttggcatttaccatttaaaaaagacaaaaatattaatcattgaccaaatgacggtgataatgatagttacatgtcaaatgtcgtcagagttacatgtcaactgtcgtcagagttacatgtcaactgtcattgatactgtcaactgtcattgatgtgtagcattgctgcgtgtaccgatcactgtagataataaaaacgttttgtctgtagacacaaatgaaaaaaaaaatgtctgggcagaaactttatgtctatttaccagttgttgcatttattaattaacttaggagctcaacatataaatataccgattattttttacatatccgtaggtgttaagatgctttttgcaattttttatagtcctgttgtatttttatagcttttttttagcgaaacatacgc

SEQ ID NO: 10759 - DNA, 674 bp, Diabrotica virgifera
  SmartBlast Evalue=9E-74; Info=tRNA nucleotidyltransferase/poly polymerase A n=1 Tax=Glossina morsitans morsitans RepID=D3TPV7_ GLOMM
ataagttaataaaacaagcatactgtacaaatgtacaactatttacgtttttgtaaaacaattttcttatattaaacaattttcagataagtagtttgtcaaaagttgaaagaattaaattcctaaggaaaatggcccgtcctaacgcaagggaaaacccggtgataatgaaactaaactcacaagaattccactctatattcaacgaggaattgcgaactttagtatccttatttaaagagtacggctatgaaattcgaattgcaggtggagcagtaagagatcttttaatgggaatgcaacccaaagatttagattttgccactacagctactccaactcagatgaaagaaatgttcgtatcggaaaatgttcgaatgataaatgccaatggagaaaaacatggcactatcacacccagaataaatgataaagaaaatttcgaggtaactactttaaggatagatgtggtaactgacggtaggcatgcagaagtacagtttacaacagattggctactagatgcactgagaagagacttgacaatcaattcaatgttcctaggtctggatggttctgtttatgattacttttatggacatgatgatcttcaaaaacgaaggatagcttttgtgggagatgccgcgactaggatccaggaggattatttgagg

SEQ ID NO: 10760 - DNA, 677 bp, Diabrotica virgifera
gccccaacgttcactgctcgacataggcctcccgttcactgcatatacccactgctttctgacgctgtgacttgagaggataggatttaacgaatagaacgacaaagaagactaaacaaggcagctcgacgggaaaaacgacaactgtccgttttatactctacagggaagcatcaaatattcaacgtaagaatatattagagtataacggtatgataaatctttttcttcttttttcatttagtgcattccgtacgttttttaaacataatcaggagaagttgttgaatttctgaagtctataaaagaatttcttaacaaaccttttttaattgtgttatggattatttttaagaatgtgtttaaaaggcagttcgcaggcttattgttcaatggtcttatcactttcaagcgcctgtcttttttgtaggactattaattgttacttgtgatttcaaccattctagcggggcaatgccttttctataactgaaatgaatattgttatccatttaatttttttcctcaattaattgaatgcctcctactggtgtttggtctaagcttaccgcttttccccatttaagctaaactgctcgtcaaaagttagggatatagaaaattatgctcattttcatagctaattttttcgagaacagattaacggattccactaa

SEQ ID NO: 10761 - DNA, 679 bp, Diabrotica virgifera
tctatttccctctgtaattctttgttcctttgatgtcgagcaagcaattctatttcggacaagtaagctaagctctcagattttatgatagccccttctagttctggagcgagcttgggtagggcgttttgcttcttcttgcgaagcagtgaatttagtgtccacccagactggggaggggtagatttaaatgtagacagcttttccttgggttccacatcagaaagtttctcgctggttttgttggtctcgtagtcggttatcaacggggaatgtgtattgtttgtactattataatctgataagaatgaagaattatctatggtatcagtataagggctaactttaattttggtagtattaactggctcatcgccggttattttgactagtgtaacggatttgcctttggtgttattgggagaagaatataatgatatgacggtagtagatttagtgttatgaatggagtataatgtaggtttagtatctggactacctccagatatactggaagctgtggaccaattaggtccgtgggttggtgaactgtaaccggaggtgctttgggaatcggggtagtgaacgataacttttgcacccttaccgttcgttgacggcttgaaggtatacaattcgggttggcactcagttagaggagaggtaatctcggctaggg

SEQ ID NO: 10762 - DNA, 680 bp, Diabrotica virgifera
  SmartBlast Evalue=3E-44; Info=Cold shock domain-containing protein E1 n=2 Tax=Formicidae RepID=E2B5T4_9HYME
tatcgtaactgtcaaatcagtttatatttcgaagccatttcgaagaatatcaacaataatttttttataatgtttagggtatcaggagagaaacgagaacagggcgtggtgtgctccgtaaaggaaggttttggtttcttaaaatgtgtcgagagggaggcaaggctgtttttccattttaatgaaatactagatgtagaacgcaccaacgaagtgcaagttaacgacgagtttgaatttactgtggttcaagatcaaacaagctcgagtatgttttctaacaatcgacaaagtgccattagaatgaaatggttaccaccaggtactgtacagtttgaaattagaatagagaatgagcttacgggtattgtaacaagtgacttaccattgagcaattggaacaacagaagtcctacaaagagccaaagcagtgtgactggagaaacaaatagtgaatgcggattaataggttactgcattaacggaatcaaaaagactatttcattctatgccaaggattgctgtgttaagcaagttccaagagttggggataaagttcagtttaatatcaatcaagttaaaagaaataaagaatttattgcaacagatgtggaagttatacaaccagctgtacaaacaaatggaattaagcacagcatctctagaacctctacagggcc

SEQ ID NO: 10763 - DNA, 680 bp, Diabrotica virgifera
  SmartBlast Evalue=6E-41; Info=Low-density lipoprotein receptor- related protein 2 n=1 Tax=Camponotus floridanus RepID=E2A7C9_ 9HYME
gattatcccacttcaattgtatctgatgatttaatacctattgaaacaacaacactagagccggaaaagaagtcctactgcaataattgcactttcctagtggaaatatgcatgaaagtaaacgatacgtccaaaccagagtgtgtccaagtcaaagatgttgcagatccaacgggatgcggaggattgtgtcaaataaatacccaattttgccaaatcttgagccaaaaatacaaagtttttcaatgctccccccgaaaaactgtcctaaattgtgatgataatcagtttaattgtggaaatatgtgtataagcgaggagaaaagttgtgatggaaagctggactgttccaatggatcagacgaagaaaattgtgactgcgattatacgacacactttcactgtcaaggccgtctttcttgcatccctaaaacgtacatttgcgacaaaaaaattgactgctgggacggcagcgatgaagaaaactgctactacgaacatatctgccaagagggggaataccattgtaataatggttattgtataaaatcggagcaattgtgtgatggctttccggattgttctgataactcagacgaaccatctgggtgtttagagtattatttgtcaacaactactgatgttacaagtccggaaaatgattatgattaaaaactatg

SEQ ID NO: 10764 - DNA, 680 bp, Diabrotica virgifera
  SmartBlast Evalue=9E-32; Info="Alpha-1,2-glucosyltransferase ALG10-A n=11 Tax=Eutheria RepID=AG10A_HUMAN"
ttctcttggcctcattttgttggggaagtttcgagctttctagcatttgctaggaaacataaaataggtgtttttgtacttactttactaggatttttaattgttatgcttaatacccaagtacatccttatttattggcagataatagacattacctgttttatatttggaacagattttatcagaaatatgttttgtttaaatatgccatcgtaccagtgtacatatttgcttggtatgttattatcaaattgctttatgacaaagatgatataacatttttattcttgtacttagtttgtacaacgatagtattagttactcagaaattgatagaaattcgctacttccttataccgtacatacttttcagactgagattaaaaagcaatgccaataatgcatttaatttagttttagaatttgtaacttatttgttaattaattatataactttacaattgttctttaccaaagttgttacttgggatgattattctgagtttcaaagaataatctggtaagtgtagacaagaatacagtcctgaagtaaagtatttattaatgctatgagatgacaaataaaataccaagatatttttttaattttttatacacaataagcataccagcccactctagaaatgaaacatgattttcacggttttcacattatctg

SEQ ID NO: 10765 - DNA, 680 bp, Diabrotica virgifera
tgctaaacggtgggtgatagaatgctgtcgggaaataaatagtaggaaatatcttcattttaccattaagtaaattttttgcgaaacgtacaagaagggctacgtttcgcaaaaaccacaaattacccacttaaaagggatgaaaaggggggttccggggcaaaatttattaagatgaagttagtctcataataagcaccccttgatataccaaaaaaaataataaaaccgcacttttgtgtccattttgcgaggtccaacctctgtttcctacactgtaaagcaaatagtaaaatttacaaatagtttaataaagtacaacgtttcacaaatctgtaatactaatagaaatgtcaccaagtagtatgaggttaacaattgaagacagtataaataaatactttgaatggaagttttgaccaaatctacaaacaaaaattgtttccttcaatttaaacatccttaaagacaccactcaagaattacctattaactattttaggtttatttatctgaacataaaataattcgtccttatatagttgagaatgccaatagagaagtgagaaaattgccaataagagataaaatgttgccattttctggggaatgcagtatcttagtttggtctgcatccaccagagaatatttatagagaatcacgataatgactaataaac

SEQ ID NO: 10766 - DNA, 676 bp, Diabrotica virgifera
tgtacgagtttacatttttgatttacatgtgagtcgatcataaagtaggtccgagaacacgtagcagcgaagtaggaggatccgcaatgacaattttaggtctctgttacataatactttggacatccatcgaaaagcggctctcacctgctcaataattgtggatctaattttaccgcgaatctctgcgttacaacctgatatcaatctttttacgctttataaaaataaactttagcaaaacgttagtaatcttacttttaactagtaaaaggctccatgctcatgtcaaaacatgacatcggaaatttagtcttgcgcgttttttctgtgcatttttttatttgtacttttttccgaacacagttctgtaaattagccttcctttactaagcattttttgccatagctgtctatgaacaaatttgacgcggtttgtaagtattcattttataaataacattttgacaatgctgtagtttatttagtagaataaaatgaaaatatttttatattttgcaaaaaatatttattttgttacacacgttttatgttatgtctccgtctttaattaaaccatagcattttggagggtatggaaataaattaataattataacaattcatcttttatttggttttttgctagttttgattattaattcggtaaataatc

SEQ ID NO: 10767 - DNA, 675 bp, Diabrotica virgifera
  SmartBlast Evalue=2E-50; Info="Mitochondrial ribosomal protein, S34, putative n=2 Tax=Aedes aegypti RepID=Q17JQ1_AEDAE"
ctcaattattcattgcaaataaaataaaactattttaaagaattaaaatgccttataagtatataggcagaaccaccgatttcaaaggaaaatctttgtgggaaatattagggaacttaaaaaattatggcattggacgaattatagtcagaagtaaattagaaagatatccagagaaatcttatatgaaggttctaaaagttgagacgttaccaaatcctgaaaacccatcaatggataacactagaaaaattaaagtttgggtagaagacacatttagaggcaaaactttcccggaacctgttcttattgaaggtatcagttacaaaacggattatagattattaccaaaggatgaagaggaagcatattgtaaaacgtcagaatataaatatcaaaagattcttcctaaaactatggatttccctccgcttcttaaagaaataataaaaaggatagcaaaatctaaaggagaaaatgttacagaagatccaaaattaaatatattttacaatcaaacgagtttacaacaaagttatagagttgcaggagaaaacgaaaaaccaactgtagaaatagtacaaagtctaggcactcctgtagctcctagattgtatgaaggaataaaattgtagaaataatatgaatataattgtaatgttttgtgaataaatt

SEQ ID NO: 10768 - DNA, 678 bp, Diabrotica virgifera
  SmartBlast Evalue=2E-59; Info=Putative hemomucin n=1 Tax= Schistocerca gregaria RepID=B7VF66_SCHGR
aacgggaatcatatatcacccattgctaagaccggtaaaccttgtaaagcacaatatgaggagagaatttgtggaagacctttaggtttaaagtttcacaaaggacttctgtatgtagctgatgcatattatggtatcttgtctattaacattaacaatggcaagaaaaaggtcttggtttcaccagatcaaataatcgatggcaaacagtccaaatggtttaatggtatagctgtggccaaaaatggtgatatcttttggacagattcctcaagcacatttcatctggagaatggattatttgagctgttgtcggatccatctggtaggttagttcattatgatgctaaaacaaaaatgaacacagtgcttatcgaccaaattcacgcagctaatggtgtagctctatctgatgatgaagaattcgttttagtatcagaatctgttaccggtagaattcttcgttactatttgaaaggttcgttcaagggaacatacgatgttttcatcgatagactaccaggtcttccagacaacattaattcggacaatgctggcggattcttagtggcacttgttacacccatcgacgacgagcatccaaatatcgtgcagattctgcagcaatttcctttggctagaaaattcatcgtcagaatgttggggattactcaatgg

SEQ ID NO: 10769 - DNA, 679 bp, Diabrotica virgifera
  SmartBlast Evalue=2E-36; Info=Conserved insect protein (Fragment) n=2 Tax=Aedes aegypti RepID=Q1HQL4_AEDAE
aaatatctccggcaatcttcacagtatcattcatagtttgtatgatatttttggaaattatccaaaattcccgtgaaactataccaaaaatcgtcaatcacttttaaaaatgtcgtctccaccttctagaaataccgtttccttatgcgaaaggtttggtattagacctttaaattgccgaaatattttatattattatttacccgcccagggggtagtaagttacactgcactttcaataaatgtaatgaacccatcgttggttttcagaatattttccaaaagagatgttactaatatactattgggacaaacgctgttaggttctggtctatatttatataaccgaccacatttaaaagctttacccacaaaagagaaaattctatacagctcatttggtgctgtcactttctctttaggatccgttttggtgtgggctatcttcagaagtgttgtcccccaaaatgtagctttaggaacagtatgcggtattggatccggtattgcactgattaaaattgcaagaagttatgtagaacatgtagactctcttgtagcagaaaaagcttaagtgattttgtttcttttttatacattagtgattatgagcatctaataatatatgtaacttatgtgaatctagattttacttaataataaatgttttttaacattt

SEQ ID NO: 10770 - DNA, 679 bp, Diabrotica virgifera
  SmartBlast Evalue=8E-10; Info=Transposable element Tc3 transposase (Fragment) n=1 Tax=Harpegnathos saltator RepID= E2BZF3_9HYME
gtaccaaaaggaaaacaaggaaaataatttaagaaaataataaatatattgaaaatttcgatataccattaccgttacagtcatagaaataattgaattatagagtcaagaaaaggcaagtatcactcgtttaaataatatgtgttaaaaccatggttttggatgacactcattattcgatttggtatagacctgatcagttttggacgtcactttgcgaaaagtggcttttggagcaggtatatgacatcttacatactgtttgaaaggactccatatatgctcaacaggattaaggtctggactttgagcaggccagtccattttttgaataccaacgtcttcaagatactgttacaatccttgctgtatgtgaactcgaattatcttgccacataacgcctaggactggtccttgggcttgctgaacatggctttggagcattctagcaatttgtgtctggtctttcaatgcagcaatagtgagaacacgatcttctctcactgttatcttccttttggtaccagtactggatcgtcattgatgagatcggttctcaagaaatcgttggtaagtctctgcacatttggacgactaacattcaattgtcttgcgacatctctttggcttgctccattttcatcattattaagaaataaatttcactgtaaggaggcc

SEQ ID NO: 10771 - DNA, 678 bp, Diabrotica virgifera
  SmartBlast Evalue=3E-84; Info=Xanthine dehydrogenase n=2 Tax= Calliphora vicina RepID=XDH_CALVI
ttcgaattatttaagtagaagagaagcagtgaaagaattcaacaggttgaacaaatacaagaaacgtggtctaaacatcgtcccaaccaaatatggcatcgcttttggtgtcacttttctcaaccaagctggcgctctcgtactgatttactccgatggatctgtcttaatatcacatggtggtatcgagatgggccaaggactctacacgaaaatgatccaagttgccagtaaagctctaggaatcccggttgaaaagattcatacaatggaatcaagtactgacaaggttcctaatacctcacccactgctgcaagtactggatctgatttaaatggaatggcagtactgaatgcatgcgaaatcttaaacgaacgcttaaagccatacaaagaagccaatcccaacggaacttgggaacagtgggtgaatacagcctattttgacagagttagcttagcagtttcgggattttataaaacaccagatcttggatacgactggaaaactggccaaggcagaatggtacaactacttcacatatggagttgcttgtagcgaagttgaaattgatacactcactggagaccatcaagtgatacgaactgatatcgtcatggatttgggagaaagtctaaatcctgctatagatgtaggacaagtagaaggagcattta

SEQ ID NO: 10772 - DNA, 678 bp, Diabrotica virgifera
  SmartBlast Evalue=3E-19; Info=Rho GTPase-activating protein RICH2 (Rho-type GTPase-activating protein RICH2) (RhoGAP interacting with CIP4 homologs protein 2) (RICH-2) (NPC-A-10). n=1 Tax=Gallus gallus RepID=UPI0000ECA527
tgtccgaggaaggtctgttccgtgtcgccgccagcacatcaaaagtgaaaagactgaaagccgccatcgattcgggatgcttctccgttctcatcccggagtacagagacgttcatatcctgtcgagcttgttgaagttatatttaagagaactacctgaaccattgttaaccgatcatttgcacaaagagtggctggacgccgtacaggtgccagaaattcaccgtttagaagtagtaaaagacatcctggcgaagctaccgcaggaaaatcgagacaatctagcgtacctcttccagttcttttccaaattggccaaacatcccgagaacaaaatgactgcatcgaacctggccatagttctctcgccgaatttgctcggtaacaaacacgaattggacgtgaacattgggaattgcgtcactgttaacattctagtcgaactgatgataaaagagagcgaccatttgttccctgatgatgtcagtaaatatgtgagcgtgatggacatttttcaggaagatgatacttccagtaattttaaggctagcaattcaaatttggattttatatggatagtccaaggccgaatcaaagaaagaagaaatctgcacctgtacctccaatcaacaacgccaaggtggacagcacgcccaaattggtgccttcatcgccaaa

SEQ ID NO: 10773 - DNA, 678 bp, Diabrotica virgifera
  SmartBlast Evalue=1E-112; Info=Mitochondrial Rho GTPase n=2 Tax= Tribolium castaneum RepID=D6X1S3_TRICA
ccttcaacccgagaagactggaggatgcttttgataaaactcctgcaaaaggtggattttcctgacgctgacggaccaattacgtgacactggtacacgtttctactggattgtttcttggctaaatctgtcttcttatctcttgttacttgtaccgctgtcacctgtgtctcgttttcataaatattgtaccccaggtaagccaaatactcaaaagtcctgggtagatccaccaaagtcatcaacgcccattgacacatgtacccctgatacgtaatccatcccttctcgttagttggcaccatagagctgacgtctgggccccacgcgggagtggggcacgttgaaaacagttcttcgtattctgacggcgataaggctttatctctatctttatcgaacctttcgaagaggtgtgtgaggaactgttgacctttgaaagacagctctgtggtagatccggtaggaactttcaaacttggatacaaatactctttggacatattcaaattatcattataaccgaacttccttagcacagtccaagtggtctcgtttctgcctctctgtatgaacaagttgtgtagatataagaagccatttagagtgacacaattgtggcatactccgtcctctaggttctttctcaacacggctttgacgtcatctagcacttgt

SEQ ID NO: 10774 - DNA, 678 bp, Diabrotica virgifera
  SmartBlast Evalue=9E-10; Info=Mariner transposase n=1 Tax= Bombyx mori RepID=Q1HPJ3_BOMMO
cacttcagtgcagtacggggtttgtctttttagtcctgcatatagccgcttagagggcgccaccaattaaaccttctgacgcaaatgtaacctcaatcttttgttggcatattgcgataaaagtcatgtagatacaatgaatttttgaaactagtaagttggtcgaaaaatggatcttagacaagaacattttcaggcaataattttttacaatttttggagaggattatatcaacagcaatgtcttgctgaaatggtttctgtgagaagaacgctttctgcagagaaagcaacacacaacggcggatcatccatcaggacaatgcaagtgctcacactgcccaaaagacaatagattttagagcttcaaagtatcaaattgttaaaccagccaccatatagcctcgacccaagtccatcgatttctgcacattcccaaagatcgagaattcaatgcgtgggagcgattccagtcgccaaaagaagccatcgatgcttttaaacagcgattttacaggtgtcaacttaagactgaataactgctttgaacgtatgcaaaagtgtattgatattggtgggacatattttgaaaaacaataaagtgctttaaatctatacagggtgtcccggaaaatagtgcgttccttaaaggtgtgagtagaatgcaccatttaaaag

SEQ ID NO: 10775 - DNA, 672 bp, Diabrotica virgifera
ctctcttatagagttttatgcctggtacaccctattacaatagaaacgttaataaaacataagtatgtaagccagtccttatggaagccatcagggaaaaaatgccaaggtctataatagcaacagaaaccccgatacgatagtcaaaccgccctcactcccggaattgattttttacattatatgtgtaaaaactataatcagcgtaaattatcaaattttaagtaaaagttacacattaattttaagtgaaatatgacattttacgtcaaaatgtgacgggaaagatgccattttaagtgtaatgtgatatataaaacgtaaaatttagtaaaatataaagtttaacgtcacctttacgtgaaatgtgacagtaaagagatattgcagagtcacttttgcacttgcggtattacatccagagacacgttcaccgtagacaaggcaaactgaggcaaaaaagcgtaacgcgcggtagtcgatcggtggtctatctatctctttttactaagcgataccgctctatgacggacaaagatggctagaccactcaaaatgaatattgatcaatggtgtccttgatatcggcgttacacctcgatgcacagagcggcccatagctagcctaatctacaggttattatatgtatgattacagcacgcgttattttg

SEQ ID NO: 10776 - DNA, 674 bp, Diabrotica virgifera
  SmartBlast Evalue=9E-10; Info=Mediator of RNA polymerase II transcription subunit 25 n=1 Tax=Camponotus floridanus RepID= E2A8W0_9HYME
tgtgcttgagatgttgcaatagctatttgcttgcgatacttgagccattgaggtctgtatggcgatttgattctgtggcattgaagtctgtacgttcgattgtggaggcatgtttatcttattaattggagaattagtagtcatttgaccaaattgatttacaccagtcccagatattgaagacgggggctgcgtcagctgcgcaatgagcgcacttccttgtgtagtatttacttgctggtttgtttgagggatatacggtctcacctgttgaatcggtggtgccattggccaatggggagatgttctgttaatattaacatgacctgtggcatgataaccaggcggagcgttaacttgcatcattgatatttgattattggccatcattcgacctcctggtacatttactacacctactcctttttgcggtggcatattcataccttgggttccttgtggtctataaacattattctgtccaacattcgcccctaccccagcagtggtattaaccaaaatgttagaattcggctgtgtagtacccggtattggactgtcacttccctgcaatggacttggcaatgacgtcattgtcggcataccagtatttgttatttgtgtctgacttgtggtcgttgcccctggtggtggacttacagaacgttccttta

SEQ ID NO: 10777 - DNA, 664 bp, Diabrotica virgifera
tggttagcatgtacattgcacgtgagtataaccgactattttaaccctagtcaaaatttcaacatctttgccttttttatcaggttatattcattttaggtaaacactgatgatgactggtaaaccagtcgaaaactagttatgtgaatttgatgttgcccttttaagggtttttttaaatataccttttatacaggattttactgtttttttgtattacatggtatacagccaactacaggaaaactttttccttgtgggttcagcaaaaagttacacatcttgagcgtccggttttggggggggagatgggggagaattcggtaaattagtaatcttttacgtttttcgtcaatattccaaaaccatgcttcagcgcaaacaatgccccatacaaaacattccacataaaatccaaaacaaaaaaggtcctatacataattgttataaaatcaaaggttccagagctacggagggtgaaaagtggaggcttcgccactctttatattatttgggcaattgatgatgcttttgggtggtgaggttgacgtttcttcaatggcttatcactaacttactatcggccactgaaatagcaaattttatttacaaaacacaatcctgttacaaagaaattttcatcagtaataatattataaattgc

SEQ ID NO: 10778 - DNA, 677 bp, Diabrotica virgifera
  SmartBlast Evalue=1E-81; Info=Groucho-like protein n=2 Tax= Tribolium castaneum RepID=D6WCN6_TRICA
gtccctctttgctcagctatctagaaaaatgtacagggtgtcaaagtacaggaaagtactcgataaatagtgaaattttgacagaagctgaaaacgataaacagttacgccctctgtagtaaacatctacaatcttttatgtacaatagaatgcaaaaattaatatagtcaaagacgcttaagtcacatggtaaaagtttttgtgtatatttttacaaacgcgcgcacttttagtatatcacttcgtacactgtcgccttcttgtctccagatcctgttactatgtatttgtcgtcagtggagatgtcacaactcagaacacttgaggattctttggattggaatatactggctccatatggcgtcctccaagcattcagtaaattatctttaccggtggaaacgaaccatttgccacacgttgcgaatctcaaactaagtacacagctctcatgtaaatgcaattgatatttgtctgctttcgtagcgtgcaacacttcgacgtgagaattctccatcccgactgccagccattctcccgtgggacaatatcccaaagagaagatctgagaactgaagtcgtgttgctgtagttgcttgccttctcgaagatcccaactgcgaaccgtattatccagtcctcctgtccataacttggtaccatccgaagaaatatc

SEQ ID NO: 10779 - DNA, 669 bp, Diabrotica virgifera
attacaagtttataatataataatgcaataattaatgcgttaagcgagttttttttattgtgctacttattgtgctattgtgctagttattctcgatttcatgaagctaaaagtaatacatgcgtgatttattaatttcaagtcttaatccgtgaaataaggtattggatatataataatctattaattaccaaaatcgcagagttatcttaaagatagttccagttattttccaaaaaaggaatatcggtttttgtgtcgaatggtatatcaaggataatgtaaataatcttcgggacctaatttaaaaggttcattaaactttacagggcatagtccctgtatttattggcactcgaaaatatggaacatttattagtgatttattactaaaaaaagtactacgtcactggatttagagtgcctccgacagctgtgaccaaaatttgataaaaatgtttaatgaacaactttaaaaggcatcttaaaagattattaaatttcacgaataaaactgtattttttaaatcattttgactggtgttttattgacatattcgcctgaatatttgctaaacctgctgaaaacggatcgagacccgtatgaatttgagtgaagtcaacgcgataaataacttcgataagatgctggttaaatgattaaaacgt

SEQ ID NO: 10780 - DNA, 678 bp, Diabrotica virgifera
atttaattgtggcttatttcccatctaaatagttagtcccatattaacaatgagatgcagtcaaaaatttgtaaagccagtgtaaaacccataatcatatatgcaccaagaacaagacccgacacagccacaacacaaaggttactggaaacggtggagataagaatattgaaaagaattaccggaaatacactgagagatcgaaaaaggagtgaagacattagaagaaaatgtaacgtacagtaataaacgagtggagacactgaacagaaaaaaaagaatggaataaccacataagcagaatgaagagacccgtgttgtaagaatagcaagagataaaatcaccaattggtagaagtatcggacgaccgcattccatggaggtatcaatccgccaatgaacaagcagaagaagtagtgtacatatttgctttaccaaatctgggacatgcaatgagaacacagtgatatgaaacgctagattgataatgcaggtaaatataagagaaggataataggacgaaggagagtgtcatagttaaaagatttaagggactggtttaaatacagtgcaatagcactcttccaagaagcggtagatagaggagagatagttaaacggtacttaaagaaggaccattgtgtattaagatgattcttaacacgagaattcatgct

SEQ ID NO: 10781 - DNA, 669 bp, Diabrotica virgifera
gctgctcttctccagaagtccatttctgttcccagtaacattttctctgttcttttttggtaccctaaactttttgtatacagtagctttacactctcatggtttaaatggtaaaatggcataggttgtaccgtacttattttatttattaactgatttgcctcgatgtgctcttttttttcgaatctgtttgggagtaccgctttaacttttagcagatgatgatcggtgccacatgatggccctctggctacccgcacatcttgtattttaattgtagttctctgtcttctctgaattacaaatactccgcacaatgcggcacaaaccttatggaaattgggtccccgtggatttagttcatactttgggaatatacctcctgaagcatcctgataaaaaattctcatgggcaaatctcgatcgtatggaggattttcaagatatagaggcacaaactcggaaaattataagatttactgggtattccaattccctgagttactggttatctggcaacatgtagaagtttggatcaggaaaagtactagtagtctaggattttttcctggctatccaatggctacttttactttgaccttgaccttcaacggacgtcatcttctggagtttcaagggttttcagcattaaattgatataaacagatt

SEQ ID NO: 10782 - DNA, 678 bp, Diabrotica virgifera
atgagggtttttattttggacctgatacaaaatacaaaagtgaaaactcaaaaagacaatggggcacatgtaagcagataaagtcatgttctaaagagaacgaaatctactggcccaaagacggaaaatgctacaaaaaatttagtagaggaccttgtgccaaaggacaattgattatcgaagattctaaatcaaagatcccgatatgtagttgcgatgatactcaattacacgaatatagacattatgacaaccgctgttatcagcattacacaaaaggaccttgtcaagaaaaaggccactttgttccttccaggaaagacctgtaattgtttcaacaacttggcgaactaccatcaagaaagtcaacaatgctttgaattaggtacagctggtccatgctcgtcaggtcaaaaatacgacttacagttgcctacagatagccacgcctcctgtcattgtaaaccaaagtacattccttaccaaaactccacgtcttgttaccgtctatacacgaaaggtccttgtgccaaaggccagattcttctagattcaaatacctgcatccgccaaccttgcgaacgcggtagcctctattttccagatgaaaacaaatgctaccgaatagggatacgtggtccttgtcccaccaatcgagtagtagcgttcgacttcgac

SEQ ID NO: 10783 - DNA, 675 bp, Diabrotica virgifera
  SmartBlast Evalue=3E-13; Info=Putative uncharacterized transposon-derived protein F52C9.6 (Fragment) n=2 Tax= Camponotus floridanus RepID=E2ALS0_9HYME
attggaaacagaataaaattggctacgagaacttattattcactgtataaaaatttcctaaacaaaaaagaaatatcgaggaaaaccaaaatgacagtatataaaactgtatatatgccaattacaatatatggggcagaaaactgggtacttaatgacagacaaagaaaaagattacaagctacagaaatgagatacttaagaaaagtggtgggagcaagaagattagacaaaagaagaaacgaagatataagacatgaattacaggtaaaatcgctcaacgaaaaagttgaagaaaagaagttaaaatgggctggacacatgataagaatgagtggtgacagacaagtgaaaatgacatgggaggccaaagcagtgggtaaaagcagaggggcagaccaaggaaaagctggaacactagtgtaaacgaaatactcaagaaaagaggaacatcgtggcaagaagcaaaagttttagcagcagataggaagaagtggcgtaaatttgcagagagtattatataaaggaggaatcctcgacacctaatggtaaaagaggcaaccgattatgtatgtatgtatgaattttttctatattgtcactttgacgtttttgggtttttgctttacgtgacagaatcatatttttgacgtcactagagattggaaatgccgc

SEQ ID NO: 10784 - DNA, 665 bp, Diabrotica virgifera
  SmartBlast Evalue=6E-16; Info=Peroxisome assembly protein 12 n= 1 Tax=Camponotus floridanus RepID=E2AHF3_9HYME
gagaattccacatttgtagaaactgcaagaaaaaagcacctacttccaatgttgtggaaactccatttcgtattaacccaaaacttatctgtggtaaacttaggctgcctttgaatagcgatgtccaaaatcctgagtggtcttcaatatctttattgtatactaatttactttctattaattgatatattggtgtctgatattctgtgtgctgtgccatatattttatatagttatgtattgtgagcagcccatacattaattcaaacgtggaatatgcaaatagcaataattttttcatggtgccttcgaaatcctttcgtatagacccttcagcattttctatccttattatagctactttttcatctattttccttttaaaatatggaatacaactaaaaatattaaagacaattctctatgccttttggttatggggtcaccattggaagatacccgtttcagtccataaaagtgttcagcaaatgatgaatcatagtgagctaaatagtgatactgtaataaaccattcaacacaacaaaagtttcttcgaaatacttattcaaccatccaaatttgtgcggaatatttgtggaaagaccaaagcaagtctttgtagagctgggtgcaaggtttcattgaggtaatgttgagcgataac

SEQ ID NO: 10785 - DNA, 672 bp, Diabrotica virgifera
cggccgagctcgaattccattgtgttgggatcgtcatcaagttcaggcaggcaataccctccgtactaccaaccgggcaccggtcgttcagctgctgagaattcaacgagtacttcgcaacgtagagcgcatagaccagtcggctacagacctcagaatcctccacccggctttataagtcctactggtaccgccaatccaaatcttagaaatctcaacaacccccccagaacgagagttcgcaacggtacaccgtacagaagaaggaggccaaactatgctagactccaaaattcatcaacacagtgacgcacttgatgtgccatagatttctaatgtaactttattgtaattaatgtacagtatataatataagaaaatagtagcttatataaagctttaaacgacttgtgattcctatatcgctgtatgtaagccgctgttgaaagtatagatatatttaacaaattttttagttgtaatttcgcgagaaatgtaaaggacgtaaaaaatcgactaaaagatgaccaagcatagcttgatctatggtgttatgtagccaacgttttaatttggtgccatacttttacactttaaataaatttgtattttttaagcttacgacaataacttgtgattccctttgtgtgtcatattttagatcttaagcac

SEQ ID NO: 10786 - DNA, 675 bp, Diabrotica virgifera
  SmartBlast Evalue=4E-16; Info=Pol-like protein n=1 Tax= Biomphalaria glabrata RepID=A3FMR3_BIOGL
taatggggtatagaagagtttttctttctacctcatatataggattgattttatatctaattatgtttttgttttttgagtatatttgtatatgctagtgagtaatcaggtatgaccttgttcctccagaatctattgtttgcatttattgcttcgtttagcttatttagactctttactatgatattgtttttttccggcatttgtttgagtatatatttatgtgctagtatctcccttctaacttgtaacgttgttactgaacattctgcttgcaatattaagatgggtgtagaacgtagacaacccgttacgattctcaaggcaacattctgtacttgttccaacctcatcatcaaacttttactgcaggggtttaaaagattggctgcgtaatctaaatgagatctaactattcctttgtataaactcaaaagaatgttcgggtcagctcgccattttgtaccacaaattgctctcatgacatttattcctttgtttgctttagttatcatgtcgttaatttgaattgtcatattcaaattgcactgtaaatgaaatcccagatactttatttcattttttccatggaatttccatattttgatatatcaaatgtgggaagttataagcctgacttctttttcaaatattattgcttttgatttgtgtgct

SEQ ID NO: 10787 - DNA, 677 bp, Diabrotica virgifera
aatgtttatttaataaacagaatattggcaagatcatagtaataataaataaacattattaaaaaaaaatcaaaacacaaccagcaaatattacacaaataaaactattttttaatagaacataaattttacagtaaaaggttagatattagaacataatagaatctggcacatacactgtttttatcatctgttgatataagtgtagattttagaattccccattaaattgagattcaacagtttcactgtatgtaccatacacgaaataatttaaacccgaaatctgcctgttacaacgatacaacatatgatatagaaacttttattctttagtttgatatttttgcattcgtcaattatgaaaattgtaagtaacaaaagagtttctcatgattgagtacacatgagaaacacatgtaaacaagcacgaaatttgaactatttaaattatatttcagacttactatcggatattaccgatacctcgcgggtattacgcagtttacccgggtaatcctaggtttaaccgttaatctaactttacccgtcacatatatgaagggtacaggagaaaaatgatcaaagtcacagaaagtataaaatagcagttttaaaacagggaaaaatgatcgcagtcctcacaaatgctgataaaatattaccccaacacaatg

SEQ ID NO: 10788 - DNA, 676 bp, Diabrotica virgifera
  SmartBlast Evalue=1E-29; Info=FAD oxidoreductase n=1 Tax=Culex quinquefasciatus RepID=B0WCQ5_CULQU
acataacctataatttacttttaaaaattaaaacttaaaagtaaagtaggatttagaatttataaataaatagtaataaataaaatgcgcttataacaaaaacaaatatgaattcaagaagtttgtgcaccatttgtaacaaagtatttcaaaataaaagatatttacacaggagtattcagttaaacaaaagacaacatgaaaatcccttctggaggactattagaatattaggtgatgactttaaaaagtttaaacaacataaagagcctacagaagaagaacaacaatggctcttaagaaggcactttccaagacatgcagatattgtaattgttggaggaggagctgtaggcagtgccattgcctactatttaaagttaaaatcaaattacgatggactgcgagttttagttcttgataaagatcccacatttaagaagtgtacaacagcaatatctatgggagcattaacacaacaattctcattgtctgaaaatattcaattggcatcatatggtgcagaatttctgaggaatatcaagacccatctggatgaaagtgttaacataaattttgaacccagtggttatctggtgctggcaagtgaaaatggggcatcacagcttgaagacaatataaaattacaacaagaatttggagctattaatatgtt

SEQ ID NO: 10789 - DNA, 669 bp, Diabrotica virgifera
taatacagtggaaccccgataagtcggcccccgataacccggaagtccggctaacccggaccgattttcatcagacaaaaatttaacaaataaacaatttaacaattttatcaaataaaaatgtatgtaggcaaataatatttgagagataatgtgtatttgtgtaatttgaacacatataaaaatgtacaatagtaaaaatgattcatgcacacggcggcaggcagagcgaccgtctcagcttatcggaaagaacaggcacctgtctgtattccttttcctttatttatgtcaaactgtcttagcattgtttaaaatagacgtgactatttaaaaattcttgtattgtgtgtagtacagcctattaatcacttccgttctgtaatgtaatcgtgcttcagattgtgtttgctttgtctacgtaatggtaacaaaacgtaaaaatgttgcagtgacaatggaaaagaaactagaaacattaggtaggattgataaagacgaatctttaaaataaatttattgcagcatcataatatgatattatgctaccataggtctggatcccgcgtatgaaaaaaggaattgattaatggcaggctgaaaatttgttaatgggttgggggtgtctggtcggatagactttgatatgtgagagcactggaacggggg

SEQ ID NO: 10790 - DNA, 676 bp, Diabrotica virgifera
  SmartBlast Evalue=9E-79; Info=Frizzled 2 n=1 Tax=Tribolium castaneum RepID=D6WG76_TRICA
ggccccttctcccgcttgtcatacgtgactgagcggtggttgtttcaagacatggtggtggagatgatgctggctggcagaggcaacactaccagtgggaccgagaagagaagcactacctggaccggccattagaaaaccgggcgggggaggtttgtttcggttcttgatcaaagctgcgttagctcccgacagatctgatcttcctaatagtcttcttgagagtcttctccacgaatcgacggtctttcccgaccaaatccaaacccctgaagtaatgcctacagctaaggccatgaaatatttgagcattaagacagagtatataggcctctccttcatggaaattacgttagcaggacaagtacaagctagagatttcatccattcttcatggaaagtgttttcatacaaatggcaaccgatgactattgtagcaggtacagtatataatacgctaaatattcctatgcgaatcatcagcttttctaatttgtcagctttggaaccagctccagcacctccttgctttttgataacatttcttattctaaacagcgaaacaaatccagctaatagaaaactagtaccaagtattaagtagaccaccaaaggagccaaaacaaaagtccataagttatccatattcatatttccaacgtaacaaatgccagag

SEQ ID NO: 10791 - DNA, 678 bp, Diabrotica virgifera
  SmartBlast Evalue=4E-17; Info=Serine/threonine-protein kinase haspin n=2 Tax=Mus musculus RepID=HASP_MOUSE
gttaaacattgcgtatctgattcacgtgttcaatcgtatataataaattcataatcttgctcgcgttcatttagtcgcatctcgtcaagaaagagtgtgcgcgtctttatccaaatttccattgcatgcatctttgcaaagaaaactccgatttgagttgtatgtgcattactacgtatgcatctttaccaggttatgtaccagatcaaatattcgaggccagcttggaagatagttttggatgtctttcgttaacccaaaatcaacaaaggaacaattcgatatctaaaaatcaacaattgggagtaccagtcacagcgagagaaattgttttgagaaaatgtggtcaaacggagccaattcagttttctcaatgttttaccgacagtatccttcagaactgtcaaaaaattggagaaggggtttacggagaggttttcctcttaaggaatcccgatggaggaacatcagtgctgaaaattattccagtggagggcgaccagatcgttaatggcgaaagacagaaaaaaatttgaggaagtgttatcagaaatcataatcacaatagaactgagtaatctcagacataacaagagaaatggaatatcttcatttactgaagttcagaaaatacagtgcgttcaaggaacgtatccagaaaaactgatagatctgtgg

SEQ ID NO: 10792 - DNA, 677 bp, Diabrotica virgifera
  SmartBlast Evalue=4E-44; Info="Acylglycerol kinase, mitochondrial n=1 Tax=Harpegnathos saltator RepID=E2C529_9HYME"
tgactgctcaggtatttcagtagagagaacttcaattttcataacatctatgggtttgaaagtgtcctctattacagccattgcagcttcagctaatgcttttaactctttccacctttgttttaccaggaaacttaactgtagctactgtattcgttttaccaagtggcaatacacccaatggaatgttactagcattgtcatttgtttttctcaataatcctgttactacttctgataaggtaccatcacctccagcaatgacaatggcatctgtacctccaatttcttctattaatgttttagcgtgcccttccgattcagtctttttcacttcaacagatatacccgccaaatgcaacaggggggcacagtatttttcaaattcatccactgatttacgtttatttgcattgggattaagaattacggttatatgtctaggtttatcatttatagctattggttctttgccatatttagcagctctttgacaataacttctcattaaatcttgtgtctgtagataatttttggtgtatattactccataagtgagtacccctgtgaaaaatattgattttttccaatgatttctaacagtttttgccactttaactataaatatcatttttaattttaacacacaatatacaaattttaaaattaaattttac

SEQ ID NO: 10793 - DNA, 677 bp, Diabrotica virgifera
  SmartBlast Evalue=2E-73; Info="NADH dehydrogenase (Ubiquinone) 1 alpha subcomplex, 8 n=1 Tax=Tribolium castaneum RepID=D6WT78_ TRICA"
ataacataatatttatttacaatagaactaaataaagtagaaactacacacaatacacaactcttgtgtatactcccattttttaccacatgaagagatatctggaaccatacttagcttcaggcttgggtacatcctctggaagtccgggagtagcatcttcgtaaacagttttaccttccactggtggtcttggcctttcagttttatgtacatgcacgcgattaaagtaatcataagggggtctgtctaaacctagattatcttttacacatttatcaaaaacggcttgagtttttctacatggtacaagggcctgatcagggctagatttgtcaagacagtttacatactgcatgaattcatctgcacaagttgctttaatctttctaaagaagttcatggcgcagctggtaactgctttaccttcatttatacattttcttggatctttcaactcatcgcgacagagaataaactcattattttcccattcgcaagtttttcctacatgaaaggcacccgctttaagtgctgggccggataaagggatttcttgaactgttaattcttcttcagtgggaagatgtacatcgtctgtaatacccatattttattaatttatcttctccagctccagcaacttctataaaatttatttatctactgcttttgac

SEQ ID NO: 10794 - DNA, 672 bp, Diabrotica virgifera
gcctcttataaacaattacataattatttatacaaggtgtccaaaaaacttttttttaatttacattatttgacaaaaaggagaatgtatttaatttatttaatttaaaatgcattttacttgttgcccgaaaacagaaaaaaatgtttatatcataaataacattgattttgcttaacttaaatgttcaaacttccaagaggcaggaaagacaggactcgagttctctgaaaagacaatttttatttaatgtggttaagataaacatctgaatagaggataattacatttccgaaaaaatgtatttttaagggattatttcatgatgacttctgaagggagcttttttgtcagggctatgttgtgggcgagctattgttccgcggctattttgtctgcaggctattttgtcggagctgttttgtgtgcgggatattatgtcggggctattttgtcggagctttttcgacggggctattttgagggggtaccttcggtgatatatccacatctcaaaagcctctattttgttcttatgtgctttcttcagggtccacgtttcagattcatactatgggaaaaataagtgctcttaccagttttaattttgtgtgcaattacaaacaaacaacatattttttctctttttttactgtgctttatgaaacttgg

SEQ ID NO: 10795 - DNA, 668 bp, Diabrotica virgifera
atcaaatgccatttgatcagtgaaaaaaaaaaccttaaaatttctgctatcataagtattttgtccccccgtcattcatatgtcagaaaatagcaagttaaaggtctaagccaattagcttttgtaagacctcaattttgaagttttgacaacgtctaaagaagatagacctatgtcactcctattcggactgctcaattattgtgtcactacaagaatagagcgatccataaagactggtttaaatcaatatccctagcgttgcttaagatactaaagtaacttgcttagacaggaaatgctgtctaagcaagtactattagcactgttgctaaaatataacaaatgcgaagaaaagattaatataaaataagaatagattaaaccatataacaacataattccataattgaaactattatctttatacatcatttcaaagaaaaccattaaagagtaagtcatttgtataaagcttgtcacgcacgggaaactatactatattatatctcatatattatagaaatatcaccaaatactattgactgtaatacatacaaatgtaaagactgaaaaagttttgtacacacttatgacaacaggtaaaagggggagaagtgcactcctgaagcgtgcaaaattaacaattctcagctgagcgccctcgg

SEQ ID NO: 10796 - DNA, 660 bp, Diabrotica virgifera
aaataatttctattagtttacagtttttattgtattatctttaacgatttattcttagtaatttcaatttaagttggttccttatccttcgtctgtaaagtgtagttttgttttagttacgaaagaactttggtgttgtgttaataaaaaaactaaacatggtttattattgttgtgtacaaatcatagaaaagttagaaaaatgcataggtaaatagtaattagtttataactgttttatctgaaacaacaaataaatacacgtacctatattgagaaaaacattgtctaacttttttatatcccttttccttgctaaatttgacagcaaaaataacatattttgtaacttgagaattccgaataatttatgagtattacttagatattatttaaataaaatactttaacaagcttagtaagttctggtattttattttaagtaatataggtgagattatttcttgtcaaataagaagatattttaattagtaacgaaattgcccgcaagaggcgctgaacggatgaaattaatacttgtccatttgaatttcccgccaaatggtgattagttaacacacctgtcgcaagtggcaaaaggaaccaaaagttttacagtgagttgcctatctatccagtaatactatattatttatctat

SEQ ID NO: 10797 - DNA, 675 bp, Diabrotica virgifera
  SmartBlast Evalue=3E-72; Info="DEAD box ATP-dependent RNA helicase, putative n=1 Tax=Pediculus humanus corporis RepID= E0VGQ6_PEDHC"
ttccaaaaagctgctttaggtttggcagatagtgacgatgaagacttagaacatgacattgatcaacaaatcgaaagtatgtttgctactaaaagaactgttaaagaaatcaaagctcccattggtattgttaatccaaatgcccttggtgctggtgtaacagccgtagataaacttgaattggccaagagattagcttcaaagatcaacttatcaaagagtgtcattctggatactaaatttgcaacccaacaagcagctgaatctatacttaaaggccgtggtcctcagccagctataacacctaaaacagtagctgagcaactcgctgctaaacttaacaccaaactgaattatcaaccaaaagatgatgatgatgaagaccgtaacatggatgatgatcaaacgtttagaaaatacgaagaggaactggaaattaatgatttccctcaacaagcaagatggagagtcacatctaaagaagctttagcacaaatttctgaatactcggaggcaggaattactgtaagaggtacctatgtacccactggcaaaaatccccctgatggagaacgcaaactatatcttgcaattgagagtacttctgatatggctgtatctaaggctaaggctgaaattacacgtttgattaaagaggaattactcaaactacaa

SEQ ID NO: 10798 - DNA, 674 bp, Diabrotica virgifera
tttcgggaccttgaatttatattccataaaccgggatattcctataaccggtactctaataagcgggttcgactgttagtttgtattatggtttttaatgttcatgtttcacaatcttataataggatagaccacaagatttcaggactttcttgcgaatatttgtttcgaaatctcttcgaatgttggtttaggtttctaggtcataaaagtttcatagtgatattttgattctgcatattatctctttattagagccacaattttcttttagcctgctgctaaagtatttaaaatggtttacacgctctgtcttctctccattaggagaaaggagaccttgatctatattaatctttcaaactgcactccactttgtctttgaaatgtcaattttaaggtctctccgataacttgtttcactgactagatttactagtgtctggagatcttgaaattttctgcaagaacggctgtatcgtcagcgtatttgatatttttgatttcttcagagtatagattaaaaagactagggcaaaagacaatcctttcgtactccacgtttgatgggcagtttttccttttcttcttcttaaggtgccgagaccgcttgtcgatcgttggctctcatgttgcccagcatattaacaatcactgtcttatttacagcagcg

SEQ ID NO: 10799 - DNA, 673 bp, Diabrotica virgifera
ccacattaggatgggatatttaagcacaatatctagatattttgtttacttttatatgacgtttttgaaaaaaagagtgacagagaatgtttcggtttgtaaatacgagttccattaaacacactgtaaattgcaaaatagttttctttaaatgaaaaaatgttgtttttaaatgcatttacgtctgcgcatttaaatgcatttacatgatacttattaacaaccagtatagaatacataatttacttagttgttcaaagtttgcattgcttgagttgttccacagttggtaaggtttactgattttataagcaagtatcaagaaggagagaaataaagacagaagtgttcaatatattttacggtgtgctattaaataaacgtattgccattgaaaagcattttattttgatttcagacatttttactaacatatcgtcgcctcaaagcaacagtaggatatgtacatatcctactgttgcacgagcaaattttgtgttttactgaaaacaaaacatgatagtgatcaaattcaattacaaaaattaaagctcctgatgaaggggcaccttcaaaaaataatttattatttgcagtatgatttttgaaaaaaaaacttaattccatgaataagaatatagatgagatctcaaattttagcgaatcttgatac

SEQ ID NO: 10800 - DNA, 675 bp, Diabrotica virgifera
  SmartBlast Evalue=5E-14; Info=Zinc finger MYM-type protein 1 (Fragment) n=1 Tax=Camponotus floridanus RepID=E2B181_9HYME
tctccatttgtaatatgcccaagatattccaattttctgatagttcaaacacttatacaaaaacaataataaagcaattttataaatgtaaggttagattgctctggttatcaccgtagaccgcctagatggcgctatttttttgcttccttaaatgtaatgggaaatgtcaagagttgtatgtattacattatgtagtatttggatatattaatattatgtgacaccagggacgtatcttgccattcctgcgcccttggcgaaattcaatggtaccgcccccttaagttttgaagctgtttcgtattcaattgataagattgccagcttgctcatgcgtgtttggccagttctcgaccgtaaatagttcttaataagtttaagtttactaaatgtcctttcacaggatgcaacgctaaagggcattgtaaggtaaattctgtaagcaatttcaatatttgagtaagcatctctcagctggtacttatgaattccctgcaaaatttctaagtggaatgccgagcccaactgttcaaacagctcgttcatatggaatttgaaacttccaatttctcttactatttcaacagcgtccacgtctctgctgtattttaggccagaatcttttgcacagttttccaaatcagagtctgttgttttttgcagtgatgaagc

SEQ ID NO: 10801 - DNA, 674 bp, Diabrotica virgifera
aattgacatcgatagaaagcgactgtagacatccacagtgcacggaatctagcccctgaggtgggatcacgatcgatagaattctattttgctgacgtcacaaaacgaatcttacaatgggagaatcgacggtttctaggcaacgtgacgtcagcaaaatagaattctacccatcgtaatcccacctcagaacggtctactatttaccaactattcagcgttaaccaaatattagctaaatcctggaagcacgacatagatatctaccaaatctctgtagattttcgacaagcagaagaaacgataaacagagatataaaatatgcttaattatgcgagaatttggtatatttaataaattagtaaaattatttatgattcacacagaagcgtaaatacgaatccaaaaccaattgacagatccctttcagataagtaaagggctaaaacagagaaatatgtttaatatctgtatagaccatgttaatatctctgcagatacgtataccatgcatgcaaatgattctaaagaattttataatgtatagatgtttcgagaaatacttaatttgtaaacattttgtgaacattttatcggcaaacctaatcaaaatcttagtcaacttttattacagcagaaaacgctgtagtgttaatggagctgattcaatgtt

SEQ ID NO: 10802 - DNA, 676 bp, Diabrotica virgifera
  SmartBlast Evalue=2E-67; Info=Heat shock protein n=1 Tax=Aedes aegypti RepID=Q17PR3_AEDAE
aagccgaacgttagctgagaactctccttactatgaatctctgaaaagtagaaaacaagaagtgttgttctgctatgaaccttatgatgaactagtccttatgcaacttcagcaattcaagggtaacaaattggtttccgttgaaaaggatatgcgagaggataaaaatgctaatgatctaacaaatttaggagacgatagtttaaaacgtagtgaaattaacgacttgtcagcatggataaaagaaaagttaggtgataaagttgcagcagtaacagctaccagtcgtctagaaagtcatccatgtgttgttactgtagaagagatggcagctgctagacattttatcagaacacaaagtcacagcgtttcagaagacagaagatacgccattctacaacctaaatttgaaattaatccaaaacacccgattatcaagaaaatgtataccttgatgggcacaaatccagtactaggtgaattgttagcgaaacagttatttgcaaactctatggtaggagctggcctagtagaagatcctcgaaccctattgacatcaatgaatgatctactggtgaaagctctggagaaacattagactatttaaattaagatttttattacatttgctcattcctgtaaatatgttttttctgttataagattctcataatag

SEQ ID NO: 10803 - DNA, 675 bp, Diabrotica virgifera
  SmartBlast Evalue=1E-111; Info=Chromodomain helicase DNA binding protein (Fragment) n=1 Tax=Aedes aegypti RepID=Q17IV5_ AEDAE
atagtcctccaatatatccagacatttaaccatttgactgaagatcagaactctatgcccgtttgcctttagtttcggtaacaacttatctatcaataccatttttccgctggattgtatgagtgctttataatatgcatcattatcttcgccatgttgatttttatagtcatattggatctgttcttcggctccattcaacaaatatggatgaatacaacatttcctcagttccatcattgtgttcattaaatttggtatattagcatgcgtagtgcctttggacaaaaatgaaaaatttctctccaatatacctctataatatttcttctggatattcgttagttctacttctacaacagtttcttctttaggagcaagagatttttctacgtcctcttttaatcgtctcaacatcatcggtttaagaagacattgcaacttttgaacttcttgttcgcttttcagttgaccaaattcttggacaaaagtttcgttattgctgaactgtgtcggttcaaggaagttcaacaatgaaaacaattcgtttacgttattttgtaaaggtgtaccagatagcagcactctatgttccaatgttaactgtcttaatccttctagtagcttacaatttcgatttttcagcctatgagcttcgtcaattacacatattct

SEQ ID NO: 10804 - DNA, 676 bp, Diabrotica virgifera
attattagaactagctaagagaaatgaacttcaaattacagaaaagacgaaacctacatggaaacaacctcaaaatgtcaaaaatgtaacggttaagaaagaatccttagaaccagccaagaaaagtgaacttaaaagtgaagttaaaattacagaaacgccgaaagctaaacgtaagcaatctcagaattttaaagaggcaaaagttaaaaaggaactgaaacatgtgagtcttaaaacatatgctcgacgtgccagctatgtcttatacaaaaatcgtaaaatttgggtaaatagtgtgacaccaaataaatgcgtagccaacattaattgtataaaaaaagatgcaaaatcacctactcagcgaaaaaaattgtatctattaaatcaaagacataaaagaagcatacaacttttatatcgccctggacctttatgcaaaaaagaagcgttacaaataactggtttgaacttgtggaaaacaaaactgttaaaactaccaaaaataaccttggaagtttttccacaacagggacgacgattttgtgatacagttttacacagattgaacactattgtaggtggagaaatggatagcaccaagattgaattttcgttatcggcactcaagttaaaggctgataatgaatcgaacaatctccaacctattacattt

SEQ ID NO: 10805 - DNA, 675 bp, Diabrotica virgifera
  SmartBlast Evalue=7E-39; Info=5-formyltetrahydrofolate cyclo- ligase n=2 Tax=Aedes aegypti RepID=Q16S54_AEDAE
tgtgattgttcaatattagttttctgtagtttagcaactaaaatggggagtgacataaaggcgttaaaaacagctttgcggaaagagatcgaaggaaaattaggacaacttactccacaagaaagacagagacaatcccaaatagtaaaggaaaagttgtttggtctagaccaatttaaagacgcaaggaatatatctatttatcttagtcttgatactgaaatagacaccgaaccaattgttaggaaaatctttcaagaccaaaaacgatgttttgtcccaaggtataataagaaggtaatggaaatggtagaattacattccatggaagattggacaaacttacctgtcaccaagtggaatattaagcagccttcatttaaagatgaaagaaagaatgctttagatgagggtcttgatttgatcattcttccaggcgtagcatttacaaaaaatggcgacagattaggacatggtggtggctactatgatagattcctacgaacagtttgtaaaaaacaagctaagccaccggcgctcatagctgtaggttttaacgtccaagttgtagatagtataccaacagaagaaactgattataaactagatatggtactttattccgagtaaagttctgtaaaaaatgtgtacagttacttgaataaagatattaat

SEQ ID NO: 10806 - DNA, 676 bp, Diabrotica virgifera
cttttttatgaaaattgtcctgcatgtactacttcttccctacaatcaatactcatgcaaattttaaaacaattggtatagtactttttattttccaaaaaagtatatgaatttcgcacttttacactaggatagccccttaatgattttatttattataggagactgacatactcaaatatacatgttgttccgaactatttagtcaccttactttaaaatcttactgtttataaaatttctttttgtttctattttatcttcgtttccccttccttgataagtctatttatttgagtattaaattttcacagctcaaacagaaataagtttttattggccaaatgtagtgtcatattggaattttatccttaaaattatttatagaaatcacacagtaaacaaaagtattaattgagattaataacttcatatatttgctagaaagttatttgatataggaatgtcaagagaatgttacccacaactatatatcgctcatcaataatcgatatcgagaatttttatcaaataatatttcaaatacattgtgcaaaatgaacttttttaactttcttctctaatatatgtacagctggttcctaaaaaaactgatacgactcttagtaagatttgatcattttgagcagtgtatgattgatctgacattatatta

SEQ ID NO: 10807 - DNA, 676 bp, Diabrotica virgifera
taagtataacaaaatttcaaataaatagttttaacttgtacaaaaatgtaatactaagaactatcgaggtcaaatacacctaaagagctacatagatagttgtgtcctttgtcttaggtgaagtctttaatacagtacacaattaatcattttgccaataaagttgggaataaaatctttgtctattcatctttttataaagaattggatactgataagtaaaaaggtattaagtcaaaattaaaatataaattttaacaaaattttcgaaagcgattgaatttcaatgctcagttcaatttaatagtgaattttaaaataaaaatgaaaatcagttgatttctattgctttctataatttttttaacgttcctactaaaaaacctagtcaaaatcaatgtttttgacctaagactttttacttatcagtacagaaatgtgggtatagttacagatcttctgttgcaagtagcttaaaggtagcattcagcaataagcaacctaggcagtagacagataggtgagactgagacactaagtaaactatcgctcctttcctactttcgcacagattcagtaaaaggacatatatataatggattcgaaactattctttttaaagggttacttgaataaagaaaaaaaacaatatatttctctattacatgtttcgaat

SEQ ID NO: 10808 - DNA, 668 bp, Diabrotica virgifera
attcaacaaaagaacgccaaagataaatgcaaccaagaaaatttccatctaacttacgacaatcttcttcgaaaagattatatagcaccaccacatcataacttcttctgcgcacacgccgaagagtataagggacagttccgagaacctttaattcaaagcgagtgtagtactagtgaagataaaaatattaatcatacaaggtataatctcgtgaattatgaggattcaggcaaatccataattctggaaatagagaaagaaaacgttcctcgttcttaaatcagctgagattttaattcaggcgtataattttctacggaaaagatattcttaacatagattcttatgttgtcttgaaaaagactgacgattttaaatcattgtacttatatataagttttactctcgaagaaataatagatttcgaccgatttaacgaatcatattataatttaaatttttacataaccgttgaattattgtgatagtatactaattaaagcaattcggcaggtctaaaatgatttgcttagtaggtaatggattttgacaagagtatggtgttaaaaaatttcacgtaaacttgtgtactaaatcgacattactcatagctcttgtcaaaatccaatacctctagaatcaaaaacttatcccatatgtgagct

SEQ ID NO: 10809 - DNA, 675 bp, Diabrotica virgifera
  SmartBlast Evalue=5E-88; Info=Serine/threonine-protein phosphatase dullard-like protein n=4 Tax=Apocrita RepID=E2B029_ 9HYME
cacctggactattatctagtataaaaataactagagagatcattgcagatggcactcaaatctttagtgtacgatcccagctctggagtacaatgctgcctgtagaatctcctgggcaagatacccctgccggcatctaatctatcagccactgctgcaccataaatttccatactcgcggtaaaaaccactaattcataccattgtgaaactatatctaagaaaaagtcaacatggggtctcttatgcacaaagaacctaacaggatgcctgtcaataacaactttcaagacgaaatcaggcggcgttcccggccttactgtctgcctgactacaccatcatgatgtgaatgtattaatgtctcatccaagtccagaacgagtacttttcttctaacaatacttaacctatgtcttgataaaggtgataaaggaaatatatcatatcttacagattggtgttgaatgatcgatctagtctgcttctttagtgcatagcagacgcatgtccagactctagaggctattagtaagaaggcccgaagtcccatctgtaactgtttccacatcggaaagttgttttatcacacggttcgctttaattcaacgcactgctaaagagacatacaaattctaggatcactaccagtgatattctataattacattttatac

SEQ ID NO: 10810 - DNA, 675 bp, Diabrotica virgifera
  SmartBlast Evalue=1E-38; Info="39S ribosomal protein L35, mitochondrial n=1 Tax=Harpegnathos saltator RepID=E2BP42_9HYME"
taacctcaaaaaattaaaaataaaatagtgaacattgtgaacaatagtgaaaatatgaacatttattgaaaatgtttaaacaaatattgtattcagctgcacgagtagcttcaatatcggtaaaatccaactcacaattattaactcaaactgtaataagacctagttgtattcatccagtaatcaccagaagttttacttctatactaggcaatggaccaaccatagctcctaaactgcttttcaaaaccccgagcccatcattggtaaacaccgctaaaaggacagttacaaaattttcatttcagcaaggcaagagaaagactgtgaagactgtattacgaagattttataggcttcattggggaggttggatacgtaccaaatgtggtcgtcacaaaaaattgtggaggaaaagtccccctagaaagcgcaggctgcggcaacatgttttttgcaatgctacccaatgtactttgctggataagatggttgccccgtactggagaaaacctaagtactatgtgaatgatccttatgaaccttttcattcaagagaagagtggaagtttacaaaacttaaacctagaccatattttcccctgaagaagaagctaaataattattattttgtttatattagtaatttaccaaataaaatttaaaaacttgaaa

SEQ ID NO: 10811 - DNA, 675 bp, Diabrotica virgifera
ggcgggacttcgttttatattagaattatcatgacttttgaatgttttatccatttttacaaaattgtcacaatttaaacttttataagtgacactttagaagatcgcagacgaataaaagtatgccgatcacctacacctactcctgaactcgaaaaataaaaaactggaaatataggccaaaatatctattgaattattcattagaactactcactgcagttaaggtcatgtaaatatcagcatatatacttcgtaggcaacaaattgacctaacaaatattgttttgattttattttctcatctcatagaagactaaaaaactccaataaactagtacatcaacttataaactaaaaaggaaaaattcaagagttggttaagaagacatgctgaatgattcattagaactattcactgcagactacgttatgcaagtaagagaacatgcggtctttaggcaaaaaattatcttacacaaccttgtttccgtattagaagatcgtaggttagaagccacgcaaatcaagaactgcatccacttgtaaaagataaaaaaaatcaagagttggcgaacatctattgaatgattaattcgaactactcaccgcagaaaatgttatgcaagtacgagcacaggcattccttgcgcaacaaacttgacttactcaacc

SEQ ID NO: 10812 - DNA, 675 bp, Diabrotica virgifera
  SmartBlast Evalue=5E-85; Info=TATA-binding protein-associated factor 172 n=1 Tax=Culex quinquefasciatus RepID=B0W966_CULQU
cgagaacaagtgtagcgataaaggcgctggtagccaaccacagactgatcctgagcggcactcccatccaaaacaacgtcctggaactttggagtcttttcgatttcctaatgccaggcttccttggaacggaaaagcaattcacagccagatattcccgacctattttagccagtcgggatccgaagtgttctcccaaggaacaggaagctggagtattagccatggaggcgttacacagacaagtattgccgtttttgttgcgaagaatgaaggaggacgttttggacgatttaccaccgaagatcacgcaggattattactgcgaattaagtcctttgcaagagcaactgtacgaagacttttccaaaagtcaggctcatcaaaccctacaggaatctatttctgccagcggttcatcaggatctattcacaatacacacatattccaagcactcagatacctacagaacgtctgtaatcacccgaagttggtactaaatgctacacatccgcactatcaacaaatcaacgccaaactacaagaaaaaaattcaagattggaagatattagtcattcagcaaagttaccagctcttaagcaacttcttcaagactgcggtataggcgtcaacgacaatcctgataaagaatcaactgacattgtcatcaacc

SEQ ID NO: 10813 - DNA, 674 bp, Diabrotica virgifera
gttgggattcgtaagcccctctaatttcgttgtttttgaaatttccttccattttttctatttgtccattttcataagctcttgttttatttctacatatcttgtctgctttccgtctggcgacttcaaatgatgtttgtctttccggtgttcttcctgttatgtccattttatgtgcttcatttctttcccctgtagttttagtgtccgcagtagtcatatcatcgtcagcatatctggacaccacttacatttattctagttcttttcagcgtgccgtggcatattgatctattggtactcatcaacgttatttggacttcttctatcttctttctgaacaatgttacgcaggatcgatacaattgccgtaagtttataagccaaggagttctgcgacggtctagaccccttctacgataatatttgaagcactatgttttagaaaaggcatctgtaagcgtccatgcttcgaatctatacattagtttcatgaagacataacatcttctaacttcacagatgtatttagaaacaatgcactctacctacttcacgttttttttaacctcacagttttccgcctcttcttcgtccttccattccctactttctgatctttgttctcagattcaattgcatttagcatttgtattattatcgattgcttttgg

SEQ ID NO: 10814 - DNA, 672 bp, Diabrotica virgifera
  SmartBlast Evalue=2E-69; Info=Serine/threonine-protein kinase vrk n=3 Tax=Aedes aegypti RepID=Q16EF6_AEDAE
aaatggacccttatttgtggagatgcatttttatatgagaaatgctaaacaagtagatgtggaggattttaagaagaaaatggggcttaaaaccttaggaatgccaatatacataggatccgggtcgcatgaataccgtggagataaatatagattcattgtaatggagcaattcggtaaggatttgtggaagacatttgtggagaataaacgagtgtttccagcctctacagtatttaaaatatccctgcaaatgttagacgttctagagtacattcatagcaaaggctttgttcacgcagatctcaaaggagccaacattttaatgggtgtaactaaagagactgcgaataaacagatgtacctgatagatttcggtctggccaccaaatactatgatcaagccgattttaaaccaaatcccaagaaggcccatgatggtaccatagaatatttaagcagagatgctcatcaaggagttcagaccagacgcggagatctagaaattcttgcctataacatcatccaatggctggggtgcactctcccatgggaaaaaatttgaaagatcctaacaacgttcacaaatccaaagaggaatatatgtcagatattccaaaattcatgaaaacgtgcttcacaagtggatctccacctgctcccttagttaca

SEQ ID NO: 10815 - DNA, 669 bp, Diabrotica virgifera
  SmartBlast Evalue=4E-19; Info=2-aminoethanethiol (Cysteamine) dioxygenase b n=2 Tax=Danio rerio RepID=Q6P0S8_DANRE
gcaacattaaccatgggcatttttgttctacaaaaagataaaaagcttcctctacacaaccaccctgagatgtacgggctcataaaagtgttagctggaaaaataatggtaaagagttactccataaacacgccagcaactatagaagctgatacgagaagttgcaaagacaatcaaacaggttctggctcaaatattatgttaagtcccgacaaaggtaaaaggaaacgttttgtaacagcagaatttgttagtagtgatatcatcggagtggacagtaaaccttgtatattagatccaaataaaagaaacattcatgaaatccacagcgtaggtggtccagctgcttttatagatatcctggcgcctccatacaatactcttatacctggggtaggacccaggtattgttcctattacagtattgttaccatcttgccgaacgtttctaatgtttatcgactacaagagacaaaaaacccttcttggtactggactgatactgctccatacttgggacctgatccaacggctaatatgaacatagagagtgaatctgtgtgatgtgctatgttgttgattttatttcaatgtgataatactgtatcataataagttatcatgttgcactttttcttatgcattgaatgacacatgttactttatatg

SEQ ID NO: 10816 - DNA, 667 bp, Diabrotica virgifera
catcgatttggctgaaaattcgcccacagatatccaaaagataggactttaagtggttagaaggatctgaattatattacaataccaaaaaagtgacatgcagtaatatcagactcaaaagtatatattagtccagtcgggatagcatttgaccttgaatgccgagctgcccaaaattttatttttctgatctttaggggagtcaatagtagcctaaatttaaaatcacgaatgaattcctccgttacgttagccgccatcttgattttaaaggagaacctgttttgctcaatatctccgccatttttaacttttcgacaaaaatggtaggaactgaaattgttccaaataaatcgtatttacaattattacaatttctttttaacaatttttgtcgtgaggtcgatattttcgagttaattgtacttacagtagacgcctatatttttgactataatattgcatgcaactttcctggtattgtaatataattcaaatccttcccaccactcaaagtcctatgttttgtctatctgtgggcaaattttcagccaaatcgactatgatgtatcttgggaatggagaaaaatgcaaaaaacggcacttcaacgttttccacactataaaattcgatcaaaagcctgttctgaatcaaagtaacccgtta

SEQ ID NO: 10817 - DNA, 675 bp, Diabrotica virgifera
  SmartBlast Evalue=3E-27; Info="Ancient ubiquitous protein, putative n=1 Tax=Pediculus humanus corporis RepID=E0VXA0_PEDHC"
cgagctcgaattccattgtgttgggcaacattcgttagtgatatgttatattttctttttgtaccaataactaattacaaactcactttcttggctcccttagaaaagagaacaatgtctgacgatgaatttggagagatagtgcggcagaatatggctacatctttaaagatacaaataaccgattatacctcacacgatttagcagaatgggagaaaagaacattggcagatcctccacaaaggccgcaaacccggtttgctaacagaactatgaatcctgagctgcaaaggatgggtaaacaagtgaaagaagttttgccccatgttccacttaccgctatttatagtgatctatatgtaactagaaacgtagacataacaataacaaacatcctagagggacgcgtcgtcttcacgcccgagcaaccttcagcaactaccactagcctaccttcaacttcgtctatttcacctagttctaacgtaacaggagcttccacttccggcggcagtaaaacgtccttcaacactgccgcctcctcgtttcccagatctgcatccgagcgcagcaggtcgttccaggaacgcaaggaacagctgatcgccaccgcaagaaggcgctatatcgaaaaacacaacctcgatataccgatttagagttcgatctgagac

SEQ ID NO: 10818 - DNA, 672 bp, Diabrotica virgifera
ggaattccccagttggcttgaaggcgtagcagccgacggaagagctcccagtgccaatagaagaggtggcaaaggaagatatggcagtggtggaggtagtttcggtagcagagattaccgtcaaacatctggtggcggtagccaaagaggtcaaaggtctggaggtagcggatatggaaataatggatacggtaatggaggtagccattatggaggcatggatagaggaagcaactttggaggaaattacagcaactctactaatcgtgatgactggtgggagaaagaataagtcacttcaataattgattagaataaaattacttaacacgtacctactaccaccaattcgtacatctagtaatccaataactttcaatgtccgtgtttttcttctacccttcccgcactctctccgataatatttattctttccgaagttttatttattatcagaaatcaatttccttgacgcttctagtaatcccaacaaacacacacactacgtttgcgtgagtgataatgtgttttttttttaatttcaaacaactttatgtctcttgtataggaaacttaatggaaataatagggaaagtatcgttaagagtacgtgtatgtttttttttattttttacgagaagtttgtgattctaagaaaaatagttttagcag

SEQ ID NO: 10819 - DNA, 672 bp, Diabrotica virgifera
  SmartBlast Evalue=3E-57; Info=Growth hormone-regulated TBC protein 1-A n=2 Tax=Formicidae RepID=E2A414_9HYME
gagtgtctggagctgaagaatttgaagaaattcaacaaatttgacgttatggtgccttgaaaaagaacattgataatcaacatattattgacactatacagatagacttacctagaacatttccagaaaatatatactttagcaaccatgaatatcttccgaaagagttgttcaatgtactagccacatttgcacaccaaaacaaagaagtcggctattgtcaaggtctcaactacatagcgggactcttgttattggccaccaaagatgaagaagcttctttttggttgctgaaagccttagttgagaatattctacctcagtactatatcgtgacaatgactggccttctgactgatctcgatgttcttgacgaattagttcttaaatatgagccgttagtgcacaggcatatccgtaatgtgggcatgccttgggccatgggtactaccaaatggtttatttgcctttattcagaggtattacctgctgaaactgtgttcaggatatgggattgtctatttaatgagggatctaaaattttattcagagtagcattagctctcataaggttacacaaagatcagattttacaaaccagtgaactgggggaactgattggatgctttagagacatgagaaatcacgagactgttattaactgtcatttgt

SEQ ID NO: 10820 - DNA, 674 bp, Diabrotica virgifera
gttaaatagacataagcagaacatgaaaattatgtccaaacgtgtgtaaaaacatctaacaccaggacatctattttttcatataaagatgtatacgataaacgtcctagtaatcgttttcctgtgtatcggattatgtcagggatattttaaaataatagcagatgatggggatttaacatgtagacctagtggtgtggaatgtctaaccgcatctacttttaccacttgtacgaatattggcagcgtcacatctttacatgcaatcttgcgttgtcctgatggctatcactgtgatgattctacatctataccgtgtaaaccatcgacagaaggttcaacaacaagcagtacaattactagtagttccactgaaatttcaagtagtacatcgacaagaacaactgatacgccgaactcaacaagttcaacgataacttcatccagtacagaagaagacattactacatcaagtactgtaatagacacaagtacaacgaagaaaaaagtaccaagaccttctggtccgccacaatgtactgcagttggcctttatcctgctcctcggtgtaatcagtattacgaatgcgtacaaagtacttatttgattttctggacaacctatacagcagaattaagaacgtgcatagatggcgattactatgataccgaac

SEQ ID NO: 10821 - DNA, 673 bp, Diabrotica virgifera
  misc_feature (523)..(525): n is a, c, g, or t
  SmartBlast Evalue=1E-61; Info=Tubulin-specific chaperone E n=1 Tax=Camponotus floridanus RepID=E2AAG3_9HYME
atttattattcatagtttcatagttttcggtttttcaattgcaaataaacaaaacgtactcaggttttatagattttaatcaaaatgggagatattacaaatcctccaatatctaatgaagatattttaaaattatgtaaaccagccactgaagaaactaaggattttattatgcaacaaacaatgtacagaattaagaatccaaaaatatcaatacccttttatacggaagtgttaggtatgcaactgttaactaagttggattttccaagtatgaaattttcactttactttatgggatatgaagatccaaaagacttggcaggagggctaagttcccaggagagagttacatggacatttggcagaaaagcgacaatagagcttacacacaattggggaacagaagatgatgaaaattataaacctcataatggtaatcaggatcctagaggttttggacatattggtgtcatggttccagatgtatataaagcttgtgaaagattcgaaaaacttaatnnnaattttgtaaaaagaccagatgatggaaaaatgaaaggattagcttttattacagatcctgatggctactgattgaaatctttaataacaaaagtgtaggggatacagtctcctcttaaatttgcagtaattatttcctgaagacata

SEQ ID NO: 10822 - DNA, 674 bp, Diabrotica virgifera
  SmartBlast Evalue=3E-17; Info=ER lumen protein retaining receptor n=3 Tax=Aculeata RepID=E2AC11_9HYME
gcataccccattttactactttttgttgtacttgagtttgctgcagctgtacagatacccaaaatcaagaaagagatgaatattccgacgtgaatgatagctgagatatgcgttacgtaaaacaattcaacgttcgtcttatgagatattaaccacgtgaaaatataaaaaagctttgatattgccatgaatgtcataaagactgccgtgcccatgctgatattctggatttttataaccaggtacacctgcggaagtagggagactgcttcgaggtattcactgaactgccacagaatccaatacgaatccatttttataggaaagtgaagagccaaatacattgctgtaaataccaatatttccgccgtgaaaatatcggatttagtgtcatagctgtccataaccacgaaaagtataaatacagtaaatactgttgccatgatttgcaatcctttcgtcattgacgtccaatcagcatagccgaaagtgtcatagggatgtacatacctagtgatgactaccattgcttgcaaaagctgagttttgccagacacatctgcaccattttgtttgagtataatgctcacaggcaaaaaacacattgcaaatgtatgcaatatttccacgacgggaaagaactccggaaccggatacattttctcgaatttcac

SEQ ID NO: 10823 - DNA, 666 bp, Diabrotica virgifera
tttagtgtttaactctgaagctaaaatattttgaggttgcgattgacaatgacgtggaagtaacagataaaatcgtttaaatatctaggaacaaccgatgggctaggacaaaaggaaattagacaccgaatagaacagggaaagaagaaatcagtatggtgggatgacaatacaggctgggaaagaatctaacgtatagtacctttcaaaatattttataaaaccgtaatcttaagctcattacaaagtcatttgtatttgaatggtgtgatatttgaattttgatccagataggaattaagaaattttaatctattgtacttttaatcattatacctgctattcagtatgctcagtactcgaaatttaacgacactactcaaatacagacttggtaataggattaagatacggttcccaaaatatcttgaaacgtactaaacgtattgaccttacgtgaaagggagtgaaaagcacctatttaaaaagaggtagggatattagatccgtccaatatattgtcgaaaattcattagtggaagcaactaaagaggagaggttcaatatttttgccaaacttattgtttttatttgacctatcgtctctttgaacaatgttctaagacaatcagatttgggcgaactggtttagatggcagcttacta

SEQ ID NO: 10824 - DNA, 670 bp, Diabrotica virgifera
ttcctccgttacggagaaagctcccttgatggatgtctgtaaaagaaaaataaaaattttatttattactatcaaaagaaaatataattaatggaatataagaagcaattacgctcagagtcgtacctccttacacttcactccagtgtaagccacaaacattcccacaataaaaatattaataattatacggacacccatacaactccgatcggatctcctcactacagagttccaccattcagattggcctacctgttcacttgttcactacactggatggaagtctagagcttgatcgccgcaagactcagggttgccagatgattttttttttaattccctagaatttttgtcaaaatttccctagatttccctaacaacttgaaaaccattttttaccctagaattccctatatattttcaatatacgcatgcgcattacaaaactaggcattggataaggtcgactttttccatctgaacagctaatgcgcaggcgtactgcctctgggtaatttcaggatatcctccgcgagtagacccagtatttttttgtatatgttacgagcaaagcccgaaattggacaatcctagcattgtacggaaaatattgtacacttctagttctagcattgtactcctaatctgtaaaatgtccgaaatggtc

SEQ ID NO: 10825 - DNA, 674 bp, Diabrotica virgifera
  SmartBlast Evalue=2E-77; Info=Integrator complex subunit 7 n=1 Tax=Camponotus floridanus RepID=E2ACI1_9HYME
gcagaataacgaagatgccaaaatattaaacccaaataacaaggagttgttatttctctatgattaaacctatgcaaacactttgtgataattatatgtatttccatttttgattaaacctttatgttataacgaaataaaatgatcggagtgagagtaagtgcttttaatgaaaatggcttgggtgaacctgaccaagatgcaaattctgcattaacagaattagataaagggcttcggtcaggaaaagtaggcgaacagtgtgaagcaattgtgagatttccaaaattatttgaaaaatatccattcccaatattaatcaatgcttctctccttaaattagcagatgtatttagaatgggcaataattttcttcgtttatgtgtgttacgagtatgccagcaaagtgaaaagcatttagacaaaatctcgaatgttgatgagtttgtacgaagaatatacagtgtaatccatagtaatgatcccatcgctagagctgtgactttgcgaatatttggtgcagttgcagctattataccagaaaggcaacaaatccatcactgtataagaagcagtctagactcccatgacagcgttgaagttgaagcagcagtttatggagctgtacaatttgcagcacagtcaaaaacatttgcgataagtatgtgcaataa

SEQ ID NO: 10826 - DNA, 671 bp, Diabrotica virgifera
  SmartBlast Evalue=3E-19; Info=Pyrexia n=2 Tax=Tribolium castaneum RepID=D6WP79_TRICA
acattcggtagcattgcttagtacagcaaaatataacggaggtctaaaatttccactgtttaaacctgcgttgatgcccgctcctctttttatcaagatctttatgcatgtcaaatctcccgcgcctgctgcacaatgtaaaggcgttatctgcttgctgtgatcgtaggcgttgatgttacaacctgcgtctagtaatagctttaaacattcacttttcccgccgtaagatgccaagtggactgctgtccttccattttcatcggttttttctagaacggtccggcttctataattgtttttaatgcagtcgcatttcctgtccacgaggaaatgagtagagcagtatttttgttcgtatggatagcctttctgacatcgtctttaagtaatagttcatttatttcttctgattcattcaaatgcataagactttcccatatagaatctgcattccatatttcttgataaggtttagttcttgttctttgctctatatcgaaaacagaaccgctttcttcctcgctggagatactataagaataactttgcatttccacatctctgcttttccatctaagcatcgggtcatctgcttcttccatttttgacaccatatcgttccattagcaactttgtctgtactgtactaaagtgtgatttattcaaac

SEQ ID NO: 10827 - DNA, 673 bp, Diabrotica virgifera
  SmartBlast Evalue=0.000000004; Info=Farnesyl diphosphate synthase n=1 Tax=Ips pini RepID=Q58GE9_IPSPI
agctcttgtttctgtgaaatcgtggttgtcgctatgtttaggatgagatccttttggattttaactaaatgcttgtgatcagaaaaatattttaaaactaggaagttagcgcctgattctaaaattatagagtctaagatagcttgttttattcccactaccctatacaagggaggtttattgtaacgaatttttgattcatccagtatgtcatcaacgataatcatggcgaggtcttgcaatttgtagcaccatcccaaaataccagccttgaccaactcttcttcggtgtgatcctgtttgaaatacttgtaggcatatatcgctattaaagcacagttgagaaattttggcttaagatctccgactgtatcattaataaggttttcgaattgttttctaactgttggcatgttcttctggtaaactaaagattcattcagaatgtcttctcgaatttgtggaatgaggttctttagaatcgtttcttcttgagtgaagtctatcgtaggtcttacgaatactgggtgcctttttgtgtgggttgcgagccttcgtttttgattagaccttcccataattttaagagcacttcttgtaacatctctttgaaagattgttttttatcattgtagtacgaaacactgtatctactgtagatcttgtagacttt

SEQ ID NO: 10828 - DNA, 666 bp, Diabrotica virgifera
  SmartBlast Evalue=1E-24; Info="Slender lobes, putative n=1 Tax= Aedes aegypti RepID=Q16WV2_AEDAE"
actcaatttctgttttttcgttttcttcttttcagcagtattctgattggattcagttctattttcagatgttttattttcttcacctgctggttccgttgcacttaatttccgttttttcgttttcttctcggcagtgtctttattagatttactcattgtttcattttgttcttctgactgatttattgcgttattatcattatcatttatcttttgtatagaatttgttgcattgtcttctggggtatttacgaataagctcggaaggatctttttcttgaggtttatattttgacctttcttttgatatgctatttgttcgtacctttccacttcgtccgaacggatctgaactgcttttttcaatgaacaccatttatttaattctctttcatttgctagcaatatttcctctgttgttaatccaaaatcgtttggtgcaacttgtctatatttgaatctacatggagtatcaccaataatatcttcacagtcgagcttgtaatattcttcaaagtatttctcaaatttcttgtcatttggatcatacttcggttttggtttgctaactgcaacagcaaatttggactttccttttacgctttttctgccttgcacttgttcatcatcgttatttgatttggatgtttgcggatcaaaatc

SEQ ID NO: 10829 - DNA, 674 bp, Diabrotica virgifera
actgatcatgcaaatatttttcatttccttttttacctaattgcttaacttatgacaaaagagcgagatagaatacgacaaaatgttacaatagacccacataacagataatgatatcacggaagagataaaagggataattcaagcagcaaggagatgtaagtatgtatagcctctacaacactattaaatctaagagcctaacacgaacataaaaaatcagtatatataccctaacaacacaaaacattccaggaatgtactatcaaagttctattaatgtttgaatgtcctggacattcgaggaacattcggtgaacatctgataaaattattggtggaatgttaccacaagacattctatgaacgtactaccaatgtcctatattttaagagaggccatttactattcaatttgcgttcattttcaaatttgccgcgcatgtatctatgtagggtcgcgtggtcatcacatttcatgataacctaaaaatttctgattggatggaaaatggaaattagtggctttttttgctgttctgtctgttagttttgctctggctggatctcttttgtttaaacaagtatgtgagtattataaaatccgttttcaattttctttattctttatgaaacgaattatttatgcatattattacctgtaaatagcatct

SEQ ID NO: 10830 - DNA, 671 bp, Diabrotica virgifera
  SmartBlast Evalue=1E-61; Info=Fas (TNFRSF6) associated factor 1 n=2 Tax=Tribolium castaneum RepID=D6WR39_TRICA
ttcttcgtctgaggtgaaagctccatcgcttggttttactgttaaatgaagcgaattgtcacctggtaacatgagcttcgaaaacggagtatcttcatactgtgctaatcgagcccaactggaaagaagctgtctgcaaggatttactttcacttctctgtgcaactttagtttcagatcattaacggttgcagactctggtaattcaactttgacaactctatcacagtactgcacattaaattttaacattcgtgatccactttttccagcagaagtggatggaaagctgtcatcaggtgtatttgcttttttcgttactgtagacgaatggcccaaactgttgcctactactaccatatctgatgctgcgtctgcagttgctgcacttggtatatcagcatcatcttctactatcatgacatctggatctacaggctctacagctggtggacgaaaactttgagtatctggtggcattactctactcacagcacgcaataagtcccagttggcctcatccaggtgataaatagcttcagcaacatcttcaattccagtgcaagcttgaaaatcagctaaaatttcttctctattttctgacattttttaacaaaatttaagaacaaagcttacaaagaacaaatgtgtttttaaccttttattaaaat

SEQ ID NO: 10831 - DNA, 673 bp, Diabrotica virgifera
tgcctattcagcgaatcagtgaccttggtcactggttctcactagagtattgtgtgtgtagttgtagaaaagatggtcaggaagtacgattcatgattacgaaacaaagatgataagacgaataaatattgccgagcctgtagaaagccaaaagcgtgacagaccaaagcttaagtgtacatatagggtattgaaacaaaggagaatggtgtagaaaatttgaggacatcataactctctgtagacagactatgataatattaatgcacctccattttccatgttccatttaatctcacttggtatgattttggttacaaattttacatttcgtcaagaaatatttaactatatgatttggctcatgttgcatgatttgggcagtattagtttaacgaacttatctatagaaatataaccaaatgatgtctcatttcactactaaaatacaaatatgtgcgaatcatcattaaattctgtaatttgaagaatatatgcatgaatatacatctatatgtatgaattggctaataataatgtaatacactattcaaatcttcatggatacctgacatgtcaaaattaatttttttgatatgtaaaagtttgatagcccactttctaaaccattcttgagatgatctttaaaactattagtagatattattgtttt

SEQ ID NO: 10832 - DNA, 672 bp, Diabrotica virgifera
gtccgttaaagccaagtctgttatataaaaataggtttaaaataaatcagactatttagaaatgtgtcctcattgtgctataataaaaagtttgttgaaactctttgtaaaatatagcgtttgggggtcaacagtgacctcgttgttatgcaatgtatcttggtatgggcagggttaagtatctataatattaacaggacatctttaatttttttacatttgatcggattttttgtcagttataaccgaagtccattaaatagggcttttcattcacagtcatttgtttcgagcctctgtcatatgttgtataatccgtgcatattaatattatatacagattatacaacataatgacagaagctcgaaacaaatgataatcgatgaaaagcctatagaggtccgtcatattgaggttttactgtactgacaaaatgcctgcctcgtctaatgaagcatgactgatgagagagcatcttggactcttctgacactgtactggttgtttgtaatcaggttttcctgatgaagcaggactcccagtttgactaccagttttccatttttgaggagtgcgaagtgagaaactcaaagggtgtttcattctttgaacttctcaaagacaaaaaactggaagtcacaccgaaagtcctgcttcatcaggaacaccag

SEQ ID NO: 10833 - DNA, 671 bp, Diabrotica virgifera
atcaaatggaacctgctaatttttatgaaggaataggttattcaaataatgaagaactatatatttattaatacatagtaactattaagagtaattgtgaagattaaaaagtatgttttgcaaggaaagtactataagtgattttgtatttttattaccctacaaaatataacaaaacttttcgtatattttaagcatagaaaaaattattgtaagctattgcttcataaagataaatggtcaaggttagttttgtaatcgtacaagttagctttatatattttgtattggacgtcgtggatacaaatggtgacttttgtttttctgtgataagactgaatggacccaacgttttacctcatggcagtgcctggcctttatgcaatatatatgtatatgtatagttttttggcggaaagagtctttgtaagttctcataggtatagttggttaacgttttaatattgattattttttcgtcgaaacaatagcgtgaaatgttttttatgttaatttttattatctaataatgtaaatgtgtactgtactgtaagtcttaagtctgagccgagagttcccgtcgggggaacctgtggtatttataaattattatattccctatcatgagtgtagttgtaaacaattcacataaaataaattgtattatggat

SEQ ID NO: 10834 - DNA, 669 bp, Diabrotica virgifera
gaaagatggcggtagtgtcatatttcaaagttggaactaagcatctagtaacatgtcacatctgacatgtgacaaaagtatagagtattttgaatcaatttaacaggttaactggaattatgaatttttgagttgtgtaagttttctttcggagacgttttgtacccaatattttaaaactatttgacatatccttgccatagatggcaggaagagtggctactgtatactctattaaattatcttaaaaaaacgtttctgactattaccaaggacgtacgacggggaaaagtgaatggttgacccttctcaaattctgcgccactggcggaattaatattttattgcaattgttcgattctctaatactttctatactaacactactttctataataataactctttatttgtatcgaggaactcattgtttttcgagatatttgaatttaaaaatgaagcggcacaaacagaattgaattaataagctcattgaggtaaatgggggtcacattgaacatctgttgtacctaaaaggtttacatagttaaaatgtgtttttttgatattttcgggtattaaaattgtttttttatttagattataacatagaatcaaaatttgtttttaaataatgaatgcatctattcatttcaagaaatttcaaca

SEQ ID NO: 10835 - DNA, 672 bp, Diabrotica virgifera
  SmartBlast Evalue=3E-74; Info=Signal peptidase complex subunit 3 n=9 Tax=Sophophora RepID=SPCS3_DROME
gtgatactacaagtaagagttacattgacgtgtctaaaatttattaaactgaataagaagtttcaaaacaaataaaaatgcactcagtgttacaaagaggcaattcaatatttgcctacactctcaccgtcttagcctgtttaacgtttttatgttttgcttccacagtttgtctgaactatgtaacagatgctaatatgaatacagttaaagtagtagtaaaaaatgttccagattatagtgcaagtagagagaaaaatgacttaggattcataacttttgatttacaaacaaatctgactggtttatttaattggaatgttaaacagttattcctgtatcttacagcagaatataggactcctagcaacgaattaaaccaggttgttctttgggataaaattattcttagaggagaaaatgcagtattagactttaaaagtatgaacaccaaatattacttctgggatgatggtaatggccttaagggcaaccagaatatcacattgactctatcctataatataattccaaatgctggacttttaccaaacgtttttgctaatggaaactacctattcaaattccccgctgaatacacaacttctagggtataattatttgtatttaagtttatgtacctctttttataaataaaaagtgtgcacactt

SEQ ID NO: 10836 - DNA, 672 bp, Diabrotica virgifera
  SmartBlast Evalue=2E-31; Info=Peroxisomal membrane protein 11C n=1 Tax=Rana catesbeiana RepID=C1C4J8_RANCA
aacaaacctttcactaagctaggctacataatcatgataagtttcaaccgtaaatcatgtggatcaacgtattgaatgaaacatgtacccttctcgaaacatataaaggcagagataagattttaaggacgttgagctatgtgacaaagctaattggtggagtacagaaaaatgaggctttggccaagaaattttttatctttagctcccaaatgtctggggctagagctacccttcgactgcttgatgatctgccaatgatacagtacaatcttcagtatggaactggaaaaaatgaacccgacaaattcatgtcgcagcttggagtactcacgaatattatcgaccagctatactaccccatcgagaaaatgtcatggtttgcagaacataaacttataactggtgtagacaataataaatgggatactgctagctctgtgtgttgggtcatttctacctacttaactcttgtaaagactctaagatatattgccgtattagaaaaacataaaaactctgtattgccattacaaagcattcctatagaaaaagtactaatgactcaaaagtatgaaatcctgactgctataagactgtgcttggactttattcatgcagtaaacacattacctccaggattcttatggtcgtcaaaactgaaagtgtggc

SEQ ID NO: 10837 - DNA, 671 bp, Diabrotica virgifera
  SmartBlast Evalue=6E-44; Info="39S ribosomal protein L40, mitochondrial n=1 Tax=Camponotus floridanus RepID=E1ZXL6_9HYME"
ataatattttagaggaataaaattttaaaattagaaaaatttaagaatgactatgaatgccatattatcaaatttctccaggttaagtcttaaagccccaactctggcaaggacaatttgtacaaataaaccactagcttttaaattcactccagttttgctcgctgaacctttgaaaaagaagaagagacttgaccctgcaattgttaaagctcgagaagaaagaaaaaaacgaaaactagaaaagcaaatcagaagattggaaaagaatgcacggaagttaaagcctatagaagaatgcgaaccaccatttgaagttttagatacgatacagacccgtaaaagaaatcttgcagccctttctactgaaactttagagcgtagagcactattgcagaagaaatggtgtcattacaagagagaggagcatttaagagatatgcagatgttagatagaatggtatattcccagcaaagggcactagatgaacttagaaaagagtctgaagaactttatcaagaagctatacaatttgattttcatttgatgccttttacaagccaaggaccagtcgaaacaccacctatagaaaattacaatagtccagatggagattatcaagatatatccaaaaagtggtagaatatcagttttgttaaataaattctag

SEQ ID NO: 10838 - DNA, 672 bp, Diabrotica virgifera
atttatttctttatgtgccctgtagatggagacggtagtgccggctggtactggctgccagaagtggggtcccctaaattcttagctagttttactttagtggacgtaattatactgaacggatttgagtggaaatgtggaaaaacattgaaatataaaatccccctacacatgatgaaagtagggggactggcggtgactacaatccccgcctgcagggacacttagatttgcttaacaaaaacttaaagcgccaaaagtatgcatgtttcattacataggtaatacaagatcaaacaacaacacacaaaaaacgcacaaaaatacccatgataaatattcaaagatatgcaaccttcctgacaacattgcagaaaattaactagaaacttcttaacgaatgaaaacatatcgacatatcaatccatagaaacttaacatttttataagccaagatttagagaagtaagaagtaagtaagcaaactggtatttattgcgcaaaattaccaaatgaagaaatttataaaaaagtggtcactgaagaagaaaagacagagaaattttcatttaataatttctcttgtcttaatccaggcagccaaaggactcaaaagatgtttttgttgaggcacagtaatttttatattgtagttcttatagtcctgtcgcc

SEQ ID NO: 10839 - DNA, 665 bp, Diabrotica virgifera
ctagatgcaaaactttgtatgtactgtttaagtcaaactgagttatttgcaaaaaactggtgacttttgcaaaaaaccttagatttaataaatggtacttttttgtgatagataaatgctttattaggtaaatataatgattttttcttagaaagctattgtgtttgctaggaaaggaagaaaaaaattgataataccgagttttgaaagtgagctatgtaaatacagatttatgcaactaacatttgcaaatacatgataatcaaccattaacgatattagttgctcttggattagtctgttttccaaacctaatgtaggtttgttccaacacaactagaaatcgtccatgtaacgatcaccgaacaaaccttgtgttagtaataaggaagaaagcatgtggaagtaaactttgagtaaatagtttatttttatccaaagtacaaaaagtcttacaaattatgtgtatatatttatattaattcctaaactcttaagctctggatcctcatcgtcaatatgatcatttcagcactctcattattatgtgtctgtacgccagtaatatctattattttataaaatgtgagattcggctggtctctccaattttcaccaaaatgttttctaaggagagtacctatggacgatttatctcctttcaa

SEQ ID NO: 10840 - DNA, 672 bp, Diabrotica virgifera
  SmartBlast Evalue=4E-43; Info="Lysosomal acid phosphatase, putative n=1 Tax=Pediculus humanus corporis RepID=E0VWS2_PEDHC"
aaacactgtccaacactaatgtgcatctgagaatggagtggtgtaaacattatttaaaatgtatattttattatattttgttgcatcaagtaacaggtgaatcgatgatacaacaattacatgtaatttttaggcacggtgaaagagcaccgacagatacgtttcctagcgatccctacattaactactcttggccaggaggatggggacaattaacaaataatggcaaactacaaatgtatgatttgggcaaattgataagaacagaatataaaaatttcatcccggatcttttctggcataaagatgtaaatattaccagcagttattcggagagatgtcgaatgagtggtcagttgtttatgtcgggactgtatcctcctgttggtagtcaaatttggaatcaagagtttttatggcaaccagtggcagtaagatatctgccaagatcggaagatactaacatcgttatgaaagttgcttgtgcaaaatatgatgcaatgttcaaagaactaagacagtcgccagccatactagcactagagagtaaacacgaagaattgaagaaatatcttactaaacatactggaagcaacgttacaaacatggaaaatgttgaatctatttacaacactttggaaattgaaagactccataactttacacggccaa

SEQ ID NO: 10841 - DNA, 672 bp, Diabrotica virgifera
aatactcacaagaaaggataacaactataccatatgttatgggctgatcaggaaaattaaaaaggataggaaacaacatcgcaacaacatttaaaacaaccaatacactcagatatatcctgttcaaacccaaaccagataacacacacggaaagtcaaagaactgcatctgcaaaatacactgtgaatgcaacaatttctatgtgtgagaaactacaaaacccctaagcgtcagaataaacgagcatgaaacatacataaaaaacagggaaattcgacaaataacagatatacaaacattcctgggacaatgagtacacagagtacaatggaaagatgcatcaaaaatcatgaaggaaacagacatgaaagagaaaaatcaaagaagcagctcttattctaccaaatgaagaaaaatgtgtagcaaactcatcagcagaatgtaacaggcttttgttgccaatactagaagtgaacaacaagaatttacaaacaatagcagatgagaaaatgggagacgcaagtcttctattatacataatacatatgcaacacacaatacataacacaagactaactctcttacacagagaaccgcatgaagcatatagaaataatgcagaaagacaccgaataaataatcagaatttaatttaccatggggtataaaac

SEQ ID NO: 10842 - DNA, 663 bp, Diabrotica virgifera
acttctaaatgatttcgaattggctgtgtgtttacttagtcaaaaagtaacgattactattttttacttttctattagaatcgtatagaatatttttttgaactaattgtatattattgataacaatccaaatggcattatgcaataaagtgttaagtagtaagacctaaattgagctgacctggactaatgtagattaaagtttttaaacatttgacatcttttttaagcgctacttccaccagcaaacttcatggtccttggattccttccttggatacatggaaggtccatgggaattttaacttttgatgttgttagtcgaaaaagtcaagcagtttgattttaacactgattaggtatgtctgatttctttatgtcattaagatacatattttgtgtagcatccagtcctttttattaaccacttaagaattactagtttgtgattggtaaacttcaacataataaacgttgaacatttaaatggtaaatatatcctatttatcgatctgctttaccattggtggtaacattaaagttaatcaaaaatttacaagagaaaacgtatcttaaatactcaattgcagatgtgatttggattgacaaataattgctgtatctaatattttgtaaactatatatataatatattactgtatc

SEQ ID NO: 10843 - DNA, 667 bp, Diabrotica virgifera
  SmartBlast Evalue=1E-11; Info=Pol protein (Fragment) n=2 Tax= melanogaster subgroup RepID=Q18LA1_DROSI
ccaggacagatccctttggcagtccattcttcagtttccttggggtgctgatgtcagatcccatgaccacttgaatcgttcggtcggctagcatgctgttgattattcgagcggtggatttacaggggattgtacggagaagcttgtataccatgccttctctccagactgtatcgtaggccgctgttaggtctatgaatgcggctgcagttttaagttttctctggaaccctgcctcaataaatgtggtaagtgaaagaacctaaataagtcgttctaaaagcttaaacgtcaccgatagtaggggtattggtctgtagttcttagggttgttatcatttggtttccctggttttaatatggcaatgaccttcgagcgtttgagttcctgtggtgtggtaccggtcttcataatgtctgtgaaaagtggatcaaccattctttcgcatatttgccgccgttaattaaaaatttgggatgaatattgtcaaaacctggggctttacatcctgagagcaatagtgacttcttgggaagtgaaagggcgggagtatttgatgtctgtagactggaattttatagttttgagctctcgttttaatgttttaatttttgttgtaaaacttactaactacacttttcagaaagtagagtaaaatcgatttaa

SEQ ID NO: 10844 - DNA, 669 bp, Diabrotica virgifera
  SmartBlast Evalue=2E-10; Info=Ubiquitin-activating enzyme E1 n= 1 Tax=Culex quinquefasciatus RepID=B0XC44_CULQU
aaaattatttagatcgttaggcttttttaaatcctctggaattatttttatttttatcgggaagaaatttattcaactttagtgtcttccacatttcttttgatgaattattattgaattgatgtataaagtatgcctttttttctctctcaatagcccgattagtaaagttacgcatttgtctataaaaatctaaatgtctctgtaatctagtccttttaaatttgcttaaagctttgtccctctcgttcatcataattttgatgacatatgtcatccatggtgctctggctttagtgactctagaggtaactatgggaatatgtctatcaaataaattatttaagcaattaactaagtacgatatttttgcatcaatattttcctggtcatatattctgaaaaatgaagtattaaacaaatcagcctgaaaggattcttgattaaaatttttaaagcttctatatgtacacattttagattgttgcgatgtaccacctacatttaccttacaataaacaatagagtgatctgagatgttatgatgtatgacacccccctccactgcagctcctttttgtactattacataatctagaagtgttgcagatgtagcagtgactctagtaggaacgtctatcaattgacaataattcagtgattctaaaa

SEQ ID NO: 10845 - DNA, 669 bp, Diabrotica virgifera
  SmartBlast Evalue=2E-65; Info=poly-(ADP-ribose) polymerase n=1 Tax=Tribolium castaneum RepID=UPI0001A4719F
ggtcctctttcttcaaccctttaaaaccaggcagcttatctccagattcgaagtatcctaggtcagctctaatttgagcaaaacaagtaacgtgatgccagagatcttgtcctccatattttctacctacttccgtttcaaaatcttttttggcaatacggacctcatcctttaaaatcttctgttcacatcctctgcaagcagcccttccggacttggaatactcaattctgaaatccttcagagcttctttcttcaatttagcatcgattttatctccagctcgttttttccctttttgtctggaactatagtaacacttgacagtccgactcttccctttatcttgtcttggtcttcaactctcaaagattcgtagtgttcaatgtcatcgacagtctttggtctttgttttttgtaaaaaagcactcaaagtggtaccaattgggtgtttccatcgaaatgtgcagactggaccataacagcaagacgcaaagtcccctgtcctattggggtcctgcagcctttgcagctggcacgaccacttttggcatattctgccagatacggtagatcagttttgctcatttttgaattagaaaaatgagtcttacaacgttcaatttgattataaaaaaaaacagataaacaaacaccggcagactcaac

SEQ ID NO: 10846 - DNA, 665 bp, Diabrotica virgifera
  SmartBlast Evalue=1E-47; Info=Transposase (Fragment) n=1 Tax= Sphyracephala europaea RepID=A4ZGV4_9DIOP
ttttcattgatttgtgacacggtgcgttgtcatgatgaaatagtactttcttcttctttaagtggggtcgttttttctcaatttcgtccttataatttcgcaataaacgctccaataatgcaatgtaagagtcgctgttaatggtttttccgctttcaagatagtcaataaatattaaaccatgcgcatcccaaaatactgatgccttaaccttgtcagccgactgttgcatctttccacgctttagagtcagttcttcacgtgcagtccactcggctgactgtcgattggactccggtgtgaaatgatggagccatgtttcatccattgtaacatatcgacgcaaaaattcggttttattgctattgaacagcttcatacacttcttagaatcaccaattcgttattgttttatgaaatattgtgagccaagccttggctttaacagtatttttttttcgccaaaaagcaaagctttattaatacacgaaatttctttttatccattttctttaaactaacacaagttccttcactcaaaatgctatatctcaaactaatacttcgacagctgtcaaatttataagaccattccagaatgacgtcatttgacatcggctgatgggcaaacatcttataaacaaagtacgttagtgcagaaaacc

SEQ ID NO: 10847 - DNA, 662 bp, Diabrotica virgifera
  SmartBlast Evalue=3E-50; Info=Aldo-keto reductase n=1 Tax=Aedes aegypti RepID=Q172U4_AEDAE
gcgatatggcaaaagacatgaattttaaattattaagtggcgatctaatgcctttggttggatttggaacttaccaggttcgacggtgacgatttgatcaaatctgttttggatcatgctctggcagctggataccgacttatagacagtgctgcagtgtatggtaatgaggtatccattggaaaagcattgaaagagttgttaccgaaacataacttgaccagaaaagatatatttataacaacaaagttgtctcctagtaatcaaggtgaacaggcatatagtgcccttcagagatccttgcagaatctagattgtgaataccttgatttatacttgatacactggcctggagcacaaggcattaacagtgaaaacaagaataacacagttcttagagatgaaagctggcagcagatggttaagggtgttaaaaatggcctaactagaaatatcggagtctcaaattataattaagcatatgagagaattattaaacaaaaaccacggtattaagccagctgtgaaccaggtagagtggcacccatattatcatcaacctgaactgttagatttgctaagaaaagaaggcattctattacaggcttactcttcactaggaggtagtaataatccagatttgttaaatgacaaagaaatta

SEQ ID NO: 10848 - DNA, 671 bp, Diabrotica virgifera
ctttttcttatttctaatttaccttaactgacagtagacaatgtaaacaagcttttgtttctaaaagcaacttcatattattctgtttttgttaaaagtaaagccaatgaattttgtgccaaaaatttttaggacatacgttatattgcaatatctatcccgtacgtataattaattttataattcggttagtgctagagaaaaaaatcttcagaagaatctttggaccttataacgattcgaatactaaccaataccgaatgagaacaaatgccgaggtcaaacagagttgatatagggcaagcccaagagattaaaccccaacgtctaagattagcagaccatgttcatagactccctaataaccgccttgccaagctaatctggaggagataacatatggtcagattaaggaacagcgagatcacacgtgagactatccactgacccaactatcatggatgaacattcgagatggaagtgagttgtgccggtggttctgcagtcagctaagaccaactccgagttgtagtgctacgagcggaagaagaagttagtgctaatatttttttatcaacaacaaccacgacggttttaaactattactacggttgcccagatcgactaaccaatgaacattaaggtgcgattacgtcacgagtatactgtca

SEQ ID NO: 10849 - DNA, 668 bp, Diabrotica virgifera
  SmartBlast Evalue=2E-63; Info=Endonuclease-reverse transcriptase n=1 Tax=Bombyx mori RepID=D7F163_BOMMO
ctttctgtacttgatccgtccatcgagtaggtgagcgacctcgacttctgcgcccttcaacgtttcccgaaattataagtctctcaaggttatcatcacttcttcttgcaatatggccgaaaaattttaagacagtgtagaggcaaataaaggaaagtcgagtctgaatattaatctcttggaggattgagtgatttgttctgtgttccgtccatgagatccgaagcattcttctccagcaccacatttcaaaggcgtcaatcctttttctgtcgtccgatttcattgtccatttttcggatccgtaattaaatatgggaaaaattaaggcacgcactaatcttattttggtgttcttcgacaaggagcgatctttccagattttcgataatcgactcatagcgtttttggccatgcctattctcctacgtatttctgtttcacaagatcctgtattactgatgtaggatcctagataattgaactcgttaaccacttcaaactggtctaaggctcctgttgtctgaagtgaatttgaataatctactatcataatttttttttaaaaacttttcaacaaatttcttaaatatttcatattgtcaaattgacgtatatttctgttattgaagaaaatgggatttcgcaaatgctgtgttataaactgt

SEQ ID NO: 10850 - DNA, 669 bp, Diabrotica virgifera
gcatgcaacggttgtattgcgacttacatgccagttgaatcgtggtcagttgcatcagtcaattagtttacgccgcagttgcagttgtgttggtgagcggaccttgtactaaaagcatgtgtccgactcttagttgacggtgtagcaactataacgtgactatttttgcagtcgagttgcagtagcgttgcagtggtggacaaagagcttaagtatttgtaggcaaattagttttttattaatactgacaaactagctatcgttatcgatagtagtaataatttcttttcgatccaatttaaataatatctttaaagcatctgtgatttactagtaagcatttcatagtaatagagattttctatgattttccattttcctggaaactatggtacctaatatcgtaaaatacctgcttaacaagttcagggttgtgaacattgttagaagaaacttacatgttaagcttatccatggaaaaaattaaaagactgtttatatactgcccaaaataattagggaaactcttatttagatatcagcaactgtacataatacagttaaatcctgtaaatttaacttaagtaccagtcaaaattcaattaatatcaagtgagcttatgagctatagacaaataatgataacaaataccaataactcaaaagtat

SEQ ID NO: 10851 - DNA, 666 bp, Diabrotica virgifera
gcttacgttaaatttcataaccttacttcaaaacgttgaagttttatattgttgtttggtttcggaattacaatttaaaaaataagtgttaatcatgtcgttctcgttcggagccactccaacaccacctcaaaaaaccgttgcctccggttttactttgccttcaaatccaatagtaacttcaactactggatttcaaagcagttttggttcaggagataataaagaccaaagtaaaccgtcattatttgcaaccccctcaagtcaacctgtttcatttgggttaactacaaaggccactacagccccaacaactctctcctttggttttgctactcctacgactgtaccgtttggatcatcaactacgattacacctgcaacaactcctcaatttggattatcgcttccaaaggctagtgccccggccactactaccttttcacttctaggatctgccccagccactactgcagcagcacctacaggtatatcatttggcaccgccactactacagcaacaacttcagctacaggtttatcatttggaactccaattggaactgctacaactacagcaacaacttctgcttcaggtttatctttcggtcttacaacagcgtcttctacaagttctgctgcacctacacttttgtcatcaacaac

SEQ ID NO: 10852 - DNA, 670 bp, Diabrotica virgifera
  SmartBlast Evalue=2E-46; Info=Protein singed wings 2 n=1 Tax= Harpegnathos saltator RepID=E2CA86_9HYME
ccaactacctctcaacacaagaatactgcatttggaacacaacagaattagcaatataaaatctctaaaaacagatccctcgttaaaacaactttgggatctatatttggacaataacactattgagagtatctcatatttggaggggtcatactggttgtctaacttcagggtgttttcgctgaaggataatcgattgggcaagttaccatcgtatgccttggacaacgcattaatgaagaatccaaatatgccaaaagcagtacgattatttcttagtggaaatccatggaaatgtgactgtgtttttacaccagtgtttcaagaactggttttacaaaaatattcttttcaaattgatgacttaagagatgtgaagtgttcttatatgagaaatgatgaaaattccttaaaaccgattataaatttgtcaagaagctcagtctgcatcgtctcaacggatttctctttacaagagggtctggatctcctaaatgcggtcctggccagcctcataatttttattttgggcaaactagcttatgactactaccatttcaagaagtcggggaaacttccatggatagtatccagaatgccttagctgactaatatttagttctacgtgttagttgtatttatgaccaattttgtagatattggatataaa

SEQ ID NO: 10853 - DNA, 671 bp, Diabrotica virgifera
agtaatgtcatatttgacaagttgtcaaaataaaaataaacaaaattaatcaaagaagaaatgtttttcttttttcttttacttgtaactgtggctttttaataaaatagttgcatttataattacatagttaatcatttaacggctgatatttgtcaggtcagatagtttaaattaaaagttgtatttcatcaaacatgaataaatctgttgtaattactggggaagcttcagagacggatagtgaagatgaaatccagaataacacactgaaggcaatgaccaaaactgtacaaggtgctgttataactggggaagactctgaatcagatactgaaattgacaacagtgtggccagtgccacatcagctttaaatcaaaaggagttattggaagtaaacgagagcaaatgcaactccctatttcatcaaaaattaagagaatataatgagcagttaaatcatagttttgaaacccattgtcaaaatacagttcacgaggcaagtaaaaatttgaatgtaatcgaccaacatctactcaggtcccaaataacgatgcaaaatgctgtaacatctttaaagacgctgagtattaactctttgtccattaagagtaaactgcattcccttttatcatcaaaatttcttacaaatgttacattaaacaggtat

SEQ ID NO: 10854 - DNA, 670 bp, Diabrotica virgifera
ggcgcgtttgatgtcttcactgttggcgtttccttcggagtcaacatccactgttactcttactttgaacggatctggtcgtttctcaatgctaatgactgtcacgaactgttgtcctggaacattattatagacactttcaacttcacgtttgattctgtcggcgagtgacttaaattgtggactgtttctgttactgtaatcatcttggtatagttcttgaagggtgaaggcaattctgaatattcttggatgtccgtagtcaaatcttggtgtggtgggaacattgggttcttcttctccagaaccgaaatcaccggaaatgccttctgggttgtgatcctcgtcatcatcgggtccatttccattgtcaatgatgttatcatcatctggatccccgtcatattcacttccttcgtcttcgctattatagtcatcttcagcttgccgatgactcctcctcaacgtgttccctttatgatgatgatcgctaatcactttggctttatggtggaccgccttcttctgtatatggtgatggtctaacttttcaggattagtatccttggaaatatgttattgatacttcgttttatcctatttacagtacttgtaagccaatgttcttctactggcggactagattcattttctattacatctacttgtc

SEQ ID NO: 10855 - DNA, 665 bp, Diabrotica virgifera
ggacccaactgcgacaatagtatggaaaaaaggtttaaccacgagttacaatcaacgagttacaatattacaaagaaacatctatagcaaattatgcaaaaatacaaagattgcgctggacaggtcaccttataagaattgataacgaaagaatacctagtagaacgtttagtgaaagtatggtgggacgtcggccaataggaagaccaatgatgatgtggatagacgaagtgagaatcgatgctaaagagatattaatggtggatactggaggagaatagccaaggaaagggatgctttgaggtagatgctggagaaggcctggacctgacttacataaactgtagagtcatcggagagagagaagtttgtgatttaaatgattgaaatcacctttgggatcatagattatacataactatctgttttttctatcactttttttggatagcccataggtgtctatatagtacagattattggagtgggtagtttttagggaaagctcagattgaccatctaaaacaatgaaggaattcgattgaattatctccaaaaaaccactaaaaggaaaaccattaaaactactactgatcataataatatacttattatattggttgtagcttatgacttgcaataattgacagacttgttttgtaata

SEQ ID NO: 10856 - DNA, 671 bp, Diabrotica virgifera
  SmartBlast Evalue=2E-44; Info=CTD small phosphatase-like protein n=3 Tax=Apocrita RepID=E2BAZ1_9HYME
aggcaagattatttagagacagctgcgtcttctatagaggaaattatgttaaggacttgaacaagctgggacgagagttgcagcagattgttattgttgataattcacctgcttcctacatattccatccagataatgctgtgccggtagcgtcgtggttcgacgacatgaacgattcagagctgctcgacttgatcccgttcttcgagaagctcagcaacatggacaatgtatacacagtgctgtgcaactccaatcatccgtacaataacagcgcacccgcgcaactcaatggtccccaaaacattaaccatgccctgagaggaccgcagaccaatcattctccggcaaaaacgtagcgatcgcttatcatctttcagttggtggtttgttattgagtttgtttaataattaaaggtcgtaagcagggtgaatgacaacagaatggtgggaaatggtattgggcaaccaggctgtacagtagataaattttcatttccttttgcaaaagtcgggtaccgctaagtattgtgacaaaacgaacgtcacctgccaacgtcacttgcagcagccttctagaaactactcgaaataaacagaaagtacttctcaataggtcataaaatcaaatgcattttttttgtatttctatatatagcttctttaaatgc

SEQ ID NO: 10857 - DNA, 671 bp, Diabrotica virgifera
ctagttttgtttctttttgtctcacaacttaatatgttttccaccttttgcgttattttgccggttgttggcgcgctcatcactgtatacaagtttaataatgtgccaatcgtcctcgcgctctcgtcaatgccatgcttccacctgtcttccacctttacctcgacttcccacaagaattggttatagaggtcgttatggcctcttttcattctctaaattgacttccttttatgaaggatattacatccctgccatggctatttcttgtatttctaataaatctataagatatattgaattacccagatcccttttctcatattgcaccaagtattctttttaagatcctttgttccaaggtgataaaatatttgcatatatttgagagtagtccttgtttttgattcatacgttactcctggaaagttagcaaaaatgaagtcagcgtcttgtacattgcccgtttgtttttttttgctgaagttcttttaaatgttctttaggtaattaaatcttacggaatgccttacctattatgcttcattcctccgaatggacactcttacttttttcctttattatgaggcccaaattgtctgtcgtaggtgagattgagactaacaagttttcgctttgatcagtgtatgtcatagtttgcgttgatttac

SEQ ID NO: 10858 - DNA, 667 bp, Diabrotica virgifera
  SmartBlast Evalue=1E-77; Info=RuvB-like 2 n=3 Tax=Aculeata RepID=E2B6H7_9HYME
tcacctctggtttaatctcgccagtgtctccagaaaataacgccaaaaatccatgcgttctgctgttgatgacatcaatttcgtgcaatgttacagtgtggactacttctttacgtttctgcaattcaccttcaggacactgtacaaatctagtttgctgtccagtggcatcgtagtccctagctctagcaaaagatctgcctaatctcgtaattttacctgtggctttgtcaattgtgatcacatcgccagactggaccttttccttcaaaatactgtcaatcatttttcctcccaagtcataaacagtttccatatcagtggttttcaagatgagttttcccacttttgcaccaattcctgtagctggacgttcaatctgcacttcaacaacttcaccttcgattatttcactttcttctttaattcgaacaccaatacttttctaatagcttgagttatagcttcggtcttgctcatttctaaagaatatatttcggaacctgccatacttgtgaaaggggtatcttgaccaagtgcgtgagccaaagctgtagctattgctgtttaccagtaccaggttgtccagccaagaggaccgctctgccggcaattcttccttctctaaccattgtagaacgatacctacagctcttctagctgttac

SEQ ID NO: 10859 - DNA, 671 bp, Diabrotica virgifera
  SmartBlast Evalue=1E-16; Info=Splicing factor 1 n=3 Tax= Aculeata RepID=E2B8Z7_9HYME
agtcattttacgtcaatgtacagaaggcagaaggagccttttttttttatttaagtgaacgtgtttaacatcaaccatttattccatttctaaaaattcccatataactatgggttcgtcgaggagacgggatcgttccagatctcgagacaggcgagaccgttccaggtctagagacagagaccgagacagacgcgataggaaacgtagtagatctcgagacaggtacagagatagggatcgtcgaagggacagaagcagaagtcgtgatcgcgatcgcgaaagacgccgtgaaagagagcgatctataacgccaccagaacccgatggcgataaaatgatagcagacacccttgctactctagctgccaccagaaacttcgccagtttgatttcaaaagagggagatggcaattcgaatatgtctacagagagcagtgacgatgaaagaaggagaaaaaggaggtctagatggggaggtagcgaacatgagaaaatatttattcctggaatgcctaccatattaccacagaatcttaataaggaacaggaggaagcatatttacttcagctgcagatcgaagaagtgagccgtaagctgagatccggagacttgggcatcccgccaaatcccgaagaaagatcaccgtcacctgagccgatttatagca

SEQ ID NO: 10860 - DNA, 670 bp, Diabrotica virgifera
  SmartBlast Evalue=5E-31; Info="TraB domain-containing protein, putative n=1 Tax=Ixodes scapularis RepID=B7QDL3_IXOSC"
ccgtcaccgactaaaaggaaagattacttttattttatttttttgttttcgtttctagattgatattctagtttttaacttaaattcagtaggatggataattccctaacaaattttgaattaactgagagcaccataaaaatcgatccagattctgaaaacggttctggatctgacaaaagtgacccaatggaaatagtaagtataggcgatgctgaatcttcttccagcaataagtctgatgatgatttcgataacaatttaccaaaaactgttacccttttgaaacacgaaaagactggagctaaggtttatcttattggtacagcacattttagtaaagaatcacaagaggatgtagcaaaagttataacaaatgttcttccacatatagttgtactagaattatgtagttcgaggacaaatattttatctttagatgaggagactgtcttggaagaggccaaaaatatcgatatgcagaaaattatatctacaattaggactaatggagcgtacaacggtttgatgtatttactattattaaatttgagtgcgaaccttacaaaggaaatcggaatggctcccggtggcgaattcagagttgcttataaggaggcctcaaagattcctcactgtagaatacatttaggggatcggccgataaata

SEQ ID NO: 10861 - DNA, 658 bp, Diabrotica virgifera
  SmartBlast Evalue=8E-50; Info="Collagen alpha chain, type IV, putative (Fragment) n=1 Tax=Ixodes scapularis RepID=B7Q188_ IXOSC"
gtttgtgaagcgcctaccagagtagttgcagttcatagtcaagctacggaaattcctcagtgtcctcaaggttgggaagaattgtgggtcggatacagttttctgatgcacacagacgctggagcagaaggttcaggccaatctctagtgtccccaggttcatgtctggaagaattcagacctaaacccttcctcgagtgtcacggccatggaacctgcaactactacacaacagccgtttcgtattggctcgccacgatcgagaactactcaatgttccgcaaacccagaccggagactctgaaggctggttcactgacacagaaaatcagtaggtgctcagtttgtattaaacgcaggatcgactcaagacgacccaaccaacctgtacctgaagtacctagcgaaattaaccaaccttataggtcccctggtaacagaccaacatatcaaccatcatatccatcatcatctggatcctcatcaggttcatacactggctcacaatacagatcgtcttctggatcacaatatggcggttctggatcacaatatggcggttcttctggatcacaatatggcggttcttctggatcacaatatggcggttctggatcacaatatggcgttctggatcacaatatggcggttctctgga

SEQ ID NO: 10862 - DNA, 668 bp, Diabrotica virgifera
  SmartBlast Evalue=8E-94; Info=Disks large 1 tumor suppressor protein n=1 Tax=Camponotus floridanus RepID=E2AM49_9HYME
gccgaagatatcacacgagatgtgcgaaccgtagttcttcagaaaggtaactcaggtctcggcttcaatatcgtcggtggtgaagatggcgaaggaatcttcatatcgttcattttggcaggggggcccgccgacctgagcggagaactccgaaggggcgatcagattctgagcgtcaacggagtcaatctcagaaatgccacccacgaggaggcggcgctggccctgaaggtaaataatcatctgggtacagtcagacagtcagcgttgtagtacaatatcggcccgaagagtacaacagatttgaagctaaaattcatgacctaaaacaacagattgcgcatcctgttacgggtggtactttactcagaacatcacagaaacgatctctctatgttagggcattattcgattacgatccgatgaaagacgacggtctaccgagccgaggtctggcattccactacggcgacattcttcacgtgacaaacgccagcgatgacgaatggtggcaagccagaagagtacttaatacaggagatgaacagggtatgggtattgtaccgtcgaagagacggtgggagaggaaacagagagctagagatagatctgttaaatttcagggacattcacccaatattcttgataagcaatcaacattagatagg

SEQ ID NO: 10863 - DNA, 670 bp, Diabrotica virgifera
  SmartBlast Evalue=1E-99; Info=importin subunit alpha-7 n=1 Tax= Saccoglossus kowalevskii RepID=UPI0001D3A162
gccgccgctagtggcgttggtgatagcccacgctgcttctttttttcgttttgaattctgatttgctcaaaatttcgatgaggagagggaagatgttggcgtctattacagcctgtatttgtgtcctattgccagccgttatgttactaatagtccaacaagcttcctttctaatagattccttagacgaagaaagcaagtgatgtaaacatggtaacgcagaacaattaagaataacttgcgtctgtacgtcgtcccctgtgacaatattgccaacagctctaagcgcagcagacactacgtttggtggttgtgccatcagtagctcgactaagcgtctgcaaactcctgcatctaccaccgcctgtattttctcgttaggcccgtcagataaataactcaaagaccagcatgtatccgccagcacgtcagggtctgtatgaaatagtaatctagacaaaattggtaaacaaggcgcaagtttggagaaatctggaggtggattcttgcctctacacagattggaaagagcccacactgcatttcttgtcattgttaagcgaattggtttgctaagtatttgtaaaagtggtactaagattcctgcttcagtaacagtatcacgacattctggagaatctcccgcaatatttcctaatgcccaaactgc

SEQ ID NO: 10864 - DNA, 670 bp, Diabrotica virgifera
tttctttgtctgaagatactttcactaaatactttacatctttcttgatatcttttggattctttttgatggtgtcattatataccaatgaatccaagtctggtgatctttccttggttttacgtttgtccatctccacttcagtcatttttgtagcaccaggtttattcatttcattatctgaagatactttatgtatagtaacaagcacttcaacactgtttggacgaggactagcagtttctttctgctctacagatgattgcttagagaaagtgataaattctacatttcttggaggttttggtgtagggggaggtggtcgccaaggtccagaaaaggattcgtacggccctacttcactggcatcaacattgaattcagcactagaaaacgtatcagacgatgtttcgctgggagtattatacatgttcactcttcgtcgtttttcgtcaaatgtaaacataatattgtcatagcttttatatggacgtagagtctcttctactattggagtaaaagcataactttctgactttcttctcacttcctttatatctggatcataaataatctccttcaacttagggttcctaagcacggattcttctgttggtttactgataggtagactctttgctttatcgttctttttcagagtgttctttct

SEQ ID NO: 10865 - DNA, 668 bp, Diabrotica virgifera
cagcgctgatttcaaaaatgtaaaccatttttgtctatcacgtcaggttttctcacaaattagggggtatatttgggtataataacaaaatgtaagcaatttgtcacctctttccaacgttataaaatttattttatttattagtcatgttctaatctacattgccggtacacttacatttattttttaagctcaaaagtccttataataacgctaacgctttctgtcgaagcttcttttactgcttttccggctgtggactcgttgagggtcatctcttttcatcacccagcagtagtctgctatcatgctgacgtttcatcttccttggtatcttctttccatttctttgatgtctcggtgaaatctttcgccctgcttttcactggcatcaccaatgtttgccgggaagtactcaagatgtgagtggagaaagtaaagcttataatgctcatgttacagcccttcttaaagttgtcgatcatgtctgcgacgattgtcttgtagtttggatctcttttgttaccgaggaaatcggtaacacctaatttaaaagatgtccaagtcgccttttcattttgttcacaaagttgggatctctcaatagttttctatgtccagtccgacaaagatttcttcctttagtttcgccgtggataaaccaggat

SEQ ID NO: 10866 - DNA, 668 bp, Diabrotica virgifera
  SmartBlast Evalue=1E-33; Info="CG8481, isoform B n=14 Tax= Drosophila RepID=Q59DX8_DROME"
ttattgatggtaaagggggtggtggtggaggagcgagaggagtgacgagccgcgggagagaactgtttttaatttcatttgtaagcgtcgatgtcaactttaaattgctattttttatattttttggcacttccgaaagtttgggcacaaaacttccatatatagaaacaggggcgcattgactgtaacccaatttctggtaaaactgttcttggcctttcgttgataaatatatcatatctaatcctaaacttctacaaaacgtttctgcttccttcattaaaattgagccataaccctttcctcgaagacttttttctatcactactgattctagaaaacaggcagttcgaatgcttggaattatggataatttaagatgtccaatagcgagtttatctttaagaagaaccagtgaggtaggtaatgtatcacaagattgttgtaagctatgcaagcgagctgtatctgatctcttccattcttggtttaaaagtttgcagcaatccatcaggtattctggatgtctgtgtacagacaccacttccaaattcatatttttcgctaagaaaatatgttgaggtttgcgtcatttacatttttttatgtaagtactaaagtactttataaaaaatatgttatatattatctcttctgtactccatgtt

SEQ ID NO: 10867 - DNA, 667 bp, Diabrotica virgifera
  SmartBlast Evalue=6E-27; Info=PIH1 domain-containing protein 1 n=3 Tax=Danio rerio RepID=PIHD1_DANRE
cgacaagaacgtcatatatacctatttcggtttattaaccttcaaataatagtcaaataaacgtcagagtacatcaaaatctaaacgtcaccgtggttaccaatggtggttacattaaaggttagaaaacaaaaatattagtgacaatttattatttttaaagatattttgcagtcttatttaaacatgtcaaataatgcaggatctatttttcttgatgttgactccagtatcgtcgaacacaatcttagaattaggagggattctgaggaagatgagctccaaaagttgatggaacagaagagttatccgtctaaattaattaagccatcatcgggattttgcatcaaaaccagggagatcgatgaaaaaaccaaaatcttcatcaacatctgccaaactaactccattccgccaccaaaagacatctcagcgacagaacttcaagagattttagaatccgatgaaccgggggattacagggtgcctatgagcatcggcgaaataaggacagaaaatgacaaaaagggagaaagcgccaaagtttgcgatgttgccatcaatccctccttttacaaaaaagtcgtggaaatagcgacatttaaaaacttcttccttgccattgtattccacggtattcaagacaaatacaatatacagtgcgtag

SEQ ID NO: 10868 - DNA, 669 bp, Diabrotica virgifera
  SmartBlast Evalue=2E-16; Info=Transmembrane protein 43-like protein n=1 Tax=Harpegnathos saltator RepID=E2C9B7_9HYME
aaattgtttatttatttattaatcaatgatattaaaagaatttattcagctacttcaagtgtagctgtaattatgcaccaaaattttaaagcaaaacttactttgacattttattttttgataacgtcaaattttaacccgtgatcggaggagtagctaattactgtcacttgctgttgcgtttagtaaatttcctacttatttcatatgctttaaatgatgacgcacgggtaaagactcgcttactcaactgtacatatttctactcagtttatgcgcatattattatatccgtgatctaatcccatagtgtagtagagaaacggacttactgctgcaaagaataaacttgcacccaacattggtctatacataatccaagcagtagctactacacagagagctacagaaaatgctagaaccaagttgctgaaagacagtggatctccggtgtagaaactcatgaatgaaccatggaagaccattatttttataagccttgataagcaaacagcagcgccataaatgataaaaaaacctaatcctcgtaatttccatgtttccaatctcgcatcaaaatgctccgcagaaaacatctgatttatgtttaagttcccttgtctcagtagagcaattttgtgaccttttgatgtttcataaggaattaac

SEQ ID NO: 10869 - DNA, 670 bp, Diabrotica virgifera
gtcaatatgatgtaattatcacattgtatatgtctatttcgttttatgttcaaagatataaataatctttgatctataaattttggaattcattattacaacaatcatttttgtgaatctgatatatttgctgtactggtagttatttttacggtatatttaccttaacacaaacaaaaaatgtatgagatctacttaccagcaagtaatacttaaatttattgtagagcaaagctctcaaatatttttcatcggtgcttcaaattttgagcttgtaaaaaaatcggcaacgtcgcaacgcaacggctacgtcgttattggttgtatcagatactcttgcgcataatgcgctcatctattggttgaaattttcgctccaacttaaagcgcagttgccgaggttatgaattatcgtacatttttcaccttgttctcaaatatttttgttggaaaaacttttttatatgttttattcgcttgaaaattgctcaatgaattggattgtctcgtattaagaagatagtctagtcaaagatatgaataatcaaagttttcctggaaatcgttctgttttagtgccttatatgctcttcttggtaccatctataaatattcttgatagctgtatgctcccgggctcgttcgggtcgtaccagggtacctcgaaacg

SEQ ID NO: 10870 - DNA, 668 bp, Diabrotica virgifera
  SmartBlast Evalue=3E-53; Info=Ankyrin repeat and LEM domain- containing protein 1 n=1 Tax=Camponotus floridanus RepID=E2A001_ 9HYME
ctccctcctgtaaaaatatattcattgccttatacaacaaataagtccccaacatgcacttctccttccgtttccacatcgaagcagtaccatagaagtccccgatcttcatattcgcaacattctccattcttagagcctctatcatggcggcttctctggtataggcctcaacggggattatattgtggaaaatatgtagaacgaccacccccaatttgttttcccatatatctatgatgctcttgattttctgatcagtagtcgggggattcccctgtttatagtgtgctattgcgtcgtagaggtgagaatatgggcgatttttcttaccctttccaacatagaatatagaagaaaggaacgtttcccaaacatctttggagtccatggtatccgccctacatggtagattgtccgtttttctcggatctaacaacaaataagtaaacgaagacttactgttcccctctcgaaagtttctcattgtggacggagagctgaattgctttacaagtgcatcttccaataatttgtaagctgatagattggtagtccaactggaatttttaagagtagcctctagttctggagaatacacttttttttgattcgatttttctcctctcttcacgttcagtagacgatagtttctttagctcgtacaa

SEQ ID NO: 10871 - DNA, 670 bp, Diabrotica virgifera
actaaaagttggtcaatcatagtaagatattccaagcctggcggacagttgggaatgccttgcggcatattcatccagccaccagctgggcccatcggctgattcgtgatcggggcgccatatccaggtcctggagggtattgacctgggggtggttgatagccttgaggagggggtgggccgtaaccttgcggaactggtgcatagcctggagcattaggcgttgggtaacctggggcaggtgcgggaggataattgctattataaggtgttgggtaagcaccgtgttgttgatttggtggagggtacgacattgtttgtatcgtaaattacacaaaatactatcaaatattctacgatactatcaaatatatatttctggagctaccgtatcccgtaattttctccacacgtcaaattcactacaggatttatttcgaaccgaaatgtagaaatccactttgtgtcactgtttcatttattagataataacaaataataaccttaaaaactgttctaaggaaatcaaataccgcagaattaacataagtatgaacaatcagctatttttagtagcactaggttaattttgtaggagcaatccctgtcattcagattcaagaaaaaaaaaccgaccgagaacgaattgagttgagttcatgagttgagc

SEQ ID NO: 10872 - DNA, 650 bp, Diabrotica virgifera
  misc_feature (561)..(562): n is a, c, g, or t
  misc_feature (564)..(565): n is a, c, g, or t
tccattgtgttggggtttgtttagcataatttagtagggtgtatagtggtcgcactttctgcaaagtatgaaaaggatacgttgaatggttttaagattctgagcaaaaatggtttttaaatttttggataaaacaccctgtagctccgtaagggaccacattttatataagtgttttgggttgaatcttcgtattttgtgctaaggtttctccggttgctgtatggacggttattaatgaaacaccctgtataatagtaaagaaataagtttattgtatattgttgaaacattttgtctacaaatggtttgctgcctttcattattgtgtgcaaaccattctgaaaaaagattatggtgttgtaccgcacaggtagaccgcaagctatagcagaaacgcgacggtagaccggatactatagtggcaccgttatttgtgttgcgtatccccaatcggtctcagttgtttgactagcagaaatattgttttgtttcgtgttttttttttgtgtagttaggtgaatattggaaaaccccccttttctgctacttgaacgcttnnanntacttcttgtatatttatggatgctcaatattataagaataagtagattatgtagtatttatcaataataatgaataaattgtgt

SEQ ID NO: 10873 - DNA, 659 bp, Diabrotica virgifera
gtaattaaaggaattgctttactgaagatacagacaagcttattcaaaaaatcactgaaattatagtccacgtccatagaggaaagcgccactcagaggttaagcataaattttggaatttacgaaagttccgagcggaaaaaatcctgcctaaacgtcgggttttcgaggagggtttgctgaagatgttaaacttcgtataaactgcttcatgatcagatatcccgcattaataattgtagagcagacatcaaggggtgagaaatctgagacaatataatcaattatggtagatgaagtttttgtaatccttgtaggagaatcaatgtgcattgatagaccatatgattcaaatatgttgaccagggatatttgtgtagcacaagcagcagcataattaatgttgaagtccccgcataaaatttttctgcttttatggggcaggtcatctaacaaattaagcaggttctgaaaaaatagttccacggaagagtcaggtgatctataaatgcaaataatataaagattaaggttcttactgtaaactaaggaaaactcaaagaatgcttcacttaatagaaagtcatattttgttaccagagaaaatcattatttgtagaaagaattaggtgcctccatgagctgaacttggacggtca

SEQ ID NO: 10874 - DNA, 670 bp, Diabrotica virgifera
  SmartBlast Evalue=3E-65; Info="Centromeric protein E, putative n=1 Tax=Pediculus humanus corporis RepID=E0VUT3_PEDHC"
gatttggataacaggccaacggcgcaggaggctcagaaagtagcagacgatctacgatcgaaactactggctgccgaaactttgtgtgaggaattaatggacgagaatgaggatattaagaaagaactgagagatatggaggaacaaatggatgagttgcaagataattttagggaggaccaagcagtagaatatacatctttaaaaaaagatctagatcaaacaacgaaaaattgtcgaatactatcattcaaactaagaaaatcagaaaggaaggcagcacaattagaatttgaaaaagcagagttagacaagaaaatgaaggatatatcaggaagcggttcaacagttacgcaaatagaaaaaattaaacagttggaacaagacctgaaggtatcaaatgaagtctctgttcgcttgcagaaagaattagatgaagctaaaacaaaaatttccaaagtagaggataccaagggattaggcaataaaaaggcaccattactaggaagcattgccaagaacccttctttagatggaaaagtatcccgcgagtcacttaccagaggaggttcccaggacgacccagtccaactccttcgggatcttcaagattcgctggagagagaagcagatttaagagaacaattgaaatttgctgaagaagaggctc

SEQ ID NO: 10875 - DNA, 666 bp, Diabrotica virgifera
ttctcagaaattccccattatattctaattccaaaaaatacttaaaatgcttacttcaaaggtcttgaaaatgaatgctttaaaacttttccaaccatctgcaaaaaagctatgaaacagcaaagcaaacatacgatggctccgctgtttataatttgttttaattgtttcaaagctcaaaagtgagtctatggtacaatctaattactcacaaaaatatcaaatattagttcaatggttatatttaatcaaagattaaaaatatttttctttgtaatttttagcgcgaaagtaagcttgatacagagccggaactaaaatgttcactcgaagcgactgactgaataatataattttatttattaactactgtaatcgcgcggcggtcgtcgctttgagtgaaaattttagctacggtactgtatcagtctactttcgtgcgtgtaaattacaaaaaaatatatataatctttaattaaaatacaaccattaaactcataatcgatatttttgtaaataattagcttgtactttaaactcacttttacgcttttaaagaattaaaaaaaattataaacaacgtagaatcgcacgttcattttgctgcttcataacttttttgcaaatggttgcgtaaaaagtcttcaaagcacacatttcaagatc

SEQ ID NO: 10876 - DNA, 667 bp, Diabrotica virgifera
atttaagtgttgcccttatgaatccatctcttgattggggcccacatacattagaccaggggtgaccaacttaatcggactcgagagctactgtttgcctttctaattctctgggatctactgactaggaagttttgtaatatttaggacgggaatagataggtagatcgagaaatgagagaaagagaattggatgaagacctttggatggaccgaagtgaccgaagtgttatttacttaatttttttaaacatgcccctgatctttaatttactattaaaaactgtactatcattaattttcaaatggagtatggaagaaatattgcactgaataagggcttgaaaagaactgtatcttaatttaggttacttttatttaaatacatgttacaaaataaataaataaaatgagttatattaagtttaaaatgaatgttgtaagttttatcacaaaacgtctaggtggcattggtatgtcacagtgttaatgattttaagtttttttagaatccgcagataaggcagaaacactgtaggtcaggcgagaaatacaggcctacaataattacgaatacagtaaggacacgatggtttttcatcgattttaaacagacttttgaacgaatcaaagaaaggaaactattcacaggatcgcaatatatgga

SEQ ID NO: 10877 - DNA, 668 bp, Diabrotica virgifera
gttcttaatatgtttcagatcattttagttgcgtttctttataattttgtgttgtacaatgattaataacattttcactggaagaatttatttaaaaagatcatatgcctcatttctgttgtgttttgaagttttaaatgcgatgtattcgtgataaagttcagttttatcggttaacatcagtgctacattttaaaaataaacaactaaataagttatcatctgagagacaaaaacaatgattaaatgatataaaacgtcctataaacatgctaaataactatgtctatgttacttacgcttggaaaactgtctccaccgtaggttagttcagaccccttgagggaaaatggacctatattatttattttgccactcttttgcttgtacctactagcaacatttttattgtctaccaacaaatgtatatgcactcatgtttatttattcactgcttaaaactaaataaaatcattcaagtacttctacaactaaaaactacacaaaatctacaacaaaatgttcgaaaaatataactaaaagactgtttacggttaaaaacttaagaaacatgtggtacaaataatataaaacaaacacaatgttttgacagttttgcctaccagcgttttcataaaagtcaaagtgtggaatgccctataagtcgg

SEQ ID NO: 10878 - DNA, 669 bp, Diabrotica virgifera
ttctacaaattttatctttgacaaggcaagagtttcaagatatatctctggaattaactatacgaattaaaatggcttgactaggacgattttatctaataaactcacaatattctttatgtatgttttttcccaaagaaaaagttgggattgaaataaaatacaaattgactatttaaaatatatttattaatttcattgcactgtgccattgcacttcactttggtttcagttataataaataaaaataaaatttcgcattaatatctctaatactcttatgacttatgactatataaattattgtagtgcattcgatgtcatttcgaaaaatattgctcgacttcatagcaatttagtcaagagttggcaaatgtgtgtaaaatttattgaataataaatttaaccgttttgacaaaaagcaattgaatatgtacttccggcataactgataacataaatagcttcagaaattcaagacactgttggtggataattagataaatatttaattacatcacattacattaatacatcactggaatgaagataactttttaacaattaaaactataatatactactccaagaaattaacgcacgacctcaaaaataggccacttttgacgtctcgaatttcccaaacctgttccgatttaagtgatttt

SEQ ID NO: 10879 - DNA, 669 bp, Diabrotica virgifera
  SmartBlast Evalue=4E-77; Info=Long-wavelength sensitive opsin n= 1 Tax=Luciola cruciata RepID=C0SPM5_LUCCR
tgtgttggggtccccgagggcaacatgactgcctgcggtaccgattacctgaaccaagatccgctaagcaagagctatctctacgtttacggaattttcgtttatttctttccactcttcatcatcatctactcatatttcttcatcgtacaggctgttgctgctcacgaaaaatccatgagggaacaagccaaaaagatgaatgtagcctctctccgatcttcggaagcttcacagactagtgcagaatgcaaattggccaaaattgctttgatgaccatttcgctatggtttatggcatggacaccatacttggtcacaaacttcgctggtatcatgggcaattccaaaatcagcccgttggctaccatctggtgctcgctcttcgccaaagctaatgctgtatacaatccaatagtatacggaattagccatcctaaatacagacaagctctagaaaagaaattcccatcgttggtctgcgctggagctcaagacgatacggtctccactgcaacaggagtctccggaggtgatgaaaaaccagcagcctaaagcctaaacaaaacggaccgatttttttactcgacgactgttttcgtatcttggtgtacgtacgctggaagatatgaaaaacaaaatatttgtaaatatgaacataaaaaatca

SEQ ID NO: 10880 - DNA, 667 bp, Diabrotica virgifera
tgtgttgggaccgatagtaagaaaagtgaagatgacaaaagccgtgttggttcaagatatacttctcccttttccactgcatatcagcgtgatactactcctactgcaggttatacaggaagaacagaaaccagaattaagccattgttggacaagaaagacaccagccatccacctgtgacgtataggccgttagcaagaacaggatctcgatcacgtgatccaagcccagtagaaaaatccgagaaaagttcttcgtcgtcatcaaattacaattacaacaaattgtaccctagaccttatcaaaggtctgcaagtagagaaagaactgaatcgattggttctaccactaccattccaaaatatgttggaaggagttctactacaaaagaagatgcacctagtagatatgttggccgaacatccattacaaaagacgaagtgcctaaatactcaggaagatcatctatgtctaaagacgaaccaatttcatctagatataagataggcagtcgagcatcttcccgagaagatctatcttcgtcaggttcgcaaaaatatattaacagtaggtttctacccaaaaacacagttgaaaaaagttatacggcgtattcaagacatcatctgcaagaaccagtgagacgagcagaaaaaatagggagat

SEQ ID NO: 10881 - DNA, 669 bp, Diabrotica virgifera
taaaaactatttaaaaagtcactacaattataaacttgcttttttctctgccatcataacaataaaaactaatatacataaagtttttttatccataatctccatattgaacaattattgacagatgattttaacacccaatcagatcccgtataacgtttgagcgactaataccatatagcgactaatacaatatactgtcggtgtgcgcatgcgctagggaatgtaaaaattcaccctcgtgcctcaagaagtataatcaaaaattgtttctattacgggaccaatatctaacatctttaacgtactattttctcttatttgttatcattgattatgactcatttacttacatatattgacaatctatattagatactgctggtgtagtgtctctaataccatcattactgtcaatgttgtggcaattttataaagtaagaatgtgtgtgtgacctcacttggtgtcggtttgtaaggtcttgaattatgatcttgtcagttttgaaataaaatgcaatacaatagaattcttcagagcagcggtagatatattgttagatagatagcggcagataattattgtgcaaaagtaaagcaaagcaaaaattatttattatcaattcaagtaaaaatgctaaatatgaacaaaagttgtatacaagggac

SEQ ID NO: 10882 - DNA, 668 bp, Diabrotica virgifera
  SmartBlast Evalue=2E-80; Info=Protein suppressor of forked n=3 Tax=Aculeata RepID=E2AWC7_9HYME
aagaggtattattacacctatgacgggaatggaaacattttggaaggattacattgcatttgaacagaatatcaatgctataattgccgaaaaaaatgagcatcgagcgaagcagagactatatgaacgctagacgagtggtaaaagaactagaagttcaaattcgaggcatcaatagaaatgccccgagtatccctccaagtgccagtccagatgaaagaaaacaagtggaactgtggcaaaaatatattgcttgggaaaaaagcaatcctctacgaactgaagataccgctctcctgaccaaacgagtagtttttgcccttgaacaatgtttactatgtcttggacatcatcctgatatttggtaccaagccgcacaattcttagaattcagttgtaagattttggcagaaaaaggggatgtaaacgcgtccaaattgtttagtgaggaagctgcaaatatgtttgaacgtgccacgagtacgttgcttagtaaaaatatgcttctctactttgcttatgcagattatgaggagggaagactgaaatatgaaaaagtgcaccaaatttataataaatattggaaaccagcgatattgatcctacactggcatatattcaatacatgaaattcgccagaagagcagaaggtattaaatccgcgagag

SEQ ID NO: 10883 - DNA, 669 bp, Diabrotica virgifera
taataccgatactaaatctgtattatatcaactgtgccagcatcaggcttaatggagaaccaactccaagatgatgatcacaaagtgagtctgataattaagaattaaaatggataatttggtagaaggaaagtttagtaatacataatgaaactgaggtatcatacaactggagccttttactatttctaaaatattgatcaatatttcgttcttcctggatccaaggcggacctgtgaagtggtcctaaaagcctaccctgttagctcccaggcaagctacactttatgaaatacagtcaaacctgtgttaacggtcacctgccaaaacccaaaaccggagacctgtactaacggccagtttcaaaattccccaaaccaattatatgtagactacaaaaactggcaataccggccacctttctctatcggccaatagttctttcattttttgtggccgttactgacaggttttactgtatctgaattgtggtgcaattaatactacataacttgaagctcaaataaagtgtcaatgtcaacagatataaaaattttaaataataaatcgttgtctatgctttggtattaccaaattcggaatttctgttttatcaactaatgcaatctgatctatctttctgataacatttcacatgtaagtaatta

SEQ ID NO: 10884 - DNA, 665 bp, Diabrotica virgifera
aattttatgtgatgtagaaccaaaagatacatacagtcctaaagtttcacttttctatcaccaaccgttattttttaatatccatttaaatatttaacatatatataaatatataaaattctccggtcgcagtgtttgttgccatactcctccgaaacgacttgaccgatttttatgaaatttggcagtattcgaccggactcgcagtaggttgttatctatatttcatacccgtacgtcataagggagttgcccatgacgctgtagctctcactataatgacgtgaaaaatacgaaattaggtaagtagactccttgctgaattctaagcagaaacgtagtaaaattttttcgtctagcgcaatcggtgtccgaaatacaatatctcaagccgtaggaatattctgaggacagaagaagaacgagcgacaaatttcatagaagagaagtggaacagtttaactttgggactcagattggcaaaatataaattgtttaattttgcgaaattttcaaaaaatatctctaaacggaacttttctgacgaagcgtaaacaggagaaaaattctgagcacacaaaaagaacaagaagcaatttataacattttatttaatttttaattaattttgtttaatttaagtattttatttattttcgtttata

SEQ ID NO: 10885 - DNA, 668 bp, Diabrotica virgifera
ttatcttcttaagatggcttacatttctgcaaagtcgtctaccgtacattgtcttgtcaggtgagatgttagatagtcagcattaaataactctgtttagcagcattataaaattataatatcatttcatagctgtgtattcctatcaattggcgaatattacgcagctatgacatctttttacgtcccagaccgcttttaaccctctatctttccttggagtactagttgctgaaaagtgtattgttctcctcctaatatataccctaagttacattcttcttactttttacataatcaaaaacttcctaatcctggaattccgctcttctaattttcctcatttatgacgtggtccttccataatattatattctaagcattcgacgcaggctttacatttcaagaactttaagtttgttaatatatgacctttaaggtccatgcttccattccgtacaagagaacaggctaaacgtaacaatctagcgtcttgaatctcaggttgaaatccaacttgcgatcagtcagaaatttacgaagtttcaaatgaacatttctggcttgttctaccttgctcttattactatacatacccagtttacctacaattcaaaagtactcagtttgagtgtatgcttaacttgaatctcatatcgtcaaaatga

SEQ ID NO: 10886 - DNA, 669 bp, Diabrotica virgifera
  SmartBlast Evalue=8E-16; Info=Partner of Y14 and mago n=1 Tax= Bombyx mori RepID=WIBG_BOMMO
cctaagtaatctaaaaattatttttaggtttttaaatagctgtaaaaacaatctcaattaaaagatatcgtaatatcttgaataagaaaactctctaacgaccatcacatttaaataattgtacaaataatgtctttataatttgaaaagaagcaaaatcaataccatccttgtaaacatgtcattggcaaataataacgtcgttgcagaaaacggcgaacaatacataccagcaacgcaaagacctgatggcacttggcggaaagcaagaagagtcaaagaaggctatgtaccccaagaagaagtacctctgtacgaaagtaagggaaaacaaattttgaacagaaaaaatgaacctgttgtgctcgcttcagggcaagttgccaagaaggccactattcccgggctttacattgttgaagatgaggtggagaaaaagaaaaaaccaaaaaaaaaaataggaagaagttgaaaaacttataagcaatatcaagatctcagagcctcctaagcaaaagtctgccaagccagctaaaaaagatcctaaacctgctcaagataccaatgctcaggaagctaccactgatcctcaaaagaaacttaagaacctcaagaagagactcagggaagttgagtcactggaggaaaaaattaaaaatggtacacttg

SEQ ID NO: 10887 - DNA, 666 bp, Diabrotica virgifera
aagtacatccgagacctaaaaataacttgttcgctttgttagaacagtctacagttacacttttggacataaggttttctaaataatttttagttaccaaaatggaatcaccattcatgtggaaggaaaaattgtctccagttacttaatatatgacaagagagtgtctgatggtttacataaaccacacttactcaaatgatcaacccacgtgtacgttgaaacatcttcggattgaatactggagtccttcaatttatggcagatataaccagccaaattctccaaaccatcatactcgaggtcactaatgttttttcattctgactctcattgaaaacttgaaaatccacaactgtttcgttgttagaatccagcctttggatcaattgtccagaaattggtaaatctgggatgtcgtctgtttaaacgttcgaaaattcgttccgttgtctttcctacccgtatataacttttataaaatataatcaaagctttttgttaaacactttaaaaaaattttaatgggttttccccgaaaagagcttcattttttggtactatgtatcacgttaaaatatttgatttggaatttgaaggataagatcgtcttttttatgagctacaaatttacttttactggttctatagactaagaacacacca

SEQ ID NO: 10888 - DNA, 664 bp, Diabrotica virgifera
  SmartBlast Evalue=2E-78; Info=LTS8 homolog n=5 Tax=Euteleostomi RepID=C1BWT3_ESOLU
tcattccggagatcaaactccagatgtagcacctgcctttattgtttacagaagccataagttggctatcaggagatacttccacatccaagatcatagcatcattctcaggtataagttgttcgttatgatcagtccgtaagtcccacttgtaaatgataccattttgatccccgacaaacaattccacttgatttggatgcagagctacgcagtttatagcactttgtacttcgaatattttggggcattggttgttcctagatctcaagtcccatattctcgctctactatcttcaccccctgagtacatccattttccgtcttcctggaagccaacgcaagtaacatttttggatgttccctcatagttaacaatggcatttggattgttggaagttaagtcatacatgtatatatgctggtaactggctgtggctaaatgctgtcggtctggagttatttctaaagcattaacttgcgattctgcatgttgtagagttctagtacaaattcctgtgtgcgtctgccacaattttatggtatggtcgtagcccccagtggctaaaattatattgtcgttttctaaagtttctatagtcatttttgcagactattttagcattcttttgattcaaaacaataattttcaataacaagcaaa

SEQ ID NO: 10889 - DNA, 667 bp, Diabrotica virgifera
  SmartBlast Evalue=8E-54; Info=Phosphomevalonate kinase n=2 Tax= Bombyx mori RepID=A5A7A1_BOMMO
ttgggcttcagaaatattttgaaaatggaaaacccaaaaataattttagtgtttagcggcaaaagaaaatctgggaaagattacttatgtgagaagcttaaacatatgctaggagaagacaagtgttgccttcttcgaatatcagaacctcttaaaagagtttatgctagagatcacaatttagatttagaagaattgttaagtgatggaccatacaaagaaattcataggcacaagatgataaagtggagtgaagaaataagagaaaaagaccctggtattttttgtaaagcagcttgcgagaaagcatctgatgttccaatttggatagtttgtgatgttaggcgaaaaacggatattaaatggtttgaggagacctatcgagagcttgtcaaaagtataagaatatcagcagctattgaagttagaagaaataggggctggatttttacaaaagatgtagatgatgctccatcagaatgtaatttggatgattttgaatgttgggacctccaagtatcgaataacagtagtgaagacagccaaaatgctttgaaaaagatattagaacttgtacctgagtattaacttggaaggcgatcctgagatattaaaagtaataaatacagtataataaatataattaaaagtgatctttttgataaat

SEQ ID NO: 10890 - DNA, 666 bp, Diabrotica virgifera
caattttgtgctttctatagactgaagtttgaaggtagaaagataaaaatattaaaaatagttaagcaaccacctttggtaccacttgcttggattgacccatatgtctcgtttatgtgctcttggtcgtcattgtattagtctctttgtccacgtcgctttctcttgtcacatattttacccatttccatttagattttgcgataacttcgatgacatattttactttgagattggtgattggttaaggacataggcgcaaaatgtcacctgtcaaaatgttcaatgtgttttaaatgtattcatttttttttcgaatcctgagaaaactaataagtatttttgaaaaatttaaacgccgaatgaaagactacattatcacagagggtagaaaggcccttagaataaacaaaaagtttcttttgaatgagatatttaaaattagaaatcacactcaattttctcttaattttcacccctgtaacttattaaaacaaacattatagaagttttcagggacggagtgggtcgagcacggggaaagaatcatcatccacggggcgagcacggccggtagacggcgcccttccccgttgtcattccgtctcgttttactataaactacccaatatctttcatatcacatgattcttcaacgtatcccgc

SEQ ID NO: 10891 - DNA, 668 bp, Diabrotica virgifera
  SmartBlast Evalue=5E-85; Info="DNA-directed RNA polymerases I, II, and III subunit RPABC1 n=3 Tax=Caligidae RepID=C1BRK0_9MAXI"
ttcaagtgtaaaataaaacaagtatcaacagaaatactgctattatatttattttctgaactttgttaacaaattatacatttttctacttctgaatttgcattattaactaaataatggatgacgaagctgaaacgtacaaactatggagaatcagaaaaactgtcatgcagttatgtcacgatagaggctacctagtaactcaagatgaattggatcaaacattagaacaatttaaggaacagtttggagacaaacctagcgagaaaagaccgtcaagaagtgatttgatcgtgttggtagctcacaatgatgatcctacagaccagttgtttgtatttttcccagacgaaccaaaaattggaataaaaaccattaaaacctattgttcccgtatgcaggaagaaaatattcatagagctattattgttgttcaagcaggtatgacaccatctgccaaacagtcactagttgatatggctccaaaatacatattagaacaatttttggaatccgagttgttgatcaatattactgaacatgaattggtaccagaacatgtggtaatgacaccagaagaaaacaagaattgttagcaagatataaattaaaggaaaatatgttgatgagaatccaagctggtgacccagttgcgagatattttggac

SEQ ID NO: 10892 - DNA, 667 bp, Diabrotica virgifera
  SmartBlast Evalue=0.000000001; Info=Endonuclease-reverse transcriptase n=1 Tax=Bombyx mori RepID=D5LB38_BOMMO
atttagtgctgtttcttattatgtgtccgtgatattctaactttttctttttaattgtaaacatcacttctctttctttccccattcttcgtagtacggtctagttggttatcttgtccgtccatgatctccttaggattcgcctgtatagccacatctcaaaggcttacaagtttttttcaagttgtaatttaccttccaatatgatttgcacgaattcatatcttttaactcgcaacacatgacattttttctttgataattcttaataattcattttgtttactcatgcgccaaagtacctcattgttagtaactttttgtacccatagaattctcagcatccgtctgtatatatgcatctcaaaggtatctacctcaatatatccctgtcaatactactgatgataaaagagatctttacaattttaaatgtttgtaatttctgatatctcagatgtattttttgctattctaaccactaaaaacttattatagtcagggattccaggcctattttcaccatttaccaccaacaagccaattcttcgtgagcagcctcatcttaacgagacgcccaacccccttccttacaacaatttccgtatgtagcagataacaaagacagcattgacagtccagtcgagtcagacgaacaacaggccca

SEQ ID NO: 10893 - DNA, 668 bp, Diabrotica virgifera
  misc_feature (514)..(516): n is a, c, g, or t
cttcaaccttgaatgttcatatcaatcaccgacttaaaagttcgcgtataatacttaagtaagaactacatactattcttttatagttagcttagaagcatttgcaaaataatcaatccgagatggctagtaaaaatcagccaacaaaaaaggctacacaagaagtacaaataaacattgctgtaaaacaacagaaggttactacaggacccgccaaaactcaaaataaaactcaagtcaaactagatgtgggaaatgcagcacctaaaccaagaagagctccccagcctagagctcagcctgggctcccaccaatctttaaacaagaccaagcggtattgttacagcaacaacaaatgataatccagcagcagactttgatgctacagcaacaaaacataatagcagcccagcaaatgttggcaaacacttcggttgctcaagttccgaagaaacaaccaggtagaccaagagttaacaataatgcatctggagataaaccaaaagcagctcnnnaagcggctaatcctagaactaaacaacaagtaaaggttaatgttaagataaacaacaatcaataaaatatgtatgagttgttttatatttaataatatgtaataatacgttaagaagttttcaatttttaaaatatattattcttttaattt

SEQ ID NO: 10894 - DNA, 658 bp, Diabrotica virgifera
gagcgagcgtagctagcgaggcgagtaacagacgagttcgataaagggtctttactgacgtggtgcatataaaattttttcgccaacataatgtgattgatatttgatattcgcaccttaaagttgactacgtaagagtttgggctctgtaattatttaaaaataatataaaatttataaaataaattaaataaaaatctgtcgtttatttaacttccttaaaatctcattataacactatttttttaaatttgattatcttcattatttcataaaattaattatctttaactttaataatccctgaatgaaaagtggaaaatgaagtactgaaggctggacagcttggataatgccaaaatatattttatctacaatttcactttctacaataatttgatattggttttaacacttacttgcaatttataatttaagaactttttaaattttagacgtcataataatttcatgacagtgatgacagataacttttgcaagatggccgctttcgatttttaatcgatagttatcaatattgaataattactaaatcggtaaagttttaatttattttatatgaatatatttacaaaatactacagaatttcactttttgccataaatttaattgatatatcgcaaattgtgtacaata

SEQ ID NO: 10895 - DNA, 665 bp, Diabrotica virgifera
  SmartBlast Evalue=6E-40; Info="Equilibrative nucleoside transporter, putative n=1 Tax=Ixodes scapularis RepID=B7QIU9_ IXOSC"
agaagatatatccgtatatgatatcaatatttttggtatattttactacactttgtctctatcccggaatcacctcggaggtagtgagttgtcacatgggccagtggatgccgatgctaatgatgattgactttaattgtgcagatgtaataggtaaacttatggcatccactcgttattggaccgggtcccgtttgctaaaatgctctatagcaagactgatgatcattcccgccatggcattatgcgctatgcctcccattacaaactttggatttctcagcagtgatctcttggcttttgggtattccattctcttaggattaacaaacggagtacttggcagtgtgccgatgatacaagcgcccaccaaagtccccagatgttatcgtgaacttgctggaaacatgatgacgctgtactacatgtgtggtttggcaacaggatcccttggagcgtacgccttggaaaaaattctaagacccgccaagatgcagcggtattgcgattatagggctgacaggtataccagaatagatatgtccagagctttcacgaatccaaacgtaaccgatctcacaacatttagtacggaatcttcttcttctatattggtctcaactatattgtcttctttatccactatgaacttcacagaatcttta

SEQ ID NO: 10896 - DNA, 665 bp, Diabrotica virgifera
  SmartBlast Evalue=7E-28; Info=Multiple epidermal growth factor- like domains 8 n=1 Tax=Camponotus floridanus RepID=E2ACQ7_9HYME
cactagcgggtttatagacgtcgatatcgacagcatgtacggccattgggagaatgggactttgaggtcgaaagatgtgtacttagaaagagaggcttcgggatacaaaacctacattaccattactcagccgaagaccattttgttggtaaaaagttacaggataggctcgttattacgttgccagaggaataccacagcttagaaacaactcgcttcttcctcgttcttcaagctctcgagcccaccgactcggagaagaaagtcgcttacggcatcgttttctcccgtcaagatcaacttcacatagatcttttcgtattcttttcagtatttttctcttgtttcttcctattcctagccgcttgcgtggtggcttggaaagcgaaacaggcagccgacgtgcgtcgcgcgagaaggaggcacgtcgtggagatgttgcatatggccaagaggccgtttgccagcgtcacgttaaatcttagcgccaggactaagccgaagaagtcggcgcatcatgatctgaggcctgtagctgtagaacctacaggtgatggagtggcagcggtagccacagtatttgttagtttaccaggaggccaaagtgcgtcagtaaaactcgctttagcgtcttcgttgatattactcgccaggcagttccccac

SEQ ID NO: 10897 - DNA, 666 bp, Diabrotica virgifera
  SmartBlast Evalue=6E-73; Info="Translation factor GUF1 homolog, mitochondrial n=1 Tax=Culex quinquefasciatus RepID=GUF1_CULQU"
agaaccattaaaaggcttcaggccatctcgtcctatggtatttgctggaatatacccaatggatcagtcacaacacataaatttaagaagtgccattgataaaattgactttaaatgattctgctgttagtgttgaattagatacaagtccagctttaggtcaaggttggagactgggttttctgggactgcttcatttggaagtgttcactcaaagattgacacaggaatatgacgctgaacccataatcacagccccatctgttacttacaaaatcaaattaaaacctaccaagcaaaatataaaagatggatcagatgtgatctttattaacaatccagccaattttccagaccatcttaaaatagaggaaacgtttgagcctatgattattggaacaataataaccccggacaagtacttgggacccgtcatatcactgtgtatggaacgtagggggatccagaggtctgcaaataatatagacaatgaaagagttatattacaatatgaactaccactttgtgaggttgtcttagacttccatgatactttgaagacaatttcttcaggatatgccagcttcgactatgaggataatggataccaaagtagcaatttagttaagttagccatactgttacatgaactatgttacttaattc

SEQ ID NO: 10898 - DNA, 668 bp, Diabrotica virgifera
  SmartBlast Evalue=9E-98; Info=Ras-related protein Rab-8A n=4 Tax=Endopterygota RepID=E2AZF2_9HYME
aaaggaagttccattgcaggttcgtagagttcaaaagtattaaaaaagtgtctcggttaaaatagtgaaaagtgtattgtgataaatatggcaaaaagctacgattatttattcaaattattgttaatcggcgactcaggcgtagggaaaacttgtgttttatttaggttttccgaagacgctttcaatacaacatttatttcgacaataggtatagattttaaaatcagaacaatagacttagatgggaaaaaaattaaattacagatatgggacacagcaggtcaagaaagatttcgaaccatcacaaccgcttactaccgtggggctatgggtattatgttggtttatgatataacgaatgaaaaaagtttcgaaaatatcaaaaattggattagaaacatcgaagaaaatgcatcggccgatgtggaaaaaatgttattaggtaacaaatgtgaattaaaagacaaaaggcaagtatcgaaggagaaaggagaacagcttgccgtagaatatggtattaaatttattgaaactagtgcgaaagcgagtattcgagtagaagaagcatttttcacattagctagggatataaaaactaaaatggaaaagaagctggaagccagcaacccaccacgaggacatcaactcaaagcaacagaaccacc

SEQ ID NO: 10899 - DNA, 662 bp, Diabrotica virgifera
  SmartBlast Evalue=9E-44; Info=Glucose-repressible alcohol dehydrogenase transcriptional effector CCR4 n=1 Tax=Glossina morsitans morsitans RepID=D3TNH5_GLOMM
tccttcagtatacagtttatatattccacattcaggaacgctgttaaaatctccacaaaatattagcgatatcctcttggatgtcttttcttttaatgatgtaataaaattctccaaatacctaattgccaatcccccttgtaacaaccttatatgatctgcatctggatgaaaataaagatgagtattagccactactataatatcgtcgcgatttaatacatctagaacattaacttgcattgtagtagccctttctgaaatccttttagacagattttcattcttagcgattttttcccatatatctgcaaatgttttgtcatgggatatgtgttctgaaaacacaaatcggtgagactccagaagattaaacttctttttataataaaataaggctaatccctctgcaacttcatttcctttagtgaaaaagttgcttccatatcctaaataattaaaaactggatctaagtcatactgaaaaacctttctgtctacttcttgtagacaaataacgtcagaattgtatcctaaaatttccttaaccagtaattgtttctataatcaatttccaatgcatatggtgggcaatatggatgtaacactgttcttgtgtaatcagaatcacaatataagtctgctaaaatgttgtaagtcac

SEQ ID NO: 10900 - DNA, 668 bp, Diabrotica virgifera
  SmartBlast Evalue=3E-46; Info=Copper homeostasis protein cutC- like protein n=1 Tax=Harpegnathos saltator RepID=E2C1L5_9HYME
gactcctcctccaggcatgattatgattctatttcccacttgctccatgagttttttaatcagtttgacacccatttgcgctgtacgttgctttccacttgttaaaattctttggaaacccaaatcgatgatgacttcaacctcaatagtaggccttctgcaaaaatcaaaagctctatggaatgtgagaggaagaggatggcaatatttgatgatttcacgacacaatttcatattaacatccccattttccatcaggatcccaaaaacaaacccgtcagctccatttctgcgtaatattttcgcgtcttctttcataatttcaatctcatcaggagtataaataaaatttccaggtctgcaacgcaaaagacaataaactggaacatttctggaatttaaattttgaacttggatcagcaaaccgggggtaggagttagccctccatctgccagagaagagcacaactcgagtcgatcggcacccccttgcagggccgccgctgctgactccaggctgtcaacacaaacttcaagtttaacctttgacattttcatatgaaatctggaatgttcagcgaacgtgatagatgtagaattttgtatgaaaatagtttacttttgtttattttgttgaaatttgggagactgacattcgaaaaccgcca

SEQ ID NO: 10901 - DNA, 668 bp, Diabrotica virgifera
  SmartBlast Evalue=1E-13; Info=Titin n=1 Tax=Camponotus floridanus RepID=E2ARB3_9HYME
ttccatgtcatattcactagttcttggtttatacatagtaattttcttttttaatgtctttggtttcgtcgacaatttcttctatttctatttctactttctcttctctttgctgatcttttattttagccgcttttcctttaacatcgatttctttttcaataatttcttcgatcacaactttttcatcttcgctatctttctttttaagtctctttttaataacttttttcttaatatctcgattttcctcaacattttcttcagtcttgacttcctcgatgcttggtttctcctcttcttctgtgatctccgtaatttctacggagtgctgcttctcggggcgtcctccttttattactctctcaatgtcctcctcgacttcaagggtttcttcgatgtcccctttctttctaacttcctttcgtattatctttccggaatcttcaataatttcgatcttttcaccaaaagtaacagtttctgtgattgatttggaagttacctcagtaacttcagctgtttcccatagcctttggagaaaatcttggggtgtaaaactagtaataacttcttcgatagtaacataattagcttctatcatcttcataaaagccctaaatcctacagtggctgcgagtttggtttcatctacagtactctcttca

SEQ ID NO: 10902 - DNA, 668 bp, Diabrotica virgifera
  SmartBlast Evalue=2E-29; Info=Pupal cuticle protein n=1 Tax= Culex quinquefasciatus RepID=B0XH90_CULQU
tgtgttggggtgtgttatttttttatttattgcactggataaaaatgttgtacataaaggtaataatatccacactttgcatcgttgcatcagatgtcttaggaggagcaattacagaatatcccgatgagggatacacaggaaaagacgactattatgcgcatccaaaatacgcttttaaatacggtgtccatgatccatctaccggcgacgtgaagagtcaaaaagaagtacgagatggtgacgttgtgaaaggacagtactcactagtagaacccgatggttcgattcgtaccgtcgactatgtagcggatcctgtaaatggatttaacgcagttgtatcgaaaactgggccatctgtacatattgcacaagaacctgttgccattaagaaagtagtaccgacttatgtaaaccaagtagtaccagtcgtcaggccgatataccagaaaatagtagcgcaacctgtatataaatatacgtcgacgttaggattgaatgacatctaccagggttatggctacgaagacggttatgacataagtccatatcttcaggatgttcatgatgagcatttatattagccaacaaaatacgctactgtactactattgttaaaatattgttaaatttattaagtattttaagttaaatatattatatttagt

SEQ ID NO: 10903 - DNA, 667 bp, Diabrotica virgifera
  SmartBlast Evalue=3E-46; Info="Multidrug resistance protein, putative n=1 Tax=Pediculus humanus corporis RepID=E0W1L6_PEDHC"
tacataggcaaacagcattagacttctagctaaacctactattatgccacgataatgtgacttttttcttgccattttctgatacggtaataactctttgatatactgttccataaatactttttcacaacctagagaaaccactgttcttatattaccgatagcttctacagccaactttgcagatgcttctaacattttttggtttttcgtggcatcctcttgtaataccttctgctcaaaatatacagaaaagaatattacgggacacaaagaaaaaagcacaaagcttgtcctccactcaaaataaaacgagaacgtacacgtaagtatgaatgttgaaataaagtttattgttgttcctatctgtggcccagctgccccttggacagctacagcatctccagccagacgtgcacacagtgccccaactccattgcttttttggtcataccagccaatttcctgtcttaacattgcttcaaatgttttcgacctaatttttagagttaaatgttctccagcaacagaaaaactggttgtctgccaaaacattgcaactccagtgactacacctagtattaggaaatataaacaatacatattactctcactccgtacttctccatcattatcatttgcaaaaaattcccattattcctccaaa

SEQ ID NO: 10904 - DNA, 665 bp, Diabrotica virgifera
tatgatcaggtacatttgattctctattttaaagtatttttctaaaaatttacacttaggtcattatgtggataaataagtcgttcttctaaatacaaagcagtaatccagtcaatctttaaataacgtctatgtatgtagatgatcgttgtgttggatatctaataccatgattttatctttgatatatttaaccgttgattgaatactcgaaattcggctattcaatcaacgatttaactccagaccaaacctttcactctcattttcaaccaggcatatgagatccattaggtcttcttagctgttgggcagtatcggaaaatttcttttctacttgtcgccattttttttacccattgctttcatgctcttgttttgttatatagtctactcgtatacaaatttttcacgtataaattgtgtacataatatcttttctcacagacttcgatatttttattgagtgccttttattgagatttttaaagacacatatatcagctaattattatatctgcaaaaacatcactatttgtgtttgtttttgaattattaaataaaggtatagttgttccattatatctttgcacaaacgtcatgattcatttgcaaacaagttaaatcaaaacattaagtgaaacgtacgttgcgtcgatatgtaa

SEQ ID NO: 10905 - DNA, 668 bp, Diabrotica virgifera
cgaactgtcaccgttacgaagtgtcgctgttacgaattgtccgttaccagttgtccggttacgagatgtcatggaacctgttaaaacatattgaggtgacagttgtgtctagagatgcaattaacaggtatttcaatgttggcgttaaaaattaaatagactatttggcatatattagttttcttcacattgcaagagaaagaaacgtcaaaatatctgctcgatgaacgtacctgtgatgtaacctcgctgttgaccaaatatatagactataaatgcacatatttgatttcttcaatgattttgtttttctattgtccctcttagtggtaaatatataacagggcaattctcttagcgaccaccagcagggtcacttcgacaaggtcggtccctttgggacgggggtaatcgcgccccctttaagtatacatagaaattggtagaaggagctgtatgcttagttgtaagtcggtgactttgctaaatgagcaaatatcttatatacgttttataatataatgagccctaaggatgtatggcatgatttttagcctaaatgaaatatacagggtggagtgaacttatatagtggtaatcaacttagttgtagtcattcaatttaatcgatactgccgtcgatagtaatacataaataggcaatcgat

SEQ ID NO: 10906 - DNA, 667 bp, Diabrotica virgifera
  SmartBlast Evalue=1E-14; Info=TRAS3 protein n=1 Tax=Bombyx mori RepID=Q9BLI5_BOMMO
tagagaaacagattgggttaccttttttgatagcttagaaaagccatttttggtaggaggagatttcaattgtcatcatactgcatggggaaatagttattcagacatagcgggttcaagtcttctcggtgctatagaggagtgtaacttaaattatttaaatacaggaagcgaaacattaatacctagatttggaagtaataacaaatctgctatagatattacaatatgctctagagatataactttaaattgtgattggaaaactgatattacaccattaggtacttccaatcattttcctgttctaattgaaacacattttaatactactaaattatcctttaagtgtaaaaaccaagttaatttaaataaagctgactggtcttttttctctcagatagtagatgaacaattagatggaagtaataacgaaaggtcatataaaagttttatagagtcaataaatcatgctacaaaactagcaatcccacagaagagaacagagatcaaatcagaatttagcaaagtttggtggaatcagagatgtgcaaatgctattaaatgtcaacaagaagctttttttgctttataaaaggcagtcaaatttaactaactatttaaaatataaaaattcagtagcagtcgccaaaaaataatattacaa

SEQ ID NO: 10907 - DNA, 666 bp, Diabrotica virgifera
tattgttacaaaaggttttttgtcttcaggtatgccaacattgaaatatttagagaaagtccttaaaatttaagaactaaaaagagagttgaatagcgatcatttaaaattatttatatcaaattctattaccatcgaagtttatcgtctctttttagtttccccagcttttgcataagtgttcttatctttgtttccaaagatacttatttactttaccgttttgctctacggaaaaatagagccctatcactctcttccaagtatcacggtcttatgtctaatgcccccttcttttgacaccaaactgctgaaggtttttctcaaaagttgtctttcctaaatcaatacaactgaagattttctatccagtcttccaagaacatgagttgagtataagattagctgcctcatagatattaaagactaatgtataaatataaaatctatatttttgaacattacatcattaagaaggcccacaagcatatgccccagattaatttcatgaaaagttagatgtgtataagtccatatttatctgcaaaaggttttgcttcattgtactaaaaaggcaaaatcttttggagctatgtatgttagtttttgtgtaccttataccacagtatacataacaataagtagttccagtctgacgcggtacct

SEQ ID NO: 10908 - DNA, 664 bp, Diabrotica virgifera
gcgcgactttggtgtgggaaacggggaagcagggttgccatgtattgccagattgtcgtttatacaaaatattcataaacacaaaattgatctcaatatatttctcaatctgtctcactgtgaaacagtgggtcaaaaagtaattatatttttaaaatttccgttttccatagacactttctaaaagaaagaaaaattatgtaaatagcaaaaaaatgtaaatgtgttaggtgtgcaattacagatctttgtgaaatcggtcatgtatacattttttaccttattcctaaagtctgtaaagtatgtaacgtcttactgtacaatggaaaaacatgttatcttcaatacgttcatgtaaactcttttcagtgtgctttgtttaagttgttcaaaaacctatttggttttctccatctagaaatgcattcacaacgaaagatattattggtaatatttttcttgttgattcctgttcaaaataattatctaaattagcgaaaataatatttgttctataaaatgcaaggttttatcaaagagtcccccctttccaacatgtaggtacatatcattaacgatgatatgtcatgagatgagattagatgatatgtcatgaaaaataattactaactacctgattcttttttttcttggtttgttaatt

SEQ ID NO: 10909 - DNA, 651 bp, Diabrotica virgifera
ttttttaattctcgaaaatcaattcgaaaatcgcgaatatgtttcaattgtcatagtatagtgtaagaaatatagttaggagatacaaaacctcaggttttgtcatcacaagacctataaatgaaggaaaaagtaaaataaacgaagcggatagaaggggattaagacgcattataatgaaaaaccgacgtgcaacttatctagatttaagtagtttttggagtaaactggttggaacccacgtttctagatcgacatgtcactgagaggtccacaaattaagattttctacttacaaagttattgataaagttaaaaaaatcaaatacgaattctttgtgaaaatttaattttatctaagactaacgaaaatccagtcttaacattacaacacaagaaaaataatgttaaaatggtcaaaagagcattgaggttggacaaattcactaagggatacaatacaatggagtgatgaatccagatttgaagtttgtgctgagtcgagttggatacagtaggagtcgagttatacgcaggaaaagtaaagcttttcagcttaatgtttcaacagaaaaatcaaattttctacgtttaacatggtttggggcagcatgtcatcgaatagtttggaaaaattgcatttttatcgat

SEQ ID NO: 10910 - DNA, 667 bp, Diabrotica virgifera
  SmartBlast Evalue=4E-17; Info="Cytochrome b-c1 complex subunit 1, mitochondrial n=1 Tax=Harpegnathos saltator RepID=E2BEC0_ 9HYME"
ctcatacttggccacagagaggaggaaactgcaagtaacccatgagcattcatctaaaattagcacctttaattttggcatatttctaacagtgtgttggaaaaagtaggtggaattcttcacatacgttcttctcagacttaattcctctaatcctgaaggaaaatcctttagcgaaatcttagatccatttaacttgatattttccagcgctaaaactctcaggttatcgaaaggtttaatattaatgaaaaaatggtctggtaagtcttttatgcatagatttccccttaaatacaaatgtgtagttttcttatgtactctattggtgcaataatgtattttatcacaaacatttgggttatcccttgcatctacgtatctccagagtaaaggatccaaaataaattcctgcaaataattacaagtcctgcttaaatgataaagagaagttgcatttaaataagaaaataatattcttaatacatcatggggtaactctaataatttacaggggccgtcgtaatattctccttctacaaccatttttacactttcataataattatctagaaatgaaaatatatagcttttgtaatttttaattgttagctaaatattgtaaaataatatttactatttgtttacacctgtttttagataagtt

SEQ ID NO: 10911 - DNA, 666 bp, Diabrotica virgifera
gttagcaaaccacttggtagtgtttatactagattctaatatacatggagtgcaaactgttatgcgttgcggttgcagtggcctctattgcagttgtctcttccgaaaaaagctgctggggtcacaaggttgtagcagaagtaagagagttattcccttactgcaaagatattattaccaccaactctatatctgaaaatgacggtttgaacatcgataccaaagattcttccgaggaattatgccaaaatataagggaatggttagatgaatcacatagcgatttgggcaaaatatcacaatttaacatttgtatgtcactaaataatgatggacttgagttttatcaaatgaagaaagttttcgaatgccttccggtccttaacaactcagtcttcgagaaaaactccaaggaaatcgtctacgaacacatcacagatagaagagtctttagatctgtaaggatttatctgaaccaagaaaagactgaagagaaccaaaaatctgtgaatgattttctagcttgtatcggttaccaaccagatagtgtcttcaatcgtcattaagcatatttatctttaaattatatttttgcattatttaccttagttttttttgtttatgtagctagtggtagattttagaaaatgattttctaaatttatt

SEQ ID NO: 10912 - DNA, 668 bp, Diabrotica virgifera
ttgcatgggtggttttctctgaaacatgtctaaacaatattctcttaagtaaaactccaaagtttaggtatgaaaattatattttttggttataagattaacttgaacgatttagttattgataatacatttcattagcataggttgagcgtactagttgcaataaatattcttaaaacaatacctgaattgcatattcaaataaatttatgttaacatgtttatacattattaagaggcaacatcagcgtgcggaaaacgcgttccaagattacagctttaattttgaatattttgttgagatatttggcagatatattcgtaatatagtaaagaatggcggtacagagctcaatttgagaaatatgttagtgtgtggaaattactataattaaataaaatattaaacaagctgaaaatgcgagcattatcataacgaaaactttatttatttacgtattttaatccataatatggaaaattgctattatgaaaagtagtttagaattaataattatgttttaatgtgcaattatatcattctaatttaaatgttatgaactataaaggcagttcattcttgatcgaaattcatattttttatatacctcgtataaaattaataaaattttacatatgatggttgcatcataaatcttagaacatga

SEQ ID NO: 10913 - DNA, 667 bp, Diabrotica virgifera
ctcagagcacgcaaaatagaattctattttgctgacgtcacaaaatagaatttcataatgggagaatcgacggttgctaggcaacatgacgtcactaaaatagaattctattttgcgtgcgcccactgcaggttagcgtagttgccataattactcaatgtatattccctatgtccagctgaacgatttacgtactgtatatctatacatcatggaccctcacttgcaaccttttcatcactattatatacatatctttttaaaatttctgattaattgcacaatagcacttttcaggatacatatttctttatgaaaattaatcaagaaatacaataaatgctagaatatattagtcagctacataagttgttaaaatagtaaatttgtacttatttctcagacttgtttaaacttttatgttgtcggggtttatgttataagtcgggggtgaagggaatatattggttgtctataatattcacttaatattacatatacatatatggaagttacatctaagatgattaatataaaaattaatattaaactaacttaattccgagctggggcaaattgagctttcttaattaactattctaattgggagataagccacaatttaacttgaaaaatagttttataacgttcagtggagatattgcag

SEQ ID NO: 10914 - DNA, 668 bp, Diabrotica virgifera
actaacatgtcatttattttttatgacataatgactttattattaatatttaaataacaaaacttcaaataaagcgcctttcccaatttcaactgtatctggactgcgatattgctcgtaagaaaaaacagttacaccattttcatcttctttggggtagctgttatagattttccctacccaattttgaccaccaaaatactgtcttccaagatagaccgaggaattgtaactgagggactgtacttcccatccagctcggactgggcggaaatcgtctgagtcaaagagtgatccgaaataagaaggtcgagcgtactcccagtagattttgtctaagtaatcattttttccaaccaggatcttaatattatcgcagattttttcgatgtcttctaaacctacaacaatatgcacacattttcgtcccgcgacaatattcgtaggtataaaaccttcaaatttttcattactgaagtgcactaatccaatataaatatcctcgttgtccatagtttcaccggaagggattgcatcgtcagggattgtatcaggatcataatcctgccattcaaggaggtcaccttggctactccttccataagcttggtggctatagaaaagtactagaagaaaacacaacgtttttgctatcatcttggtatata

SEQ ID NO: 10915 - DNA, 666 bp, Diabrotica virgifera
  SmartBlast Evalue=2E-11; Info="CG9134, isoform A n=2 Tax= Sophophora RepID=Q9W0I2_DROME"
ataaaaaaactttatttaaaaaaataatttgtattaaatatcactcaagatagtgtagcgcccccaagtgtagagcccacatcatccacatatctttcacaaatgaaattcagtcgcgcataacagtctcccacagcccaagtgaactgttcgcccactccccagttcgaccccagtatacaattaagagtattcttaactgggtgaccggcggcccagttgctgtagtcgacttctcttccataaggtatccacaaccatttgacgttatctacgaatctagctcccccaatccaatatagattactgatacctgcttgtcttgcaaactgcgcgattttattattttctcttgctgaattaattgatgccaacttcatgtgaattgtttcgcaaaagttaagagattccatccaattcaacggtgtgtgaccgccgaagtaatagagtttattttcgaaacgaaccaatggcagagccgattttactccattctcgaagtttttttcccattgaggtcttgaagaaacatgtacaggtacagtgtgtgcagtatttccatcatcttgaatgtaagcttcgctgatagaaacaaacacaaagactactataagacattttgctgaaatcgtcatctttagtcaatgttcgtggacacagcccgta

SEQ ID NO: 10916 - DNA, 667 bp, Diabrotica virgifera
ttctttgcaatttttatcacaatacaacgcctaacagtcaactccttggtcgacagccaaatgcccttgaatcgaaaaaatgtggcattcgtgttatatagagagaaaaatttccaaacacttttgtaagcttactatacactaattaatatagagttcaaatctgcccgggattttagattatttcgaaaagtgtttcgttttaaaaatgtacgagtagttcaagaagatttttcgtgaattactactcacccaatttgactatgaatgaggatatcacatcctcaaacttctaatataaacatactatacgccaggactataaaaaacgttaaaacagacaaatattagatacagcccactaaataaatatttaaaactagtataatgttacacattgacatttaatatatttctattagtcgatgtgtatacattggctcatctcaacactggggcactgatactattgctcatagcaatttacttaaatataatacgagtatacgagcccagacgcattgaattggaataaaaccaatatgccctgggaagaaaagaaaattttttctttatatcatctttaaatgactgcaaaaaattaaacttacccacaaacgtgggatttttactacgaaactgtactgtaactaattatgtgatgtcg

SEQ ID NO: 10917 - DNA, 665 bp, Diabrotica virgifera
gcggtccctccggtgagtaccgatcccacaaggacagaaactatttttcatttattaatttatattaaacgaaaaatttctgcccctggtaggattcgaactcccgacctttcgtttcaaaggtaggcgctcttaccactgcgccacagaggggttataattaactttattgtaactattttatatctgtcattataatgtcataacattaacttttatatctttcagtttgaatgttcaatgtgtttgtattgtatggttgtacggttgctacggacgacgagcgtaaaatcaaactttacgcgctagagcgataaagtgacggtactcagtaaacgtcaacttttcgttgccattgacaagcgaaaagtcttccttataaagtgattgaagaaaaaataatttgttgaaacaaacatagagaaataccataattttggaaactagttcgaaacgaataaaactacttaaaagggtcaggaaacaattacccagttgggttgcaattgaaaaatagacaatgctgcccgatttgttttctgttcacaaatatttgtcccacctgtgcaacttgaaaacataactttcaaaaatgaagacggaaaacaacagaaagcaggtataaacccaaatcagtggcatctcattcttcttcttcttctaaa

SEQ ID NO: 10918 - DNA, 666 bp, Diabrotica virgifera
  SmartBlast Evalue=5E-29; Info=GTPase-activating protein and VPS9 domain-containing protein 1 n=2 Tax=Formicidae RepID= E2C1S5_9HYME
tagatggaatttttgtaggttttgttcattataaatctttctaaagtaatttttaatgtcttttctctgttgcgtacaatgcctttccaagtcggactgctcttcatgatgagaaatagtttggtgtaaaacctctgcatcaaatcacacttttcatccgccaaacttagttgcctgaactcttcacagaattcaactatggcagattcctgttctgataagaactctttgacacagatcactgccaagtatctctcgcactggtatttgtcattggttatttgtttctgtaggctatttagataactttcacaaaatagcaactcttgctttgatgtgatcaaatatttgatatatgtagctcgcagaacgatatcagagcgcatagaacgtagcaatttaagacagctgtcatcgtttaacagattgacgcaccgtattgcctccgatattctcgccacttcagaccattctctcagtcttctcgctttgcccagttccagacgtagcatcgtttcaattttattcttaatactaaaggggttgttcttaaggtaatgtggaatttcccaagtgttacttaatactaaacgtaatttgttcttaatgtcattaaaactattaacttcttcactattactattgcttctgtacactactttttcc

SEQ ID NO: 10919 - DNA, 667 bp, Diabrotica virgifera
aaatatcaataccacaatttgcgtttctccaacaacattcagtaagaaaaaaattgttgagttttttagttttcatagacttgtaggtgttgaatcgttcatattttataccaaagatattccttatcgactttcaaaattgttaatgaatttatctaaaagacttgatgcacatgtagcttttttaccttggaattttccaaaaaatgatattgatgtagcccaatctattattgaatatgattgcctattccgtacctatggtcgatccagatttataattactttgaatttaaatgaatacctcgttccaactacatcttatactatcaaggaacttctaaatgatttagaaaatcaagtccataggttaagtttgcccgtccaaaagttttgtattaataatgtaagtaataataaacctctggctttgcaaaactatgatgttataagggatatcaatcataatgacgtccgcttcatatataaaaatgtggaggataataatttcaataccaacacagttgataaaaccagagcatcagttcataagtatgtgaaatgtggcgtttatagtcaaactacaacagactatagcatgcagaagttttcaatcgactttactagatctacattggtgcagcttcttatacataatcaattgtaa

SEQ ID NO: 10920 - DNA, 655 bp, Diabrotica virgifera
cttttattgttattatcattaatttccttaatttctttaatttgttcatttctcttatttcattgtacataataatatacctataactatatagtagatataaatacgtaataaatataatgatatgatatttaaatttatatttattattccaaccccattaaaatattatatctacttgaagacttgaattttttttgttaaggggatgggtacgaactttcggctttaagccgttacgttattaccgagggccgaaagtccctgaaaacttctataatgtttattttaattagttacaggggtgaaaaactaagagaaaatttagtgtgatttttaatttcaaatatctcattcaaatgaaacttttaattcattccaagggactttcggccctcggtaataaagtaatttttcattctgcgtttaaatttttcaaaaatacttacatattagttttctcaggattcgaaaaaaatgatacatttaaaacacattgaaaattttgacaggcgtcaacattttgcattttgttacttttcccttaattttagcgaatccgctcctggagggtttgttgtttgttgttatgatactaaatcggtggggacatcccaccggcgccacaccaaatttcttatatcttgacgcaaag

SEQ ID NO: 10921 - DNA, 667 bp, Diabrotica virgifera
  SmartBlast Evalue=2E-30; Info=Vitellogenin-1 n=1 Tax=Culex quinquefasciatus RepID=B0W8V0_CULQU
aaattcctatcaagaatgaacaacgtacttgtcttgtgtgcgattttctcgtgtgtcgccactattccaacatccgtgtttagagacccttcttcagaactgtacaaaattcaagatttaagccaaccgatacaactgaaaaaaagtgtttgtaatgacgatataaaactatacttcagaaatcagaacggtagagacaatgaaaatgcattggatgtaaacgatacaagctcgctacaaagtcttggtttctcaacagagaagtttacgatattcctcatccatggctggcgaaacgagtacgattccgatataaacaccgtactaactgaagcttatctcagcaactatgacgtcaatgtattcgtggttgactggagcaacttagctgacgacctttacgtaaatgcagcttcagctgttggcggagttggggagattgttggtgactatattcaatctctgatgaaaaataataatctggacttggatagaacagctgtaataggacattccttgggagctcacgttgcggggatagtaggtcttgctcttcgtggaaaacttgactatattgtcggtttggatcctgcattacctttgtttttaattgttcacgatgacttcagattggacgccacggatgctaagtttgttcaagtgattc

SEQ ID NO: 10922 - DNA, 665 bp, Diabrotica virgifera
tgtagttagtaatccgcaggtctgttaatagaaagttcattcaaaacatgaataaagtcagtcatttcaagaaaaattcaagtttggcgcctttctcccatgtaaatgttgccgccagtctcgatcagttgtcagtaagttggaaagtacagctgagagaagtgttttgcggacctcgtggtagtgtgactcattgtaaaacgttgaactctatttttgtcgaaattttgtaaaaatggaaagtgttatttctgattttctaacaagcacggtgtttgttttttcgctacttattggtgcaagtggtttacttatactgtactttatcaaaacgtttaaacaggaggcagttatcgagaaaaccaaaaacgaaaaatcaaccgtctattccgaaaagaaaaaagatttgccgcaggccgggaaacgtaagaagaagaccgtcgaaaatagatggactggaaaacacgacaaacattcgtattctaatccatggcttttagtttcgctaaaaggtcatactggaaacattctggatatggacttcagcagtaatggcaaatatatgacttcatgtgacgacgaagatcctgatcctggaggaaaggaagctaccactgccagggagtcgaacaaagagaacgaccagccacccgaaaacagccccg

SEQ ID NO: 10923 - DNA, 654 bp, Diabrotica virgifera
ctgttgaatcgtctacaaatccatctgcattagaggaattactcacagaatgacctgtgaaaatcttccaacgtagtaatcacgtaaataaatctttctacaataataccaatactgatagcgtaactgaagtagtcattttcagtctaatgttaaatgtttctacctatatcaaggatgcaagttattaacaacctgcaattgccatacaattgatgaacatgtggatatatttagctacaatactcctatctagacaatttgtgacaataaaaagagatagggtgagtggaaactcaaacaaatttacccccactgaaacaattgcatatagcgaaaatttataaaattttcccgtaaacaaatatgtttacaataatattattgtttagtacctactaactttattaactgatctccttaatatagctgcaatttactgtccaatatttaacattgcatccatagcattcgcaaatgatataaaatcgacgagatatagaaatatgtatagagccccagaaacttcatctagtgaacaagaacaactgatgaaaaggggtagaagtgggtggaaagaccatcaaaaccatgtacattagtaaaatttcagacttttatgagatatttagaccacattcacaacagagattg

SEQ ID NO: 10924 - DNA, 666 bp, Diabrotica virgifera
gagggcagtccgataagtacttagtttcaacgtatgatggcgccactttcgcaagataaatttactatcatatacagggtgttagtaaataagtatgaaaaactttaaggggcaattctacatgtaaaaataatgacagtttgctctataaacgtatgtccgcaaatgcttctttccaaggtacggggtgttgtagtttttttcaaactgcgaatttttttattgctctaagaccttttaagctatgaaaattaaatttggtgggtttcaagaggtagttattgcgcattttttggcaaacaaataacaactttatatttatcattggcgcgcctacgggtaatggtctgaatttctttaaagaaaaaatagtacgccactgagatatttcaaattaaaaattattttgtattccacgtttaatttatgataaagaacctttcttgtcttttttcatatggtgcaccgtttttatgcaaaaaaataaaacatcttcgcgcgtatttttcatttcgtaatacattatcaagaactctccaatataataatgccaaactagaacaataacagaaaatatttctaaaaagattttaactatgtgcaaggctacaacaaatgttcaaaattacctcctttaaaggtgacagagtaattttatattcacca

SEQ ID NO: 10925 - DNA, 666 bp, Diabrotica virgifera
tgcaaagtgctcaaaatagagcacaatggacaaaaatgagggaggcctatgtccagaagtggacgcaaagggctggaggaggatgatgatgatgatacttaatcttaaagtaataactaagaaaacacaaaaaatcgccgatataatttaattaacctatgaattataaatgtcaatagcgtcaaaatttcataatttagtggagtaaacttgcctgcggttggaccaattacaaacaagcattccagcgcggtaaagttgaattactcttcctggtttaaaaatcgggatagatttttccctttctgttccgtttggggttgaaaatataaattgtgatgaatttttagaaacctatttcttaatactacatccattttatacataaattggaaaagtatcgttaaaaaacgaattattaataatttgcaacttcacaataaatatgtatttatcatatgcttaacctcaaactgtgatctccaaaatgtcaggtgaaggcgctaggtgtcgcgtcagtcatgcacggagcgaatactactttttgaactagaaatctttcaatagttgtggtgttatttccaaaaaatacaaatttgtttatttagttatatgattcaacctctgaagctctatcttacatttaactacatatatgtattatgc

SEQ ID NO: 10926 - DNA, 662 bp, Diabrotica virgifera
  SmartBlast Evalue=7E-10; Info=CG1105 n=9 Tax=Drosophila RepID= Q9VI53_DROME
aactttcaggatagagagacagtaggaaactgtatagagtggtaaaggattcattctaaattttattaaatttcaatttaatgaattgaaaaaaaaacagtgttgttctgtttataacttgtgctttacactgtatgtatcgtttcctgaatttcagaacaattacataatgtgtataattttaaatctttgataagagtaagaaaagatgtcttgtaacattattttaaacaaacccagagtatttcatccacgtgataatataaatggaagagtagtggtatcatttgatcatgaagaacatataggaggaatcaggtgtagctttcgtggacgtgaacaagtccattggactgaacaaaaagataaagaaattgtacacgttggagcacaaagtgactttttggtgcagaatattgtgttagtcggagaagaaggatatatgaaacctggcacctatgagtaccaattttcatttacgttaccttcttgaaacataccatcaccatttgtagaagagtttggctctattcgttatctcgtgcaggcgaaggtagaccgagcatctaaggtagattacaaagatgaatatgagataaagtttgaagtaccgacaactcagtatgttgaactttcacaaaacgaacaacttacgtatcaag

SEQ ID NO: 10927 - DNA, 663 bp, Diabrotica virgifera
ttcagatagcttctacaattaataaaaaatatccctactctgcactaccaactatagagcgtttcatgttaaggacggaacattgccatagatagggctacgtatttcttatggacgatagaagcgcggcggtgctgtttctatcgcatcgaaaatgaatctagtagcaacacgtgcctgagaattttggcaacactgatctgcgtaagcaaaacggtccgttcttaacgtaaaataaagtataggtagttaaatatgaatctagattaccatgaaagtcaggattttcataaaatgtacatctagattaatcacaatagttactttactgtacaaaatgtattttttaaagaacgctatgaacttttagtctgcgtgaacttgatagggtatcctataattgtggtgccataaaagtattgtttaatttaattaaaagacctcatagacatttaattctaacacaagtaaaacgaaatcacatgaaatataatcaagtgtaaatcacttaatcgactgtggattttttgatatcagcagtttggtcattacaggtatccttcaactttttttgggtgccgttccatgacatctcgtaacgcgacagttcgtaacctgacaaacggtaatggacaattcgtaacgccatcagttcgtaactac

SEQ ID NO: 10928 - DNA, 664 bp, Diabrotica virgifera
  SmartBlast Evalue=3E-22; Info=Protein takeout n=1 Tax= Camponotus floridanus RepID=E2AYI9_9HYME
catcgttctattagcaataattaatacgaaggtccagttaaaaatgacaaagttctttgtgatactggtgttaacattatcagtttctttatgttactctacaaatatatctgaattgttcaaaatatgccaccagagcgataaagatttggatacatgtttaaaaggagccattgaggtagcaataaaagcaataggatccaaaggaataccagatttggatgttcctccggttgaaccaattgctgtaaaagagataacattcggatctggaactgatgcagttcagttggaccaaatgtaccatgatgttaaactaataggatttacagataatttgaagataaccaaagctcattatcatactggaaaaaagtccttagcttttactactttcaatcctgttctaaaacaacagggcaaatatgacttaaaaggaaaaatattggttatacctgtatacggaaagggagattccattgtaacattaaaggatgtaacaatgaaccatttcatgactttcggagaagagaagaagcaaggaaagacatacctcaaagttatcaattacgttgctgaattgtctattaagggggcaaacttcgacttcaagaatttatttgacggcaacaaacttctttcggataatattttgaaagtcgtg

SEQ ID NO: 10929 - DNA, 663 bp, Diabrotica virgifera
aagatcagttacagctttgttgctgtcttggtcattgtgctcaaatatagtctaatagtgtattatctagtcgacttcgaaaaaagtatcatcttttaatctacagaaggcatttattcccaaagtctgctgcagtacaaaaatcactaacaatgttgcaatatacaatataacatatctcattcgctccgtcaaacatccataacaaccaaatactgcaagtattattaaaatagtgcctaatggaattgttaaaacaggtatcaccgataaatctccatattcctttggtagggcataggctagctcttcaagatttattttatatataattccaagagagatcaacgaaattccaactagagccaaaataaaattggtccaaaacactaaacacttcaaaatatcttcatcgcatcccatcttaatcatactgtcacaataacatgagtttcattcattgtttgcaagttatttcgacgtttatagtattaattatttagcgttatttagtttccatatcggcgaaaaaaagattaagtagatatgatgcatgctcgaacgaaaacacgctacaaatgttaaataaaaatgtaagtaaatttagaaacaaactgttttgaactcaatgtgattggtctgttggttttacactcttttaat

SEQ ID NO: 10930 - DNA, 663 bp, Diabrotica virgifera
  SmartBlast Evalue=1E-71; Info=WD repeat protein 36 n=1 Tax= Culex quinquefasciatus RepID=B0WAH4_CULQU
tgtggacatattgtgttttgggatttagaagaaagaaaagtgtctactcagctattagctgctcatgatggatctgtcacaggaatggtgtgtctttccaatgaacccttagttattacttcctctccagataatacgctgaagctgtggatttttgatatgactgatggtggagcaagattactcagaatcagagaaggtcattcatctgcaccatctcacatcagattccatggatctaacggtcacaacattttaagctgtgccggagattcaaccttgagaatattcaatacccaaactgagcagttcaacaaaagtctcggaaaggcttcctacaacagaaaggtcagcaagaaacggggaagagctgtagaagatcccctaaaaatgcctccgataattcagttcacttccgagactacaagagaaaaagaatgggataatatcgcagctatacattcgaatattcccttggtgaccacctggtcctacgataaaattagaatgggccagctcaagctactaccagaacggtttcagaaaaagaataaagatgtcaacctggaagtggcagcaagtttcttgtgtttgtcacattgtgggaatttcgtcattgttggttacaccacaggggcatgtagatagatttaatatgcaatc

SEQ ID NO: 10931 - DNA, 661 bp, Diabrotica virgifera
tcgtatgactatatagaactataacattattgtaattgatatttttacgagcttgtaaagataacagcaataattctgaatcaacctgtggaaattttttaatgtaaattatagtcaaaataattttaaaatttctttcaaacctactctaattatggtgattttgaatgtaatgaagttataagattattttcagtttaaaaaaaagttaaaacggcgagtggagaaaccagagtaatgtgctagctctcctgtcagaaaaccaaaaaattcctattgtttggtggagagcaaactttgaagagcactagataaactgaaagtttactatgaatgaaataacctgaatccaaatccgtcaactacaccttttatttaaaagcaagaaagctgacaagaagcttaaagttgtggggtggggtcaggaattagagccctactcagtcccaaaatacctaggtgttaccttcgacagatccctgttacaacaaaaagataaaagtcacaccaagaaagaatatcctgaagaaactgacagatgccgcttgggatgcatcatcccacatgtcctccgcaccttagcagttgctctaagtttctcagcagctgagtacgcggttccggtctagagactctcaacccacgattcgcagatagacac

SEQ ID NO: 10932 - DNA, 666 bp, Diabrotica virgifera
gtgacaatatactttgtttatttgctactatagatgcgtttcaatttaatcattgtttttgagtttttttgaatattgcaaagatgtctaattttgaattgtttttaatttcgttagcagttgttattgttagtgtacaacaggtacatgcagattgtgaaagggctagatcattattaggagctgaagatgtatgttggtctagaaaagtggaaatgttagaccgaatccaatatactcagaagcgtattatgaattttgctaagaaaaagcttggaatggatgtagaaaaagaggaacctcagaaatgtgaatactattactgcatattttcggaaatgaagttgataaatccagattatgatgttccatgtattgaaagaacgtccaattgggtcaaaagaaacactttgtataacgacggtgagattttattagacagggtacagaaatgcagcgaggaattgaaatattcgctgactaacaatataagcttcttggctgataacgttgataaacagaatgaaagacttcgaacttccgagggccaaactaaatgtgaaatttctttggaatacatgaagtgtatggccaatccttcaaaaattactgagtgcccagtttttcagtttccttaagtgaaaataaaaaatgaatgcatgatat

SEQ ID NO: 10933 - DNA, 665 bp, Diabrotica virgifera
catgagactaatactggttttgtccgttctatcagctctcgtagccatctccttcgccacagtctcagaaatcattggaggtacactgataggctccctcatagtccacaaagtagcgaaggaccttggtattggaaacataataacgatcgaaggtgacgctagagccaaattgggcaacaacgaaatcgcagttgaggctgcagctggcgttggaggagacgtggtcggataccacgccaatgttgaaggagatgtgttgggacaggaagtgaaggtgcatggtgatatttatgatggggataaggttatggataaatacagaactgtttcaatcgatgaccaaggtcgtcaatacgtcttggtacgcaaatgggtcggcaccaaccctgtattggtaagacaatacatcgacacccttgacgttaacggcaaaccagtaccgaccaacccaatggtccgtcgtgttggcatgatcatagaaatccgtcgtcccgatggtaccatcgagctacaccgtccagatggaaaaatcatcattcttcgttcaggagctatcatctacgtcaaacgccctgacggtactgtcgagcttcgtcgccctgatggtactattcttgagattagacgccctggaactttcatcgaggtgaagcaaccagatg

SEQ ID NO: 10934 - DNA, 661 bp, Diabrotica virgifera
aggaaaactaaagtagatgatctgagacatacccccaaacgacaaagaagtacacccgcagccacgatatcatcgtttgatgcagagggattgttcgacttcgagggcagcgacggactaaattcgctttcagaaagtgacattggcgaaagtgataaagatgatactaaagaagaaaggtcgaatctgccaagaaataggccctctagaggtagtatagcgaaatcgttgcctatgaatattccaacatttttatcgcaggccagaaatccatctacagaagacctggacgatcttccacaagaagacaacctggatatagcagcaagtatcaaagctctcgccaagagtgtacacggcgatgcagtatttggagaattgccaagaccaagactaagtacccagatttaagattctcagtatcttccaaggtattcttccaaaaaaaaaatacagatggcgtgaagttaaagaaaaataaggtaaacggttataaaacaagttctctaagttacgtaagtgacaaagtgtagagtttaagaagataaatttttgtttttgttttggtatttgtaagtatcatcgaagttaagaggaatgttttgttcgtcggaggactcagtatctcactctttcatttgtcatttttttaaacaatata

SEQ ID NO: 10935 - DNA, 659 bp, Diabrotica virgifera
gtccagactatatagggaaactttaaaatgcatcggctggtgaaacaatggaatatatgccttaagtatacatagtaattatttgtagatatgtttaccgataattatttttatcaaagatacgtttcaattgaaaaagccttgtataaacaatattgtgattcagatttttaatttaaatgtgtagaaatatataaataaaataatataataaagtttatgaagtctacaggactattttgaagtatactaaccgtgaccatattggtttcatttgatctgtgcttctgtatgcgtctatattcgttgtaataataatagataataaaagatgagacccaatataaattgtggaatacttttccattatcacagacataaaatacttccgttagaattatttattataaaatcaataattgtaaaaagacttttacaaatttccacgaaaatttaaataaagcgtagtgcaaagtatactattttgtccaaactaaatgctaaaacatctttttttaggttaaaaagaaagtgttcgccctacagcaaatagaccgtcacgtaaacatttgatagatttccagttacagctaatttgaagcgggaaaaggtcttaacgtgattgttaattcattaagaggccatttactttctaaatt

SEQ ID NO: 10936 - DNA, 665 bp, Diabrotica virgifera
  SmartBlast Evalue=1E-75; Info="Glutamine-dependent NAD synthetase, putative n=1 Tax=Pediculus humanus corporis RepID= E0VPD9_PEDHC"
atggcagtacttgacgaatccacaccaccactcaaaggaaggaaaaaccaccttgtcctgatcttcttaaataatcccacaaccaacaagctggaccctgggctatttcctcttctggttcaagaaactgccattctattggattggcagatggaagggcagtatcgtattcgggagatagagaaaaatctacgttgatccttggataactaggtgttgaggaagccaaatgtgcgttagctcggcgattgttgcgataagaacgaatatcttctaagtcgatagtagatgctacaacttccacttcacttaaagcaaattgtttagctctatttaaaactttcccattcaacgtaatacaagaaactccatcgaaataaactctttgaccatcacagcctcttaaattactgtatacataacaacctccacatttcatagtcgcattcttaactaaatcggctatcacatagtttttccttaattcagtatgactacctgaaccattgcatataatttcaacaccatctaatgataaaggaatgtggggactgcttgaacaccagagttctcacatatttcaaaacctatacacgtatctaatgtagaaattactgcatcaccaattggtacaatcttttgattagtaatactggaaatcatac

SEQ ID NO: 10937 - DNA, 652 bp, Diabrotica virgifera
aataataatcaaatcctgtaaatggtatttaaatgaagaagtagatctgtaaggtctagactaaccaagcattttacgcgcctttttaagggaaacttatgcgtatagatacgcaacaaaacgacaaaccgaacgttattgtctgtcgtacaacatttttgttgctttgcgacaaaagaactctgcagccaacgaaatgggcggttgatgcgccttgttgttgcgcagttgcagttcgcactcaagtgcaagtttaagcgacagtgtttggttcgctgttttgtcgcttgtctgtaagcacgtttatttatagcaatttcacataagtgctagttgttattcttcaggtgagtttatgtaattttgtttcttcggaactagtagaatatcgtccccccgttttgttgttgatttttgtgtgaagaggagtgtggtcggtattttttattccgtttgtttaacaatccgagcttgttttttgcatacgagtgagctaaaggtgtggatattttttatctctaacaattctgacaaaaaagtatatatataaaaaaagtagatgaatttaggacaatgtaggatagaaaaagatattaatctatttaaaaaaaaatcactgcattttctaacggtcgttactaccacacttaca

SEQ ID NO: 10938 - DNA, 663 bp, Diabrotica virgifera
aactgtcgctgttgcgaactgtcgcgttacgagatgtcatggaatcggttttgatgtccgtatcacaaggttggaataaacttcaatcgaggagcttatttgcaaagtgtaaggtcacagtgtgtgtcaaaagaaaactcacaatttttcgatataatcgaaaaaaaaaacacttacgttactaacctaaaaaattatcgaacttttcaaaatcgatttaaactttcctgctccaattagcttcctcagaaaagtgcgcatgccgagttaaatgtttaaccgttcaaacagcgcaagcgcacaagaagctcaatttgtcaatgttcaagttaaatattgtatgggattacaccagttaattgcaataaacattacattttacatttgttttcggcgctttgtagcagccaatttgacagttgacttgtactcgaccttgtagacaaacagcaatgttgtgacttcatgtttcagccacacttgtcttcgttcgtactaaatccatggttgtgctaaatcaactaagtaatttacaatagtcaaggttgtaccgttagagatcaattatcgatatcttttacaactttggcagtatatgttatatattttattttatataagtagatttgttcaaaactattgcaataaaagttgtgcttcaga

SEQ ID NO: 10939 - DNA, 666 bp, Diabrotica virgifera
  SmartBlast Evalue=1E-20; Info=Zinc finger protein 706 n=4 Tax= Apocrita RepID=E2AVW5_9HYME
tttcattggtacatggtgtatggtacaagctgacgctgcaccgcagctaaataacaatatttaaaagaaaaactaaattttttatacaaaaatcactcaaaattaattcttattgtatgaaatttatataggagttcatccgggtaaagcaagatggcaagaggtcagcaaaaactccaatcacaggctaaagctgcggaaaaagccgctaaagccaagaaacaacaggggcacagcgctggagaccagaaaaaagctgctcaaaaggcactggtccatgtttgcgcggtttgtaaagctcaaatgcccgacccaaagacctacaagcagcattttgaaaacaaacatccaaagaatgaggtgcctgcagaacttaaagacatataacgtatatttaatgtttaataaccgtaagtgttcactttaagttgggcacactttcttcttttttacttacttgtttttatgttaatatattaggatgtatttaattgtataaattcttaccagctgagggtcgcacttttttttctagatctttgtttttatgttataattttaagaagtatttcttgtttgtataaattcttgaagccatgggtttgtatattaaatttccagtttgatttacgatatttgtatctattaaagtcttagtatttatag

SEQ ID NO: 10940 - DNA, 660 bp, Diabrotica virgifera
tgtattccctacggtataaaatagcttcggcgcgagatatattatatttttattattcttattaataagaaactttctaggtttcaaatatgtttcactatggctgtgtcgaaacatagcaacatttcttttagctttttactggctcaaaaagcgcaggaacctcattggtcttccaaataacttaaatattaacttattcggaactcataatgtaacaaataacacacaaaatatatttctacagaaataaaaacaaatatcgcattaaggaaagagtttgaaactgacgctaaattttatgagtgatttttataatgttctgtaataaaacattaaaaaattacactaagtgtttcggcatctgacgtttaaagagcaaagaaggtgataccgcgataacaacactagataattgtttatatacagggtgttcaattaagtcggcaccatatcggaaacttttatttttaattttaagaaaaaagttatttatatattttttaaatttttgtatgttctaaaacctaaaatgtaaccatccaatattaaatttgcatagtcatatacgctgtttgtcaaaaaaaaatgaattgtggatattgttaactcttacataaaattcatatcctttgacaaaccgcgtatatgactaaaaaa

SEQ ID NO: 10941 - DNA, 665 bp, Diabrotica virgifera
ggtcctttacgtccttaaggtccaacacgacatggcgatcctgccaggagtgggtggtttgtgtaataaggaggatgcagtatttagtagagaatatatataaaggactaattcttgatcaaacacaataataaaactagggtactgtcgtgcaaaagaagaagcattggatgtttaattaaaatcttacataaaaatttttttcgtaggacataattgactataaatcttaacaaaagaaagattaaaaccagaactaaatatacctaacacatattaagtaactagccataaaatgtgtttatattctgcgatacgctttcggacagagggctgatgaaaactaacaaacaagattattcaaacaaattctggaaatcacgatatatcacgaaagcatgatatgtgtttcatcacatttacgattatgacagatatacgtagtgtgtataaaaaaaatgagaacagtaagactttgacttattttgcaagtaataatctttaatggctttaaaaacaataaatttgtttaaaattttggaaaataatccacgtaactaatagttatgaaaaaaatgtagatataagcaagaaaattacataaatatacatttatataacagaatattgtcgacgttgttaattttttgatttcattgtaattt

SEQ ID NO: 10942 - DNA, 662 bp, Diabrotica virgifera
  misc_feature (607)..(613): n is a, c, g, or t
gatttaactttataactttattatagatttaagataaaaaagatgttactcagatttctaaggataccgaaaataaaaacagttgcaatacccattagagaactgtctaatttaagcataggaaaagcaactactgctgcaaaatttatccctgtattagaaacatccacaaatactattcaaaatccttggatatatcgacaaaacgataacttcaatcttccgcgatgtccaaatttaaagatagatctcccaaatactatcaaaacaatcatacctgcaatagaaccaaataaacaggatgtaattgaagcaccagcatttgatgatagtatcaagaaagaggcggtgaaaatgatcgtaatcaggaggaaaaagatgaagaaacataaactgaaaaaattgagaaagcgaatgaagtttgaatgggcaaaaaaaagacaacgaagagaattaaagaaagaaaaggctttccaggcagaactgatccagcagtgtaaagaagcagagggattctcagcagaacagtatgttaaagacaaaattagtgaattcaaaaaagcaagtgaaacactatctgaggctgaacattcaacaaaaacagacnnnnnnnataatagtcaataaataggtttatacaatgtgtatgtaaagtaaataaa

SEQ ID NO: 10943 - DNA, 664 bp, Diabrotica virgifera
  SmartBlast Evalue=4E-13; Info=Serine-type protease inhibitor n= 1 Tax=Culex quinquefasciatus RepID=B0W015_CULQU
aaaatagcaggtgattccaagtttttgttgttatttgtgaaagtgtgggttcttacatgaattctcattaatgcattcggtaattgtaaattcacatatcatttaactgtgcaaattttaagggtgtagtgccagtacaactaaaacggattatatctccatgaaatggagttccaaaaattaactgttttattcattttggccttatgtttaaccagttgcgaattatacagggaatctaacatacaggaacagtgtccacagctgtatgaaaagactttcacaggctgtatacccagaggaaatatcagtgcaggaatctttgaagaggttgaaggtccaaacaaattaaaaacttgcgttttggaatgctgtataaaagatacctgtaatgtagcttttatgcataatgataagtgttaccatattacttgcaagaatgacgaggtttgtttaccaacaaccactacaaatttgaacaagtctgatcgacttttcttagttttggtaaaacctgtagatgatcagtcgtgggaagaggttttacgacaacaagatttctcgaggaatcaagaagacaaggaaatctttaatattttaaatgacagaaaaagattcgaggacgttttcagagatctgctgaaagaagaatcttacgaacgag

SEQ ID NO: 10944 - DNA, 658 bp, Diabrotica virgifera
gtaagcagagtgctgttgagacgaaatcgtgatcgagtcgagaagtaaaatctcctcgtgaccgaatagattccagtttctgtctggaacgagtagcctgtttgtatcaattttgcacaagatatcgagctgagaaaaaatcttggaagtataaagattgatattgtttgtatcgagtcagagactaaattgaggagagatttcgagcgagtgctgtttgttggtgaagcagttggaagagaaggagcgtcgcagcatccgaaggagcacgtgtgggggaaccgaggacaacacaatccatgacaagaagtatagaagataaaaaaggttagtcagattatttgtaaaatggagtgagttgctttatattacataccatatttgttttaatttaacaattttacagcataattcattcattcataaattcatagaagatataagtaatctatttaaaaaggtgaaaattaaaatttgttttatttttataataataagaacagtctaccgaatcttttaaaggaaaatttgttaaaaagaggagatagtagaattaaagattaatttattagatcagaaatttttacaacaaaattgagttttagcatacatttggaatcgtatatttatggtatagcatataaataaataatatttg

SEQ ID NO: 10945 - DNA, 665 bp, Diabrotica virgifera
  SmartBlast Evalue=2E-38; Info=RNA-binding protein 1 n=3 Tax= Endopterygota RepID=E2B790_9HYME
ttttagcagttttgtcgcgtgtttagttttgtattttattcggcgttgagctttgcagtgttcttaaatcaaaatatcccggttcaggagaaacaccatgtctagacatcgagaatgggagctttcttgtaaagtttatgtaggcaatctgggttcgtcggccagcaaacacgaaattgaagccgcgtttggcaaatatggaccgttaagaaacgtttgggtagcccgaagtcccccgggatttgcatttgtggagttcgaagacaccagagacgcggaagatgcggttcgaggtttggacggaacgcgctgttgtggcacaagagtaagggtagagatgtcaaatggacgttctagaagaggtggtggcggtggaaggagaggaccttcccgatattcaaggtctagatctcccagacgttccagaagtccaagatctcgttctcgcagccgagattccagaggacgatctgattcaagagacagacgttaaattttaagatttatcatttaatttataagttcaagaaggaaagattttctggataataagtataatcttgatattttacagtttttacaatgatttttatttctaagtttgtattttgtctatatttagtctcgtattttgacttcataatcaaataaagaaattacacgtg

SEQ ID NO: 10946 - DNA, 665 bp, Diabrotica virgifera
  SmartBlast Evalue=1E-66; Info=UPF0378 protein KIAA0100 n=2 Tax= Formicidae RepID=E2BI45_9HYME
tttttcgagcctccttaacttactttgtgtacttcttactagcgtttgttgattttgtatcggttttctttgatcttcaaccgtgtgcaactgcaatttaaatcgcatacgggccagtttttctagagcttccttcctatgaggttccacatatagtaatagattgtttactacatctaacaacatggcatattgtaaggaattcgtacaaacgtctaagtcgtaatgcataagggtgaatgcatcaacggccgattgcttattttcccatggtccaacttcctcttgtggcggtggtggaatctcactgataccttccggatctacgcttatatctccgtagtcagcatagaagaattcgcatttacatcttgaaactatccgttgcaactgtctggaggaactagggccaacagtatcactgactacagctccaactgacacgccactgcccaccaaattaggaacttcggatggttcggaaatttcggcagattctttttcttgaatattatccaccgtaagccacattatattctcatctgcggtatcgttctctccagcatttactgtggcataatactgcatacattctaaggttcccacccaggtggttttcgacacgagcgttctatccttccacgcaggtctgtgaatcctctgta

SEQ ID NO: 10947 - DNA, 666 bp, Diabrotica virgifera
agcgcgctcatcactgtatgtatgtattcaggtattccctttacaaaaaagtgtgttttggaactataaggttcatgaatctgggcattttctaatctgtattacaatgcaataaagtattcactccaataatttcacaatgaagttatttttacaagtatttgccttctattgtgtcacgaactgtgcggagggcccactccagtggctatcaccaatgatgcatattatagtttacttacatttttatctccttcatgatcctctttgagacaagggagtcaaggtagagcaatgtcagattctatcaaatattttacaaaatactatatacaagacgtttaaaaaatgttatttgcatattatagaaaacgatgaaccaaacatacaggaatttttttacagagaaaataatatataatttgttggaagaatatgttttgtaagaaataagatttgtatcaattataatggttttatagtagtaccaggaaaataaaaaatggttgctgtatgtacattttaaaaaataaatagttttatttttgctttttgttttctaaaataattgaaataaaacaaatacatccagatccaaaaagtagttatcaccgaacctcttccatatttataataatatcaaattatcaatatcccttctacaca

SEQ ID NO: 10948 - DNA, 656 bp, Diabrotica virgifera
attctgtgaaaattgcgaggtgaaaagcttcggttcctggcctaataacttataactcataataacataaaaaaagtgcaaattgaaaatcttctgtgtatttaaaatagttcaaacgacccgtgacgtcacatagttatactttatttatgtttatatttatattcttctttagtttattggcctccatctacttgagtatttggccagctcatcgtcgtagaataagggaaaaatctttatattttaatgatatttctcgtatgtcattgtaataatatataccagtttgttcatattggagtttgacacagtttttgaaggaaaggaaagaaggtttactatggaaaataaaagataacttagaagtacaaatttaaaatcttctatatatttaaaatagtgcaaacgatcaaaaacacttgagacgtcacataactgtattctctactgacgtttataatgtctaatttaaaattatatacaattttgcttttattggtgcagaatgtaagcatataactgtatgacattacaacgcgttttggggctagctgctataatttgaatttagaatcgtctttggggccaaacggaacacaaaaacaacttctttatctttgatacatgttttaaataattcgttgtgatttata

SEQ ID NO: 10949 - DNA, 661 bp, Diabrotica virgifera
  SmartBlast Evalue=1E-71; Info=Aminoacylase-1 n=1 Tax=Glossina morsitans morsitans RepID=D3TP85_GLOMM
ggaggtgtcgatggaatgaaagcatttgtcaaaactaatgatttcaaaaatttaaacataggatttgccttagacgaaggtatggcaagccctactaatgagtaccccgtattttatgcagaaagaataatttggcaaatgcatattcattgtcccggacacccaggacatgggtctttattgttggaaaacaccgctggagaaaaagttgcgcattttttaaataaattatatgaatttaggaaaacacaacaacaaaaattgaaagaaaatcctaattttacaattggagatgtaacgactgtcaatttaacccaagtacagggtggtgttcaaccaaatgtaatccctcccgaatacattctaactgttgatgctcgcatatcaattacaacgtgtttaaagaagttcgaagaaatggttaataaatggtgtagtgaagcaggacagggagtttatgttgaattcgaacaaaaacagcatttggttacacctacaaaagttgacaattccaattcctattggatagcattcaaatcagcggctgatgaactcggcttgaaactaaaaacccaagtttttcctggcggtaccgacagtcggtacgttaggaacgcgggaatcccagcgataggattttcgccgatctccaacacgcccg

SEQ ID NO: 10950 - DNA, 664 bp, Diabrotica virgifera
  SmartBlast Evalue=3E-14; Info="CG9134, isoform A n=2 Tax= Sophophora RepID=Q9W0I2_DROME"
gcgaacttagttcagcaacatgacaaaacaacttgtgggtgtactactactacttacgatcttattcaatattgagatcaattgtgttgccgatgatcaagtcaattatgttataacgacagatacgggtatagcacaatccatagctccatcaattccagttgagaggaatggaagtactttatattactttggatatacatttacgggtagttggttgggagcgatggagcattgcaaatcactcaatatggatttagctagcatagaatcgccggaagaaaacgattttctttttaatcggatgaaaatattccttggtggtggagctgaatatcggttttggacatcgggaaatacattatccagcactccacccagatggatgtggatgagaacaggccgtccaataggttgggctaactggggccaaggttacgcaggtcccgaaagatgtctcgaggttaagtacaattatgcaagcggtcttaaatggtacgacacaaaccaaaatacgggtcttcacgctctatgcgaggctaaaattacaaaaactgtggcagatatgattcctaagttttgtagatggcctccctaccctagaaattataaactactagactctagaaaggatttgtatatttaaatgagatgcattataaat

SEQ ID NO: 10951 - DNA, 659 bp, Diabrotica virgifera
  SmartBlast Evalue=8E-53; Info="Retrotransposon protein, putative, Ty1-copia subclass n=1 Tax=Oryza sativa Japonica Group RepID=Q2QSQ2_ORYSJ"
tgaagattttgagtattcatttctttctgttgggcctaatgacccaaagacctatgctgaaatctgtgaaaggtcagataaatccttatgggaaaatgctatggctgaggaaatagaatctttaagtgaaaataatacatgggaacttgtcgatagaccaataaatagaaacgttgtcaagtgcaagtgggtatataaattgaaaaatgcaatagatgggtctaaacgttataaggcaaggcttgtagccaaaggtttttcacaaatccctgcaaaagactatgatcaaacattcgcaccagtagtgagattgtcctcattaagaatgttgtttgcgttgagtgcgataaatgattacgaaatagatcatgtagatataactactgcatttttgaatggggaattaacagaaactatttacatggagcaacccgaagggttcataaaggaaaatgaaaaagtatgcaaattgaagagggcgttgtatggtcttaagcaatctgctaagtcatggaatgacaaaattcatacatttttattagaaataggatttgtaagatcaaaaatggatccttgtgtatatataaaagaggataatggtattttcatagttataggtttgcatgttgatgatttttacattttttcaaactctaaac

SEQ ID NO: 10952 - DNA, 665 bp, Diabrotica virgifera
  SmartBlast Evalue=1E-68; Info=Protein canopy 4 n=1 Tax= Camponotus floridanus RepID=E2AF95_9HYME
gtccagtgtataatatcaagcatatttatatcaagtgcgctaaagtggctaaatgctaagcgagaagtaaatgaataatttaaaaatggtagtgtttaatggatattttataatcttattttgtaccttagccttagtgtattcagaaagtccagaggaagagcagggtgtaaaatacgcaaataaatgcgaagtgtgcaaaatactggctatcgaattggaatcaagactggaagaaacaggtaaaacgagcgaggttctcgaaacaggatattccgtagatgatgtgaaacccaagaagaaaaaagcatataaaaagtcagagctcaggcttgtagaatcattggaaggtgtttgtgatagaattttagagtataacattcataaagaaagggaagacagtacgagatttgcaaaaggtcagagccaaactttccaaacgttacatggattggtggataaaggtgtgaaagttgagcttggtataccgtatgagctgtgggataagcccagtgcggaaattacaaaacttaagactcagtgtgaaactttattagaagaaaatgaagctgctatagaagactggtacttcaatcatcaaggaaaattaaccttgaaaaaatacctttgtgaagatagggcactgaaaaatcaggaagccaaat

SEQ ID NO: 10953 - DNA, 652 bp, Diabrotica virgifera
  SmartBlast Evalue=6E-23; Info=Endonuclease-reverse transcriptase n=1 Tax=Schistosoma japonicum RepID=C7C208_SCHJA
tccttactggtatacccattccttcgcactttcttttccatggtttcagggtcttttccagggatattttgaatagggtaggggatgtggagcagccctgtagtagtccctttgtcgtcttaaatggactgcatattcgattgcccattttgatagctactgtgttatttttgtagagtgcttttactgcttttattaatcttcgtgggatttcgatgtcttccattgcttcccatagcttggttctaggtatcgagtcatacgccttcttaagatctacaaatgccagatggacggatctatttttggccattcgtttttctattagttgttcgaccgtgtagatgtgatccaagcatgctttccccgctgtgaatcctgcctggtcttctccaattttatcgtgtatatatatttctaattttcctttatggtctttccatacagtctgcctatatatgatattatgctgatttctcgatagttttcgcattttttctatttcctttcttatatattgatgtcatatatgcttgagtccattctgccggtaagtcttctccattcagtgctctctcaaaaattttgtgtatcatgcggaatagcttttctgatccgttctttattaattatttggtattccgccggggcc

SEQ ID NO: 10954 - DNA, 663 bp, Diabrotica virgifera
  SmartBlast Evalue=1E-85; Info=Peroxisomal n1-acetyl- spermine/spermidine oxidase n=1 Tax=Aedes aegypti RepID=Q171T9_ AEDAE
ttctggtatagcattctttaacggctctaaaattgagctgtatccatttggtaacacaatattgcctccttgtaactcttcataactccccaattctaacaaatcaacttcattcatatcatcacagcctgaaatacaagtctctctcttcaacaaacattcaaaaatcaattctcgtaaatgtctttcttgatcatccttaattttatctaaatacaaacttatttctaatcttaagtggtcacccacactatcgataccctcaggaggtgaatactgagaaataaaatactcttcgcaacgttttaaaaagcatagataagcttcataaacttcacatagtaaggaaaatggtatctgttttccctgctcagtggctgccactaacttgtggggctttggatatgccataatgtctaccaaaccattttgcatggccaattcatagacagggttacctaagactccatgtatccagttagctccaagttccactttttcagtgccaacaggaatttgcacaattctaccacctaccctaccgcgagcttccaaaattttaaaatcagtaaaattatttttggttaaatggtaagctgccgacagaccagccatgccggcgccaattataataattttattgttataaacattgttatctga

SEQ ID NO: 10955 - DNA, 664 bp, Diabrotica virgifera
  SmartBlast Evalue=1E-43; Info=Extracellular sulfatase SULF-1- like protein n=1 Tax=Harpegnathos saltator RepID=E2BR95_9HYME
gaacaattacaaagggaatgtggttttgaaaaaatgaattgtttccatcatgataacgagcattggaaaacagctccgttttggaccagcggaccgttctgtttctgtatgaattctaataataatacctattcgtgtgttagaactattaactccacgcacaattttctgtattgtgagttcactactggatttattacttactacaatttacgtagagatcctttcgagcttcagaataatgcggattccctaaaaccagaagaactttcttacttacacgaccttctggcacgtcttatggcttgtaaaggtagatcttgtactgtctcacattatggaccaccgcacgtaaaacctagaagtagagcgaatagtttacccatgcactcaaatattcaacattcgtataggaagaaaaagtttacagaggaggaaaacgggagcgaggcaacacgaggtgtattacagctggtacgaccagatttgaaaagaagagataaactcagcaacactacgtcttcaagagatattacgaataggaaaagaagaaaaatagaagaaagaagtcactaattcgcttgatattctcatttgaccctttaacgtgaatttagatattcacaagtttttgttcaaataatttgtattaagtgatactaga

SEQ ID NO: 10956 - DNA, 664 bp, Diabrotica virgifera
gtgcgtacatatcaccagaaagaggaataaggaaataaccacgatattgattagtgagtaggtaaccttttaacagcggcacagtgtgcgatgtttgagaaacaataattgacaacatgaacaacaatcggtcgaagctgctcccacaacaatcgtcgaaataaggtgaagcaatatttcggtgaaatatgcgaaaatacagcagtggggaggaaaagttgtacataaacagtttgtgtgttagtggaagcagtataaaacttttgaacccgacaaacaagtgttacatcaacaaaacgatcaagataacgttggatgccgacgtcgtggaccaggaagccaccgccgatagcaaaaataaaatcgtggattttaaaaaaagtgacaaagtgcggagacaacctctaaatctcaacataaccgactacaaaaattcgaaagtgtgcagtaaacaacttagacagatctacgaaaccgtagaaatacaggattttgaaaggattctaaacaacctgcagagaagtaatgcctctcataacttagtgactaacaaagtggataaaatccttaagaaaatagatgctgatgatatttacgaagagtatttcggtcagtattacaatcatttatacgacttgatagaaacgagttaaacctgcgtcat

SEQ ID NO: 10957 - DNA, 662 bp, Diabrotica virgifera
aatttcatataaacatgtaaattttagattttcactcgatgtaaaaattacataattattatcagtacatcgattttccatcatttatttttttatgttgattctcgtataacataaatttttttctttgataaaattcagtaccagtcaaatttttaactttctatttctaaccattaatattttgtattttgacaacgacatccgatgtggatgtcgaaacgttaataacattatttttttcaagttaaattgtgacttattgctcaattagaatagttaattacaaaaatgccacaaagaaatagcttcagaactgtacctcgaacggaaatgtttaaattaaatataccttttataaaggattttaactaatttttttacacaaagatggtttttacgtattttaatatagtaacaatagcaaaaatatacaaagctttaaaaattattctatatttttagaaacacgttctgttcacaaataatgatgcttcaatcgataatttttgaagcagtagtaaatataataaaaataaattaagcttataatgtagatataagaaacggtgaaaaaaatacccaagaacatcaaaaaataaaacactttgtcaacaaccatgtatgattattttactacaaaatcacgcttacgccattca

SEQ ID NO: 10958 - DNA, 664 bp, Diabrotica virgifera
  SmartBlast Evalue=6E-82; Info=1-Cys peroxiredoxin n=2 Tax= Bombyx mori RepID=A8D0B7_BOMMO
ggatctggtatcattcttatatagttctttcctgaaggaaccgtcgtaactttaacatatgggaacaaacttttaagttcagtgtcagaaacagtgggttgtaccattacatcttcaccaggcacccaatcagcaggtgtagctattttatgtttgtcacaaagttgtaaggaatccaacactctcagaatttcattaaaatttcttcctgtggtagcaggatataaaatggacagtctcatcttctttttcggatcaacaataaacacagcccttgcagaaagtggtatgccatcagagtccttctcatctgaatcaataattcccaactcactggcaagatctctatcttgatcttcaataattggataaggaaatgtgccatctaaacatccactatagttaagaatatcagaactccatttcaaatgactgtctactgagtcacaagataaagcaatgattttagtgtttctttttgtaaattctggaattaactttaccaatctggctagttctgtagtacatactggtgtaaaatctgctggatgagaaaacagtataccccaagattctcctaaccagtcatggaatgttatatctcctattgtcgtctttgccgaaaagttaggaaattgttctcctaaaataaccatttttatgc

SEQ ID NO: 10959 - DNA, 647 bp, Diabrotica virgifera
attatcacataaatattatattgcaaatatcgcaaaaatttgtagtatttgttgatatttgtgttgaaaaaatgactaacaaataagaataagtaaaaaattacaatcttttaggcgtgtgatccagacttaaaaattttaaacatcgatgctagatggggaggtgcaacacatgatgtggagaaactcaaatgtaaaacttttttgcagcagatcgtttaaaatagagatcaaagcattttccatttctattctggcaaagattactttcacttcttagttatctttgctggacggtgaagctttatatcttattatgaagtatttgaacataaaacttttgttttatggatgcattgatcaaatatcttaaagaaatgtttatttaaagtttcataataatttttataagtagtttaatattattacttatttttgcactagaaataataattgtaaagcttcattgactaatggccagtttcaccaaagatgaatagtagtttattcgatgaataaaattattcaactgataaaactgacacaactatgtctctctaacgtcaaatagtacttattttatttatttatcaaataaatagttactcttcaaatgaattgacgagttaatctcactttaaatatct

SEQ ID NO: 10960 - DNA, 660 bp, Diabrotica virgifera
  SmartBlast Evalue=1E-104; Info=Dynein heavy chain n=1 Tax= Tribolium castaneum RepID=D6WRL4_TRICA
ttattggaaattataggaaacagcaagaacatcgctagacttcagaaacactttaaaaaaatgtttgctggagttgcttctatacttttaaatgaaaacaacaccataattacaggtatagcttcaagggaaggtgaagaagttcacttcaacaacccagtctcgactgtagatcatccaaagataaacgaatggctcacaatggtagagaaggagatgcgtgtaactttagcttcaaatttaacccaagctgtacaagatatcaagcaatttaaagacggcattgattcaaagagttacatgcaatgggtcgacaaataccaggcgcagatagtggtcctcgctgctcaaatcttgtggagcgaagatgtagaagctgctcttgtcaagatgaacagcgaacctcaaaaaggtcctctagaaaagtacttcaacaggtagaaaatacactcaatgtacttgccgactcggttcttcaagagcaacctcaactcagaaggaagaagctggagcatctcataaacgaattcgtacacaaaagaactgtgactagaagactgatcgcaaacggagtttgtagcaacaaagcattcgaatggttgtgtgaaatgaggttctattttgatccaaggcagactgaagttttgaaacaattaacga

SEQ ID NO: 10961 - DNA, 664 bp, Diabrotica virgifera
  SmartBlast Evalue=3E-12; Info=Endonuclease-reverse transcriptase n=1 Tax=Bombyx mori RepID=D7F158_BOMMO
gtatagtgcaaacatacactgataagaaataacatgggtaaggtattaaaaacacaaagggccatggaaagaaaaatgctacaagtacatctgaaggataagaaaagaaacgaatgaataggaaaaatcactaaggtcaaagatgtaggtaaatgaaaaaatagcagaactgaaatggaaattcgctgggcacaatgcaaggcaaaaggacggtagatggaataaccaaatactacactggagaccctgggataccaaagaggaagacctcaaatgagatggatcgacgacatcaaaaaacaaggttggttccaaatggatgagtatagcccaggaaagagaatcctggagagaaaaaggggaggctttggttcaagaatggtcgaaataggctatagatagatataagtcaccttaattcttccttcatatatatgatatttgttctataagtatgaaagatgatatgttaatattagtattaattattctggatatcttgcataaataaacactttttccaccttgtaaaaatttttgaagaaatcctgaaaacacaactaacgtagtacaataaaattgtagcgttttaaggaataattgtagttataagaaaatcaaacattttatgtcacaatcgagaactattgtgctttaatctttg

SEQ ID NO: 10962 - DNA, 664 bp, Diabrotica virgifera
  SmartBlast Evalue=7E-12; Info=Probable RNA-directed DNA polymerase from transposon X-element n=1 Tax=Drosophila melanogaster RepID=RTXE_DROME
ttcgattgacccttcggttgccattacaaagtctattgggtcgcctgtgtatgctctgcgtgggcagtcctgaacaatgtgactgagaaacttaagaatggcctaccacaggggtcagtgctctctccactactatttagcttatacttagcagatatgccggaaacacaatcaagaaagttcggatacgccgatgactgggccctcactacacgatgcagaacactagaaacgtctgaagaagttctgacggcagacttgtatatattgggccaatattttcccaagtggcgacttcaaccaaatgcatccaaaacagaagttagttgctttcacctgaacaataaacttgctggaaaggaactcaacatacggtttgaaaataccacacttacccacaacaaaacaccgaagtacctgggcgtaacactagacagaacgctatcatttaaagagcatttaacaaaaactgcccaaaagttgagtacaagaaataacatcatacagaagctctgcggtaccaccggggagcatcggcttccactctccgctctactgccttagcccttgttttctcgaccgctgaatattgtgccccagtttggctacacagcccacacgtaaaaaaggtcgacattcagctgcatagcactatgaggatgat

SEQ ID NO: 10963 - DNA, 655 bp, Diabrotica virgifera
gtcgtcctgtaaggctagaaatttgtatagtgataattcatagcacaccaaggctaaaaaccatgacctggcaggcatcagccgtgcacgtgtatctaccaggtgaatcgaaaagtgcaaagtttagggaaaaataaactttctcctgtaaagtttaaatttaagtatgtgtttgagtaagtcatttagaagaaatgtgtacaatgacaggcgattctgaagagcataagaccttgccaggcgaggggaaagattaggggttatcctaaaattatttttttgcatcgaacaaagtttttttaggtttttgaatcattccaaacagaaaaggtctttagtgatttttctcttaggttaatagtttttgttatataagcgattaaaaattttgaaaatttttaaccctaaatcggacatttaactaaaaatttcaatgttgccaaggtaggtagatattctttaaacattgtatacaaatttctagccttacagaaaggccgttagtcggagggttcactagctcttaggctattagtgtcaaataatgccgacgcactattgtcaaagtttcgcagaacttttgaaaaagtgtgtgctactatctcccgaagtaatattaatgacgcgctgatgtggactattaaatgaactattg

SEQ ID NO: 10964 - DNA, 663 bp, Diabrotica virgifera
  SmartBlast Evalue=3E-19; Info="Crotonobetainyl-CoA-hydratase, putative n=1 Tax=Aedes aegypti RepID=Q17EN7_AEDAE"
aatggtgttgcaattggtattggagccaccatagttgctttgtgtgatattgtctatgctagtgacaaagcagcctttgatactccctttttaaagttgggattatgtgtagaaggaacatccagtttaaattttccattgattttaggtagaagcttagcttcagaaattttcttcttaaatagaaggctgacagcacaagaagcacttcactatggtttagtatcaagaattataccccacaatgatcttaacaactacataaatgatttgcataaatacggaaaacttgcagttggcactgtcaagagaataaagctgctatcatggccaactttaggcaacaattccatgaatgtaataaaagagaattagaggtattgaaggaatgtgttaattctgaagattttgcgaagagtatggctcagtggttcgctagcagaagtaaactgtgataagatttttttctcaatgaacattattgctaattgtcaaaaatttaaatggaaatttcattattttactgtagtagtaaatcaatttaaatctttaaatcaagacctaccagtcaagaaagttttttgaaaaatataactagatattgcatgatttaagacaaagtctagattttaataatatacagtgaggacgtttgagttggaa

SEQ ID NO: 10965 - DNA, 661 bp, Diabrotica virgifera
  SmartBlast Evalue=4E-23; Info=WD repeat protein 26 n=1 Tax= Culex quinquefasciatus RepID=B0VZH5_CULQU
gacgtaattcttgaaggtcatgatcagcctttgaccagtctccatccatgacatgctgacggaattttgcagctgcgggatgatcaaggcgacagcctgactcgtccataagtgaatcagatgttttagtcaatccttcatttttaagatattgcccaatcagtctcacgatttcttggttcgtctggttgaggaaaaatccattttcaccatcaccgtgaccgttttccgcagccccgttactacaagaaggtgccccatttgtaccaacccgttacttgattgcattgtctcgttttttgtagtccttcgggttttcttacgaggcggttcaccaccgtcgtccccggatgaatcactatccagacttatttttgaaattcgctttacctcctcgctttccagatttctattatcttttaaacaaaaatatattaagctctttgtctcaacaaaaacatctattacgtcattagtgagattttgtacttgacaaaacggaatacgaatttatgagctttatttaagaaacattctaaaaatatttatagtaattgcgaattgtttatagcagcacgttcgataaaatgtatgtcacatcaaaatgtaccacccaaaaacaaacatcagctgaaatgtctacgaacagctggcaaatttg

SEQ ID NO: 10966 - DNA, 661 bp, Diabrotica virgifera
  SmartBlast Evalue=3E-28; Info=Nuclear pore complex protein nup154 n=1 Tax=Aedes aegypti RepID=Q17JY3_AEDAE
gaacatcggtgatgtgtgtaaagaattttgtaatcttaaaggatacaaagccgtaactgaactatgttgtcattatgcctcaaaattagacccagaaaatattgcagagatatattacaatgcaccggatagcactggagaccaggaaggttataattactatcaaaacagaatggaaatttataggcatttattgaatatgttaaatgccatgtatcaagaacttaatgtaactccagtaccgtgtctcaactacgacctcgatttttcagtaactcaatcaattttgacagatacaccagaacagtcacaaattggatatatgatgaagcaagtgatcactgatattttgcaaactcccgatcaaataatgcatataaacctatacgattggctaatatctaaaatatgactggagatttactaacaattaataatgattccttggagacgtatcttaaaagaacagcagctcaaaatccaaatgatactgttgctttggaccttctatggaaattctatgaacaccgcaatgaccatgccgctgcagctaaaattcttaatagcctggcatcaagaactggtgttaacattcctttaaaagaaagattggcgtacttagcccggtctataatgtgtatgagaagcgacaaaataggat

SEQ ID NO: 10967 - DNA, 662 bp, Diabrotica virgifera
ccaatttagtccactgtttgcctgccactactcttatgtcatctactcatctcttttgaggtcttcccacgtcttctccttggtcctccattctaggatttccgtgtccacaaggagtgaaatattatgacgccaaagtgtacagtgttcaagtgatgacatcctacttaaaattataatatatttctatgtaaataagtgtccattgatgtataaatgattaactataaaaatccgataaacagtatgttcacaaatcaacttttttctaaaattagatcactctgtacgatttaaaacttattgagcaaaaattatatttatgcaaataaatatatatgcactggacgtaaaaacctaatatttttaacaccgtgtactctaaaaatattgtactttgtcaaatccttcaaaattatacaactatgaaactatttctgtatacctcagtataatgtactaacccaatcgtatataataaagtacattatttttaaaatacacaccatacagtcttcgatacatacaataattctaaaatacaagtatacttacattaacaattcacttttaaaaggttcaaaaattgtttaaaaggaaataaaataaatttactttttgtataatgaacagcgtggaagtggcaaagttctccggataat

SEQ ID NO: 10968 - DNA, 661 bp, Diabrotica virgifera
caacaccgcattggctagaaaaattcctaccgctaacagctgcaacgatctttttcttccaagcagctctgataaagtaccaagtactagtgagccaccgatcattgctagtggagcaaagcctgctatcatggagatctccagcgtcgttgctggccttcctatgggattatcatccgaaatatccgattttaatttgggaactactggtgaggtccagactaagtgagcaccagaaactgcgttagtcattgatcctgctataaccataaataataagaaaaatgtatcaggttttttctgttcaatttctattttcaacggcaaattttctatggaaaattttctccatcattgcattctcgtcctctgtatatgattcatcattagatgcaacaggtttattatccatggcgaattattgtacacatgcacttttaaacaactatttttcttggtgttgcaactcactcaaaagtaggatcgtgtttataataccatcgtattttgttcttgttagctatacttgctgttttttaaaaaatgtttgttgttgtaaattgttgaataattccaaaatacgtcaaaaactttaacactgtaaattcgaaaaatttaattgcaaattatgcacgtaacaaacatactaaactccttaaga

SEQ ID NO: 10969 - DNA, 660 bp, Diabrotica virgifera
  misc_feature (150)..(152): n is a, c, g, or t
  SmartBlast Evalue=4E-28; Info="Gamma-interferon-inducible lysosomal thiol reductase, putative n=1 Tax=Pediculus humanus corporis RepID=E0W468_PEDHC"
cttcacttcatgtctatacgcttttctggtgttattagtgacatcatctaatgcccaagaccagaatgagcagaaggtcacagttcgagtatatcatgaatcactatgtccctatgccaagaagtttattgtagatcaacttgcacctannntgaagggaaatttgtcaagatacgtcaatctagaactagtaccttatggaaaagctaaggaaatccatttagcaaatggtacacaatattatgaatgtcatcacaaagtccaagaatgttatggtaaccgtatccaagcatgcgtagaccacattgaaaagtccaaacgggaggagtatttaagtttcgttagctgttttatgggtaatttgacgacaaatgtcgagaagaaacaagttgatgatgccttaaaaagatgtatacctgaacctctagatgttgaccaaatacgtaattgcactacaagtccattaggcgataaactcatcgagaacaatgcaaaaattacaaatggcttccaaaagcctttgctcaatgtacctacaatagtgtttaacggagtctacaatccatcggaaagttcagaagctgaaaaaaattttaaaagtgtactttgttcaaaaatcaagggaaagaagccagaggaatgtgccaatttacctaacaa

SEQ ID NO: 10970 - DNA, 663 bp, Diabrotica virgifera
taaagatattttaccagacgaatatgacgatgaggatgaggacgaagataaggaagacacttctggtggcgatattgaaaacctagtattattttaaaagttgttgaccgtccagaaaagtatgttgcacaaattctacatgatttatgtgtatgtcaagtatatattgaaacgtttaaaaatacgctctactttgactccattgtgcatttctacgtattaacagaaatgaaaatgaagaccacattaaccaataccgacaagtcgtttagatcaaatcttaaaaggattataaaagaaaatagtagaaattacggttggcaatggcctgcagtggcttatctattgtattcagagttactacccgaagatctaaaagccgtgtataaagaatttgtacaggatacgtcaaaaaacggatgtctcttatgagttacatttgactcaaacttttagtcagaatattaattacgatctcgttcataataaagcagatgcgattgataatattgtctcgttgcgtagtttaattcagtgtgaagacattgatgttcaaatagctgaagtttttacgcaaatggaagcaattagaagtaagaatgtgccgcacttcctgtataatactcgtgatataagttggcaagactgtcaagaaattgttga

SEQ ID NO: 10971 - DNA, 652 bp, Diabrotica virgifera
  SmartBlast Evalue=3E-21; Info=Endonuclease-reverse transcriptase n=1 Tax=Bombyx mori RepID=D5LB38_BOMMO
gtccattagtttcaggatctcatctgtcatccatgatttcttcttggttaatttatcttcctttaagtgtctattctttacattttgaactatttcggtcatctgtttgatcattttgttcttcgttcgatgcgtctctaattgcaatgacttgctcgtttaacgcggcttggaccctcattttcgtgtcagggtcttttagcatacgtaggtcgtatgattgtgatttctttttctgcactattttgagtttgacgcgaaatactcccaccggtggaacgtggtccgtctctaagtctgctccaggataagtcttgacagatgtaaagctgtttcggaatcttttgtttactaaaatgtaatctatttgatttctaataattctccgggatttgtttaaggttatttccgcgtgtacagctttcgaggtagtaattggaagaatatgttggtgacaacttgttccagatcctctgcgaatttttctaggatgtctcccctctcatttctgactgtattttatctccagctccaaacttggcactaaaatctctcataatgatgagaacttcctgtcgtggaattttctgtatgatctgttgatttttctgttttactcaattacttttttattcctctttatctgcagtgg

SEQ ID NO: 10972 - DNA, 662 bp, Diabrotica virgifera
  SmartBlast Evalue=1E-105; Info=DNA damage-binding protein 1 n=4 Tax=Apocrita RepID=E2BJY1_9HYME
tcttatcctgttgtaaatctaaaaagctctctattaaatcaccatctatgaaaccttcgctattttccgtctttatgtcagtgtgaaaagctctccagaacgaatggtcgatcttgccgacggattttattgtcgaggaaagtttgtcttgaagctcttgcaagaattcgtagaaatcttggggtatttgggttaccaaacctatggctcctcccacagtaccaaacagaacgcaccctctcgtgggcgtcgatgattcggcaatattctgcataaccaaagaaccgtgcctgaaaacattgatcatgtcaccgacatgaaattgtcctacttcttgcatttgagaccgttcttcatcagtcgtcgctgcactatccttttgacatacgaacatgttgaaactgttttcggcacccaagaatgtgtcatcgtcgagtatttcgacagcggtcatccagttggggttgtaatctcttgctatttcttcgaaactaccttccattgttttgtattgtaaaagtgtcatgcttctcatcaaatctccaatcaatatgaagtcccctttcgtttttaaaaatagtgaaatgatattgttaaattgtgaacattccagtcttaattctttctccgctgtccattcgaaaagccgaacggtgctgtta

SEQ ID NO: 10973 - DNA, 664 bp, Diabrotica virgifera
ttgttagtatgtattttacgatgatggcgaagatacaaaacagtataactggttatttctgttgatattcttctttcttgaaattccttattactctgcagaattgtccagtttctgtagatataaaaaaagtaaatgtctcttgatggtgttaaaaagcagtagaattactgtgtatttgaaccgaaatttcgttctatagtttttaaggatacgggaaataaaatcatggaagaaaaacactcatgaaaattcaaattcatggaaatatatgagtcaaacatgaatattcgacttcacgttacagccaacaaccagcaaatcgaacaaataaacctggataactaatcttaaagcagaagatgaaataagtaccgcatgaaacgaaggtgaatttactattttcactgggaataagtcacaagtttgctttaacataaaacaattaaacaaattttgtttttgttaagtgatacaaaaatcttctaataatttaattttatctgactcattcatattgacaattcaggcatgtattatacattttaacaggtggctttaaaatgttattgttaatattttggagttgcgtcctgggacgactttattcgaagatagttcattcgaatacatgaaatcatcttttaacttacgaaaacacgtc

SEQ ID NO: 10974 - DNA, 659 bp, Diabrotica virgifera
ctagtacgtatatttaaagataataatataatagtctgttatttagaacatttttaagtatagtgagccacacaggacagttagaaagaatcaatgatataaacatatatctgtcagtggcacctacagatctacttagttcttgatactgtatatagtttacttagttgtaattatgattgaatattaaacaagaaaatcagaatttgctgagtctaaacatatatgagcagaaactgtataaccaatttcttacaatgtttctccactctattcgaaattgactgtttctattaacttgtttttgtttaataaataggataaaacaaacgaagtttatacctcaaagagagaatgttaataagtttagccgaggatatagctcatatcatcgaacttctaactaatttgacctggggtacacgttgttttatatttccttaaatttgtatgacaggtattctatattcccgctgagtcattcaccaacgcacaagaacattgtacaaaacaactaaataaagttgatcaattgagtacatttcttctcaagaatacctatataatttgaaacaagatttaccagcatacagttaatctacatacacacgtttatatacaagagtaatccggctcgaaggaccaactggagtcgattg

SEQ ID NO: 10975 - DNA, 655 bp, Diabrotica virgifera
  SmartBlast Evalue=2E-22; Info=Mitochondrial polypeptide chain release factor n=1 Tax=Stomoxys calcitrans RepID=C4N164_STOCA
attaggttaggtttttaaaacccaaatgtttaaaaaatgaataagataaatcgtacacaaatattaagattatataaagaattattaagatatagcgaagaacttaaatttacagacaaacaatatttccgcaacagaataaaagaggaattccaccaaaatagagatcttgttgacgaaaaccaaatcagtcataactaccaaaaaggtgtaacgttacttctaaaacaagcagtacaatgatgttgtgcagacactatattaggacccaattactgttaagatttaaacacacattagatatttccaaagttccccctttactggataaagacatagaggagatgcatgtacgaggaagcggacccggtggtcagaaaataaacaaaacagccaactgtgttgtaatgaagcacataccaacaggaattgttgtaaaatgtcaagaaactagagaactgcacaaaaatcgagtaatagcccgcagccttcttcaaacaaaactagataactttgtaaatcgagaaaacagtttagaagcccaaactaaggtccggaatgaaaaaaggagtcttgtaagggaccagaaaagagaaaaactacaaaactaaaggaagcttggaaaaatcgagaatgtagcagcatagatcaaaca

SEQ ID NO: 10976 - DNA, 657 bp, Diabrotica virgifera
atggacgtacaataaaagaaggttgatattgggtatttccttataagtccattcgcgatgttaagtcacaatgacgacctctcggggacttcggctcaactggcttcgagggagttttcagtgtcaaacaatgagagcacatgcattgaaacaagtaggtaatattcattaggtatttatttttggagttgtacttctttaggcgcgtttaagagtaaatgtatatgtgcgcgaattcatcaaaagtcttggtgctggtcgcagatgaaacgttatacgtgctctgattgggtattacaatgacctgtcaataattgttcaatagggcggttatgggtaaacaaatgtgtatattagctttttattgttgtgaggacagagacaaaagcaagtttataattgtagtgactttttaaatagtttttaaaagcaacaggtacgtaattattgttaaatgtttcagtattgtaataaaaaagacataggtatttacctatttggaaaatgtatgtacctgtctagtaggtaatgctttgatttacataaattgattaccaacgtaatttctaccaattttcatctaatatattgttttcttactctatgttttgttgtattttaatattttaattcaaacaaaaaatcaaactaatttga

SEQ ID NO: 10977 - DNA, 657 bp, Diabrotica virgifera
tgtatcagcaatagtggcgatgagcgatcctggatcaagatcgagtgctctaagttactaccgacgaaccaacaagtagtctttaagttcttcgtcatcgtcatcatcgagcagtagcagtagtagtagcggtaacggaggaagcaatatcaacgtcggcgttggcagtaacgtcgctgttgcctcgtcagtatcgccacagtccttattatcgtcagtatccatttcgtcgtctacggcgggtggattacaacaacaaagatcccatagcagatctccactatacatccccgcttcaacttcaagtgtacaacagagacatcacgaagtaagaagcgaaccggtaagggtctggagagaccctaacctgttgctagaggagccgcatgttcggcacatacatagcgttcagcatcagtcgctactaatgtcacactctaacaccccagccagcgcgtcagccggcccgccgcccccctcgtcgtccgtcgcgtcagtagctgctgccgctgcagctgcggctgctcaacacccatcagccagtgcccttggcgcctaccccgtacccccacctccatcgttaatggctccccacgttccgctcaccagtcaccatcctcatctagctgcaactcatgccctctatcaccacacggc

SEQ ID NO: 10978 - DNA, 647 bp, Diabrotica virgifera
gtgtggacacgtggacaggcagggcagccgtgatgtgctattttgctattagccaaggagataggtttgctcttattggtcgagaattgtcgtgagactgtcaactgttttattttgcggggtagactcgcttacaaactgagctgctacctattgagttgacgacgtatagtgatctttgtatgttttagaaacatgattagggaagttggttacctaaatggttattcgagagtcttgcgacatagtagctacctactaattttaacatggtgtatcaacaacatctataattttaaaactacactaaattcacacttaaattcaaaacattattcaaaagaaaataactgggtaagaataactgggtagattgaacaactggctaattagaaggatatgatataaatctttgatgattactagacttagtcttgaaatctgaggagatttctttattttgagcaaaataatagttaaaatgcaaggattgttccttcaaaatttgacattttaactcatgttcttatgtatgtaaaaaatcggttaggattatggttctaaatatcatatccggtctttaaacattgaatgatatgacattgcatatattgcttctgaatttattctggcaataccttgaacaa

SEQ ID NO: 10979 - DNA, 651 bp, Diabrotica virgifera
  SmartBlast Evalue=2E-68; Info=Nuclear cap-binding protein subunit 2 n=4 Tax=Apocrita RepID=E2A3N2_9HYME
tatataagttatatgaaatattgtacaatcgataaatgatattcatttataatgaaaaacgtttttacacaacggaattaagctattcatatttcgtcatgtcccttagctttaacctaacttgaaaacaaatcttcaatgcttatctcaaaaaagctggggtctcaattccaatcttttgctggattattttaccataacctcctcttccagaatcataatcagtcctatattcatcacgtacctgtcctcctgtttttcctctaccatattgtctaccttctataaatcctgcatcccaatccgttcttacaatcctatcatctaaacgagtaccatttatataccttaaacagttttctgcatcagctctgttatagtattctacaaaacaaaacccacagggtgtcttcttatatttatccaaacccattacaactcttcttatgtctccacattttgaaaagagctcatagatctgttcttcagttgtataaaaagatagatttccaacgtataatgtggttgatagtcttaataatccgtcctgttcggctctagtacccttgaaatgttggtctctgtaagaactaagttctacggaaggtgaggttaccatcgacattgtttttagaaagtttataatttggc

SEQ ID NO: 10980 - DNA, 657 bp, Diabrotica virgifera
  SmartBlast Evalue=3E-43; Info=Mitochondrial ribosome recycling factor n=1 Tax=Aedes aegypti RepID=Q16WG4_AEDAE
cgatggattccctaattctggatttcttaaattttcatttaaaagtgtggttatacaaccggtttatggaataaaactaaaatgcttgtattcagaactttaaaaatgtttccattaatagttattaagccaatatgtcttcaaacaacaagtagaacacttagtaatttaccgaatatagcacataaaagtttactccaaacacacaacttttcccagcttcaaacaaccagaaattatgcaaaaggaaaggacaagaagaaagaaaaaggtaaaggaaaagtgtttatcaatgaaaaccaacttacagagatcctgaatgtagattccatgaaaaaacaaatggaaaaacctttggtccagttgaaggaagattttattaaacacttatcacttcgatcaacaacaggttccattgatatgatccctgtttcactcgaaggaaaagaacacacccttcaagaacttgctcaaattgtccgtaaaaaccccaaaaccatagtgatcaatatgtcaatgttcccacaagctattccagcagctctgaaggctttagagaagtccggaatgaatttaaatccacaacaggatggaactaccttgtatattcccattcccaaggtaacaaaggaacacagagaaggcttagccaagagt

SEQ ID NO: 10981 - DNA, 662 bp, Diabrotica virgifera
  SmartBlast Evalue=6E-45; Info="Major sperm protein, putative n= 1 Tax=Pediculus humanus corporis RepID=E0VZQ7_PEDHC"
ttcaaaaaatagggataatacgaattaaacagtcctattaggtattttatcacgtccatatccatattacttaggccacatccttccatatcaaaaaatatagaacagaaatctccttttgtagttctttctaatctttcaaaccaatagataatacattgtttgactatatttacatctatagcaccttttgtatgcttattacatttgaaaactaataatttgcaaccatctacgtcttctccatgtatggaaaaagctccggaacaaagtatttccttattaacggtatcttcattaatttcatttacgttttgctctttcctccatgatattgacgaccacatcatctcgcgggctttttcctgatttttctcttgatgtaaataaaacctccgtagccagtcatcatctgtttttaccctttgtaaatctttaggatgaatactatcagttccttttgaagagacttcatccaggaatgattttcttaaatcctcaatctctggttttgatacttcaatgtattccctaaccattttagatatccgtttatttctaatttaaatgtattctaattaacaattattattatcacacgtattcactcatttactgattattataaaaatgaactttgttttcaagcacttctactcttt

SEQ ID NO: 10982 - DNA, 652 bp, Diabrotica virgifera
  SmartBlast Evalue=4E-10; Info=High mobility group protein DSP1 n=9 Tax=Sophophora RepID=HMG2_DROME
ggcttcactttgcggggatgagggattttgtacaggtggcatttgttgctgcattccgtgtatgctattctgcaaattttgtagcgtgttatgcatattctccatggtagacgaaggataccaccattgcgctccttgtgcaggtgcagacaatgtggggtttccacctgtcatactataatcgtagccgcgaataccggcggcaccaatgggcgacgtagacgtcacgttagacacggtcgtagcgggattttgaaaattgtttcccattttatagttaaacgcttgtgcttgcgtattggattcatcgtctacttgctgtgtttgttgttgctgctgctgttgttgttggaaaaattgttgatgctgttgtaaattctgttgatcggcggccacagctcccggccaccacataccctcttcccgtccaccccaagaacggtggtcggacatgattgaactataggaggggctattcttaaagttgctcgcgcactatccctcacaaacaaaaaccatgaggatgcacaactaaaaacaacactacactaattcttattcgacatcgccgtgacaaaaaagagataacaactgaaacaactgacggagcgatcgaattttaaaaattattggtacatgtgcacgcgcaacc

SEQ ID NO: 10983 - DNA, 654 bp, Diabrotica virgifera
  misc_feature (559)..(559): n is a, c, g, or t
gtctgtctgtccatgaacacaactcatccgttattagaacaaatacaatgacaaataaggtatcaaatgagatcttataacccacagattgtattaaaggtgagaaatttgacctcagacttccggttccagagttgaaaccggaaatacagttttaaagtcgccgaaatagtacaagcgatatattattagacgcgccttagcaagacgagaacaaatatttacttccggttcatacatcacttccggttaaaaagttatgaccggaagtctggcaaaaattacaaaattagtgaaatcaatcgacgagcgacgcgagattaaacgaagagttgaaatattgacttctggttctacttccggtcacgttgggtgaaaacctaaagcttacgaagtccaactttgcttgtttctcttgttcataaacgatatttataaattatatttgttaatgctttatgttccatattactatatttttgccatgcaaatataagttattgaactttaatcaacgtaaaaaggaatttaaatatttaaaaattaaaaatttaattanaaagttgggtataatcattcatataaaatattatatttataatacaataatatgtctaaaacatatatcaaacaaatctacaagtatatcttgat

SEQ ID NO: 10984 - DNA, 657 bp, Diabrotica virgifera
  SmartBlast Evalue=2E-27; Info=Endonuclease-reverse transcriptase n=1 Tax=Bombyx mori RepID=D7F170_BOMMO
cgcctccattcgtttgtcacgctgtctctgcaagggccgtatatcatttgaaggattttacgttcccacaccagcaatttattaacttctctttttgttagcgtccatgtttcgcttccatacgcgactgctggtcgtattatggtcttatatatctggatttttgcacctcgtgaaacaagttttgacttcattagatgtttttacacattttaaacagctcgatcattgccttcagtaatgttgcacgattaattgaatcataagcctgtttgaagtctataaagatctgatgcatgtcctgattatattcccaatacttttcaagcatttgtcttattgtaaatatttgatcaatagtcgatctgccaggcctgaaaccacactggtagtactaatctttttaataatatcgaagccaatattttatacgtagtgttgattagtgagattcctctgtaattcatgcacgattcctttttttccttttttcctttcttgtgtatgggtacgataatactaccacaccattctttcggcattatttcttgttgccagaccttttctattaattgattgattttactaatgagttcatgaccgcctgttttaattaaagagtgtgatttaagcgcgacaaaatcaagcagaatcaat

SEQ ID NO: 10985 - DNA, 658 bp, Diabrotica virgifera
aaaaggtaatttttctatcctttacaattaacaatcagaagaaatattatttacaggtaataatacgcataaataataataataataataaaataaataataaattaaataatatttaaataaataataaataatatttaataaataaaataataataatgaacattttgtattttgacaacgacatccgacgtggaagtagaaaccttaataaaattattttttcaagtaaattgtggcttatttcctcattagaatagttaattacaaaaaagccacaaagaaatagatttttcacaaacaaataagtatttagtatttattatatttattgttttattatttactttaatgtcctactggtacattatttgacaaataatgacatttcgaagtctgttaagtatgatataacgcccttgggcattaaatttaaataacgacttagatactgtcaagttgacaaatatcaacctaagtaaaactatggttaccacaattatgttactactgttactggtaaatgtacttatttaaaaactaatcaattcaaaattcattcaaatttttcgcatataaagaataatttagtcagacattaaacgttgaaggcaccacaggtattataataataacgctttcggtcaacgtatatccc

SEQ ID NO: 10986 - DNA, 662 bp, Diabrotica virgifera
ctatctcgatcacattgtgtagatattcctcatatactgttttggagagttttcgattttctggtgttcactatttttatttaattttataagttcagtataggtatttttcttttatctctttcagtgtctttgttaacaatttcgtataaaggatcagaatcaaaattctgtaaatgacacacaaagagagcgctcagaagttctgatacaggcgaaaaatattccatgttaatctgtcagtctttacattaaattgcgcatcttcttgatctaatggcgctacataccaaattgagccttgcaatctaattattttcccctaaatcataagttccatgactttcatctataagttctgccctgggttaatcttatcttacagccttatatagatatgtggtagacacttaaaatatacaaatttcataaatataattttgtgcctctttctctatctttgtttaagttggttaaacttaacgggatataggtcaaatattattctctgattaaaataaatgttcttttttcaatgaaatcaaaagttacaagtatataatatgtatattttgccctaaggccactggtgaagtgctaatatattttagttttaacctgccctaattttatttgttaacacccacattgtaacatacaat

SEQ ID NO: 10987 - DNA, 661 bp, Diabrotica virgifera
  SmartBlast Evalue=4E-97; Info=Putative eukaryotic translation initiation factor 3 subunit n=2 Tax=Formicidae RepID=E2BKC5_ 9HYME
aaaagaaaaagatgaatctgaggaaggaaaaaataaagatgaggttatttttatacaggatgttggcttttctgtgaaaattattagtcctggagcagaaccgtttgacatacaggtttcaagtatggaactagttcaagaaatacatcagttactcatggacagagaagatacctgtcatcgcacctgcttctctctacaattggacggaaatacattggacaatttcgcagaattaaagaatattgaaggtttgaaagaagggtccattataaaagttgtagaagaaccgtacactatgcgtgaggcgagaatacatgtcagacatgtaagagatttactaaaatctttggatcctgctgatgcatacaatggagttgaatgcaattcgttaagtttcctaaatactattacccaaggtgatatcttagaaaagaaaaagatgcgtccagaaagtgtagattgtacgcctcccgactatataatgccagatagcaaagaaaggtctctaactgctctacaacctcagattaaagaacaaaaatcacctcagtgtatcaaagttttgacaacttcagcatggaacccaccacccggacatagaaaattcatggagacttgatgtatttgtacgttgtcactttagaggaaagcactatca

SEQ ID NO: 10988 - DNA, 656 bp, Diabrotica virgifera
  SmartBlast Evalue=1E-21; Info=Mitochondrial ribosomal protein L53 n=7 Tax=melanogaster group RepID=A1Z9J6_DROME
atacataacctatctaacagaacttatatatcaacttcttttaaggtaacaaacctagaaataataaacacgattacaatagtactaatcacaatggttatggcaaatatataaaatgtatcttcagtaaaaatatctgtaaaagcgggaatattatcataaacgtgttcgataagtttgagatggaagtccttctttttattgcccatttcacctcttgcccttccttttagcctctaattttgttgtaataggtgatgaaactggctctactggaactttggagctgatgtgtttattgaactgctgcagtatttctaagactgtcaagttgttggctaaaaacttcactgtgcctgcatctcccaagtcaatctttatctctggttcactcctgtcacatacaacatttggttttatcacacaattaagtttgtttctattacttttggtgttgatatatggaaaaggaaatctcgagcggttacggcattggcatggaatggatcaaattgaacctgaatctttttaacaggttttaggttaactaattttagttgtttatttatggcacttattatcccggctgacctagtaaaaccaccgctaaaatagatagacatttttaaactcctttctaattatgaaaatgaaaa

SEQ ID NO: 10989 - DNA, 658 bp, Diabrotica virgifera
taagaatagaacgatagaagcgcgacgatgccatgccgtactcgatagaatgaatcgtatatcggcagtcgagtagccacccatgcccgagaggtttggcaacactgatcttcataagcgcagtgttctattcttaacgcggaacgctgtatataccaagtgaatttaatatttgctccctaaagataaatggttcggtatcatttttatttttgtgatagtgacactcctattgtcttgaatattgttgccacattcgtgttattgaattgttgctgtaattaattaaactgtttttattgtcatttgctttattgtcttcaatcagttgccagattgttcatccatgttatttttatttcttcaatatcaactattggattttcttgagtgtgtgtacgtttacatttaaatatctcgatttcttcagactgttcttcaagaattctgtttttagcttttctgacagcttttcttatctctctgtctaggcgctgatataatcgcctttattattagtttatttagttgtcttcctatattaataaagtgattgatgctgtaatgtgagccaacataccaaactgtacgtttcgtgacgtagttgatctcagatgatacttgtataactggttgcgtaacatatacttgcatatta

SEQ ID NO: 10990 - DNA, 656 bp, Diabrotica virgifera
tacagcatgttgagtatccctaccttcgactcactttgcagcagattcgctcgcttgagtgtagtgagaaacgttcaacagctgttccccttctcttttgtaaattactccgcgattcaaaaacatattccgtgtgcatcactttacgatttgacatacaaagaagaaaatgaaattaaacgttgtcaaaactgtaaacgcgtttttctcgaaactgcttttttaaatgcggtggatattgtaactcaaaaactacttgactgatcaacctgaaattttgcatagattttctttagacatttttttataaaaaatttcgttattttgacttcggagtgataccaaaaagtcaaaaatcgttaaaaactaaaaaactttagcgttaacctaaaaaagcgttacctcgaaaaaactcataatagctaataaaatcttttttgatttttttgtttcgcatgatctaatgacaagttctgatgcccaccgtaaaatccatttttttagttgtttgtaaaaatttgccaccgttggcttatttttcaatattttgccttgcaatttttttaatattctttgaagattaatttgttaatagagtctttttcatgtgcattcttcagtgagtcacaaatgatagaaaaagaagtccgtgataa

SEQ ID NO: 10991 - DNA, 660 bp, Diabrotica virgifera
ttaagtcggaatccgaaagtgagatgagaccttcattcggtttgggatttagttcctctgcaagctctaaacctaagaaagaatcttcgaaaatgtctttcgtatcatatatttctgaaacacctgttaaaaggtcagctgaagaacacgaagaggtggtactgtctcctaaaaagaagtccaaaaagaataaacagaaaaatgaagaaagtacagtagttggcatttcaaatcctagttttaatcccatgggcacaccagttaaggttgaaagacattctttaaatcccattgaagaagtctcaactgaaattgaggatagtttaaagaaaaaaagtaaaaggaagataatttagaatgctccttagataatttagaggacagctcaagaaaaaagaagaaaaagaaaaagaatacctcgatagacactagtgaaggtgctagtgaagtcgtaacaaagaaatctaagaaggttgaacaaaatttggaaggtattgcaaatccagcctttgctcccatgggcacacctgtgaaaatacaaaggcattctttggatgtaattgaagaaagtatcacagaaatagatgacagtatgaataattccaatagcaaaaagaaaaataatttatctactaacatagaacaattaaatgatgaatc

SEQ ID NO: 10992 - DNA, 661 bp, Diabrotica virgifera
  SmartBlast Evalue=7E-25; Info="Glutamic acid-rich protein, putative n=1 Tax=Pediculus humanus corporis RepID=E0W4E7_PEDHC"
ctttctgcttcggaaagagtctccaaataagcagcaaagtcttgattatatttttcgatggttttattgaaaagatctttatagtgattcttctcttcatctgtgcactctttccattggttagagacaaaaaccaacctatcctttactggaacgtctttgatgtcatcagaatgaagcatcattcttgaaaaaacgttgtatgctgaaactggtggttttgcaggtctacctgacattcgttctttaacttgaagttcctcttttgtcagttgggattttggtgcattagtaacatattcaggatgattcttgacatactgtcgcacttcttcttcatattttgctgtttcagcttcggcgtatgtaatccattccatttttctgtcatctggcatctccttccacctttctctacaaatatctctataagcaattttatcttccatttcatttttagccatttcagcaatttggtaatactgaaaagcagaaagtgttcgttttggtgctttttctttaggaactttaggtggcttcggaggaggtttttctttcactggttttggaggttttgggggttttcttggttttgaggttgtcgaagatttcttgggtaaggtgtttctttaagagggatttggagttggaatctttaatc

SEQ ID NO: 10993 - DNA, 658 bp, Diabrotica virgifera
  SmartBlast Evalue=1E-71; Info=ADP-ribosylation factor-like protein 5B n=3 Tax=Aculeata RepID=E2AVF5_9HYME
gttgttgcttgatggaggtcaaatctaattctttcgaaatctccgacgccgacattgaacctttaacgtcctgtttattggcatagactaaaacacctgcttttgataattcttcattagctaacattttgtacaattcttctcttatcaccgacaaccgttctttgtctgttgaatcgactactactataacgaactcagtatttgtataataagtactccaagctgcccttaaagattgctgtcctcccaaatcccacataatgaagtgtatgtttctccataccacttcctcgacattagaacctatcgtagggctagtgtgaacgacttcattcattagaaactgatataatattgtagttttgccagcattatctaaaccaacaattactatcttgtgttcttcgttgccgaaaagactccacaatttcgcaaataacaatcccattgtttaacaaagatgccctactacctagaaatacgtttatttgttggaaaagcgagttcagtatataaaaattatcacaacactattcacactatctttgaactgagtcatttgtaacatattcaacaaaaaatatcacaaatatcaccagcgttcacttttaattaattaattagatcattttgtaactgtctcattcgtcataag

SEQ ID NO: 10994 - DNA, 654 bp, Diabrotica virgifera
  SmartBlast Evalue=1E-39; Info=Pol protein (Fragment) n=1 Tax= Drosophila melanogaster RepID=Q18LA8_DROME
agctattttccactgcacacaccattcttgtagtccatcaagagctctttgtagatgtcttgttgcaaaatctgggagggtactgctaaaagctatcgctgtatcatctgcgtatagacttagcaacgatctgggttcagttgggtgtctgccgtatatatggtatatagatatggcgacaacactgccccctgtggcacaccagcctccatggtcccaacttcggacagggttggccctatccgaactctgaacctcctgttggctaggtatgacgagagaagacacgtcatcgcctcactataaccatattggttcattttatacagcaggccgtcgtgccagaccctgtcaaatgctttactgacgtctagaaaggcggccgctgtatatttcttttcgttgaaccctttcgtgatatattctgttaacctcagcacttgaagttcacacgagtgctcggatctgaatccgaactgtgcttcaggtattgttccgattgcttcagattcttcttttagtgtaactaatatgacccgctctgcgattttgcttaatgctgataatagcttatcggtcgataattctgtggaaatgtacctattttttcctggtttttcaatcatgattacgtgagcctctttccatctgtca

SEQ ID NO: 10995 - DNA, 661 bp, Diabrotica virgifera
ggacttggtgtagatgtaactaagggttctgctacttttggagtaggtactctgggtagttctacgagttttggagtaggctgtatcacaaacgacggacaagagacctctggaggcatggtcactgcagttatagaacttgttaccgggcttgggcttgacgatgttggctttggacttggtgctgctggtggcgtaggtttcggacttggggaattctttaaacgaggactaagggcgctgggtgaaaatggattaggacttggacaatttgttgatgatttgggacttggtaaggttggtgttggtattgtaaaagtatcttttggaattgttattggctgtaaaggtggatgtgaaggtactactgctggttgagcaatgctcgctggtaccacaggaggtaaaggttggttagtttctcttgctgtggaattatcttgattatgagatgatgtgggaatattaaaggtgggatgtggtggattactcatataattgaaattatgtgggttgatctgtctcgtaggaacaagtagtccctgtggctgtaaatgcctaatatttcctggaattaccattcttggcggatttggtccaaagttaccaaactgtggtgattgtaaagtagaggattggtataccattctagcgcgttctt

SEQ ID NO: 10996 - DNA, 654 bp, Diabrotica virgifera
  SmartBlast Evalue=3E-21; Info=Endonuclease-reverse transcriptase n=1 Tax=Bombyx mori RepID=D7F178_BOMMO
agcagatattcaaagtgggtttaggatagcacatagcgtccaggaccatatcttcactctacagcagatcatcgaaaaagccatactaaaagatgaaacggtatatttgggattcctagatatgaaaaaagcttttgacatggtgaaaagagagggaatatggcaaagcttgacaaataaggaagtggatatggaactgataacaacaatccagagtttgtattgcaataccataaatcaggtaagaacaggcaatcttatttctagcaaatttacgaataacgacggagtcagacaaggaggggtattgagccccctactgtttatctgtgtaatagacgaagtaattaaaaagtgctggcctaaaacaaaaaatataccataggatacagaaacctacaacaaataaaaatcgaagcctgtgtatttgcggatgatattgttattgtggcaagaacagaaagagctccggaggagaacataagaatctgggaggcagaattaaaaaattacaatctaataattaatatggaaaaaacaaaagtaatggcaatatcgaagaaagatgttaacctaaatattgaaatccaaggcaaaacaatagaacaggtagatctatttaaataccttagaataattttaataagaagggga

SEQ ID NO: 10997 - DNA, 658 bp, Diabrotica virgifera
  SmartBlast Evalue=2E-95; Info="Transcription initiation factor TFIID subunit, putative n=1 Tax=Pediculus humanus corporis RepID=E0VZR5_PEDHC"
ccgaagacgacgacgaagaaatgcaactgaagatggacgacgaagtcaaagtggcaccttggaatacgacaagggcttacatccaagccatgaagggcaaatgtttgctccagttgactggtcccgctgatcctacaggatgtggagaaggtttcagctacgtgcgagtccccaacaaacctactcaaagcaaggaagaacaggagtcgcagcccaagaggaccgttactggtacagatgctgatttgaggagattatctttgaataatgctaaagctttgttgaggaagtttggagttcctgaagaagaaatcaaaaaattatctagatgggaagtaattgatgtagtcagaacactgtctacagaaaaagccaaggctggtgaagaaggcatggataaattttctagaggaaacaggttttccatagcagagcaccaggaaaggtacaaagaggagtgccagaggatatttgacttacaaaatcgcgtcttgtccagtgctgaggtactcagtaccgatgaaggggagagttccgaagaggaaagtgacgaagatatagaagaaatgggaaagaacatcgagaacatgttggcgaataagaagaccagttcacagttgtccctcgagagagaagaacaagaaagacaagagttgag

SEQ ID NO: 10998 - DNA, 658 bp, Diabrotica virgifera
  SmartBlast Evalue=1E-107; Info=Pre-mRNA-splicing factor SYF1 n= 2 Tax=Aculeata RepID=E2BK31_9HYME
gtcgaaaagtagcatatcatgatgacactgaaacagttcaaagtcgactatataagtctctcaaagtttggtccatgtacgcagatttagaagaaagtttcggcacctttaaatcctgtaaagctatttacgacaaaataatagatttgaaaattgcaacacctcaaattattataaactatgggatatttctagaagaaaataattattttgaagaggcattcagagcgtatgaaaaaggaatatctctatttaaatggcccaatgtatacgacatatggaacacctatttgacgaaattcctgactcgttatgggggatcaaaactagaacgtgccagagatctgttcgaacaatgcttggatggatgcccacaacagtttgccaaacatctttacctgctctacgcgaaactagaagaagaacatggaatggctagacacgctatggctgtatatgaaagatcaaccaaagctgttccagagcaagaaatgttcgacgtttttaatatatatatcaaacgagccgccgaaatctatgggattcccaaaacgaggcagatctacgaaaaggctatcgaggtacttccagaggacaaaactagagaaatgtgtcttagattttctgatatggaaacaaaactgggtgaaattgatag

SEQ ID NO: 10999 - DNA, 661 bp, Diabrotica virgifera
gttcgaacaaccggcccttaatctaaaccgaatgtttcttggtttgcttaaaaacattatatttgtattatattatgtacctaaaaaatagcaaaattgaaatatcttaataaaataattgaaacaatattatagtgtttcattaacacgtgttataaatattatttccatcaagtatagctctacacgagcttggtttttatcaagtaattgtaaattcaatatttagatgtttagcaatgataaattatttaaatacatctgataatttaaaaccaaagagattttccatatgtttagttcaagtctaaaagattatacctttatttagttacgaattcaccggtagttaccgaaaaataacctgagggccagagttaccaattggcctgtaattaggatgggggattaaaatagttacgaattcaccgggacccttagaaacctggatttcagaagataattatcaaacaacagaaataagggccaggatagaaatagcaagaaaagcgtttgtaataatgaaaacaattatctgcaacaaagaccttagattagaactgaaagtaagatttttgagatgttatgtgatttcgatactgcaatgtggacttgaaagctagacactgaagcaagaacacataaataagctacagtgatt

SEQ ID NO: 11000 - DNA, 635 bp, Diabrotica virgifera
ttttgtgctctctaaaagttggatattggtgtgtaagaagttttatgttcattcctaataaaggttctgagaggaattcttgaaaaataattatttttggtcttctaaagtctaaagtgtactagtatcttaatacctatacaaaaaccaaattgctcccttacttataataattcatatctatatttgagcaatactgaaaaattcattctttaaagttgtcttcactcttaaaaactacagaaaagttatagtttcgattagtttgatattcactttagaatataagacaaaactgtatacaatattttgagattctaacccctaataagtgttcttagtcacacaatgggtgccttcggacgaccacagcagctggaaagctgagtaagcattagcattcagacaacaccgctggaagtcagccgctgagagatttactaagagtttcccattagcgctggatacaatcactaagccatttggtgctgacactcagctgctgtggacatctgaacacaccctatcaacattacatttgatgatctacctctatttttacttatttttgaattttatcatcgtttatatacttaattgatactaactataacactcaaatattagaaaaatat

SEQ ID NO: 11001 - DNA, 659 bp, Diabrotica virgifera
tgatatgaataagttgaattttaccgagcatgtcaaaagtttgccacttcaaccccctttctctcgaggggggtggcaaaaacatcgatttatcaagaatctgtacgcagtaaaaaaatgactcagacagaactaacgctcgaagtgaccggcgatatcaattttttcaataaaattttatgaaatcgacggtaaaaattcgatatcttctgatcagagtgtcctatcgacaaaaatcaaaatttttgtatatttgtttgggtcccaaaattgacattttcagcaaaattcaacttgttcgtatgatttttagagattcagtggaattttcgtctctgacgactctggtattgagtcaacagaagaggatccatagacacggtgttcaagagaaaatagttcgaagagaaaagcaaaagaagcttctttgacgcatgcgtagaaaagtgtcgcatagccgattttaattttgacgtatttttgatctacaatactgcaagcttaaagccaaaaaaaagaatgtgtgtgtactttgtacgcacgtaagaagttatacgattatatgatttcaacgaaagcaatatactttaaaaagtttatttatattttatttaaatattaaactaattttaatactcactactttccaaaacttttta

SEQ ID NO: 11002 - DNA, 660 bp, Diabrotica virgifera
  SmartBlast Evalue=3E-46; Info=CpG-binding protein n=2 Tax= Formicidae RepID=E2AND0_9HYME
gccaaaatagaaatagaaaatctaaaaaaacatatttttaacatttaagaaagtgagaaagttaaaagttaatattttcattcttttacttgttatttatatacacttttagtttaggtttaacaaacatatattgtatatcctgctgtatattccaaaatgtccagaaagagggatatatctagggaagaaatagccaaacaatttcttttgccagaaaggcagtccaaaattgacaccctgttaaaacaagatggtcaagcctattgtatttgtagatcatccgattcatctcggtttatgatagcttgtgatgcctgtgaagaatggtatcatggggattgtgttaaaatatcggagaaggaagcaaaacttataaaacagtatatctgtgttcgctgtaaggaggaagatccgtctttgacgactagatggaaaaccaagaaagaacatgatgaaactttttctttgtctcttggacaagaagaacgaaaatccagaaaaagaaaagaaaggggcgagaataagaatgataaaaaaattaagaaatgtggtgaatgcatgggctgctacagaacagaagattgtggtagatgcgatgtgtgcaccagaaagaatagacatagttcatctaaaaatagagaaaggtgtaagcaaagg

SEQ ID NO: 11003 - DNA, 660 bp, Diabrotica virgifera
  SmartBlast Evalue=1E-82; Info=Metastasis-associated protein 3 n= 1 Tax=Culex quinquefasciatus RepID=B0WF44_CULQU
aatccaacgccctagcgaacgtacccacggacctagacactaccaaaaactgatctatctgtctatcactgaggttatgatccggcgtccaaataagagtctctagctcgctaagattacgatcgtcctcttccgtctctttgaacatcggaggaacatcgcactggtacctggaacccaccctgatttcacctttgtcggctaagagggttttttgcgtgggatcgaacacaaggcagtagaagaacatgtcgtctttgttgaggtaagacgccagagcttcggtttcgttgaatagcgtgacagaacacttgccgcggatgtgcgtcgcaggtaaggtttccacttgtcgagacaggaagagctctcgatgtttcatctggtgtcgctgcttcggactgagcaactcgctggcgcggccacccatctcgggaatgggactttctccagactcgtctaaggcacattggtgtttgtctgctaactgaatcagctggctaggcaaatctcttcgtctataaaaacacatcactttggcttctacatttcccgaggcagttttatttaattcctctatacgccggatctgataaggggatgtagaagacgcctcgaaatacacataatctccaacacgatacatattcgcagccattttca

SEQ ID NO: 11004 - DNA, 654 bp, Diabrotica virgifera
  SmartBlast Evalue=6E-11; Info=Lactosylceramide 4-alpha- galactosyltransferase n=1 Tax=Harpegnathos saltator RepID= E2B6F6_9HYME
aagtagtgaacgtaaccgcacgaaagaaagttctaattattacgataaatttttggaattacttttcagaatatctacgaaatgtattttaaatattctgaaatcattggttaagttaatagttttgtaccaaataattaaagatcttcagaaaaattaatgtggggtattactcattatgcttctctacagacatggccgtctgttattatgcacgtttgtagcaatactgcttgtaacagctagcatgatgctaattagttttaactataccaacagttatctaattaaaaatttgagtccatatgtacgctaaattcgttggtaaaacagcagaactcgtagaaactactattaaaacgacaagttcaactaccattaaaactacaacttcagcttctccagagaatcatattcattgttatcgagaaaacgtagaatctctacctgatatctcagactttaatccaagaccaggaaaatctatattcttccatgaaacatcgtgccactcatttgaccacggcaaaatagtcattaattcacgacaagcctgtgctgtggaaagtgcagccaagatgaatccagatcttgatgtatatttactgtatgcttcgccagggatatttagatttgaaggagatgaatcagatc

SEQ ID NO: 11005 - DNA, 660 bp, Diabrotica virgifera
  SmartBlast Evalue=2E-95; Info=Probable phosphorylase b kinase regulatory subunit beta n=1 Tax=Camponotus floridanus RepID= E2AVZ9_9HYME
gcgctcttctaactgttgaatttgggatagctctttctgagtcgatgttttctttgcatacatagtagtatttggggattacaggatctccatgatggtcgagcataatcctttctttcaataaatcttgatactcttgtatttggtcgggaagagttttaaatactccatctattatcatgaaaatataaaataatggccattcacattctatattttcaaagttctttatttctcctttttcataatacctattattagggttttcaacttcagtcctaaaaccatctctaatatatcttttaaatccgtattgtccttttaaacttttaacaacattcttcttggtttcttgatacaacatttcttcgtgagttgaaaaggctggaaaagatatggtcggaagaagagaagcatccacatcttttgagcatgactctcttggtaacaatgtctcaaaaatgcttctgtttctattatgagcatcaatatcaacgtaaacgacactccaagaagctcccttttccccaaataaattacaaccatttatagcttccagagctgatttggctagaccaatggaactggcatgaatctctggagttccatcattgtacttgcttcctctttcccacataccaaaatcaggtgttctgtaag

SEQ ID NO: 11006 - DNA, 660 bp, Diabrotica virgifera
  SmartBlast Evalue=8E-66; Info="Sorting nexin-2, putative n=1 Tax=Pediculus humanus corporis RepID=E0VQT9_PEDHC"
catgctgctattctttacaaatatcctccagtcaggcaatcgctttggcttctggtaaaaatgcctcccagtatttaacaagctgggcttggtgttccatatgattctctaaatacttgataaacatagttttaaattcttggactctgcacttctcaaacctttccatttctttctttatcatctgagatattctatcgaagttttcttgtccccgttcgactttggactcccactcgacaagttctgcattggtttgttccgctttatcatttcctcctgcaattttcacctttgctttgttttctctctttttggccaacatttgctgagcgtgctgccaatgttggaacaacttagttctctcgtggaaggcatcccttactgcacccaacaaacccaaataatctttgagtaattcgcaaaatataaagaaatccgtattggcttgttctatgtgaagggcttcaaccttctcttctgtatcagccagctgagacagagctctagaaagagaattatgatcttcacaagcactcaacatagcagcagatctggaaacaccattagttagattggctaattcttttctgtaagacaccattgcttcaacgctagcatgaagttttctcaactgcatttcaagcgcttctacatgat

SEQ ID NO: 11007 - DNA, 654 bp, Diabrotica virgifera
aatacattttcttccattatggcaaataattcaataaaagtatagccgttatagcatacaactgccgttttataggttacgtttgccaaatgtcaattaacgttaatctgagtgtgtattttctgaagggtttcaaaaactattttaagcaaacacgttatcccttatttatcactcagtgcgcatgacaagtataacgttttacgtttagcgtacgtcaaaaagtagagggtctaaaatctctctactgtctctgcgaatacacttattaattgcctccaggcgcggcggtgacataaatgacataaaagtcttgaaatgccctatcataaacataaaatgttgacattgttgatagtctatagaacaggaattgaagtttatcgttgtcttgtgttaaagttgtaaaagttatagagtattgtaatatgtattgttagtctttgaataaagttattttaaagcagtaacaattaacaataatattaattaaggtatttttgtatggaaaacaattattttgaatagttccatgagaatcacatgccatgatcagacatgaaagtcacaggtgataacgggccagattcattgacatattaagcgtagacaaggcatactcgccaaaaaagtcgtaacgcgaaaacagcatgg

SEQ ID NO: 11008 - DNA, 657 bp, Diabrotica virgifera
  SmartBlast Evalue=4E-18; Info=Nuclear protein Hcc-1 n=1 Tax= Camponotus floridanus RepID=E2AAE0_9HYME
ggccgatgaaacttctgcaactgaaactatccccgaaccaccaaaaaaggttgtgttaaagagaataagtagttcagaattagacacagaagaagaaaaatctgaaccggaaaaagttgatgccgaagttaaaccggaagaagataaacacgaagacaagaaagttattaaactttcagaattgacaactaaagagaggttagaaatgagagcaaagaaatttggagtaattgtcaatagtccagatgccaagaaagcagctagagcagagaggtttggtacatctaatgcatcagctgatagtattacatcatctcaagtgaatacgaaattagatgttctaaaacaaagagcagcaagatttggagtttctgtatcgtctgcgatgtcaaatttagaaaataaggaaaaattggaaaaaaggaaacaacggtttggttctgacacagaaggaaatcttccaatggtgtgtccgaaagtgataaagcgaaacttcgtttagaacggtttaaagaaccagtgaaataaattttgttatattggtgtataataaattaggtttaggtaacaattattgaagaattcactagtatttacaaattaatgtattatataattaattaatgttctgaaatctaaaatgaatatactgcgagg

SEQ ID NO: 11009 - DNA, 657 bp, Diabrotica virgifera
aacacttcatcatttttccaaattttaatattttttaaaaatactagttgatggtataggaaaaaacttacatttcaataatcactttgacattttatgtttatggatctctgttagtcccaaccactgcagcagtggagctatgttttctttttcgcggtgttagaggatggcgcataaatcgtttaattttcaatatctttttatgaaaatttttctaaaggtacttctttttataataaatcctaatttacattttcaaatcaattggtacagtactttttattttggaaattcccaaaaaattatatgaatttcgtacttttacactaggatagccccttaatcgataatttagctggtactaatgaaaagaaagacatcagttagttgtaagtcataatttttataccagtgatattttgtttatccttcaaactacttaccattgaaagaagtattttttattaataattataaccttgttatagttatgtaaattatgataacctgttaataaagtaatcgtcacattggtttctgtttaatgtctcaaaaataaaatatatcatatttttgaagtaaatttattggtttatatagttttgtatattattaaaagcttcatatttttcagatttctatgtataaatatta

SEQ ID NO: 11010 - DNA, 659 bp, Diabrotica virgifera
  SmartBlast Evalue=5E-32; Info=Probable phosphoenolpyruvate synthase n=1 Tax=Camponotus floridanus RepID=E2AW36_9HYME
ttaaaatatcacctaattttagttggtctatttcttcaaaactggtaataacacatgctctagcttcaacaactccgctatatacgggagtacccttaaacttttctgttaaactatctgaaggagcatctatgttattcttttttatcataggaccaccttccattacctctggaaattcaagtttcacccaccttgggtaaagcttttttctcctcactgccttagttattaatacaggatttctattgcgtattaaggaacctatctcttcatgagtgagatggtagattaagtccttggaaggtatcaatccttcacaaaccatcctctttcctaagtgtctatatgcctgtcttattttatcataaccacgtatcatttctgatttggtttgttccctacatgcaaccgctattctaatctttttataattaatttaataacacttctggtaatattactcgtaattgatttcaaattgtttactatatcctctatactttccgattctttgttttgagtcctcagattttttgtattagcttgaatcatcgaaattattaatgatgggttttctctccaacttggttcattcatctcgaactcataaagacatctgtgtccatgtctatccataaactcacaaaatacgtcat

SEQ ID NO: 11011 - DNA, 659 bp, Diabrotica virgifera
  SmartBlast Evalue=6E-26; Info="CG4210, isoform A n=6 Tax= melanogaster subgroup RepID=Q8MRT7_DROME"
gtgagtgacagcgattattaaatttgttgcttcaatagagcaaatataagaatatgtacaatttatgaactacaatagttattcatactttaattcgatcgtttaataatagagtgcaagccattgatagtttaacaatgtctgaaagtaatacagtgaccatccgcagggctgaattagatgatatgccgcaagtatttcaaatgataaagggactctcggactttgaagaaatgggtaacaaggtaaaagtagatgttgaaatcttgaaaagagatttagcagaaaaatctcctgcttttcaatgtatcgtagcagagctacctggtggtaaattaataggatatgctgtgtattctcagatttactcagtttgggacggcaaaactatatacttagaagatttgtacgttagtccagattacaggggttttaaaagtggtaagaatctctttctgactgtcatgaaaaatgcttatcaagatggctgcaggcgcgctttctttcacgttctgacatggaacccagccgtaaaattctaccacgaactaggagccgttaatgttacccaaagggacaactaccaaatactgagaatggaacaagaagcctttcagaaactgttttcctaatacacttgttataatttaataaatggt

SEQ ID NO: 11012 - DNA, 657 bp, Diabrotica virgifera
ttttgaaacattctgtaccttttgaatcgaacatttttaaacgctaatgttaattgctgacttcaatcaacaattattcgtaaatttaatgtacttaaataaaatctatattgatagttcaaatatatactgatatacaatgctttcaatggctctaatatatccatattttttttaatgagcgcaccagtggcacatctgttcccgatatacgagggatgatcaaacagttccctgactaatgcttcaaaactttattgaaaaatataaatgtcactttattctcttcgcagtctttcagtatgcaacttatatacttcgcccaacgtctttgtcacttttgtgaattattgcttagtttttccagctatttttctttaatgtattcgatcgaatcaaacctctaccatttaaaacatattttgagtttggtaaataagaaaaatccgatggggttagatctggtgagcaagggggctgagagatgagtttcctcgttttttttttttgtacagaatttgtaaatgagcaacgttggatgttaaaacagtccctagttggtcatctctctagtgtttatctctgtacaaccttaaacaaatttctcaatgttttaatataacattctgtaaaacgcaaaattctaataaaaaggtg

SEQ ID NO: 11013 - DNA, 657 bp, Diabrotica virgifera
gcgggatccaagcctattatagtttctagttatgatctgatgtcagatggcaagtattactatggattctttacatattaaaaagagtgtagttaagctatagttatagcctgcctgcctagttgcaattggttgacacgtttgataaaatgtcactattgacttcgtacataaagatttattgaaaattgtcagaaagagacgataattttatagtcaaaatatgcgaagaaaaatttataacagtgaaaacagacagttggtaaccagacaagtggcaacggacagttagtaacggtaacacttcgtaatggcgacagttcgtaactatacatatccgtaacgccaattttagcaaactaaatttatacaaaaaaacgcattttacaaactttcctataccaaaagtaatagtacattttttaagaccacttctttataaaaatatttcacacaatttatgcatatttatttaatattttcgtaaatattacaacaaaagatttttttaatttttcgtcttgaattatcacttctgaaattatctgaaaaataaatatcgatcgaataaagagagtttaataataacgtatttattataatgattaatacaatatacattactatattataccgggtgtccacttatattttcac

SEQ ID NO: 11014 - DNA, 657 bp, Diabrotica virgifera
  SmartBlast Evalue=2E-13; Info=CDK5 regulatory subunit- associated protein 1 n=1 Tax=Harpegnathos saltator RepID=E2BU72_ 9HYME
cagtttctttcaaaaatgctaaaatatgaagatttatagtttacatattaaaaaacaacagcaaatgaattaaaacatattacagagcgtaatttgatctacgcttaagaactaacattatagaaatactgaggccgttgacaataacgtaatactgtgactttgtgtttgcatgtttgatttgccgatttggaattgtttttgtgctttatttttgcaaagatataccgtaaaagtgccaatagacttccggaatagttagcatgctcaatttataacagccataccgtagttgcttttgtattaatttgaagaatatggatccaggtcttccaccgcagacattcgtggccccgccgggtatagggactcctccgttgctgccacaagttccgattcctgcgcctatagcagggctctcgccgttttctccgatgattccttcgtttactgtgcctcctcctgggtttaacaacttcgggcctcctggagttcctggaattgtgccttcgaatatagggccaattacaccagggagcgagtggactgaacataaggctccggatgggaggacctactattataactctgttacgaaacagagttcgtggcagaaaccagatcaattaaaaactcctgctgagttgctgctgtccc

SEQ ID NO: 11015 - DNA, 662 bp, Diabrotica virgifera
aatagatgttaagaaacaatatttatttttttctaaaaaatacttcctgagtgggagtattggtttttcgaataataaattaacctttgttataaattagtaacaaccactagcttaatgaagtcctagtagtaatactaattcaactcttcattattaaacaaaatatgtacctataaagtgattcatttgacaaaaacgctatataaattacttaaattaatgtttttgtttgtacaattattataattttgttaattttgcagttctttaaaagtttttgcatgctggactagagctgtcgttcgtgaagagtactataaggaagtactttaccgacaacatctgactagtaattccttattgcacagtatttagttttatggctgttcatgtgttcaataatacctcagtattttaaatatcagttccgctggaaatactttctagaattacatccatttaagttcttttggtttagtctaacaagttatctaatggattcatatttagttcagcgggatgctattgttggaggtgtgaaattgtataaacaaggaatcatttcataaaacaggtagattccttgtttatggaatttcacacagcgaacaatatagcaccccgctcagctaaataataatcagtctcttgcttgttag

SEQ ID NO: 11016 - DNA, 655 bp, Diabrotica virgifera
gaaatacacttttcttacagggctgtgttaatatacagtgccagggaatatttataaaagttattgtaatctagtgaaacttgctcgtttcctacatatgaacatgaaaatatgatatgtatgtaatatgtatatacagcgtgtcccaaaagtagcggaacggtcaaatatttcgcgaactaaacatcggagcaaaaaaactgaaaaaacatgttttcaataatttttaaacatctatccaatgacaccaaacgcaatcccccactccaccccctggaggtggggtgggggtaactttaaaatcttagatagaaaccgccagtttttattgcatattttgattccttatgtaaaagtaagcaacttttatttgagacattttttagaattgtggatagatggcgctataatcggacaaaacaatttattgtagtaccataggtaaattatagaaacgctctaatatctcgaggaatgcgctttcaaatgaaaaaccaaaaaatatattgttaaataatttttatggggagaatttgaaaaataattttatgtcaaagaccacgagactgtcagttttcatgaccctgtatatggtcaaattttgtaaataaaataatttagcagtaagaagtgtttcgcagaagagtaaaatttt

SEQ ID NO: 11017 - DNA, 658 bp, Diabrotica virgifera
  SmartBlast Evalue=6E-35; Info=Guanine nucleotide exchange factor for Rab3A n=1 Tax=Camponotus floridanus RepID=E2AH85_ 9HYME
gctgtagaatctggtaccattctcatcgaggccgtgggcgacaaaaccaaagccatgtttccgaaaaaatgtgccttgctggaagtcccaaggttatgtttttatcgaatgagtattggagaaaccgacgactggtagaacatatcgcaaatttgtcggaataggataattgcagtctgtgattttttaaactacctcaagtacatcgaaggaggcttggtcaaaagttccgctcacgacgtctactgggaaatcgtaaggttacgtaaaaatatgtgcctcgcaagactgggattggttctctcatcgtgaaacacttaggaatactcacaaaacgtgccaaaatgattttttatgtataaactgttatggatctgttgatgttaaaccaaagattatgtttttagttcatacaaagcggttgttatctacataaagtgcagaataagataaaaacgaggggaaatgttcaaagaatgtcacgaactggcccaaaaattatataaatacacgaaacagcaattttcaataaaaaaaataaggacaatcaatctaaaattaacaaattgttctaagtaaactcaaaagtagcagtttttttaccaaaacagtttgagctggtcttcgactgtattttataaaaatatctctactttat

SEQ ID NO: 11018 - DNA, 658 bp, Diabrotica virgifera
  SmartBlast Evalue=2E-48; Info=Endonuclease-reverse transcriptase n=1 Tax=Bombyx mori RepID=D5LB38_BOMMO
tatttcaacgatgtagagacgtaaattgcgatatttatgcatgtttcattgattaccataaagcgttcgatacagtaaagcacgacaagctgatggagatattaaccaatattggaattaacacctgtgatttaaggattatcagcaatctgtactggaatcaaacatcctctatccggacagaggcaggagaatccgacgatatcaaaatcaaacgtggggtccgtcagggatgtatactatccccactgctatttagcatctactctgaggaaattgtttcaagaagcagtgtatgatgttgaagccggaattcgaattaacggagaatgtatcaataacataagatacgcagacgacactgtggtattcgctgacagttctgaagccctacaggagttaatgaacagaatcgcagaagtcagtcagagatacggactttcactaaacactaagaaaacaaaatgtatgattatctctaagaataaacagcaatttggacgaatcagtgtgaatagtcaacaaatagaaagagtaaaaacatatacctaccgtgatacgaacgccaatgaaaattgggatcattctatagaaatcaaatgtaggatggagaaagcaagatctgcatttcaaaaatgcaaagttgttcaaatgtcat

SEQ ID NO: 11019 - DNA, 659 bp, Diabrotica virgifera
gttttattacataaaaatataataaattaattataaacaaacactacttccctatggatcaacactaacgaagtctaatatcttagaaaataatacactactacactgaacatatatcgatacagataacagaacagataagagaatcgtgctattacacttagaaagctgatgcaggtttgtcaaactaacagtgactagttctctatgttgcctaatcagttattagttataatattttcgatttcttgttatagataacaaattttagtagttccaatgtgacacaaaatctaatcatgggataaaaaagtttatttgaagaaagtgtattattttgttcttcttgatgatggtacaggcccgttattgtaatattttatttaattatagagtaatttccacatactaacatatttctcaaattgggctctgtaccgccattctgtaccataataaatattcaaaattaaaactgcaatcttaaaacacttttccgttccgatgacgcactgatgtagcctcttaacaattgaccaataaatttttaacatattataatataacataattactgtagttgcaattgacgaaactttgtgaaactggccataaatagttttaaagatttggctacaaattatgaagtaccttaaagt

SEQ ID NO: 11020 - DNA, 649 bp, Diabrotica virgifera
  SmartBlast Evalue=1E-13; Info=Transposable element Tcb2 transposase (Fragment) n=2 Tax=Camponotus floridanus RepID= E1ZYL6_9HYME
acatgtaccactggtggtacatatcattattggcggtgatacacaaaacccaaaaaaaattaaaatagtagtactagtaagtattgataatacaatttaaaaatataggtggtaccaaaaataataaaaataactgtaggtggtacatcactcaaaaaggttgagaaccgctgccctagagacaacgtacaattctgtacgcgcctccgaagatataccagcccaaaccataactgaacctccttgaaaacttactctaaggctaaaagtgtacttaagtaggtactaggcatatcgttcaccatctcttctccagactcttccgcaaccatccgggaaatgcagacaaattctgggctcatggctcattggtaaacattacgtttctccagtcatctacatttcaatagtgatgctccctagctaaatgtaatctggcgagacgatgtttcctggaaagttctaatcctgtagcggtcttggactattctgattagcttcatttaaccgtcttttaagtgttcgttcaccaatatgtacgtttatgacatgatgaaaactgtttctaacctctatcaaagttgaatgacgatttcttagtattgaagacactataaaacggtcatccccataagtagttcttgtctgg

SEQ ID NO: 11021 - DNA, 659 bp, Diabrotica virgifera
  SmartBlast Evalue=8E-11; Info=Endonuclease-reverse transcriptase n=1 Tax=Bombyx mori RepID=D7F166_BOMMO
ggatctgaaaataagtttaaaatggtgttttctccaatataatattttgtggcatatcccctactggtcccaaggtcttcaattataggaagacaacttttaggataaacttacgagatataaaaaccaacaattggattagacaacggacaaaagtcgaagacataggtaatagaaagagcatattcctcacaatggaactaggccggacaagtaactataagcgagaagagaaatcaacattgaatattcgattgaatttctagacatagatctctctcataattttccgtatgtttcgatcttgtgcctcgtgcatttaattcatatgacaacgttttagatcatcagtccaacgtgttggtggacgacctctacttcggtaggcatcatattttgtgtctccattccagtatccgctttgtccatctgttatctgtcattcgagccacgtgacctgaccagttccatttcaacactgagaatagcaacactgaaatagaagcgagaaagttgtagtttaaatggaattaaatggagaccatggggagaaagaagaagcgtatgaagatcgcaacaaagaaggtactacgacttaaaaagaatagctaaattggtgccggctagcccagaatagagataactagagcaatgagaga

SEQ ID NO: 11022 - DNA, 658 bp, Diabrotica virgifera
  SmartBlast Evalue=1E-14; Info=Reverse transcriptase family member n=1 Tax=Glycine max RepID=Q1AKH8_SOYBN
aaacagagtatttgaaatgctcatttaaatatggagttactacaaataaaatggtatctttggatggtgaaatgattgtgaaaagcaataattttaagtacctaggatcggaattacagagtaatggagaaatagatggacatgcatgcagtagaattagggctggatggatgaagtggaaagaagcgagtggtggattgtgtgacagaaaaattccaatgaagctgaagcaatgtttggtcatgttcaacgtcgagacgttaatcacccaatacgaagaatagctgaagtgcagattcctggaaggagtaggagagcaagaccaaagaagacctggggagagacgataaggcagggcatgttggtaaagggcattaacattgatatgacccaagataaaattgtgtggagaaatgcaattagggaagccgaccccgcatagggataaggcaaagagaataatgatgatggtctccgaggtattatgcccaggatagggggtttttggggtcgctgatcacgaatatcatgaccgcgatgatatgagttttcactgatgttgtataaaatttttacaaaactacaggagacgaggatcgccctggtcaccaacatatccgagattatcgtcgtcatgatattagtgttcagtgacacc

SEQ ID NO: 11023 - DNA, 656 bp, Diabrotica virgifera
  SmartBlast Evalue=2E-23; Info=Minos transposase n=2 Tax= Drosophila RepID=A8E1U2_DROME
gcaggaaatacacggtacataattatacataaatacaggtcagaatacacaaatcaggactcagtttttataaacttgaatcgtaaatggctaattttttcattactcgtaatgttttagccgaaggaaaaacccctgctaatagagtagcaataaacgaatcgcttcaattcgacaagatcgaagatttcatggaccgttgatgattggaccagagtcatattcagtgacgaatcgaaatttgatgtttgcgtgggggagttacgaaaacaggttatcagaagtcaaaattaagcattccataaagattggctcaaaagagctgtgaagtttcgcaaaagaattattattttggggtacatgtcatcagcgggactaggaagatatgaggtggtggaaggcacaattaacgcagcatagtaccaagaaattttgacaaatacttttactctaccatgaattgaattttatatttaagcaggacggtgctgcatgcaatactgctaaaataactaaaaaatggtttggagacagtaacattaaagtactctaggagtcccgacgttaatgttattgacacattttagcatatgatgagtcagaaactgcgtactaatctcatattactaatctcatattaaaatagtaatttcttg

SEQ ID NO: 11024 - DNA, 659 bp, Diabrotica virgifera
  SmartBlast Evalue=3E-84; Info="PRKCA-binding protein, putative n=1 Tax=Pediculus humanus corporis RepID=E0VGF8_PEDHC"
cattgtgttgggcatgaggatcgcatgggaatgacggttacatcgggcagtgtcaccataagaaaagatgataataacctgattggtatcagcattggtggcggatcgcctttatgtccttgtttatatattgttcaaatttttgacaacacagctgcagcaaaagatggcaccttgcaatcaggagatgaactggtttccgtgaatggtcaatctgtaaaaggaaaaacaaaagttgaagtagcgaaaatgattcaagctgcaaaggatgaagttattattaattataataagttacacgctgatcctggtcaaggtaaaagcttggatatcatcatgaagaaaatgaaacatcggctggtcgaaaatatgagttcctcaacggccgatgccttgggtctatccagagcaattctgtgtaacgataccttagtaaagaaaatgcaagaactgcaagacaccgaagttatgtataggggacttgttgaccactgcaaaagaatgctgcaagctcacatggagctgcagcaggcagttaaggcgatgggggatattttttctggaatagcagtaagggaacctcaacctcgagcaagcgaagcatttagattatttggtgaacaacatcgtagtattgaaaaaatgggtttagagatggt

SEQ ID NO: 11025 - DNA, 656 bp, Diabrotica virgifera
agaaaacaaacgtttttcagtgttttattgtgagataaaatgaacttccatcaagtaacggtcgaatccatcaattatataaggaaacaaatttagatttattacatttttacaaatacctcgtaaattacgatagggaaaaataataaagaattatagtaagtgatataaatgccacgtagatacttacctttgtgacaaatatgtattacaataaaatatatttctaataaatgcactgcaactttctgcaaataacacacagaaaattcagcaacctgctttagcgaaacaatctcgaatgattaagttatgcctgaccatgccgctgcgcgaaggaggagccaaaattcacttaaagcagaaaggttctactggaagtggaattatactaaccaaaatgaaacgttcgactgcaacgtcgaaattgttgcagtattggactgagtgataaataaaaaattgcacggtgcataaccgaaatgcattttgtgcatttagtttatattttcggattcaccttctctatttctgtgtgagaagcgaaaagcaaagttgttagaagcaaagaagcaatgagttactttaggggggcggcagctgttcctcaacgcccccaaattttccttggacccaaaaagcccccttatctctct

SEQ ID NO: 11026 - DNA, 659 bp, Diabrotica virgifera
  SmartBlast Evalue=1E-78; Info=DEAD box ATP-dependent RNA helicase n=1 Tax=Aedes aegypti RepID=Q17I24_AEDAE
tagacaagtgatgacgtcgctcttgccgaatggttctccatagttatcaaattgtctattgttcgacttcttccctgtgcctccgaaaccgaaacctaacctgtctgtaccaagatccaaattagctgtcagcgtagaccaacctactctacagagtccttcatctgttacagtggcttcgaatccccattttccactgtttattcctcttgtacatctgaccccatgccagtctttttgttctctcgattgcacccttttaccgtcaggagctacagctatagcgtttcctctgtctagagttgacattgtccatggaatagacatgctctctttagctgccttagctgattttccagactgtatatcctttagagtttcccatactatctggataactgggagacaaaatgctgcagtttttccactaccagtttcggcagccataagtacatctcctccaccaagtacgagaggaatcccttcagcttgaatatctgtaggtaacatccaagccaattcatccaaagcctttgaaatttccggtagtacaccgaattcttcaaatgcagtcatttttcacaaaattctataaatctgtataatatttatagaaatttaattacagtgagaaatttaatgaaaactgaaaacttctc

SEQ ID NO: 11027 - DNA, 658 bp, Diabrotica virgifera
  SmartBlast Evalue=2E-53; Info=TEX261 n=2 Tax=Caligus rogercresseyi RepID=C1BN86_9MAXI
ttgagtctttcgcgtagttgaatgctgttagcaaaccaaacttcttttttcttttggagaagtaattcgatacaacgtccgtatctgttccttctgatatacttgtaggtaacacattgtcattagctgatagcgatacaaacaaagcaaacggtactaaccacaaaaacaatgtgaaatatgctagtacctctgaaaacgtatggtatactgtagcgaaatagctgaacgccaaatagtgattaagaataataaatagaactgtaacgataaattccagggataggaatactacatacggaaaatttcttaatatcacaaaatggtttagctgagcaagtagtccgcagaccacaagggatgttggaaaactttcaaatatccataacagagtatataatcctaaagtaatcgagtttagccaccaaataattttcttggctactgtggtatattcctctactaattctgccaaataatacaacccagcagctatagaaatggtaacaaaaataacctgcactattatcgccacatatgttatgaacgttagaaaccacatatttatgcaaattttataccatttttgaatattatcatagtattattatttatttgtggattttaaaatcataagtatttatgatgcagtatctct

SEQ ID NO: 11028 - DNA, 656 bp, Diabrotica virgifera
aaatatttcccagctgattgtcaaaaaaatgtcaatttaaaaataaattatttttgttattagaaatatctgattgatttaacaaaagtagtttcgactgaaagtattcgtttgatcccaatgatatggatcgacctggccagacaggatacatggtattaaacgaagaaggagcagtattatcttcgtcgggagatctagaaaatgatgaaaagttcgccaactctataatgggattattgaatatttcttctcacatagacctaaacgacacaccaaaagaaggtttcaaaaaactgtcgatagtttacgaagatcattgttatattgtttgtctgtctaatagaaaatatcacataattaaaaagaaaacgcctcatttctgagatttcaaataaaatgaatgttatactatacttaacgaagatgaaatttatgcagatgattattcttattggtggtatattatattccttgtttcaactgtacaatatagtacatagcatgtaatttttttcattagattagcaattattcctgtagtatgtttttttattttattgtacaaatatagagcaaaaatttttattttttctaattttattaaaattcaaacttgaatgctttgctcaaaggcattcgaataattatccatg

SEQ ID NO: 11029 - DNA, 655 bp, Diabrotica virgifera
  SmartBlast Evalue=2E-44; Info=OCIA domain-containing protein 1 n=5 Tax=melanogaster subgroup RepID=OCAD1_DROME
aaactgaaaatggaaatgtttctgcaagacaaagaccagatcctagaagcagatatgaattcacacccgaagaactacgtgttcttaaagaatgcaacagagaaagtttttacaatagatgcctaccaataagtgcatttttggctggttcaacttattatggtgtaaaggctggatttttaagaggaaacccacgatttggagctaccccaaaagtcttcgttgctgtagcagttggttattttcttggtaaattctcctatcagtccaaatgtgcagaaaaactgatgcagcttcctaatagtcaaataggggaaatgttaagacaaaaaagacgtggcaatcttaaagaatctatagatactggatttggaccaagtttaggtttagcccccttttcaagtattaatcccgccgacacatatagtgatataagtccttacagcagtttagacctagatacatcaagacctgaaaaccctggtttggatgactatcatagaccatccttagataatccagctgtagagacacttgaagaaatgcctccagaacaaaaaatatccacaagttatgaagaactgaggaaaaaaaatagggaagaatatattcaaaaaagaacaggtggatataaagagcctccggtgagagcaac

SEQ ID NO: 11030 - DNA, 654 bp, Diabrotica virgifera
taccagatatttctctaccaatcaaatggtcagaaaaactctcaagacatccctcgaacgccatgatggttttactttcaaccaattacaaatacttaaacttcgcaataacaaaatcccttgagtttacacgaaatgcgatgactcagaatattacagttagtcctcagaaacaatatttcagagttttactaaaagcctcggcttaggttaagcctttcctgttgcaatacacatacaataggattcttgtctgtgaatatcataaaaacctttcatcttctagactgcaacagtctagtctacagcatagcaggggttcttcctctagctatttggatataccgacgaacataaaccaagactgtaaatatcataaaaacctttttaccttgaaactacaacaattcaagggtttattgaaaaatattccgtttcttaaatgcgtaggatataaacaatttggggcacctttgtacaccaaatttcaaagaatcgcaaaaaccgaaataaacatccaaatcccgtgagaattgaaaaacgccatactctgcactttgcggaagatcgatatacagggtgtagcgaaagtgtacaactgtaaactgagtcggaattttcaaatatttagacggaggactttcagcgtgtttc

SEQ ID NO: 11031 - DNA, 637 bp, Diabrotica virgifera
agattactaaaacaatgcacattaaaaaatggatgtaataaatgcaattaagaactttaacactgattttggaataataaataaatcaacatggttagtcaatttggtgttacagtttcaggaaacttatggaccacttacacccccagaaaatcttcaccaagatatcaaaacgatggaagaggggtatcaggaagatggggctatcacatgatggctgattactgctggagtcttcaaagggaccgtccttttaaagcatttgcaagaaaaccatataaaaggaagtttttaggtgacgccgaataacacatttttgttgcgacgctgccggttaggatagatgaaaagttaagtttttttggcagatatgtgtgatgatttttgtaagtacattattgtacaataaatatcttactttttattgtatttgcttatttcatgagtagcagcactacatatgtaggtagtgctgcgttaaattaccctatatgttagaaatgtgatctgttgtcgtattttctgaaaacgatctgatggagcaaatctggtggcatttttggattcagcagacccaaattacctagaaacagtaaaaaaatttccggcagcaaactgtgtgtttaccagtgttatt

SEQ ID NO: 11032 - DNA, 657 bp, Diabrotica virgifera
  SmartBlast Evalue=7E-44; Info=Red-bioluminescence eliciting luciferase n=1 Tax=Phrixothrix hirtus RepID=Q9U4U7_9COLE
tcaactataaaaatgaaattattctcatcataataaccaagatcgccagatttaagccaaccatccgcagtaaagctgtctcttgtggcctgctcatttttgtaataacctttcatcatcaatggtccttttatacaaatttcgcctactaggtgaggcccaagcgactttcctgtttctgggtctctaattttaatactggtaaatgttgaaggaggtcctgtagaaccttcttttcccacggcatcgggcataccaagacatgctgccaaatattctgttaagccatatccttgaatgattgctttaaggtttggtagtcttttcttaaggataagttcagtttctttatttagaagagcagatccacttccaattattttcaagctggataaatcgtatttgcctgcttttggagatttggccaataaaacaactacaggtggaggtaaccctatgctttcaatttggtagtcctgaattgttttgtaaaagacgtcttcgtcaaatcggctaacaactaacatttttgtctgttgagctatacaagccagagccaaaactatgccagctccatgataaaatggcattattccaaaagttcctttggatgtcgtcgtaaatttcccgtccactattgcatatgctcctttgtag

SEQ ID NO: 11033 - DNA, 653 bp, Diabrotica virgifera
  SmartBlast Evalue=2E-40; Info=Novel protein n=2 Tax=Homo sapiens RepID=Q5VW09_HUMAN
gaaatcaaatcttttgcatgaaaaacaatattcaaatctagtctaggagtaagattttaataatgttacttagtctgttgaaacataatgttaccaagtctattatcaatagaaatagcattaatgtcatttgtgcatttaaaaaatatagctcaaaagagagtgtcagtttaggaaatattgtgaaggaaattacggaagctgagcgtcctgaatatgtgccaataaagtattatcatgatgacattccaaagagcagtttacaccatttaaaatggatgctacagaaagaacttttaaatcaggatatatttcttttggggtccgccagggcccagaagaagacatttagctatgcagtttttagaattgaccaacagggaacatgaatatgtagcactcagtagggacactacagaatctgatttaaagcagaggagagaaattgttcaaggaacagccaactattttgatcagagtgctgttaaagctgccaaagaaggaaggattttaatcctcgatggaattgaaaaagctgaaagaaatgtattacccgttttaaacaatctactagaaaacagagaaatgcacctagaggacggacggttactgattccagcagctagatatgataaactattgaaagaacacgg

SEQ ID NO: 11034 - DNA, 657 bp, Diabrotica virgifera
  SmartBlast Evalue=3E-68; Info=Ethanolaminephosphotransferase 1 n=2 Tax=Formicidae RepID=E2AHR2_9HYME
ttagttccttttagaatgttttttaccatgtggaatgtgatgatgaatttttatatgacacatttcgaaaagtacaataccggggtgatgttcttgccctggggatatgatttctctatgtgggggacaataataacattccttatagctgggatatttggatcagaaatctggcaattccgatttggcagtgtaacagctggcaacatatttgagctgactctctatatttcttcactcatatcgaatgtacctgtaatatcttataatatttatctatcttacaagaataaaactggcaagatgagaccattttcagacgccatcagaccactcttgcctgtgggatcattctttctaatatcactagtgtggatcctttactcccctggtaacattgtggaaagagatccaagagccttgtttttcctcttggggacagtgttctcgaatatttcgtgtcgattgatcgtggctcaaatgagcaatacaacctgtgatgcatttaatttactgctgatccctacgtcgttcgtagtggcagcgtctcttttaacccaatgggcaactctggagttgatgcttctatatttattatgtatatttacttccgttgctcatatacattacggaacttgtgtggttagacaaatgtgt

SEQ ID NO: 11035 - DNA, 653 bp, Diabrotica virgifera
gatgaaatagtaaagtacgttaaattctttttttatataccatttaatagaagtttaggtaatatttagcttagcttaggaagtattaaagtcgagattttattacaattagattagttacggcttataggcactaaaagactatttaaaagttaggttcaatttcattcactgtggacactgttttgatgaagtgaattagtgaacgaaaaaaaggacgaaaagacacgacgtgaaagtacgtgaactagtaataggttataaaataccagtttagtatagggaaaatatgaacttttgtgtaaaataggaaaaagaatatacatgtttagggaaaaattgattgatctgaaatgtaccatgttacagttagttagcatagttaggaaatttaatttttcaaaatagtattaggtaaccataaacattttgtaaaagggaaagagaaatatatctcattttaaaacagggagatgtaatatagttgggacaacctatataaattaagttgtaaatatctttatcaaaatataatgtagtgtattagccatgctcgaagacaatgactcctgaccgtgaattaatacgtgaggtttacatattaggtagtgtataaaaatgcagcataggtaaattcaagagttgttataatt

SEQ ID NO: 11036 - DNA, 658 bp, Diabrotica virgifera
gggattctctgtgtttatttttattaaaatcattcagcaaaattctatttattttgggagacgtggacatactcaagtcacacattttgatgctgcctaaatagtagtatgtgtcgggctgttcttctgctgttatgataataattctctcaaacataaaaaccagaacatttttcctcttgactggtttcttaagtttaaacttgtctttcatgatcagcattccgtatcccgtaacatcgaatggacattcttggatatcaaccactggagaaatgttatctgggaataagtccattctctcgaaattagtaggggatgatattaagtcatttcctgtcttactcgttctaaaatatgaggtgaacgatgaaaatttaagtttggattttctctttgagtttctcctcaattcagcaccttccataaatgttgtagtcttattctgttataatataaagcagtcttttcgttacaatggtgatttttcttaacttaattgtgtaccattttctttaagtttcaccacattatactgacgatcatttccggggtaatcaagcaccaaactatacctacgcggtaaacttaaattatgtagacaaaacacaaaaaattacgcgcaaaagtaggtatacgatgattacttattattggt

SEQ ID NO: 11037 - DNA, 657 bp, Diabrotica virgifera
cccgaggcaacttttgttataaatatttttttctcaaagctgtactataaacggttcctgagatatggccgagagtcattcttattgggacacccggtacataaaaatatttggaaaaacattattttattcaagaaaacttagaaaaaagatggtgttagttgattttctttgtcatttaatgtatcgatttaagcacggtggatgatgaatttggagatatgcggtttttcctgttaacatattgatgtttgtggatttaatggtattaaaaaatcataattgaaaaaaatggggttagtggattttcctagtacgcccacgaaatatccttaaaaatcttgcaaaaacatgattttttgggcttaaaggtgtttcgcccaatttctgaatgtcctaaaggacttagttacatcaagttatatatagcatataaaaaaaccttgatttgatatatttcaaagcctataaaatcgaaaaaaatccaaaaaacccctaaaaaaagttttcgggtttttaaaggtggcgcatcttacggaaaaatcttaaaaaaatgagaaatatagttttgataaaacacacaaaatacaacaaaaaacgtgcaaccatctcaaagaaacatctaacaataaaacactgaaaacgtttgttttctat

SEQ ID NO: 11038 - DNA, 658 bp, Diabrotica virgifera
  SmartBlast Evalue=7E-27; Info="Elongation of very long chain fatty acids protein, putative n=1 Tax=Pediculus humanus corporis RepID=E0VQR2_PEDHC"
atatggatcagtcgaggagctcgtgaaattctagtcagggaaactgtgtccgatcaggaagaaagtcgcagtggttatcaagaaatcacacaagtaatattcaaaatattgtagactttttagaacgagtaaaataacctagaaaaaatggaaaactctacaaatatttttgacgaactgcacaaagtgataaacgtgcatgaagattccagaaccaaagatttctttctaatagccagtccaattccttcaattgctttatcagtagtatatttaatctcagtgacggttcttataccaacttttatgaaaaacagaaaaccatatgagctcaaaaattttgttatattttacaatggtttccaagttttgttcagtgcgtggttgttttacgcatttttagttggtggctggtactctccggtattcactggaaaatgtttccttccaggatctggaagtaatatggtgttggctgcttactgttatttcctgtcaaaattcactgaattcgtagatacgatactctttgcgcttgagaaagaaggacaaccaaatcactcgcctccatttatatcatcacagcattatgccgtttggatcttggcttgccgcgaagtatgctcctgatggtcccatgacattcctgggattaatc

SEQ ID NO: 11039 - DNA, 656 bp, Diabrotica virgifera
ctgttatcttctcaaagtttagtgctataagaaaatctacaggctcgtctaaaaataatacttttttcggctcctttcttggaacaagaatgtttttgtagaacaaattaatatacttcgccttttactctatctatttaaagctgcatgcgtttcttccaggtatttagatctcgctttcgttttatggaaacgtttgatgtagtagaaaagatctcttgctttctttttctttcattcccttggccaacccctctagacccgttagaagacccgttataggcttttgaataatcccgctgaattctctgtctccagaaaagaatttactttcaacaaggttttttgcatgactgttctctgctctttcttcatcctccgtgtcacttgtttctgaagaactgcttaattcagtgttcggaaagtattcagcatctccaccgctgtcggacaagaatggttgtgtccattttaaatgttaactagcattaatatcacgatataactggaaaatactgtaataatgacagaacacgtccacgcaataccgactcaccaagtaaaataaataggctagtgggtgaatgaaggggttatgtgtgtcacttaacaccatcattcatgactaaggtatattacaaaatattacacataat

SEQ ID NO: 11040 - DNA, 657 bp, Diabrotica virgifera
gccgtattcaaggtccaagcttccatttcataaaacaaagtccagaaaacgtaacacctagccaacctaactcttggctccaacttcaaatctcttgtgaagacaaactcttctcattttgttaaaatttgctttagccctttctattctaattttaatttcctggaagtaaccatttgtggagttgattattgttccaaaatttgcatattggtctatacgttcgacattggttccgtttatgaggagattctcgttatttctttacgagttttagatattctcataaattttgtcttctcgatgttcattgttaatactgtattcttggctatacagctatcctgttcatcagtcgctattctgtccttaataacaattacatttttcagtatgttttggtgtttttatctccaatgcggaaatcgtctaaaattgttgtattacccttaaatatttatcaatcaaccttttaggttaaagataaatttcatatttttaatgtaataattgatattactgttaattgtggtttaataccatcaaaaaatatcagtgttaatcatgccagaaagattcgagtatgtccaaaatatttaaatttgtggaagaatttataacaaatcagttcttataaataattagataaaatcatca

SEQ ID NO: 11041 - DNA, 655 bp, Diabrotica virgifera
ttacattacatagtatcccatctttagacgtctgttacaggagtattttataaaattctactgtcacagtgacagttgtcatactcctctgatacgtctaaaggtggaaaactacgttacctggctgacatttgtgtctgtcattggtcttcttcttttatcttttaacataatatattccaaagtatatgtcaaaaaagtccacataaattctcaaaaggtttttttgtcccagttaacatcattgtattattttccctgtaattataatttgtcatgtcctggtactaacaaattatactatttagatggttcgtccagttctcgtcaccaaaataatgagtttctttatttcctgaaatttctattaatgacaaaaactataatatagtatattataacgaacaaattagccaaataactgatgtgcagtcatatgttcgttgacagcagtggctatattcttgcgcgtttgcgtacagttcaatcccatgctagcaacgttaaccgagcaatacactgtaacttaacacaaaatatgtaattacctagcaaaaaatcttaacatttactttgaagagcagtatattttatcaaatgttttcaaattttatacttttagtatagtgtatagtaaggtattttatattaatta

SEQ ID NO: 11042 - DNA, 655 bp, Diabrotica virgifera
  SmartBlast Evalue=1E-48; Info=RNA-directed DNA polymerase from mobile element jockey n=1 Tax=Drosophila funebris RepID=RTJK_ DROFU
aaaattccaacaccacctggaccatgggcaaaaagtgataaagaaaaggctgacctatttgccgagtatttagcagaagtttttactccactaaatgacgaccaagtaccagaagcgaaccaaatattagaagaaccactacagatacaggaccgaataaaactatttactccaaaagaaattagagacgtaattgccaccctaaacccaaagaaggcaccaggcgaagatctgataaccgcaaaaatgttaaaagaaatacccaaaaagggcatagttaaactactgcacatattcaatgcaatacttagatgtgactactggcccaaagcactcaaaattggacaaataattatgataccaaagcctggcaaaaaccctctagatgtctcatcatataggcctatcagcttattaccaacaatctccaagttgcttgaaagacttatcctaaacagaataaatgcagaaataaatccacaaaattggatcccagatcatcagttcggatttcgacaaagccattcaacgatacaacaatgccatcgcatagtcaacgccattaaccagtcacttgaaaatcagcagtactgcacagcagcctttatagacatcagtcaggcttttgacaaagtctggcatccaggcttgttat

SEQ ID NO: 11043 - DNA, 654 bp, Diabrotica virgifera
taaaaatagcgtatagctaaggaaagattgttgttttgggaaaaaatttcgtgacaatatagaaaacagtagttgttagtttttacttataattattggttactgtgaaaagtagaaccaatattctttcattttaatcgtctctactcaatattgggggcattttactgttgatgatataaataaggttcagaatttttctgtgaaatactgaaagaaactattggttgttcctttacgataaatttgtattttgcatatggtgtagaccacaattagcacataacacgaaattcggggataatagtaagcagcaggatagaatgtgatgcttcttttaagaaatatagagtgcttaagttaataataataaagcaagttgctatcaaatctacaaatcccattaagcagaaaattaatacctattttattacatcaggacagtacaacttgctgtgttcgctggttgttagtaaaccgatcttcatatgaaaagagctcatatttttacaaactaagagggaatctggagtctatgtctccactgttacaaggccatcttggtagtacatctgcctctgatgtgttccatttagttatgtcgtcttttggatgaagatgccttaatttaaccagtaacaattcttatggcct

SEQ ID NO: 11044 - DNA, 650 bp, Diabrotica virgifera
  SmartBlast Evalue=2E-79; Info=Mediator of RNA polymerase II transcription subunit 17 n=3 Tax=Aculeata RepID=E2B843_9HYME
tcctagtggttcaacggtaccagtacctaaatgattggagtttcctaaagcttgccatcccattgtcttagccaaagcttgaactgccaatatttgatgctggttaatatgacaaaatattagatctcttaattcttgtggttcgtaactcatgttcatcacttttccgtctctgcagatacattttagattcttctgtccaacatgtattataagaggtgttctacaaacagcatcgtaaccatgtgtcgaaatatgaattttaacacaagactgtgttggactattcagagtattccagtgagaggtaatgagctggatcttttacttcttttgctatggtgtcgagcacatactcagtcctcatcctcataataaaatgttgggcttgttgaactatctgttccagaagtgtttgggttttcgtcatttcaagaagttcgtaccgatcagctgccataggacctgcaagcattctcttcttggatggacccaaggcccagttgcggatgggggaaaggatggtgcgtatttttgtggtgcacttcccttagaagttgatgtaagaatgttccagaacatggtcgtgatcgcttttagatggtggaggattttgttgtttcttgtcacttgatgtggagtgccttaat

SEQ ID NO: 11045 - DNA, 657 bp, Diabrotica virgifera
  SmartBlast Evalue=3E-61; Info=Spermatogenesis-associated protein 20 n=1 Tax=Camponotus floridanus RepID=E2B1K9_9HYME
tattctatcagttcagcgtgtgatatattgtcagttttttcatccaataggttaaatatctcatcatattcccatacacaaaaagctccttcttgtttatgtgcagcaccttcatatggataagaatctgcatcttcagctccgtagaaacccccaagtggatggctcaagtctctggagacatatgtgagaatatctttaacaacatcagcataaaattcgtcttttgtaagaagataggcatcacagtaagaaacaaccaattgggcttgatcgtaaagcattttctcaaagtgtggcacatgccatttcgcatcaactgagtaccttgcaaaacctttgttcacgtgatcatgaatcccaccataggccatcttttttaatgtgtgtagacacatttctaagcaggcatatccttgttcactttgtttgtttctagagtacatgtgaaacaagaagttaaagttggttggttgtggaaatttgggagctgtgctaaatccaccataatcggattcataatttctggttaactgcaagacgcaagttttccaagcatcttctccaggtacgttttgaccaccctctgtttctttgacctccatttttcttaatatacctattattttcttcccggcagcttccatctttgatcta

SEQ ID NO: 11046 - DNA, 656 bp, Diabrotica virgifera
attgaattgtaattaaaatatcaagtgttcatatcattgaataatagatatgagccaattattgtatatgtagaagcactgaaaactatttattagtgacaacggtgtttacatttctctgtctgacaaacgtccatgtcaaacttgaaaatcttgttccatatttgtttactttttaaggtaaatgaggaagagttgtttttcgctattttggctctattttgagtgatatttgtgaaaagtgaaaagaaaaaaacgaaatatttatatcccgatatctcatttcatttgtaagtactctttttttacattatataagatgaggaagtctgtttacattttaaaatatgtttttcatagtcgtaccattgggttccttcatattaatgtattgaacaagatattagttcattaaattaatatagatatttttaaattgtaagtagacatagttatactctgttttttttttaaatttaattctttgaacgtgtttttataaattattactacttccaattattaacgtctgaataattatcccccgagtaaaaattcaagcacacttatgctcattgaggaagcatcacattctatagaagctacagtgcgtccatggagtaacgcataaattcattatttcgtaagcaggcgac

SEQ ID NO: 11047 - DNA, 655 bp, Diabrotica virgifera
  SmartBlast Evalue=2E-21; Info="Glucose dehydrogenase, putative n=1 Tax=Pediculus humanus corporis RepID=E0VUA4_PEDHC"
cctctcagacgaagatgagtatgacgtgagcactctaatggccggcataagaaaagttctgaacatgatgaacggaccagctatgcagaaactgggagttaagttggtgaaggaaaagattcccgaatgtgatcaagctatcttcaacgatgaatattggaaatgtgccatcaaatacatgtctgtggtccgaggccaagtaacaggcacagccaaaatgggtattgtaactcagaaggacgcagtagtggatgaggatcttaaagtttacggagtgaacaagttaagagttgctgatgctagtgttattccagttagtatcacaggtaacttgatggccccagaaattatgatagcagaaaaagcagccgaaattgtaaagaagtgttacatggtatagatagaccatagattttagtactctaaaagtaaaattcgttaacttttaaataaagttgatgctcccagactgatgagatattcactaggatttagtaaaatgtaaaagataagtgtatccaggagatatacaacttcatatttatttaaaagtttagtacgaccgtcatactacaacagttataataaagtattcctgaattgtagttgtatgtacctttttgtaattactaaatgaataaacaatttaagtggc

SEQ ID NO: 11048 - DNA, 658 bp, Diabrotica virgifera
tattaaagagcattctagtaattttaggaggcacatggtgtccaaattgttgttaggtgttgctgttgcggccaccattgcagttgtaacttccagtgatgtgactacctgctggggccatacgtctatagcagatataaaaacgttagtcaactactgtaaacacattatccctacaaactttatactggacgatgcacgtttgaactctgaagtcaaagattcttccagtatagtatgtgaccaaataaagaaatggctagataaatcaaatgacgatttaacaactttatcgaaatttaacaattgcatgactcaaaaaactgatggccttgaatttaagcacatcaagaaactttatgactgcctaccggaactgaaggaacccgtgttaattaagaaggtcagagaaataatttacgaacaaaatgcaaatagaaaaatctacaaatatctaaaccaaaagatgactgaaaacaacaaagacaacttgaacatgtttctagattgtctagacttccatacactgagttcatccgaacgtcgtaaataagaaaagtgtatttttatatatttatgtactaatattcagtttttttttctttcactgtactacgtatatgataacagtttatttaaaaacttaatcgtaataaaa

SEQ ID NO: 11049 - DNA, 649 bp, Diabrotica virgifera
ttgtgatggagaagttgacaggatttcgaatgtggaatgaaatgtggggtgttccatttaagaaaacataagttgggtctgccactgtgttgtcgaacaccctgtaacattctaactagttttgtgttgtgaacctcaaggttggttaaaatttttgttattgacttttattgctatctattactatagcggagctattgagctttgccctactagtcaatcaccctgtatacactctcaaatttaacataaccagagcatctgtattcttacagtatttgaagtccttgtagagtacagaaatatttaaatacatattcgctattttttgaagtattgtattggtagcttagagttaagtaattccagtaggggtaaaattaaacaatgtaaaagttaatattggaactacgtctgttttaataaataagttaatatttttttaaatctcgttttgttttcagtttaagtttatattataaattaacaagaattaataattattttaaactgttatacagtacaacaaaaaacatttgtaaataccttttaaataaatatatccaattcttatgtatttgttactgaaatcttatctggtatcagtttttatgtatcacttagttctctcacagtagatctattatac

SEQ ID NO: 11050 - DNA, 645 bp, Diabrotica virgifera
  SmartBlast Evalue=7E-42; Info=Isoform E of Titin n=1 Tax= Drosophila melanogaster RepID=Q9I7U4-5
gttgtgatcatgagggcgtggttaccggattcgttgactaatatcttatggttgtggtcgtctactacttgtcttccattaatataccatgtcacttcaggatatggcctgccagtgactctacagtcaaagcgagtcattttccttcagtgacatctctatcgttgcaaactcttacaaaattgggagctaacgttttgtttgaatcggtttgttcaatttctgtttgttgctgcttgaaagtagattcgtgaataagaccctcttgggtggtgactggttctatagctaaatacgcagatgacactacgcaaccttgaggattttcagcaaggagagtgtaatgaccagaatcatcagaagtagtttgcttaactcgtaaaagatgcttgattattagagaaagttgtttcgtatttctgagtatctgtaatcctttggccgtttttgaaccatgtgattctaggtctaggattagctgatagcttagacgtaaaacagcatcagagccctcgagtagctttggaatttcgaggtttttgggcaaattgaggtggtgctggggtcccaaagatcgttcgactgtagtagaaatttgacagtcttgttcgtaattagtccttctcgttatagattccctaaagg

SEQ ID NO: 11051 - DNA, 655 bp, Diabrotica virgifera
gccgagctcgattccattgtgttgggggataagaaagtagaggaggagagattggaaaaagaaaaacaagagtttgataaacaggaacaagcaaagaaggtgaaggaagaaacaataaaaacagacaagcaagaagaggaaaataaaaataaagagcaacaggaagatgaactaaaagagaaagaaaacaaagaaaaagaattggcaaagaaagaggaagacctacaaaggcttaaaaaagaagaagaagataggaaactagaggaggagaggttagcaaaagaaaaagaagagcttagtaaaaagaagaaagaaaaacaacttgaggaagaaaaattaaagaaagaaaaggaaaaattggatagaaaaaagaaacaacaagaggaaagggaactagataaaaagaaaataaaagaaaaagaggtggcagaaaaagagaaagaattgcaaataattaaacaagaggaagatgataagaaattagaggaagaaagattaaaacaagaacaagaagaattggacagaaaaaacaaagaacaagaggaaagggaattagaggaaaagaacatgaaagcaaaagagattgaaaaaagaggaaaaattgcaaaggattaaaaaagaggaaaaggataagagactagaggaagatagattg

SEQ ID NO: 11052 - DNA, 655 bp, Diabrotica virgifera
  SmartBlast Evalue=1E-42; Info=Glycine cleavage system H protein n=1 Tax=Glossina morsitans morsitans RepID=D3TM64_GLOMM
catacctatcttagttttaaaactaaggttttattactttttataaaatcttaccaaaacgtctataacacaacaaaatatatacaacaaacattaaaatctttggtgtttagtgagattcctcggtttttacaaactcactgtacttttcttctgacattaactccttgatctcgtctggatttgataactctactttgtataaccaacctttgtcgtaacacgaagtattaatcagtgatggattattttcaacttctacatttttttctactactgttcctgaaattggactataaatctcactagctgctttgacactttctaatgctccacattcatctttttgtttaaccactgtatttacatctggtaattgagcatatactacatctcctaaggcttcctgggcatactgtgatattcctacaattccaattttttcagttacttcaacccattcgtgtttattagtgaacagtctttctgcccatgtgcaccttgatgtatggaaacctctggcacttgttatttttaagtgctgactaaaattatgatttttaactacttgtaaaacactagaaaatacgcgaggaagagccatcttaaattaaaattatttaaactgcttaatttattgtttacagtctttatc

SEQ ID NO: 11053 - DNA, 654 bp, Diabrotica virgifera
  SmartBlast Evalue=0.000000004; Info=Transposable element Tc3 transposase (Fragment) n=1 Tax=Camponotus floridanus RepID= E2AGQ7_9HYME
ggcccattcacaaaataatattatcttttcaaaatcttcctgaattaattcttggtgcatttgaatgcggtaagggtgcattctgttttttgcaagaatttcttgcacagagtagtaagattgttcttttctttggaaatatttcgaatacttgtatgtggattttcagtaactgccatcaacacattaatttcgttttcctctgttacagtactttttgacgttcgtgtttttatacgtaactgaatcagggcggttaagctgatcctttaatctttcaaagcttgctgttgtaggttgtcgtctttcaaggaaccgtttatgttcatgatatattgttattgataataacgcatttttattgcactccccaaatatactgccagatcaaccatttcctcaatattaaaattcatctcaactattaacccggtctatatagagatttcaaataacaaaaattgccggagagccaaatcttggtggagagctagggcataccataacaaacaaagtctaaaaagtccccatcgatcccatgtgtggttcaaaagttattcgaggtcaaaggtcaaaatttgagaccttgtggattcttttcgaaaacggtaagttttatcaaaaaaaaaacctcaaaccaaagttgtagacctt

SEQ ID NO: 11054 - DNA, 648 bp, Diabrotica virgifera
attagaagagtgtaaatgcagattgtgacatgatttttgattgcaaacaacttttctcaatgacaattttcgatattgtgaaatatgtatatacaccgttcttaggcgtcaacgcccttcggtagggatctatgggggagtatcaccgagccgcaagcccttatcccttgccgtactgctccctcataggtcgatcagatgcccgcatattccagtctaagcgccagattcatatttagaattttatactgacgcgttagcctttttgtttttccgatggcctgggctgggcttgaactctcgtacctcacggcgaagtgaagtgcgggtcagccgctagtcgcactgagctatccgatcgacatattttcaatatccttcagccatccgatattttcaatataccaattaaaaaaaatagtaattttccttattaaattttcggatgacagacgaaaaaccacctacttgtgacatcttgtcgtacatttctggcaccaatcgatctagcaatagggcttttcatcgattgtcctttgtttccagcttctgtcaggtgtcacataatattaatgtatctacgtccatacgtctttggtttgtatcattggcaataccaataacgtatgacgtagatatgttaatatt

SEQ ID NO: 11055 - DNA, 656 bp, Diabrotica virgifera
  SmartBlast Evalue=4E-32; Info=CG7120 n=3 Tax=melanogaster subgroup RepID=Q9VSJ3_DROME
catacattagcaaaacgaacgatgttgttactctacatttcaaccacagcgcacaacgagaatacagttttttcaacataaaatgctgctattcaaatattactcgaattaattacgaaacagaggtggatgacgaaatcaaactgaccgattgtattcccttcgaagactcagtagaaataaagttttcgtacgtaaaagtcaaatgttcaacattttttagtaacgtatacagcaatgtccacgctaccactttgccagtgtctaaaaaatctaagaagcctggcgagaaaccagtattcagtattatgttgctcggaatagacagcatgtcaaaatctaatatagaacgcactatgccagaaacctacaaatgggccgagcaaaacatggttagtcttaagggttacaacaaggtcggcgacaacacttttcctaatttgatggcaattctcactggatataacatggatcagttatcaactttttgtaaccgaaccattaaattaaaccattgtaggtttatctgggacaaatttaaagaatctcaatacatgacagcatatgcagaagacgaatgcaaaattaacacgtaccactttgaccgtccaggatttttagaagaaccaactgattattattatcgtccttatttt

SEQ ID NO: 11056 - DNA, 656 bp, Diabrotica virgifera
  SmartBlast Evalue=5E-13; Info=Bm8 interacting protein 2d-2 n=1 Tax=Bombyx mori RepID=D5MTP4_BOMMO
cattgtgttgggggatgtagaaaggctcattgaaatcgttagggataatcccgtcctgtatgataccaaccacgataattacatgaggacaaaattaaaagacgaaatatgggaggaaataggacttgaattgaataccgatggtaattcagtcaaggatcaatggcggaagcttcgtgattcctatcgcgaagctctacgaaggcaaagctccaaaatcggccacaagagtggaccagtcaggctgtggctctaccagaaggaaatggaattcttaatacctcatatgaaaaacaggaccactgcgggtacccttacagcaacatacaacccagcggatacaatagagtaccctgaacttcagctgtccgatgaaataaagtcggaacacattgacgacactacagtacctgttgatgaagcgccaaatgatgctgaagaagtggaatgttttcagcgcccaaaagcaatcaaaagaactatagtcaccctcagtgaaccaatcaaacggtacatcaacaatagcgaggaaagggtcaaaaggaaacttatacagcaattgagccaagaagaaaaggaatcacatcgagatgatgccttataccaattcttcatgtcgatgtacaccatcactaaaaagctcccgatgaagtacc

SEQ ID NO: 11057 - DNA, 653 bp, Diabrotica virgifera
gataatatatattttcgaatggttgcatctaagacatgtcaaaatgcgttttttctttttaattgctatttttgcagtaactccaacaataagaagacatacgcaagccttacatatagttcgcttcatgtctatttccagtctttgaaccgttttcctggaaatattattaagaaggtttgaataagctgcagcagctgcattatttgtcctattctcagtgatcatcagattacatatctgatacaaataattcattctttgcattccttccttctgggtgcactttttaagtgtatttaaagacatgacgcttctgctgtaaaactcaaattgcactcaaatttcttagagttggactgttcaactgaggcttgagtcacactgccctcaccctaagtcttgtagtgtatagtctactatactatatgcatagataaagaatatattatatactactcaaactatacgtgtatattccgttggtatattcgcccatcacatcaccacagcataataaacgaaacgttttctatgctgtgacatcactaaaaacaaaaacaaagtgtgaggttaggtttttgttttgtttcccccatagatatataatactctagattgcgccctgcgatcttaaaatgggtgacggttgc

SEQ ID NO: 11058 - DNA, 653 bp, Diabrotica virgifera
  SmartBlast Evalue=1E-37; Info=Transcription initiation factor RRN3 n=1 Tax=Aedes aegypti RepID=Q16ML1_AEDAE
taagatctgaattgacatattccaatccgtcttgtgctgatatataactgtgaatccattctgctaattgctgcatagttccttttatcattgataatggaacaaaacttcctcttgctatcaaactagcaatataattaactgcggcttgcctcaaaattggagcaacgtttggattgcatactttcttccacaaataattcaaaaacccttcagctattgtcgttttgaaactgctcatcaaaaacatcacaaactgtacatgatgaaggccgtaagtcttcaaaatgacttcatcaaaaatgggcaagatgtccaaatataactttttcgttttctcccaatttaagccttccgagctgtggcattccgttactatgtaatgaaatattttatctaaacatacatctagagtgtgtcctaatgcacttctatcgacttttgtgaagcctgtggttgttgttctaatagacttggaatcgtcgtccatggaaaatatgtcttcatcttgttcagaattcagatatttttcaatttcttcttttggtgcatttacatccattatgaccaattttgaaagataagccttagtatttcaggccttagtgttggttgatattctagtatccacaataaattatgaatatacaatt

SEQ ID NO: 11059 - DNA, 645 bp, Diabrotica virgifera
gctgcatagcactagcagcagctcaatcgaactacgccgaccaagccaacaacatcgcctaccaaggagaaggccttcccgaacaaggcattctcgatggaaaagtcaccaaactcgacgacctcagtcccgtcatcttcctcaatagaaccaaggccgccttaaactgcgcagctggctcaatgcagatagagctcaaattcaacgataagttctacggaatagcgtatgcgcagttcgataggaattcggcttgtagagtctacgggaaaggagccttcagctacaagttggagttgcctttgaaagggtgtggaacaaaacagggaccccaacgtgtttttactaacaacatagtggtcagattcaacccccacttcgaaattgatggtgacgaagttatcaccatcgtgtgcaggtatcctccacctatagtgccacctccagcacctctgccgcatatcgtatctgaagctccagcatcgctagtagctgcaccattgaaaggcttccaaatcctgctgattatttgcggtatcctcttcttatctctacttttactaggattaggatgctcgtactactgtctaagacgaagcctttaacggtcatccgacaaccgttttctactctgggaagtggatc

SEQ ID NO: 11060 - DNA, 655 bp, Diabrotica virgifera
aatcttctttatctgcctttttgcaaataaaatctaatatttacctctgtgaggtatcacgtcagtaattgattttatattctttgattgaacaatcccaggtttgtcgaattgttaattaaggacatgaaaaaaatcaagtagtccggtagtataaaagaaaagagttagattataacaatccctatctgcgttagatcacgaacactagcaaatacatcgatatagtaaccaaatgacccagtgcaactctattctgaataaaatagcacctttgagaaaacccgatgtatttttttttattaacaaattcgcatcaaccaaattggctattccctgaaacaattgtagcgaccaataatttgtattacgtttgtatgtttagatggagtttaaaatgttaattgaagttaggaaaacccgatgtattgatagacggttaaagtgccagattgaccgtttgtgcaaaataaggcctaacgctcctaagttatcctaattaaaattagtcaattagaatttaaagatagactgcgactgaaaatatttgagtaaattttaatgactttatattttttgtatgaacatttgttagaatatttacaatcttacagtttccatgtcagatgaacaaactaggtggaacaataatgta

SEQ ID NO: 11061 - DNA, 653 bp, Diabrotica virgifera
  SmartBlast Evalue=5E-52; Info=CG4330 n=3 Tax=melanogaster subgroup RepID=Q9VYG7_DROME
cttctttccaaacggaggaatccatctagctaacattgcgtgcatcgaaggaaaagtgacaccctcgcccattccttccaaaactctaacgataataaatagtgtaaagttcattctcgcagcaattggagtaagtagagtgaaaatcgaagtgaccaaaacacctattccgtatactcgcttgctgccgaagatctcggccaatcgtccacctggcacctgggttagcacgtatccgtagaaaaacgatcccaacactatactttgcgtcttttcgtcccagtcaaattcacctggcgttgcagtgccattcgtatttgtgctattgtctgtaataggacaatggtcatacgaattattagtgaaaacgggttgagtggtattgaccatcgctacaattgctacagataagttaactctcatggcatatacattggcaaagcctaaaaatcccaatatacctaagatatgtcgggccttcatgcaatttgtggtatcttcaacctcaggaggaagaattctagtcgtctcgtcttcatcttcatagacactttcagtatcactctcttccccattgctttcgggattttctttagggacatacatttttaatcaaaacaaaattttattaaatggaatttctcgttagttat

SEQ ID NO: 11062 - DNA, 655 bp, Diabrotica virgifera
aaaaagaaattttattagtctcaagaatattttaacattgtttttgtttttattcctgcatattcgtattaatttgttaatggtgtctcgtctaaaacctattgttaacttactaatagtttgtggtcatatcataaagggcacaacattaggctatacaattttagagtgagatatacttaaaataacattacccctttagtccaatttagaaatcttagaaatccgtgcaataaatacgaaatatcaaaattgttcttttggatgagcaaatattctctacatcaacagtttggtacacgtagttttgcaaaattaaggaaataaaatctagcacttaacttttttgaaaatatgtcacacagaaacttttctatcaaaatattttactatttggacaaatttagatgaagttggtataaatataatcgactaacaattttaagtttaatatgccctactaaaatcgtgacgttatatgaggagatggggcttataagtattcccaaataaacttctgatagtatttaaaagttcaaaacatggggtgcgttcggacgaccacagcggctggacagctgagtaagcggtagcgttcagacgacaccgctttaaatcagctgctgagagatttactaatagtccaagaggcagc

SEQ ID NO: 11063 - DNA, 655 bp, Diabrotica virgifera
  SmartBlast Evalue=4E-89; Info=Bt n=1 Tax=Drosophila grimshawi RepID=B4JZU2_DROGR
tttaggtttggtaggtttagcaataacttggagttctacttctacagtgtctactccagagtcgtttctagcagtaacagtataggtagcagtatcgcttctttgaacgttcttcattatgaagcaagtgtggtaatcttcattatcaatcttaattctatcgttgtttcttagagtctgctctttcaaagtccatacaacaactggagcaggttcacctttaacatctgcttccaatcgcaataattgtcctgtacgtagtacttttttattcaggttcttacggtcgatctttggtgccaggaatcttggcttggctacaactggtttagatggatcgctaggttcgctaggacctgctttgtttacagcaacaatacggaattcatattcgtgtccctcttctacggcttcgactctgccagtagttctatctccaggaacagttgctgcatctacccagccacgaccagctttatcgtgcatttgaataatatatttttgaattggtgctcctccgtcacttactggaggcctccatgcaagttctacaaagtccttgtcccaatctttgagttctgggcggccaggtttgccaggttcatcaaatggatttttagcaatgatagttttctcagtttctaatggttcagat

SEQ ID NO: 11064 - DNA, 653 bp, Diabrotica virgifera
attgaacaaaaaattttgaatgagttgtccctgcctttcgcaatgccacatatttccgaaatatcgccacaaaactgatggcactgttttctgaatttttgatcacaaaatttcggtcaattttatttttggtgtttctaatcgcaattaggaaggaatcgcccaaatctctcacatcgtcgatttctaaatcaaccaactcttttccacgacaagctcccgcaacgcccaaaataagtgcaacctacaaaaaaattgatttcttaaaatttctgaatataaacaaatttccaaatttaccttaagcattaaatatttatcatccggagcctcccgtaagaactgatctacctgctcagacgtgagaattcttgacttctttggcttaaatccctcatttcttctcttcaaaaaagctaataattttggaaatttacttatatcaatatcttctctaatgttaataaccgatttcagcattgagtaatgtgcccagagagttgaggcacaaaccgcttttgatttatcatcgaagtagactaacagcgcattttcagtaggttgtctcacattttttaagcggcaccactttttaaaagcatcgtactgctgctcgtatagtttttctagatttcggtggtaacaattcttca

SEQ ID NO: 11065 - DNA, 655 bp, Diabrotica virgifera
  SmartBlast Evalue=2E-96; Info=Ribosomal protein L11e n=2 Tax= Eukaryota RepID=Q4GXJ8_AGRLI
agtggctccacctttaacaagtctgatcaacaatggcgcccgtagctaagccaaaagatggaaaagagaaaagagaagttaaagacaaaacaaaaaatagtatgcgagagttacacattcgcaaactctgccttaacatttgtgtaggagaatctggtgacaggcttactagagctgctaaggtattggaacaacttacaggacaacaacctgtattctcaaaagccagatacactgtcaggtcttttggtatccgtcgtaatgaaaaaattgctgtacactgcacagtaaggggagccaaagctgaagaaattttagaaagaggcttaaaagttagagaatatgaattgagacgtgataacttctctgcatctggaaactttggatttggtattcaggaacacatcgatcttggtatcaaatatgatccaagtataggtatttacggtcttgacttttacgtagtattaggaagacccggattcaacgtagcccacaggaggtcaaagactggtaaagttggattctcacacagattgacaaaagaggatgccatgaagtggttccaacagaaatacgacggtataattttagctagtaaaaaataagttgttaagtaaaattgacatcaaaatataaaaattttcacataaaa

SEQ ID NO: 11066 - DNA, 655 bp, Diabrotica virgifera
  SmartBlast Evalue=3E-29; Info=Nose resistant to fluoxetine protein 6 n=1 Tax=Harpegnathos saltator RepID=E2B2T8_9HYME
cattgtgttgggagaagacctaggacaaaatttctattttgttaattactacatcaaaacacatatgaggtgcagttcctactgtataggattattttatgcctatttagtgtataaaatccaacgagatacgaaaaaaatcccaggatacgtcatcatttgcgggtggatcctggctgtcgttggtggcttaggatcgatggtctcggtagtactgttttaccagccagatcattcaccgaacattctagaaaatgctgcttattctgccctgcatagaatatgttgggcgcttgccatcggatggattatgttggtttgcatcacaggcaatgcaacctacatcaacaaattcttatcccacaaattctttataccagccagtcgacttacatactgtgcatacttagctaacggattggtggagatatatagctcaggggtaaatcggcaagcgatgtatatgagcatatttgaattggcatcaaaagtgttgggccacatagtgctaacatttacattggcatttgttctgtgcattattttcgagtcgccaatccatggcatggagaagattttactgaagaaaatcgatgtgaagagaccgaaaccaaagcatcctgaaagattaccaaatggagactttcaatagcga

SEQ ID NO: 11067 - DNA, 650 bp, Diabrotica virgifera
  SmartBlast Evalue=2E-40; Info=Odorant binding protein 6 n=1 Tax= Tribolium castaneum RepID=D6WM82_TRICA
ccattgtgttgggagaagttcgagaatatacaactataatggtgaaaagattgcttttctgtgctattggattactttttttaaaaattaaggtgcagggacttgaccctgaaatgcaggaattggctgacatgctgcacaacacctgcgttggagaaaccggagctagtgaagatgacattaataacgcaaaaacgggaaactttgcagataaagaagaatttaagtgctatataaaatgcctaatggctcaaatggcttgtatagacgatgatggaattatcgatgaggaagctactatagcagtgttacctgaagagttccgcgacaaagctgctcctgtcgttagaaaatgtggaacaaaaaagggtaaaaacgactgtgaaaatgcttggttgacccacaagtgttatcaatcggaagctccagacgattatttcctcgtttaaccctgttgatatcttcatcaatattagttagataggaaagaatagcaacgaactaattatctgtatcgtagaaataataataaaaatatttatatataaaatattcgataattagggatatatgtaaagtattgttactaaccctatatgttaatcgtgaagctaatagttttatacagacactgtgaccatctatgtatt

SEQ ID NO: 11068 - DNA, 655 bp, Diabrotica virgifera
  SmartBlast Evalue=9E-97; Info="Mixed-lineage leukemia protein, mll n=1 Tax=Aedes aegypti RepID=Q17A66_AEDAE"
aaatcatggagttgttgtatagaatgcaaataacagtcacgccgccagttatgccggatgatacaagaaagtgcatgttttgtcagggtgtttgtgatggagtagctgatggcacggcaagattacttaactttgaagttgataaatgggttcacttaaattgcggtctttggtctgacggcgtatacgaaacggtgaatggggcgttaatgaatttggagaatgctttacaaacaagcctaacgacgccctgcgtacattgcaatatgttaggtgctactataagatgcttcaaaacgagatgttccagtgtgtaccatctgaattgtgcagtaaaagacaattgtgtatttttcaagaacaaaactgtctattgcatagcgcatgtccctaagaacgaaaaggacaacgagttgacgacgctctctgtatctagaagagtttatgttaatagagatgaaaacagacaagtcgctgctgtgatgcacagctcagatactgacgatctattaagagttggtagcctcatattcctaaatgttggtcaactattaccacatcagctacaaaatttccacacttccaactacatatatccgataggctacaagataataaggttctattggagtatgaaatctttaaacaaacggtg

SEQ ID NO: 11069 - DNA, 650 bp, Diabrotica virgifera
  SmartBlast Evalue=9E-25; Info="CG9134, isoform A n=2 Tax= Sophophora RepID=Q9W0I2_DROME"
caagttagagagaagaaagatggcagccattttgaaggctttggtcctatgcatttcttgtgtggcattttcagctgcagtttatctagatggctggggaggtggcacagcaaacagaaatcctcaaagtgctacttgggaaaaaatcttcgaaagcaatacccgatcatcggtacttcccttgtttagacatgacaataagttatactacatgggcgtacactttaaggcaagatggcaaaatgctttccaattctgtgaatcacttcatatgaaacttctaacaatacattcaaatgaagaaaacgacagaatccataaatacattagagatgctagcaaaggaaccgaatactggatcggaggtacccgtttggtagatggatccagctgggtatggatgccatacggaacgcaaatagattacaccaaatggtccaacggtcaaccgagtgacattaacgaaaagtgtctacaattatggataacgaacaatcagttaacatggaatgatcgtgactgcaacgctgagttctacttcatctgcgaaaggtacgtggactcgaatgatagtggacctccaggagcatcactttaatggcttatattaagctgattttaattctttgtgccattaaaagataacatgt

SEQ ID NO: 11070 - DNA, 652 bp, Diabrotica virgifera
  SmartBlast Evalue=7E-17; Info=Endonuclease-reverse transcriptase n=1 Tax=Bombyx mori RepID=D7F178_BOMMO
cctgtattctcaacttgcaaacagcaggggactccaaaacattctggtcagtgattaggaaatttcggaaaaatcacaatacttcttttatcgatgtagacgtatgggagcaattttattcgaatatatatcccccaaaactatatcataatgcccgtttttttgatgcaagacatccatttttgacgctattataaccagtgacgaaatatatagagtcctaaataactgtcccaatcgtaaagcacctggaactgaccatatttcttatgaattctttaaaaatcttccaaataattggatactgtatttaacgggcatgtttaatagaatactggaaacaaccattacgccgcataactggagtgaagtcatttttactatgatatttaaaaagggcaacagagatgatccagcaaactatagaggtattgccttacttaattgtgttgaaaaaatatttactaatattttgttaaacagactcagagattgggttgaagtaaataatgttcttcccgaatgtcagtcgggtttcaggggatcaaggggttgcattgataatgtattcaccctcacttctgctgtacaactgcaactacgactgaaaaaacgcaaagtgtacgctgcctttgtagattataagcgggcg

SEQ ID NO: 11071 - DNA, 654 bp, Diabrotica virgifera
  SmartBlast Evalue=2E-22; Info="CG9134, isoform A n=2 Tax= Sophophora RepID=Q9W0I2_DROME"
acataatctctgcttcatttatttgcatatatttacttaactcctctcaacttaaaataagataaaaatatgtttcatttaatcttgacacttcgtttcgcatataaccccaagttcattgtcgcaattctcgtcgttccaccacccattttgataatgtctataatatagcgaaatgcatctttcctttttgtccttgttgtttggttctccatcgccccagttgaaaactttaattggccttcctgttgtaagccaaatccagtcatcatcgtttgctattctacttcctgaagaccagaactctgcttgaccggcaagaaattgatcgacttcattataaagagcatcattctcttcttgcgttcctaaacttaccaactgcatattatgatggtaacagtattgaacagcagtccagaaattggccttaacattttcttcaatgaaatattcttttcctcgcaacgtaaaccaatgtcttccagtttcgtttctagtgacatcactaaaggcttgtgtaacaacagccaaaactagtatcaaatatactaccttcatgtttttatgatttaaagaaataaaaaagacgatgtttaggtattggcaaaaaatgataattttttaaaatatttgataagatacttgtaaaat

SEQ ID NO: 11072 - DNA, 654 bp, Diabrotica virgifera
  SmartBlast Evalue=4E-66; Info=3-hydroxyacyl-CoA dehydrogenase type-2 n=11 Tax=Drosophila RepID=HCD2_DROME
gtgaactttgagcaggataagttgtagtgttatccttagaaatatactatcgcatttatcggtgaaaattgttgtttttaattacagtgataacaatatgattaagggagcagtaagtttggtaactggtggagcctctggattgggaaaggcgacggtagaaagattggttcaacaaggatgtagagtagtactttgtgacttaccagcttccaaaggaaaagaagtagcaagcactataggcgaagataaagtactatttgcaccagtaaacgttatttcagaggaagatgtcaaaaatgctctaacggcagccaaagataaattcggaagactagataatgtgataaactgtgcagggattggtgtagcatttaaaacttataattttaagaagaatgtacctcatagtttagacgatttcatcaaagttttacaggttaacaccattggcacattcaacgttattcgactgtccgtaggacttatcgggcaaaatgacccagatcaacacggctgtagaggagtcgtcgtaaatacagctagtgtagcagcatatgacggtcaaatgggccaggtagcatattctgctagtaagggagctatagctggtatgactttgcctttagctagagatttggcgagccaagggat

SEQ ID NO: 11073 - DNA, 647 bp, Diabrotica virgifera
ttcttatgttgagtttgagacaccctttagggaggacgggttataaatgtgagtatacatcggaatcgtgttggagtcttgttttgtgaacattttgtttttgaatgtccctgatatcttcagaaacaaagaaaatagacggttttgtagcttagcatgtgtttcaaccgaaacaaaagtttgagacaccctgtaggaaggaaaaggtataaaggtgggtacatcgaatttatgttgtatctattcttatattttgtgatcattttattttttaaatttctctgatatctttaataataaagaaactagacggttttactctttaatataatatgttataactgacgacatgcgatacgtgcggaggccatgtcttataccactaagacgaaatgatttcctatacagggtgtttcattgagaatgttcaatctctgagttgtagattctggacctcgaaatgttgggatttgccaaggtcacttaataaaatgtggctccttactgagttacagggtgttttatttaacaattgtctttgctcagtgttttgaaactattcgacgtgtccttttcatacttcgcggagggtgtgggtactatgcatcctgtgaaattgtattaaatgggcgtctctggctgttact

SEQ ID NO: 11074 - DNA, 646 bp, Diabrotica virgifera
  SmartBlast Evalue=2E-39; Info=Pol protein n=3 Tax=Drosophila virilis RepID=Q86GH5_DROVI
tgtaaaccataggaccatactggttggagcatttgtttgtaaactaatactttgtttttgattgtaagttgtgagcttctacctaataaccaatataacttcttgtacttcagttttagttcttcggttttctttctgatatgttcctgccactttaatttgctatccaaatgtagccctagatatttaactgttttcttgtaccgaatgatcttattgtttattctaactgggtgactatttattcttttgtaggtgaaatcgatatgggcagatttcgcttcattgatttttatgcaccatttattattccaggtgtttattttgtttactgcattttgcaggtgtctagttgtttcttcgaatgtttcaccgactgctagtattgcagtgtcgtctgcaaatgttgccagtttaatattttctgtaacaggtatgtcacaagtatataataaatatagtatgggtcccagaacactgccctgtgggattcctgctttaattggccgtaattctgaatattcgccttcctgtttaactctaaaagttctatcttccaaatatgattgtattagatgtacaaattggatgggaagatatctttttaattttagtaacaagcctttgtgccacactttgtcaaatg

SEQ ID NO: 11075 - DNA, 650 bp, Diabrotica virgifera
  SmartBlast Evalue=2E-14; Info=CG3706 n=3 Tax=melanogaster subgroup RepID=Q9V3E0_DROME
atctatttctaaagtgccgtttatataacccatttgttcgtaatgacgttgatgtacattctttaaattttgaaataatttctcggaccactcttcagttgctaaactcctggctagtgttgatataggtacgtcgacttcaaggaagaaccagtcgtaattacttatccaatcagcttcaaaagtcacatgaacacgtttttggggattattctgatatttcattgtgccattaaaaccaattttccattttttcattggcactacaggtgtaaacgtcataccacccccagagaaactatcttgattgtacagagatagtacagtagcgtccataattgtattgggtaattcctcgctttctagcaatccataatcagggtgcacaatataaactaatcctactattttgccaccatgtcgccgttcaataccaccgcaaaagtattctccagtttgagatgctgcttgaaagtagacagcgtcaaatgcaagattatggctggataacatctgaagcttctccatattatgtatcttttcaacgttgtctttgccatatatataatattttattcttcttataaatatcaataaacttattatgatatatttaagataataccattttcctctctggcatacacgtt

SEQ ID NO: 11076 - DNA, 648 bp, Diabrotica virgifera
gtttggcaatttttttgctagattttaatgaatatttgattttaattaacgaattttgtttatatataatcaaggataattttgtatgggtctagacataataatatgatttttttaattacgatggttatttctatttttaccgttttgttcgatttaacctgtaaatttctgaggcgctttcagtttttagcaatttttatacctagtttaacagtacacttccttgcgtttgtaaattttcgaccgcattatgcaatgaggcagatgattaataaaatatttatacaagtcacttaggttatattctgaatagagtaggaacctacttaaataagtatcaacaggccgtcatgcatcttagtttctgatgatttaatatcctccaagattattaacctatttggtaaaaataagtgtgtcggccgtacttctgtggtagagaattttatactattactttacaagaccaaagtcctaaaaaacaaacgtaatttgacgataaaatatctcgagctgagaagtcgagagggggacgtcgaggcaacccgtatttctattccccacttaggtgcaaatagcggttttctgaccgtcgtcgcaacgtcgcgtattaacgttggggcatttagtccaacgttaagacgt

SEQ ID NO: 11077 - DNA, 645 bp, Diabrotica virgifera
aaaagtaaagtgtgaaaaaagtaatattggtgtttctagtaaatatattttattataatttgtgggtctttggatttgtcttcgtcgggaataggatcataaatattaaagtatgatgaaaattagaattagaaaacaatgttaataatattaatttgtacaatctgtcaaaataattcatggtaccagacgaactaactgtcatgctaatttgagacatatgttttttgaaatagaagtatatattactaataaccttttatttattttatattaggtcgaaatatttcataatttatattagaatactggattataatgaaatattcctaaaattcagcaaaattctaaattttctgttgtcctttgcttacgaaaagatcgacatatgacagcggctgtgtgggtagtgcgaggttgccaatttttgttctaggtttctctatatgtaccgatgcagaatatttacgtttttgggaattatgatacagtgttaaaaaagggtgaccgaccgcttgggaaaaccacatgccttactttttttatttttggtattatttttaagtattaaaattagtttaatatttaaataaaaatacaattaaactgtttaaaatatatttatttcgttgaagtcattataat

SEQ ID NO: 11078 - DNA, 644 bp, Diabrotica virgifera
  SmartBlast Evalue=3E-38; Info=Vinculin n=1 Tax=Aedes aegypti RepID=Q178I1_AEDAE
gattattcaatatcaaacgtactaacccctttttgtatatcatctttttataaattattacatttataaagaattgccgtgtagaagaatacttttattaacaaggtttacaagaaatcaaaataaaattgtgtcatgttctgtgtggaaagatcagtctcgtttaaatgtcgacaagatgtgggattctggactcacataaattcaaatatcccacatttttaacaaattgtagatacattaaataaaataaaaaatggtcttctgcaaaatgcttagtttttaagcatatgcgtaccatggttgtttcctcacccacctcaatttctcatgagtttgggcgtgtattttaacgctagcgctctctgctgctcggacggtttctttaacactttgcatgagattctgggcgtttccttctagcatctcagtagcttctcggtcttcatcagaccttgagatcccaacatagtagctttgactgtgctgagaatcttcaactgcgtagcgatcgtaggtattcgctcgcaaacttgcagtaagttagttctgatcctcttgtcggtgcattctctggcaagttgtttagcgatgcgtgttacatcggcgctggcatcggcgatagctttggccgtggctatcag

SEQ ID NO: 11079 - DNA, 650 bp, Diabrotica virgifera
aatcatcaggaagaaataatcatttccaaaaaatatgacaaaaccaaaaagaatagaagaggatgacaaaaatataaaacctgcctcgaaagtaacttggtggatgtgttaaaagttgccttggaatttagtagctggacattcgaagacgatgtggttgattgtttgttcaacagtgctgtattgtcacacagagctggcagtaatactccattggtttagcgaatgtgtaacttgtattatgttcagattgcaccattgacgtcgaaggagagaaaaaccgtttggttagtttatggggttctctacaaaatccgaatttctgatttcatgatttaattccccgatccagcactgctaaaatgtggaatattttagtagcagttcttgttggaggttgccaggattttagtcgcagtcatccttgactgaattcatggatgactacatttatcggcagtattataagtgtggcggacaattttaagtgaggctagtagggatggagtcgatcagagccgagctccagatagaaactcggcatgaacttcgagctgctagttgagctcatggctcatgtcaactcagctcgaaagttcgagctgagccgactcgagctcgaacggcttgtttaggaaatatccaattta

SEQ ID NO: 11080 - DNA, 654 bp, Diabrotica virgifera
  SmartBlast Evalue=1E-13; Info=Transposase n=2 Tax=Danio rerio RepID=A9X5I1_DANRE
actggtggtacgaaggaagatttcaggtggtacgcgtcacgtgggtgaaacaagcgattacgctgggcatctgtctgcgaaagtgccaggtgccagtgcagttgttagttgttgtgcttccatatgctatgaagcagtttttggtgaagcctgggacttcaaaggaaggtgctaaaaaatctaaaccgcaaggccaatcggaaataccacaaaagctacttacagtgtggttatatagtgaagtctggcacagaaaatagtgacaatcctattcctcaatgtgttgcttctttcgaaacgctttcgaaccaaagcatgaagccttctatactgataggtcatcatgactagctttttaaatatgatgctaacttaataaaggcatcctaccatgctagatgtagaatagcaaatgatggaaaggctcacacaataggtgagacccttttactataggccgttgtggaaatggcccaaaccgtgttaaaagaaaaggcagccaaagacatttaaaaaataccattgtcaaaaacacagtgaaaaggcgaattactgatatgtcttccaatattaaagaacaacttcgtttaaaacttcaagaatgcacatattttacactttaagtagacgaaagcattgctataacaaacatag

SEQ ID NO: 11081 - DNA, 644 bp, Diabrotica virgifera
gtcttgcgccgaaatgtattgagcgggttatgaacgccgttataacgtatgtaaacgtttaatgtatcaggacagttctgttttgcagaaaatttttttatcgtggggtactattttcggtcatacggtcaaaggtcacgaaaacagtccaagcttaaaatcaacaatggtttcagcaggacggggcaacctgttacacggccaggaagtctcaagacctcacctgagaatgctgaacgaggcagacagatccaccgactgacattccggaattgcggactagaattgaagatttttttcacgacatggggcatctttaacatatgttttatcgggaacgtggtcgtgaataatgtttgcaaggctatatcatgtatacttaacatttaaataatcataaaaatttcaatattaatgtcagtactgtttattttgtcacatgctcttctggaacatagcgtatccactatattaaaatcaaatcaaaatttcaaactgaataaaagaacagttttttaatttttatagttcaattcaaacaacttttatgtattaatgcacaacattaaaatttcttagctctacagatatgttacaataccatcacatctttttccaaacaaaaaatgcaataatatcaaatt

SEQ ID NO: 11082 - DNA, 652 bp, Diabrotica virgifera
  SmartBlast Evalue=1E-73; Info=Dunce n=1 Tax=Tribolium castaneum RepID=D6X3D8_TRICA
gatctaaagactatggtagaaacgaaaaaagtagctggttcaggggtacttcttttagataattacacagatagaatacaagttttggaaaatttagtgcactgtgcagatttaagtaatcctaccaaacctttggatctctatagacgttgggtagatctcctcatggaagaatttttccagcaaggagacaaagaaagagaatccaaaatggatatcagtcccatgtgcgataggcattcagctacaatagaaaagacccaagttggtttcatagattatatagtacatcccttatgggaaacttgggcagatctagtgcatcctgacgctcaggatattttggacaccttagaagaaaaccgcgattggtatcaaaacgctataccaccgagcccccctccagaagagactcccgagtcccagcgaccaggcatcagattccaagtcactttagaagaaggcgaaggggaatctgaagaaggtccgatgtgacggaaactagggggcctctgtagaaagctcactgaaaaggtgcagcaatggtggcgtatcaggcagtaagcgcaagtgcaggcgcatgcgcactgactgacgaacgttacaccgcgcaggcgcgggtttgttgtgttttgcaatatatgcttgactg

SEQ ID NO: 11083 - DNA, 654 bp, Diabrotica virgifera
  misc_feature (19)..(19): n is a, c, g, or t
  SmartBlast Evalue=1E-67; Info=Retrovirus-related Pol polyprotein from type-1 retrotransposable element R2 (Fragment) n=1 Tax=Popillia japonica RepID=PO24_POPJA
cggatgcctacattcacgngcctactagagaaggtggtctgggcgtcatgaccatggtcatgcacgttccagccatcttaagaaggagattgactaagttgatgatctcagcgactcagacgacagctgatatactatcactgccgtacatgagtcgtttctgggagaaacttgtcaaatggacttcgaacaacggaggcagttcggcatccatagcacgtgagctgagcgcgaagttggaaatcggctatagcgggaatggtcttgctcagggttcttgccatccagagagctctgcctggatacataatccaccgccctactggtcgggaagagattacgtgaaagcaatccagttgcgaggaaaccttttaccaaccaagggtatcccgtccaatcctccacaagaacggatgtgtaggacgggatgcggtaggtccgagtctctgagccacgtactacagaaatgctcaaaagcacattggcaaagatgtaggagacatgaccagctcgtgacctctctacgaaaatcctgtgaacgtaaagggtggatatgtcaggtagagccgcgtatcagactaggggacgggagtcttagaattcctgacctagtagcttgtctaggtgacagagtgattgttgcggaggtaaccg

SEQ ID NO: 11084 - DNA, 651 bp, Diabrotica virgifera
  SmartBlast Evalue=0.000000002; Info=Thioredoxin binding protein tBP-2/VDUP1 n=1 Tax=Glossina morsitans morsitans RepID=D3TPJ4_ GLOMM
tgatttggaagtttcaatgtccaacaatttattattctaatattctaagttgtcaaaataattaagtggttgaatataattatacttgaactgaaggccaaaaagtggaaatgaatattgatattatattaactgatccagatggtacctacaaaccagatgatataataagaggaacagtaacccttgatctcacatccactcaaaatatccaaaatatactttgcaaatttgttggtaatgaagaaactagttgggctacttcagaaagtttatatgatgaaagaacgaacaccatgagatcaggaatagtacactataaaggagaacacaatataatatcatgtgaagaacaattagctaaagatctaattttgcctatcggacgtcacgactttccttttgccatcacagtgcctaagagaattcccagctcctattcatcaaacaatggatggatcaaatttggtcttgcagttactatacagaatgaccttgtcttgtatgaaaaagagataccaatccatgtaaaagcacccataaattttaatgatatacgaggagaaattcaactggaaccaattgtttatcaaaacgaagaaatcatatggcattgttgttatgcaggtgacccagttacgatggatctga

SEQ ID NO: 11085 - DNA, 653 bp, Diabrotica virgifera
  misc_feature (578)..(580): n is a, c, g, or t
tttgtttttattgtacccacattattattattaccacaaattatcttaagttttttacccttaatagttttttagttgtattttccgaacattttgttgatgattttatgtagtttttatatagatattatataatatagattcattttccctcaaggagtctgaattaacctagagaggataaagttttccaaacgttgacctgactctggaaaaccaggatctgttggaactttttggaccgtttggcgtggaagcttcatcctcctccacgtcccacaataaactccagccgcagcaacctgaagcaaggtatgcctcagcttcaccaactccatccccagtcactgcagccccaagcaaagcctttgcctcagctacagcacctccagccccagcaacctgaagcaaggtctgttgcaattatcaaaaacttggagctcaccgaccaacaaattggagccaaatataaagagacctactcccattttcgggcttctccaattcaataaaatttaaaaaatggaggatgaacgaattgcgagagaggcaaggatagtagaaatcattaaagctcnnnacgagttaaaacaggaattagtaaccttaaaacaagaacaacaaacatttgataaaaattttgatttacttta

SEQ ID NO: 11086 - DNA, 653 bp, Diabrotica virgifera
ggtaccaagatgtgtcacgaattacaatgatagcgcatcgctagtagacgacaataagttaataaagtaaattgatgatggccgctaaaacgaaggtcaatactaatcataataaagttgtaactgcaagtactactacgacaatagtaactgataaatgtagcctatggttagtgatattcactatcataactatcctcattgtggtgatcactggaatatgcgttaaattcttagtggagagctacacggccagtataattttggtctctttaatatgcttggaaatagtcatcggcttttcagtgttagccatcttagcttggagaagaaataaattagctgtgaatcacacagtcgtacgaagaaatggagtattaaaatatcatcctgttcaaccgactgcaccaagagacgaaggatcatgggaatattcaaatagaaccacgttaccagcgtaattttagcttttatgtatgttgtgtaatgcaaagtacaattttatacgctttaaagatgtaaataggtagctagtaatgttcaacaaggctgtttattaaaagttatgaatttttttattattttgaatattttacgaatctgtatttatataaaaatttatcgttacctttatgcaaccagtcttacactag

SEQ ID NO: 11087 - DNA, 653 bp, Diabrotica virgifera
  SmartBlast Evalue=6E-16; Info=Benign gonial cell neoplasm n=2 Tax=Tribolium castaneum RepID=D6X4B1_TRICA
aactttggcttttgcagaacaacatcgttaatattttcattggccataatagcaaaattgtccagacatcttgttgaattaggacaaatggagatattaaagttcttagtatctttctgcttgaaagctttcttcctgatgtgtaaatttctgttgggttctctaccatatgatctggaaatgaaattcatctgtgccgccttaaagtggatgtatttcctttggaaattatttagatctgatggaaatatgtattcactgctctctggatcgtctacaaaagttttaaagatgcggtctatctccatgcgcattattatgggagtattttcgaggcagttagtgtccaaattttgattcctttgagcttttttgctcaaaggcctttggatcttagctggatcgtacacgcctttagatttgcccatttttacgttattattgtttcttatactgcctcaaaccaatgaatattatattccttgctgaaactctgtggttgaaaagttgtaatataaacctacaaacttacaaaagttgtatgactgcaaattttttggaatcgtgaaaaagtttaaaaatcatttaatttattatataaaacaactacattatttttaaattaataaaataattatttacttttttcactg

SEQ ID NO: 11088 - DNA, 652 bp, Diabrotica virgifera
  SmartBlast Evalue=5E-62; Info=Metaxin-2 n=1 Tax=Camponotus floridanus RepID=E2B261_9HYME
ttccatctaaacgtgtttgtagagattcacaacatgtttcaacttcagtatatacatcctctaattttttgtcataccatccaagggcttttagtttcttaataacttgactgcgtttagttctattctgaatgtaattcagtggccaaggaaaaactgatccatttcgaatccatgttacttcattgtaagtttcattatccacccaagaaatatataattctgccatttctaacacactgtgtattaaagacatgtatgccctcatatttgacttttcttcattgtccaacttctccgttaaagtgatacctttgccatttacaaattgtacaatgccttctaattcggctataacaaaacggccagcttttatgaaaggcacctttaaggtaggagacatggcttcagcattgggtttgggttctacagaataatctagttgacacatcttaaggaaagcttgtgttgcgaggcaattagcattatcaggtaataaaatctgttcgacttcataaggctggaataattttacatctttcggccaaggttcttgagcgccgagttcaatgcttattctgtcaactaaagtcattattaaatcaaaatgaaatctactctagtagctcaaacttattaatttatatttaaa

SEQ ID NO: 11089 - DNA, 649 bp, Diabrotica virgifera
  SmartBlast Evalue=2E-66; Info=Short gastrulation n=1 Tax= Tribolium castaneum RepID=Q0ZEL0_TRICA
gtggatgaagttgacactaagcagtaccaccagatccagccatttttagcggaatctgttcccgagctggttcgagaagtgaactgaataattcactggcaagggctacatattttgtaagtttaccactaagggtaaattctgaatcctttgtaccccatattagctgtacatacagcttttcttgtttaagaaatcttctgtattccctgggtaaccttctccatattccacatatcttacgggttgcattctggtacggactgttgaccaagccacctgcatgtgataaagtgaactcttctagaatagttccttggttatccaagatatgtaagaactttggtctagcagctttttcagatatgtaaaatgagtaatgaagattccttctatggaaggtaaacctgccagtagcaactacattatttttgtttaaatctttcggcatcgtgtcgtttcgaagatcgagggaggatctgcctgtgagtaaggctgcaaaatggtttattcttctttcctcctcttcaataacattttgtgggacgatgtcttgtataacgtcgggttcatttttattatcaccaggacatattttacagcacctctccggcaataaaacaggatcttcgcatgtcggctcaggaca

SEQ ID NO: 11090 - DNA, 652 bp, Diabrotica virgifera
gaattttcattgatctttaaaaactgtaacacaaaatttcgatttggagttttggctgcaaatgtgaggcatttgaaatatatgcctaaaaaacgcattacaaacgatctaaaatgtttaaaacagcttctttttaattgaataagtaaatttttcgaaattacacaacttcaactaccataggcgtaaccaggatgatcctaaggggggaggttacaactacctaaaagggggggggttacaactactggaaggtctctgagggctatggtgttaagcgtatagagctgaaagtacatcccaatgggggagttacaacccccaaaaccccctggttacgcctatgcctatacccttcaaataaaatatgtagattctgaagggtaaagttgaatttttaaggggaagacccgggaaacttatgaacataaatgcatcatgaaaacatcagaatcattatcagttcaatattaactatcgaggaattagtaaagtatttctcatgatcatctttcagtgcgtcacagtttttcgatttctttctaacgcattcaattgtatgtgacagaaaaaaaggcacgtcggtgattacatttcgtcggtgacatttttataacatttattctaattattctatttgtcgatagatggc

SEQ ID NO: 11091 - DNA, 627 bp, Diabrotica virgifera
cgatttgacagtttattgtgtaagattttaactctgactctaaaaaatactaattacatgagccaattatggtgagaaatgagaaattaagtaaagtccaacgagatacctaaaagatattcagctcatcgaggtgcttgaggtgtgaaattgttaatattgttcgaggtgtaaagatatataaaaaagggatcatttcataaaacaggtagtgtctcttagacagcttgttagactttatttttgcaccgcgtttaaccggcgaaacgatcgtcagcttcattcagtggcgtatccgcgaagattcagttcagagatatttgatatttggaaggagttgctcttgcgtctagtatatttccatgatttaggggtacatacccctcttctacaaaatatcattgataaaacaagcttttttatttttaaacaagcttattaagtgaatcatcataaaagtacagaatttacaaataaatagcaaaaacaaagtaaaaagttaaataatctacacggtcctctttcatagttacctcaagaccaaaaaaacatttttggatgctttatctgataaaaactatagtactgtaacaaatagaaaccattccaagagttcttaggtaataa

SEQ ID NO: 11092 - DNA, 638 bp, Diabrotica virgifera
  SmartBlast Evalue=3E-48; Info=Endonuclease-reverse transcriptase n=1 Tax=Bombyx mori RepID=D7F170_BOMMO
ttctaggatttttcgccattctgttctgttccttgctttgttcttccaattattaatctcaagtgttttcagatcttgttctatgtatgtaagtttgggtcttccctttgatcttctccctactggtgtctgcctcattatatgctttggtgtttcagtctccaacatccgttcaacatgacccatccagcgcagacgtccgatctttatggatgttatgacgtcgggttcgttgtaggctgcgcatagttcaaaattatatcgtctgcgccatacgccattttcttttatccccttatatatgtgtcgaaggtttttgcgttaaaacgtacgtaataagttctcgtcatcgcttttcgacagtgtccatgtctctgatccatatataaggaccggttttatcagggttttgtatattttgcatttggtttttctcgtgatgttgttagatcttagatgtttaattagcccattatatgttttattagcaatgtgtattcttctcttaacttcttcgctgaagttgttatctgcgtaactagtgaacctagatatgtaaaatttttcacactttcgatgtgatactctcctattgtcagattctgtatgtttctttggtcctgtcgatctgctggatc

SEQ ID NO: 11093 - DNA, 651 bp, Diabrotica virgifera
tgaagaaggactatatgctgttaggggtagcagaactaggcatctaattcgaatgaatcgaatgcaaagacgtacagctctatcgcttagaccagtaagacaaaagtgctatgctgattcactttcaccatcacattttaactctgacagtgaaggtagagtaagaagaagtaccagaaaacaagcagataacatgtcctggctagacgacagtcaaatgcataaagtcggttatccgaacctccatgccggatactcggaggaagacagtcgatacgccgctgatgctcacaataaaatcgaaatttctggtcgaatcacaaggcgaaacaacgatgtaagacttagacacgaaatcaaaacgccgaaatatctttacgattatggtgtagaagatgcttcgaaaagacgtaagaggaatattgaaaaggatgatgaaataaaagaagagatggtagaaaccaggaggacgtcgaacgacaaagaaaataaaaagggagaaaatgttgaaaatagattcatgggaaggttaagaagatcgaaaactatgaattatggcgaagataatgacacagaggaaccccacgaagaagctaaaaaacccgcaatgaaagaagaaccaaccgttaatggaaatattaacggtggatg

SEQ ID NO: 11094 - DNA, 648 bp, Diabrotica virgifera
  SmartBlast Evalue=4E-60; Info=85 kDa calcium-independent phospholipase A2 n=1 Tax=Camponotus floridanus RepID=E2B1P4_ 9HYME
cgaccacccttacgagttacctcatcaccagatcagcagcatatttgggaagtcggtagagcaactggtgcagccccaacatattcagagcgttcggaagatttctggacggcggtctaatagccaacaatccaacactagatgccatggccgaaatccatgagcacaccatggcgcttaaagcgaagaatcgagaaaatgaagcgagtccagtgaacgtggtggtgagtcttggtaccgggtctataccggtgactgaagtgaagagtatcgacgttttcaaaccagaaagcatctgggacagcgctaagttggtgattggtatatcgttccttggaactctgcttgtagaccaggctacttccagcgacggcagagtagtagatagagccagagcgtggtgttcatcaataggcgttccttacttccgattctgcccacagatgtctgaagatgtcgccatggatgagaaggccgacgacaaactagttcgaatgctttgggagaccaaagcctacatgtacgagcagatgagtagtataaaagaactggctgatattataaataggtgttaatcctgttagcaaagacatttttgttatttgtgtttttaattttatgttttcaattatagagaatgttgtagat

SEQ ID NO: 11095 - DNA, 641 bp, Diabrotica virgifera
acacatattagtgatttaaagtattccactatattagtggcttctcatttcgatcattaattcattcgtatcttctaaatcacattcgaagactgctttagtttatttaattttaggagtgctgtttcttgtagttctattatatacatacatcacaattatcaaacgtatgggaggtcttaccaatcccaataaaagaattaattctaaaaataaacaatttttcagtagtattatgattttttttaacagagtgtatcatttttgtttattcttctagttttagtactgctgtgtttgggactctgtccaaccacgaaatttgcgacatacacccgcaggtccatctttcgaccccatacattacattagtatcggtaatcatagcatagctgtatttatgtcattaggcaaggatgccagtagtattattttctttagtataatttaacacaattggtgttgtggttgtgactttttaggatatttgctacctggatttttgatgtcttggatataatcctgttgtttttctgttgaaatctctgcttcatcagttcaagaatttcatttgtattgttgctttttttgtctttgatcattttcgtatgttttattatcatctttaacattttctatat

SEQ ID NO: 11096 - DNA, 651 bp, Diabrotica virgifera
  SmartBlast Evalue=5E-34; Info=Muscle-specific protein 300 n=1 Tax=Tribolium castaneum RepID=D6X2J9_TRICA
tgtcttttggcgtttttccttcaagtcagttaaaaagcctttcgtaggtttcatcaagttgttgcaatttggaggagagtgcgttcgcagacgctggtgagctctccttaaggtatgtcaaaatagtttctgagagtttcttgacctctgcttggtgggttttgataccctcagcttcagcctgtagttcctcgacactcttcttagtttgaacaacgtggtccttgtttctcactacgtagtccagatgtttagctttttcaccaacggtgctaagaagactttcgaagttttgtagtcttccttccaaatacctcccacatttgggataatgctgtaagagtgtctctcctgttttccaacccgacacgagcgacgtccattcctcagttactttgtcactttgagactgaatgttgagtctgttttctggtctgcttgctgaataatctcattgacacgttcgtggagaaggtcgagttccaattgttggttcttatcatcttctttaatacgaatcatgattgatcacttttcgaaattatcgtctgtatcactaacacaaaaaagtcattttcattaagaaaatcagcgggaaattcgaacatatcacaaaaaattgactaggcgaatacacacatacataacgcg

SEQ ID NO: 11097 - DNA, 652 bp, Diabrotica virgifera
  SmartBlast Evalue=6E-80; Info="Inositol-trisphosphate 3-kinase A, putative n=1 Tax=Pediculus humanus corporis RepID=E0VIU1_ PEDHC"
agcagaatcaaaaaatggtatcgatggatccaagttggcaatcaactccaaggatagaactgaagaagacatgtcgttgctcaaatttttggccattaacgctttagatcttagtgcgcctgccagcgatgtcctcttaaaaagccgcagcagtaattggttccaactcagtggtcatcccgatagtttagcacctgcaggaccgggaaccgtctggaagaaacgatcgtctaattccgatgacaccgagcgtatagtatacgaagaagtgtcacaggatcccaatctttgcgatattattccaagatattatagagaagttgaatatcagggcgagaagtttatagaattgcaagatttgctgcatggatttcaggatccttatgtagttgacattaaaatgggcactcgtaccttcctcgaatcggaagtgcaaaaggttacagctcgaggtgatctttatcaaaaaatgatcgctatagatccccatgcacctactcctgaggagcaccaagctaaagccgtcaccaaactgcggtatatgcaatttagagaacttcaatcatctacttgtagccaaggtttccgtttggaagctatgaagtgtcgtggatctcctccggtcaccgatctgaaaaagtgaagtctagag

SEQ ID NO: 11098 - DNA, 645 bp, Diabrotica virgifera
  SmartBlast Evalue=6E-18; Info=Transposase n=1 Tax=Salmo salar RepID=A8C5I4_SALSA
tcgggccaaagaccctcggtatatacaccattgacctcaagcgtgattatccttataatacctttggtaccttaataactattattgctaatacaaaaaggttatttttgacaattaaaaattccacaattaatgttttaataatgggtatgccctcctcttgcattaatagcttctcccatacgattagacatatatctaataaagttcgctattgtttcttacgggatattaaaccactcttcttctattgcgataataagctctgggatcaattttggtatatgaagtctagctcatctcataaacgttatgttggattgagatcttgactgcacgctggccattccatgacctgaaaaccggcttcggtaatgtaatcttgcacgattcttggggtatgcggccttgcattttcctgacaaaaaaaataaattcgtctagaatatagtcaacgtaaggtatcacattcattgctaaaatctcctcgatgtatctaatacctattaaacctcctctcttgggaagacagttacccctacgaataaaaacaaggtcggttcgtgcctccatagaaattgcaccccagatcatgcaggaaccagctccataatgactacgctcttcaatgcagcattctgtaaa

SEQ ID NO: 11099 - DNA, 652 bp, Diabrotica virgifera
  SmartBlast Evalue=5E-34; Info=60S ribosomal protein L7/L12 n=1 Tax=Spodoptera frugiperda RepID=Q95PI6_SPOFR
ttgggttgaaggggaactaaaagtacaaattgatagaatttaatattatcaaaatgcagagtgtaaaattgatacttcgcccattgcaaggatacagacgaatttcaaattgtgctgcattgtgccagtccgtagaggcccagacgaatcccgtagaaaaaatccaaattccaccccctagtaatgtcgaacaaccagtatcacctaaaatagataaactagccacagaaatttccaaacttaacttaattgaagtctcggaactaagttctgtcttgaagaagaggctcaatttacctgacgctcccgtcttcccagtgggaggcttcgccccagttgctgcacctgcagaagaagaggatgccgcccctaaaaaagaaaaatccgtgttcacagtgaaattgatgaaatttgaagaaaaacagaaagtagcgttaatcaaagagattaaggcgttagtagaaggcatgaatttggtacaagcgaaaaagtttgttgaaggtgtgcctgctgtagtcaaagctgatgttcccaaggaggaggctgaaaaattaaaggcagccatagaaaaagttggtggtgttgtagtacttgattagattagttgtataggttagttgtgcagttttataataaaataataaatgttaaa

SEQ ID NO: 11100 - DNA, 646 bp, Diabrotica virgifera
  SmartBlast Evalue=2E-19; Info=Ribonuclease H1 n=1 Tax= Camponotus floridanus RepID=E2A8N3_9HYME
tatccagtttgtcatacaatttatggtaaattgggaatccaaaaatttttactttttttacaccttgtgttcccaatacatttaaagcttgaatgcatgcttgtatttctgctgtattattcgttgctttacctttaacaggctgtgatatatttaatggatgaccatctctaaaccacactccgatacctgctttggcaattggtttcccattattttcgcaagcaccgtctgtaaaaactatcgtatatccatcttcttcagtaaaggatgccttaatttttttagtacttgaacaaccatctaccgaacttacttcatctgatgttacaccagttccagtttttagggaaacggcaagattattaggtccagaaagagttcttcttaaatcagcaatttcttttcttatacttctcacttcggaattcaaccgtttagaacgtgtttcagcaacatccagccggtttattagtaggtctattttactagatccagtaactgccattatgctgtatgataaaagtgatgatttataaataacaggtgctaaaacataattaactagaaaacgaattttaacacaattatatctcatgaacaaaactagtttagaaattattaaacagattcattaagcccaaca

SEQ ID NO: 11101 - DNA, 653 bp, Diabrotica virgifera
  SmartBlast Evalue=5E-16; Info=AT-rich interactive domain- containing protein 4B n=1 Tax=Harpegnathos saltator RepID= E2BZ09_9HYME
tgccattcgcaagtgctcctagtacaagtaataataagagtatgttgttagatcaaaagaaggctgcagaatcaccgcctcacatggaaatacaagaagagagagaaaaccgactggaaaattctactgtgattgataataccccacccacgacaccagagagcagtattagtaatttgtcgcttagaggagatgcaggtagcttctctcccaatatgggcgacaacgaaagttgcaaatcaaatgatattgaaactgagtatttacgacaaaggaatacgtcttcaaaagtatcaccgtatagtgaggaagatactcagatgatgggtgacataaagaagccagcatcttgtaagaaacgaagaaagtctttaagaaattctgaagataccatgcctctaagtggcaaaaagagtaaaaagaataggtccagacataatagtgacagcgatgacacttcagaccattctaatactggtagtgccaaaatatcggcgtataatcgaccaaatcgatctcctcgaccatcacaatacaatttctacgttgaatttgattctagtttggacagcgttcaacggatatcaatacttcagcaaaagttggcggagctgaggaagacgtacgctgatgttaaagcggaacttgcggtt

SEQ ID NO: 11102 - DNA, 649 bp, Diabrotica virgifera
gaataacattagaagaagaaccggaaggttttaagtcgggaagatccttagaatataaaataaacaggaaggagtctgtcatatatcaacaacaccttaaatttctagccaaatcggccatcttgaacgtctgtggatgactcataagtttttgtcaacgaggtagaaggtgtttgtgtattggatcagctgtgtgcataggcgtaccatctggtaaagctcctgtatatgcaatcaattaactgaagttattagtataataaaatgttatttaactgacttttcaacaaaatattatattaatacgtactttctcttgatctatagctgtttgtttaacatcaaagatgtaataaaatcgttaagaatttcttttcttcccactttcaaaggtacgtcactggagatagaaagcaaatctgacagctgatcgccatttgcaacctccttcctggctcgaagtcatttcgcattgtactccttcctggtttattttatattctaagagcagacctactaaggtgtaaattagagctggagggtcaaataatagaacaagtcatggagtttaaatatctaggcatcacactatctagctacggaaagctcgaaacagaagtgaaagaacaggtgaataaagcaaacagag

SEQ ID NO: 11103 - DNA, 648 bp, Diabrotica virgifera
  SmartBlast Evalue=9E-71; Info=Ubiquitin conjugation factor E4 B n=2 Tax=Formicidae RepID=E2AX73_9HYME
ttcatttcatgatggcaaatcaagacagtagagaccaatgtctgaattatatcgctcagattttaaagtacaatgataaaagatctcaattacaaatggaagaaagaactttggctggggatggttttatgttgaatctattgagcgtgttacaattcctgtcagttaaaataaagctagataaaatggatttcatgtacccattccatcctgaagcccttgtgtctatctcgaatgatacaagactgaaattcacttctcaggaagttgctgattggttgcaggagttcggcaaaacccacgaacaccaaacccccaatttctcaacaatatgttggttcctaacgttgcactgccaccacttgtcactgatgcctgcactgcagaaataccagcgacgattaagggccatcaaagatcttcaaaagttactcgatgagactgtggcagcggaggcccagtggcggaacacgccgtttgccaatagaaataagcagtttatcaagaggtggaaacagcagttgaaaaaactgaacaaatctaaaatatgtgccgatgctggaatattagacaaaacctaattcgacgatcgttagtattttatacgtcagtttccgagtatttgttaagtctgatgacgaattcgcc

SEQ ID NO: 11104 - DNA, 645 bp, Diabrotica virgifera
tgcgaaaatacacattttcgaggcgtaaaaactcatatttaaattattatatttaaagttggcaagtatttaaagtgaagtttaaacattcatttttaaaattctgagtagtaattgggtctaacttcaatttagaccgttgttttttaattgttaattatgcgcgtccatccgattttaatgccaatgcggcaggctctatttcaataatctcctattttgccctgtaattttttaggttttttggctccttctaaacaaaaaagatatcttctcatttttctgagaagttaacagttttcgagttacaagggatttaaaatctgaaaattgcgagaatacccatcgcttgctgagaacattagtgacgtaacttcaaaaacgtagtttgtagcgccgtaactgtatcatgtatggatattgcacggataatataattatgtttaaatgtaataccgcaacatgttgcgagttctaggggtcttttacagaaacgttttcacaatattccgaagtatgggagagttgtagaaggaagtaataggacaaagaatttatgtttttatttaactataaacaaattaaggagaagagcatgcaaaatatttttatgaatacccttaatattggaaatcgatttcttcg

SEQ ID NO: 11105 - DNA, 647 bp, Diabrotica virgifera
tccctcttttcttaccaatctttttaggggatttggcttctggagtacactcaatataaaaattttctttatcaatgcccctaaaaatgtttttctttagacagtctattttgtctttttttgtgacatctttctttctttttgatataagtgtagggctgtcttctatagaagtatcatcatctgattttgagagatctataacggaagtgggagatagttgttccacaggttttaaagactggtttataaagatatcagggctctccaaatcacttagtactggtctatggtcaatctcattgttaggcaagtccaccttaagttccaattttggactattgtgaattgattgtaaaattggttggcctggtgaagtaatttgttcttttaatttggtattgtcttttaattgtctttttaatcgatcaaattgcagctctaatactcgagaacattttggaattctgtttttaaagctgtaagcaacatagccgcattttgtaattcttgtttctcattattatatgagtgtaaaacattatcgtcaaagagtcttttccattgaatataagcctctgcttccattatttaaatcatattaattaaactctataaacaaagaataaagatactttcttcaaacg

SEQ ID NO: 11106 - DNA, 650 bp, Diabrotica virgifera
atgagaaggatcctaagaaaaatcgctgtaaacgacagagacgttggtgatattagtactttagctgatagttctgtggtggaagtcttattcgcttcaagacctcaagaagcttaattttagattaaacgtaggtacctacttagcatataataaataagtgtacataatctagtctcgtatacaagtttgttaccattctgtcttggactattctcatgtaaataaacaaactaactaccagagatcggcaaaactgggttttaactgtatttgttaacgtaagtttatgcatactcattgtaaactagttttgtcttgtattaacgaggaaaattgaaaaaagcgacctataataaaatttactggatttgttataataaaaaattgttgaaattctcttagttcgatgtgaactgaaattctgaattaaaatgaaccaagaaaaatggaagtgttgtaagggaatgttctaagatgtttctacaggaaacattcgttagaataaattaagaagcaaattaaaacgtaccaaacgttctttaagcagaattaaaactttatataggtacaggacgggaatttcaaaataaaacttgtaggatttttgaatcgccacacttcgtcaaatgagacaggtgacttgagat

SEQ ID NO: 11107 - DNA, 651 bp, Diabrotica virgifera
aatcgtcctcgtccacacatcaatagctatgaagtatctatattatgtatatttcttttgcacactttcctgttatgtatcagcagaagacgtcctactaggaactgatctttgtgaatgtaatgaatgcctgaaaccaatccttgaccaacttgggggcagcaacgttacaatccagaagatcgaagctctcatacaaagattaagaaaagatgtcgtaactattacagtaatactcaacggaacctgtgaaaaaatcgaaggtattcaagaagacatcaagaatttagacgctgtcctcgacgttaacgttgaactggtcaaccaagagaatctaatcatccacgatatcgatgtcagagttagggagctcggtcttgaaggacaagaactggacgatatgatcgactctaacaacggcactattaacgatatcgaaacaattgtggacgaattacaaacttgcgcatgtgcagttacaacaccggggggcagtggaactcctactactaccccatattatttcaaccatacgtaaaacgtaaaaactaaagcacgtaaaattctaaatgttatttccaccattaaacacctttaaagcacccatgtaacatgcattattaataataaaaacttattaataaaaagaaa

SEQ ID NO: 11108 - DNA, 649 bp, Diabrotica virgifera
  SmartBlast Evalue=2E-46; Info="Mitochondrial ribosomal protein, L51, putative n=1 Tax=Aedes aegypti RepID=Q16TN5_AEDAE"
gttattcagagacattattgatttcgttaataatttagcatttttatagaaattataggtgaaaatatatctaatgtgagtattttacatctatttatcaaagtgattagttcaaattaaactaaaaatacgacaaagaaactatgtcacttatatccagaagtattagtggattttggaattctgtaaataatattcaggcatactctgctcaagtaacatgcctaaggtttagataccatgctgacaaagttgctaagggtcgtgttattagacgatatggttatgatgaccaaatgcttcaaaaaggtttgctaccgagagaaacagatggagaacgggtattgacaatgccaatttacaaacctaaagactcatggtcagaaaaaagagcattgtttggccagaatgattatgtagatattttaggaaacgaaaagctgcatcctaccaaaattttgtataacatgccaagatggttaagaggtgtggggggtcacgaatataaagttatgctacgaaagagaaactctttggttggcacatcatatcctcttgctagaccaacaaaatggtatcaattagataaacgaattcgatatttatacaaatatttaaataagaaaacaaaaactggccattataatta

SEQ ID NO: 11109 - DNA, 648 bp, Diabrotica virgifera
  SmartBlast Evalue=1E-55; Info=RB1-inducible coiled-coil protein 1 n=1 Tax=Camponotus floridanus RepID=E2AF03_9HYME
ccctgagtatatccctatccaaatcactagctaatcctacatcactaacagcctgtatcaatttctcttccacagccttgatcacttcttcgtttcccatcttatcatcctgtatttcttcttcttttcgtgcggtcaaagaacgcagaaggaagaaattcgtcaggacacttgtatcgggaacgttcaaattttctgccatatctggcaaatcctgtttcaacttatctatatcttcctgggtaagtttgggtaatccggtatcgaacattgggggtgcctgcgttgcaaaatctggaggcaagtcatccattccaggaaacaaggaacttaaaaagtgcccttggaaccgagattggaactcttttcttcgaactatttcttcattacgaatagttagaagatggcaagctaattccgaagcccacaataaaaagtgttgagaaaacgttcttctcctaaccacttcagcaacagcacacaaatatgtggctggagctttatgtacctgttcaagtattatcaaatgcttcgttaacctcttcaaactttcattataaataactaatttgtatctgtttctaatatatgatcctctatgtacatcacccacttaagcctatggtagagattaatactcagttcttc

SEQ ID NO: 11110 - DNA, 650 bp, Diabrotica virgifera
gaagcaaagtgaagataatataatatacttttatgttgcctttattctaactttctttatgtttattttttatattacttgtagctatttattagtataaaactacaaacatgtattattaaacagttatattttgtaacgatattcctaccttaagagagatcagatgtaaaaatctacaatgttacttaaactcttagaaaacaaatattgcatttttggcttaactgctctagctataataccatggaagatattttacagcaaatataaatattatcaaaatcagtatgaagagaagttgttattccaaaataggcataattgtgttgttacttacacagctacaaaaggaattgctggatggcccccacataatgatagaatactacctgacattacatccaaagacggtctgtgtgctctgtatgacccgtttatatattttattaaaacttcagaaaagagtatagacgtagcttacatgttcattttgattcaagaaattcttgatgcactagtagaagctcatgaacgcggagttaaagttcgtatattattaaattttgaacataacaagactgatactggacctatccataaattaatcagtaaaggaattaaggttcagctttatatgtaccccaaac

SEQ ID NO: 11111 - DNA, 642 bp, Diabrotica virgifera
caaggatccacgtctcaactgtatgagaaaagtcgaccagacaaaacgtatgtgctgtttcacattataagaatttaaacgtgagagggttagaacgcacgacgacattccaatggtggctcatataatcatatggagcctttctcactagacggtggttggaacgttcggtgaagtcgccgtgtttatgccgtcccttgctacaacaacagacggcagccgtgccgtctttacgcacccagtagcataggggacttaatgcatcctttcatatgatactgtcgttcagtcgcacgaaggtagtttctttggctgtttggtacattattttcatttacactttgtgctgtttgaagtaggtgcatatattttatattatgatgtctcagattgatagtgaaatattaataaaattaattgaagcgagaccggttctttgggacaaaacaatagaaatatgtaaagatagaaacttgacgagaaatgcttggaatggtgtatgccgtgcacttaacagtgaatttgacgaattaggtgataaagaaaaaaaaacacataataaactttatttacatagttgcaattaacgtttagtatagagggtgctccatcaatatgtgtgaatataaaaatatataaatc

SEQ ID NO: 11112 - DNA, 650 bp, Diabrotica virgifera
  SmartBlast Evalue=2E-32; Info=Meiotically up-regulated gene 71 protein n=1 Tax=Camponotus floridanus RepID=E2AII7_9HYME
ctctcagcttactacagccccacctcttagccatgcacgaaaaatacgggttaaacgtgtgtggtgaagggggagaatacgaaactttgactgtggattgtcccttgtttaaaagtagaatagtgattgaggaatcggatattgtgattcattctaacgaccccatagcgcctgtaggttatctagtatttaagaaaatgtcacttgagctgaaactacctgctttagaccttcaaagtcgcttagaaggtttgcctttaaaagacagcgatggatatgtgaccgatcaagaagaagaagaatttaaacctatcgataatgatgcggaggacgaaacggtcctaaattctggctccaccgagtgcagcagttactcctccgaggaatttctacaagaagtgtcttccgtctacaacagagagggatggttgttgataggcggcgtccaaggaacttcgagtaatgcgttcgaagccatggcggaggcgatgagtatcttaaagtctgaactgttgaagcatgaccatacaataagggacgtatgttctgttactatgtacatcggagatatgtcggagtatgcagcactgaacaaattgtatgtggatacattcacctttacaaatccaccaagtagagcctgtgtccaa

SEQ ID NO: 11113 - DNA, 653 bp, Diabrotica virgifera
gatctgtcaaactcttccaatatgtctggcggctggcatgaatacattgaaggcatatgatagtatagtgttattttagtattttaaagtaattttcgtattttatgtccgtgtaagtattgctaaatacttctgtgacatagtaaaaaatattgcttacgtcaataatctttaataattagttacgtttaactaagtaatttggaagattgaagaaagctaggttaacaaattttatattttataagtttaataaaaaataatattgagcatccctaaaacagattttaggtaaaatcatcggggtaatatatattttattattttaggtacctagtaataccacattgtatcttaaatttgaaattttaatttaaataaagtatccaataaaatcgcttgtgtgcagtgttgccagagaaatttttgtaaatgcaccggaatgactggaatagtgacacaaagtactaaaccaacacattttgtacaaaaacttaaaaaacgtcgtttaatattatttgaagcaaatttcttatgtcacaaaattttaggtttttactttaggagactttagtatcaaaagtttggttgttaattgtatcaaattggtacaattgtaacagctctggcaacgctgaattgcctgccatacg

SEQ ID NO: 11114 - DNA, 648 bp, Diabrotica virgifera
  SmartBlast Evalue=3E-61; Info=Beta-glucuronidase n=1 Tax= Camponotus floridanus RepID=E2AGJ7_9HYME
gccaacgaacccagaactgctgcgccagcaagccaaaaactatttcaaggaagtaattgaacacataaaatccttggacaaatctagaccgaccactatcgtggaggcccaaaattttgcagtagttgaatcctcaaaatttgttgatatcatcagcttcaacagatacaacggttggtaccaatatgaaggagatattgacgtggtttcgtactacgtcataaaagaggcacaagcttggcgtgataggtttaagaagcctgtaattatgcaggaatacggagctgataccatggaaggtcttcatttcttgcctgcgtatatttggtctgaagaataccaaatgaatgtaatgtcagaacactttaaggcattcgattatttaagaagccagggattcttcgtaggggagtttatatggaatttcgctgattttaagacagctcaaacttacacgagagtgggaggtaacaaaaaaggaattttcaccagaaatcgacaaccaaaagcgagcgcattccatttaaggcgaagatattggggactagctaaagaatataaccccaatgtaactttaccaaatgatctgaacgcaccctacactatccgagaagcccctcctcatactgaactgtgatttaattatac

SEQ ID NO: 11115 - DNA, 650 bp, Diabrotica virgifera
ttcttctacatttttttattaatgaaatctctgtctattgcctttcctcctcatggagtattgggcgctatttagtttcttagccgaaagtgaaagatggctgatgggctggattagcacaaattattaattaacaaaatttagaataacgaaaatacacttccattattcaaggttatttatcttttataaagaagtctgtaatagtaatagattatttcagacattaataatgagtggtagtaatgtttatgttgtatgttttcgacaatgaatgtcaaaatatcctcgagctaattgaatcgactataatatcctctctatcattacatacgtaactttgtttataaaaaaggtatctataagaagaataatgagaattccgattaaaaatggacataaatatcccaacttttctctaaaatgtctaaaagtggttctaatttagtttaaatttattaaaatttagcgtacaccgttttattatatacatatatggttgcatgctgctcttgcataacttcgaggaggtaaggttaattaataactacaataaagaaaaactaaatcaattaaatttacaatgttttatattcaaatgaagcaaacctttcagtattttaaagagaaaagttaaaataaataagaaa

SEQ ID NO: 11116 - DNA, 651 bp, Diabrotica virgifera
  SmartBlast Evalue=2E-29; Info=Transposable element Tc3 transposase (Fragment) n=2 Tax=Camponotus floridanus RepID= E2AKN2_9HYME
attgtgttgggggaacgaacatcaatggggaagagttcttttcacatatgaaacgaggatacaattatggaagccagatggacgtgatcgagtatacagagggtctggggaacgtttcgtagaatgtaatcttgtataaaatgtagctttggtggcggttccacattttattaaatatgctatgggatggcattagttgggagagtcgtatggagcttattgaggtgaatattccaatgaatgctgattggtacatacggaacatccttgaagagcatgtttttccttaagccagcttcatggggtatgataactttgtgctaatgcatgaaaatgcccgtgcacataccgcaacaacagtcatacaatatcttgaggatgttggggttgagactctagactggccaccaatgagccttgatgcaaatcccatagaacatatatgggacatcctaaaaagacgtatatgagcaagaaatccagctccaaactcaattgcagaattaagaattgctgcacaggaagaattgaatcgacttccgcaagaaaccatccaagatattctgcagagcatgcctagaaggatgcaggcaatcgttagagctagaggaggaaatactaaattagaggagctactaaagtgttacaatg

SEQ ID NO: 11117 - DNA, 645 bp, Diabrotica virgifera
tgcctctcttcctttttcctatcggactcaactctgttattcggtttatccaccgattttggtctgctcttctgacatgtccgtaccaggttaatctcttctgttcgatgtagtctattatgtctgagttcactcccattcttctcttaatctctatgttatttattctatctctccttgttactctgcagcttcttcttaggaattccatctctgtcgctcctattttatttttggttttcttatttattgtatttgttttcttattaaatatattttatacgagtataatctcacgtgcttttttgatgagtgtgcgtctttttgttttgaccgtttcaactacttatcacgatttgaacatatccaggaacatttaatttctagaatcggttgtttgtgtgaaccaactcttactaaatgtcattgggaagagtatactttatctagttgaagtctacttttattagtaaatgttgaataaaagtctttattttatattattatgatcaacttttactaaaatcagccatttcagttgactctaattaggaagagtcatctccaactggataatcaacttaaactgtaacatattatacattgtaaatcataatttcaaagtgctccttgtaacattcaacg

SEQ ID NO: 11118 - DNA, 647 bp, Diabrotica virgifera
  SmartBlast Evalue=2E-63; Info=vacuolar protein sorting 45 n=1 Tax=Nasonia vitripennis RepID=UPI0001A46D5D
gctcagtttgcttgcaaaatgaaaacttaatacaacaaaattgtaaacagtttaatttagtgtaaaacggttttaataagcttccaaaatgaacgtcatatcggcaattaaggcctatatagtcaaaatgaccagcgagagcgaaccgggcatgaaagtgctgctaatggacaaagacacaacaagtgttatcagtatggtctatgggcaatcagaaattcaacaaaaagaggtatttttactagagcgaatagactctcccagcttcgtaaactcgacaggtcttcgttacttgaagtgcttagcctttctgagaccgactcaacagaatatcagtgctctatgtgcagaacttcgaaaccctaagtatggtgcttactatgtctactttagtaatataatagctaaagctgatatcaaaattcttgccgagcatgacgaacacgaggtggttaaagaagtccaagagctttacatggattatttggctgtcaatccacatctgttttcacttggtttaaacgctgctttgacttcactcagttggaatccaagtgctttacaaataagcgtccaaggcattatttctgtattactgtctcttaagaaatgtccagtgattaggtatcaagcaaactcgaatgttt

SEQ ID NO: 11119 - DNA, 650 bp, Diabrotica virgifera
  SmartBlast Evalue=2E-39; Info=Non-lysosomal glucosylceramidase n=1 Tax=Culex quinquefasciatus RepID=B0WC06_CULQU
ggtgaagaaccattaacccttatcaatgcttacccaatccatgatgttagtcattggagagatctgaattccaaatttattctacaaacgtttagagacgcatacggttcttcacctgacaagccggacttgcaatatttggaagatatgtactctacgtgttatactattattcaaaatgtattaagaacgaaataaatgaaaatggtctgattgaaaacggcgggataccggaccaaacgtatgactcttggacgatgtcaggtgtcagtgcctattgtggtggattatggctgtgtgctctcaaaggaatgtctgtaatggccacccaacttggaaaggaaaaggacgcaaaattattccaaagtatattaagtaaagcccaaccagctttcgaaaaaaaaattgtggaatggaaaatattacaattttgattgttccgaaagtcaatcgaagtcggtaatggcggatcagctttgtggtcattggtatttaggttgttctggattgaaagcatatgatgtttacccaaaggataacgttaaaacagctttgaaaactatatataagaacaatgttcaactcttctgtgatggaaatatgggtgctgtcaatggtacaatagacggaaaagtagatgggtcttcggt

SEQ ID NO: 11120 - DNA, 649 bp, Diabrotica virgifera
accttcaacccaactccaactttgataagttgtgcgatgcaccgtttacacacaatgataagttgcaacaactcgattgaccttgataagttgtttgatttatcgctgtgtttaaacgatccttaaggttgaatttaatagtcacataaatatcactaggacactatcagaattccaatcgggatttaattgttttaatggggatcttggatagacgacaagatacaaaaacctttacagccttagtgaacacagtacggtgttctgtgttgaagtttttgcactattagtctaaaagtctaaaccgatacgttacgaagtttaaagggaatagctaagagaggtctaaagctaaagggaatagcacatagctaagagaattattaatatttaagctgaaagccataatattattatggcggtaaaaattgatcaagtaaagtaaatttaccaaatcaaatctggtgagtaattgcaagaccctccataacaggctggtagaaggcaacaatatgtcttaagatggttgctggtgcatgagggggtgcaagggaaagaacaaaaagactagttaacaaaacgaggctggagaaaaacctttatgggcccaaagccgctctgtagagtgactaaagacgctgcaagatat

SEQ ID NO: 11121 - DNA, 650 bp, Diabrotica virgifera
  SmartBlast Evalue=8E-29; Info=Vitellogenin 2 (Fragment) n=1 Tax= Nicrophorus orbicollis RepID=Q5IH20_NICOR
atttgtggacagtttaacgatcaagactctgaagatttcttaacatcagaaacctgcattgcccgcaaaccacacaagtttgtcaagagcttcgaagttgaaggtgatgaaggaaagcaagtcagaaaagaatttgcaggaagcagcagccagtgcgttgaaatgcaagttcctttgtacattaacgttattactgacgaaaacgctagacgcaattcccaagacagatctagcaagaattcccaatattactccggcaagtcttcttatagaggaagttctagagtaagttctagaggaagttctagagactcctctgaaaaaggaagcgaagaagataacgattgtttgttccatcaaaccaggtacgtcttccaaggaggaaaaatttgcttcagtaccaaacctctgccttcatgcagaagccattgccaacctcgtgatcaaagaaagaagtctgtaggtgtacactgtatccaaaagagcgacgtagccatgttgtggaagaagcaagtcgacaaaggaaattctcctgacttcagtcagaagaaggaacacacaactttgaaattcgaagtacctgaaagttgttccgcttaaattaattgactagtgcgaactgtatttttgaatagtttgtaagagcatcc

SEQ ID NO: 11122 - DNA, 648 bp, Diabrotica virgifera
  SmartBlast Evalue=1E-39; Info=Rab proteins geranylgeranyltransferase component A 2 n=2 Tax=Formicidae RepID=E1ZY69_9HYME
tccatcatttgtatctggcagcaaagtacatagaccaaagaattgaaggcttttgctcattttcattttccatgtttgtttcttcattttgaccaaacaagctatctataacactgctgaaatcttcttgtggagtagtgccttgtttggctaataaatgcactagatataaaggttttagacaagtacctgtgagacatcctagctcaattatcttcacaaacggttttccattttctggaggataaaatgctagagtcaagtgttctttttcactatctaatatggatttatcagttattaacacacatctggaaatatactgtcgattgtttgatttaagaaactgttttggtactttttctatactcatgacaagatgctctgcttgaatgttttgagacctaactgttattgatttaaatttattatcagacacagtaaaaccttgtatattttgtcctagagcaaacacgccaccaaacacagcactcagtctacaaaaagcttgaggtatttctccactaccatacattgagtataaaaacggagtgtgcccaaaacgtcctaaactatctaaaaatcttttcacatttacaacacctacatcacattgcgtatcatcagagctcattgaaataccataaa

SEQ ID NO: 11123 - DNA, 651 bp, Diabrotica virgifera
  SmartBlast Evalue=2E-55; Info=Tyrosine-protein kinase transmembrane receptor Ror2 n=1 Tax=Harpegnathos saltator RepID= E2B3S0_9HYME
cgtgtgtgtgaggtgactgtgaatcccatctttggcaaggaattccatctttagttaaatttacctttccttgataaaacctaccccttccttttacacaatcgtaagttatttcatctaattttaattcagttaggcctgcataagaacattctaccatatctttattaaatttaggaaaacctgcacaatcaggcagacggaaatggcctctggatttgacaaagatgccttgttcttttttgtcctctataagagcccagtctttgtaacaaaatagttgttttacggctacacagtcttcgtaacaaagtggaagaggtttggagatgttgcagtctggaaatgcataaaaacaaaagcaacttttctgccgctgaacgacatggttcttcaagtggcactattatttcatcccatagagctgtagtgattaattcgttctcatatcctccgctgttattgtaccatacctgttttgtacttaaaatgtagtttttacagatattaccatggtatgatgcacagtatccttctgataaggtgtgtgttgatttaatgaaaaataataacgcaaatagtcgatacatagttgtagttcaaaactaacttattgttatatcatttttaggcctatttgtatcatttttc

SEQ ID NO: 11124 - DNA, 650 bp, Diabrotica virgifera
  SmartBlast Evalue=8E-58; Info=THO complex subunit 2 (Tho2) n=1 Tax=Aedes aegypti RepID=Q17KE9_AEDAE
tcctatcagtcgacctactggtttgacgttttctttgctgactctcttcataatgttcttgatctgcttttcggagtccgctctttttctcaataactcggggtataaatagtaagtctcgttcttccatctggagtacaatccatacctgatatgatacggatagagcttgataagtgtccaaatgtcctcggctatgcagcaattgcactccaaatacgacaacgccggtaatatcgtaacatccagcaacgacagaatatcataatacaacgacctttccactggcgccaacgatttagcgttgtcgatgccacaggcagctagcgcagctttagacagtctcacgatcttacacaacaggatagtatcgtaacgcaaagatgctccgagcatgagtagcattggaatggccatgtcggtcagttcgaggaattcgtgtgcttgtggtggtattacgctgcctgtgaactttcctacgggttttctgggtattttggaacagataatgccgaacttgctatatagaggctcgattatataatgaaccagtccacagagagctgtagcaataggttcataattaactgcgtatcgatctggtaatcgtttgatgagaatttgtgcattttcccaatcgccaattagca

SEQ ID NO: 11125 - DNA, 649 bp, Diabrotica virgifera
  SmartBlast Evalue=2E-25; Info="Rolling pebbles, putative n=1 Tax=Pediculus humanus corporis RepID=E0W098_PEDHC"
ggagcgaaaggattaaaagtccattgttgagtaggggtgttaggcaagaaccagctctatcagacgatgaaagcgttcaacctaaccgccatcaagaaaacctccgaaaacgatctctatatgcgtcttggtctccttctcggtgattctgccaaacgatcgaagaagcagcaggaaataaaccatgaatcctgctcatcgttggctagttacgaggcttcgacgatgttatcaacaaatactagccctgtctccacattaaccgggagttcagaagaccatcaccggactaatcctagttcagatagtgtcgcatcgttgatgtcactctcaatgtccggacagagtagcaattccagtcccctgagtaggagacacagtgttaccactcagcaacaaaaccacgcagaaagtataaggtatagaagacctggcgctagaataacaaaagccgaaatggtcaaagcctcggcagatccgaggatacgaattaggcaatacggtgcacctcaactaacttttaagcccttatttttcgaagtacctcttcaagaacccaatcctctcttcatcggcagacattggttgattaaagaaatagaagatgttattaattcttccagtcccggtgttctgctgacaggtaatc

SEQ ID NO: 11126 - DNA, 646 bp, Diabrotica virgifera
cataaaaagtttactcataaaaggtgtgacctgaccacagattcttaaaatcgaagtccttcattcacttaaattaatgacagcttgcagttcttatttttctaaatgactacgtgtattcgtaatgtcatagaatacatggcctgacttcctagattttccataagatatagcaaattattgataacggaaacatactaaaagaagtacctcaacaaaaaagggctctgatcactacatctgacatttcataatttttctatctaaaatctacatatatgttgcagtatctgttattttttagataacgtattttatttaaacaaaaattaattaaataatttattatactattttactttaatgtgaatttttttatactagttggttctattaattaaacatgattcagtattagtttttgggattcttgacaatatcggcaaaattgtaggtaaactgatgatgaactcgtatctaaaatcccataaggctctcatttcatcaaaatgcaacacataacttaaatttgaatcggaaaaataactttgtttattctgtaagataatattagtcacttgtgccattaataaaaattaatttattgtaaacgtcaatgacagcttaattaattgtgaaatcaggg

SEQ ID NO: 11127 - DNA, 647 bp, Diabrotica virgifera
gtggaaaagctgcacacattttgtgctgaagcaagttttgaggttctttaattaggatgttcttctttctggaccttgctttccaaatattttttcttgcaggatggcttgtaggagagcatatctggattaattttgcatatcgatcatagtaaaaatttatttattttcttattttcatcattattctttaatttttttccagaacgttaacacaacgtttccaatgtctcttcttccactttggaagaagagacattgcttcaacaaaaagcaatgacaagtatttcgttcaaataatgaaccacaaaccatacaatagatttcgtaatttacaaaatatttcttcttaattcactttcttctagttttttgacaaactaaattgttctttatttgaggttcccaccatttactagataagtttgctaaaattcaagatttagctgttttctagaacttgagctaaaagtcccagttatcaacatagcagaactggcaaagtaaggctctagaatcttcgagcaaaacctttggctgcatcaggatagatgttgttagaaacgaagttcaaaagtggctgaaagaaaaataataccaacaaatggagagctctacggatgcacactatatcaagaatattgtaa

SEQ ID NO: 11128 - DNA, 650 bp, Diabrotica virgifera
agtagatgcatcaagtggaagctgtctgaatctaatcactaatcagttctgtggcttccccaaagcaagaagataaataaaattattgtgcgagatattacttaagtaggtatagtaaatctgtgaaaaagactcgccaattataatcatgatttttaatgagaaagaaattttgggtttgtgccacagtttggctgaggaattagagcttgaagctaaaaaaacaattgtaggtataactcctcatttattttttggactagttacgggaggatcttccggatacgtatggagctctatgttaaaaggcattttaataggagtatgcgtcacattcgtaacaacttgttgcgaaagaataatacaaagctgcagtaaaaaatcagtgataaatgttttaagcaacgatctaaacattagtgccaaacacaaattagtagatcagatagatgacatcgttacccctcatgtacgtagaaaacctaatagtctcaaaaaatttgttaaatctaacaccgcattaaaggataaagtaattgagggattggagcactttcttttgaaagagcttgaattaattattataaaaaagtagcttcgcttttaaactttgtaaaaaaattctgttgtattaaagaagtgatacagat

SEQ ID NO: 11129 - DNA, 641 bp, Diabrotica virgifera
cccacagacccaacatgcttccagggagataacatcccaacacacttagacattgcaattcttcaccatgtgggactacaacacgagataataacggcaaacgaaggagactccacacataacgtaatagttatgacacttggggcaatagatttgaaccaagtagaaccacgtaaaaagaagataataaattggcaaaacttcagaagagagatgagtgagaacataggagatatacccacaataaataacataaatgaattggacgaaagcataataaaactagaacagacaatacaaaatgcaatggaagttagcaccagaaccgaaagcatagctacacaaagaggaagattcagagaaatatctattcgaattaaaagaattgataagagaaaagaacagaagaagaagaagagcacaacgaactcgaaacagagaagacaaaagaattgcaaatgaattagacagggaggtcaaaaaacagttacaagagcaccgaagcgaatgctgggaccaatatatccaaagcttaaatccgaataaatctgcattctggaaagtatcagcagtacttagaaacgatagaaaaccgattccacctctacacggagaaacaggaatcgtatatacagacgaag

SEQ ID NO: 11130 - DNA, 649 bp, Diabrotica virgifera
aaatcgtggtgcgattcgaatctcctgttatttaacgtttctaaaaccaaagtcctaccttaaaacagtatgatgcaacctttagtacttaataacaacagtctagaggtagttgaatcggtgaagttcttagggattattgtggataagtctctaaaatggaacttgcacattgatgccttacacaaaaaattaagttctgcttgttttgcgctaagatcagttgctacggaaatgaatttgtcaacatctaggaccgtttattatgccctttttgagtctcatcttcggtacgcccttccattctggggtacgtgttgtgcgactcaatttgagcgtatttttaaactacaaaagagagctcttcgttactccctgagactcaatagcagagttcattgccaagaattctttaaaaaatttaaaatattaactcttccttcttttgtttgtttttgaatccgtttgtttaatccgcaaacatgcatcagaaggtccagagagacccactcacaactatccccttagaaacgtggagcatagtctttatctgccaaccccacggtctgagctggttaagtgctctatactatacaattcgagaaaaatgcacaatcacctgccatctaacatcaaatctattacagca

SEQ ID NO: 11131 - DNA, 639 bp, Diabrotica virgifera
agacaagccctgtcgagatcacatttcgacatcgtaattggtcttgacgcttgcgcattggcattattattgttgttttgacgtttatttgttaaattaattagcgattttagtccgtgttggtatttatttagataattgtatatttaattttatataccaataattatacagcatcaaggttaatagaaatcattaaacatttttcttcgtacagaacacttatttcactttgcagtgcggtgttgccatcctcctcctgagcgtcaaatataagttggcgttttcgatttacactgattacgatgtgagttacggaaaaacacgaaaacgaggcgatatatatccaacattctgatttcaggtaattacgattcgacttggtcatttctattcgatttgttaaaagttatagagtagggctgaatgtatattatagtatataagttggtaacatttgaacagctgatcagtgatatgcaatgaaagttgatgaaaaattctatatttaattcttgatattatgtatataatcttgtttttaatcaacgtagtttaatgaaaagcaaatataagcaaattttatcggtttaaattaagtcagatgttacttaaatttctatgtatgtattttttcct

SEQ ID NO: 11132 - DNA, 648 bp, Diabrotica virgifera
aatatttaatgaaaaacttcatataatagtataaaaagcacgggatggaaacatatacatttggacattttgtcttatatacaaaaatataagagaaacatacattataatggatgatgttctcaaggaacttaacctacatataatttaataaaaaaacaatcttaaaagtaataaaaaacaacaaacatcagtcttcaagtatccagaattgttgggtggacaaaagtatcaacggtaacttgtgtggcagtgagatgttaatctgtgtatttgtcgaaacaagatcatagtcttttacggcggcaactggaagtttgtcgtccaccgttgcctcggtggggccacatccttaattttagtatagtcctgtggggtctaggcccttgcctcccgttttctgcatcgttaaaagtctttttttcgttaactgtcacacactagtactgtccggtaggatctaacttgtctccgtccatgattgcgaaaatgtcgtgtttaaatttacgaaaaatcagaaagaacttgttaaaaatggcacaaaatctctcaatatagcccagtggggtcaagacctccgaacatgctgctgcgagatgaggatgagtttggcactgtgcgcggctagagaacgacgtgagagcgaat

SEQ ID NO: 11133 - DNA, 649 bp, Diabrotica virgifera
  SmartBlast Evalue=2E-28; Info="Guanine nucleotide-binding protein gamma-1 subunit, putative n=1 Tax=Pediculus humanus corporis RepID=E0VMT0_PEDHC"
ctgccttcgaatacaactggctcactaagtgttgattgaaaaattgagtacaaagataatttacaattttatccagttgcaaaaaaatattaaaaaaatacttacttgagtatttaacaagcgctgtttggttaatataagcacaagtttgctaacagtaacagtaattatttaccctacaacaccaaaattccactttcctgaggatgatcatttctaagcttgacagtgataaaatagctaaaatgcccctttcagtaaaattacagcagtgtacaaggagtcttctccctaaatggattaacccgttgactggaaaatcctactaaaagacagtcatcctgctcatgttcggttatgtattttatgatgtcctttacggccatagagacaggcattcgcttgacggcagcttccctgcgaagttgttcggtgacggaacgttgttgttgaagatttgagacaaccatgtccattaacgctgtatctgacaggcctatggtgaatgatttactgaatacagtaaataggaaatagggtgcggctctaccgcttcccaatttttagttttttggtttgtttggcactttgttgcgttggcgaaaatttgcttgtcttttgcagcttgttgctcaatttttaatatgac

SEQ ID NO: 11134 - DNA, 648 bp, Diabrotica virgifera
ttgtcctaggggcgtcataagatgtacttgggtcacttgattaaactaggcaaacataatataactattccggtaggtgtgtgtgacggaattaattaaaaataataaaaataagtgtaacgacgaacagtaatatatttatttattttgggtgaacaagcggtgtgtttgcttatatctcgaaagagtgttgattgtcagcgagccgagggttggtctgcatcgtttgcatgctgtgaagtgactgacttgccggaccaccaactttgtgtcaactggttttgcggttttgctataatggccagatggcccataaattactgcctctgcagaagcttttttgtattttatagttgacataaagagtgtggcgatctggggcatcgtaacctattagtgtttccttgaaagaaacattaatcttacacaatatgtttaagggataacctttcgtttctcgaaatcaacggcatatggtttgtatatcacatgtggattttaaatgaccaatttcgttttgagaaaagttattaaaaattaagaaaataaaattagcaaaaatagtaattaaagcgtaccgctatataactgcagagataactagaagaattcgattgacttggacagcagtattatgttgaaaaacaa

SEQ ID NO: 11135 - DNA, 649 bp, Diabrotica virgifera
  SmartBlast Evalue=3E-46; Info="Procollagen-lysine,2- oxoglutarate 5-dioxygenase 3 n=1 Tax=Harpegnathos saltator RepID=E2C3R8_9HYME"
gtcggtgaagatttgtgccatgttttaaatattttataattttccagtaacttttaattaattattttgatagtatttatttaaagtaagagtgtgccattatgccgattttacgtttagtgttcattttattcgcctcatttattcatgtttctcccaaggagaacattgatatcctcgtgtacacagttgccaccgaccaaaccaacggcttcgacagatacctccattcagccaacgagttcaacatccaaccgcaaatactgggtttgggtcacgaatggaaaggcggacaagtcaaaacccatccgggaggaggcttcaagttcaatttgttgaagaaagcactagaagaacataaagccagcaaaaaattagtactttttacggattcctacgatgtgatatttttagggaagatggatgagatcattaggaggtttaagcaaactggtgctaagattcttttcggtgctgagcctttctgctggccggatccgaaactagcggatcagtatccggaagccattgaaggaaaacggttcctaaattcgggaatgtttataggatacgcgcccgaaatctacaaattattaactagggatgaaatccaggatactgacgacgatcagttgtattgcaccaaggc

SEQ ID NO: 11136 - DNA, 645 bp, Diabrotica virgifera
agacttaaacaaacttgagaaaacttggattttgtttataagttagtttaagaaatattaaaattgcaatagtgaataatgggcagtacagccaaagccataatgactggttttatatgtagactctgttcagagcagaaaaaagttgtagtccatttatacactaaaagggccagagagttagatttgataaagaaaatggaatctttaccaattacactcaaaaaatacgacaatttaccaaaaacaatatgtttacggtgcatcctaaggttagaagttcaatataatcttatactcaaaattagatcttcaagggcagtaatcaaaagtcatagaatgtaccatagtaatggcagatgtccagtggaatgtcccctacatggtgtaccagattcaacttggtcctcctcgcccccagaagaagcagagggagctagtaattcctaaatgtgatacaccttataacaactatctctattttattcggtatattttgacaagtatgagccgcatgctcatttgaacttcaatatttattttatttactttcatgagatcattgtcgattccattttgtggtttagtgtattattggtcatttgaagttcttactgagctcttataaagtaattaaaatgattt

SEQ ID NO: 11137 - DNA, 649 bp, Diabrotica virgifera
tagcccttgatgggatttttgatgggaagtgtataccttttgcaaaggattttttccaatttttataattttacgttttcgcaaggtatccgacgtagattgatttcatatttgctatcttctaagtaaaaatgtgtattcctgtgatctcaagcatcttactccggggcattacaacccttcgtggtttttagccaacttgacaacatcctccattcctctctatcttgggcaatctccatccaattcgccacgcccacagttgtctcttctgctatattatcgcgccatcagagtcgaggtcgtcctcgtggtcttcttccagttgggacttctttccatatcagccttactattctttcgtcagaatctgaggtgtcctgcccgttggagttttccggactttatttgttaaaaaacaatgacggatacagttaaaaaaattaggttataaacaaaaaatacagaaaagttggacgactgacgaaatcctggcaatgttcgaaaaaagaagaaaacataaaaacgaagggaaccgagacaaatatcaagaacaacaacaaagcataagaagcgagataagaacggcaaaaaataagcggctcaagaaacagtgtgaggaaatggaacagttacaaaaacaacatga

SEQ ID NO: 11138 - DNA, 649 bp, Diabrotica virgifera
  SmartBlast Evalue=0.000000004; Info=Molybdenum cofactor biosynthesis protein C n=1 Tax=Maricaulis maris MCS10 RepID= Q0AL42_MARMM
cccaagttctatgtgaaggaaaaaccggagtggaaatggaagctctgacggctgtcagtgtagctgcattaacggtttatgacatgtgcaaagctgttagtaagagtattgttatatccgatatacatcttttgagtaaacagggtggcaagagtggagattatggttctgaagaatttcatttgagagaatacaacagaaggcctactaccggaattttttctcctcgtgttgggctcgtttaaacttattttttacattatataagcttaaagtgtatcacttttgtccttagttgtttggtgtaaggggcgtttagctagaataattatgttaaactaaatttgctactctactagcccagttggccttgttgaaggcattacaggaactaccaaaaatattatgtctactgttgaggcttgaacattcaatgttgtctcgtgatttaggctgttacaaataattaacgtaaaaatggtgattactgctattcgagttagtcgaacgaaataatcgatttcgtctttaacgcaaacatccaaccgttcaaacaatttgtatgaatctggcgatattctattacaagcttggatgttcaatcgtggatgttcttgagccatgacatcggtttccttccagttcctct

SEQ ID NO: 11139 - DNA, 649 bp, Diabrotica virgifera
  SmartBlast Evalue=7E-30; Info=Pheromone-degrading enzyme 2 n=2 Tax=Antheraea polyphemus RepID=Q2TIL4_ANTPO
ttaaaccgagattaagaggaactacgccgtcttgagtaccaacaaatccaaatggtcctaatctgtagttaaatgtaaccacaacaacaccatgatccatgatatacttcggaccatagtactcataagtactggattcattttggaatgctccaccatgtatccagagtaacacgggtataagatcaccagatccaggtttttggggggtgtatacgttcacgtataggcagtcttcgctaatttcgaggttgctatattttacaacagtttgatagcaaactttggtattctttgttgtatccaagattccaggccaagcctttggaattttgggattttgaaatctattttccccaactggtggggcagcatatggtatttcttgaaaagcataatagtcgtttccattttcacttttgagaatgtgccccctaatcatacccctttctgtttgaactaaggtgccatcatcagcggaaatccgcactgtgagaaagacacaaaaaatacttattacaagagcaatttttttcatgattttttttttaatattactcgttcacttctcactaactattaagttattataatatttaatcatgtgtttatataacgtattgatcacaacacaactcccagatagttt

SEQ ID NO: 11140 - DNA, 641 bp, Diabrotica virgifera
gtcattcatacccattatgatttgtttttgtgtttgttttgtctccattaactttttatgttaattgatgttttgtctcttacatctgttttggctggattgttttctatgacaattcatattgaatcggctgctattaaatctggtagctataattctagttggtagttttagggttctatctaggaaacttattacccgtattgctaggatcttctcatttttaattgcttgtttgttttatcgaacagagtgaattagtagttgtaagaaatagtaaataatataatatacacgtgttcgtttaaaccaacattgtgatgacaaggcgaaatattataaattttatttttgcatatcatcaattctccttattgcaatataatcttttggtagaatcacaaatacgagcttcactagactttacttgcatattacagctatattaaatctcatgtatagttggtatttatcagaaatacaggatgtttcattgataattgaaaatattttaactgtagactcttacgctcaaaatcagggtgttttatttaaaaatagaaaaactgtttgtacccagtactttaaaaccgtttgacatatccttgtcatacttggcagaaagtgtaggtactgtacac

SEQ ID NO: 11141 - DNA, 647 bp, Diabrotica virgifera
aaagctgaaatccactggcacatcaccgtcgaacaatttttagcgtcgatcttgaattctcaacccttagtggactttttctcaagaagaaacccgatcagccagaagatccggcaactgaaatcgagaaaatacgtaaggatgcattcgttgtacaacgtatccgctattaaagtctgatattccttgaactaactctcactatatgtctgctacatcgctcaatatctctcagcgaataaaaaaagtcttgtagaaactattttaacgaacgaaaccaaaaaatggaatgtaagtttggtgaatttggtaaatgttgcctttaaatcgatatttaatctcgaattacagatatttcgcaagacaaataagtcaagtaggggatgctgagctacaatgaaacacaaaagttggttttacacatagctattccaacttcttcttcaggtgccatcttcgctacggatgttggcaatcattatagctattttaatttttgaggcagtagctctaaatagttattttgagctgcatccaaacccttctctcaggttcttcagccatgaaattcgtcttcttccaatgcttcttctgacatctatctttccttgcattatgagtcgcaggatgctatacttctcgccccg

SEQ ID NO: 11142 - DNA, 649 bp, Diabrotica virgifera
ataatttaaatattggtcatggtcgacaaaactaataacctaattaataattttaataaaaatgtatattacaaaaaagtagccaaatacatttacttctgaggtgttatgaaagaaacagacatatcattatttttagaattattggttttcaatgtgcctgaatagtacacttgagattatgataaacttttattagacaataatctgttttcaaataactttcgagcagctcgaaactctagtagatggttggaagaaaaggttcgacataacaaaagataaaacatcatatctttaataataatgatatatcccagtgtcttttattagtaatatttcacgacggagctaaaaaatcatataaaacctaatttttcgcattatttcatagttttacaacaagaatgcataatatattcaagtccaagtttttccatttagcgagaaactgtaaaggttactgccacagtacgtgataaatatacaatgaatacatagaaacattaaggcatggggacataaataagaagtgaatatttatcgcggaaaatgtattaatagcaatgtattaacagcaataaaagttaagtttatacgaatattttcaagaaaaatatgatacagaagagaagacactactttatgt

SEQ ID NO: 11143 - DNA, 642 bp, Diabrotica virgifera
  SmartBlast Evalue=2E-72; Info=Glass bottom boat n=1 Tax= Tribolium castaneum RepID=D6WJG3_TRICA
aggatggattagcttgaacttaacgagatgtctcgccacggtgggtggcatttccgaatctcaacaaaggcctttacctatccgtgcatccagtcagcaggccaggccatgaagtcagaccagaagacattggagtagtgacggtaaaagctgaagatgaacaacaaccatttatggtagcttttcttagagcagctaacaatatcaagccgagagtaacaagagagactagaaccaaaaaggacacattcaatagtgttatgactggatattcaaaagttaaaaatgaaagacaagatctacgaagaagttgtcgcattgagaccttgtacatcaatttcaaggacctatcttggaccgactggataatcgctcctgacggctatcccgccttttactgtgccggagaatgcaatttccctctaaatgcgcacatgaatgccaccaaccacgcaatcgtccagacattagtccatctgatgaaccctttgagatttccgaaaccgtgctgcgcaccaacgaggttaaatccaatatcggttttatactacttggatgatcacaatgttatactcaagaagtacaaaaagatggtagtaaagagttgcggttgccattaaatgatattttttcacgatatta

SEQ ID NO: 11144 - DNA, 649 bp, Diabrotica virgifera
  SmartBlast Evalue=2E-41; Info=Histone H2A n=29 Tax=Pancrustacea RepID=H2A_DROME
tgagctcccgcctaatttaacggtttgaccggtagatctgaagaatctactaaactaaacattttttgttgctaaatacattttacaaactaaataaaatgtctggacgtggaaaaggaggaaagaataaagcagataaatataaatcccgttcaaatcgtgcaggactccaatttcctgtaggaagaatacatagattcttacgtagaggaaactatgctcatcgtattgggtcaggagctccagtgtatctttcagccgtattggaatatctagcagccgaagtgttggagttagcaggtaatgccgctagagacaataagaaaaccagaattataccaaggcatcttcagctagccataagaaatgacgaggagttgaataaacttctatctggtgttacaatagcccagggtggtgtattgccaaatatacaagctgttctactgcccaagaagtctggaactggaactgcagcttcgggaggaaagtcaacaaagagccaatctcaggattattgataattttttaagtaagaatgttttttacctaattgtaagctctagaagtctgatgtatttgtttgtaataatatttggtagtcacttgtacaatattcgattcatgaatgtttgtttagtctaataaa

SEQ ID NO: 11145 - DNA, 647 bp, Diabrotica virgifera
ttgtgtcttaatgatatgaaatgccgtctgcattcacatcgtcgtctttactcacactctactcaactgtgactgactgactgtcgcttgacaatgacatcctcaacctatccatagcgtttttttattattctgcaaatgtcacttgactggccttcggctcgtgtttatgataaatggaataatttaagaattcgtaattgtggagtaaaacaatattgtggagcaacatataatttttctttttcaatgacagtaggtatgaaatgtacgtcaatttgacaatttcaattgacaatatgatttatttaggagagttgcaagatttctccgctattcgcgcctgatcgtttctcgtatcccttccaagtacttgcatacttaaagttaaactgacgaattttctttgttatctatattcaaactgaaattaacctgtcaatttattcagatagtagataattattcaatatataaataaataaaatattgtttgacgctagtgaaacgtagctgtgtcagtttattggctgaataactttattcattgaataaactactatttgtcattaccggccattaatattttgatttaacttctttgcaactgaattattacatttgtgcaaagatccaacagaacaagt

SEQ ID NO: 11146 - DNA, 648 bp, Diabrotica virgifera
  SmartBlast Evalue=1E-18; Info="Protein takeout, putative n=1 Tax=Pediculus humanus corporis RepID=E0VZK3_PEDHC"
atcgttaagcaactcatttccttttgcatttaattctgcattgtccccgaaaaatttatcaaatgacatattataactgccaattttcaaattgatgtccattttattgatctttaaatgttcttttcctctcttgatctccttatctaagactaaacctgcgtcagccttgatcttagtcaaatttccaaaaccatgaccaactgtatctatagccaagatcaataactttccgaccattttataatcggtaaccagccctacagaatcccaggaaatatccaagccggccttcagggtttttacgtctaggtcaatgctttttaggttaaacgagtctaagccgtacaaattaatattatataaatctacgtttaaacttttgtcagggtgtagttctgctctgtctaccttcaatggagataaagctggaataaacagttctggaacgccatgccctagctttgggcgaaggctaaggatattatctaaaaggcattcgttcaccttcggatcattcctatagcactgcgttacgacaggaggaagcttcctttcactccctacatacacaactaaacttaacaatatggggataaataatttcattttttaagaacgataacaactatatggaacttgtgggcc

SEQ ID NO: 11147 - DNA, 647 bp, Diabrotica virgifera
  SmartBlast Evalue=7E-13; Info="Protein takeout, putative n=1 Tax=Pediculus humanus corporis RepID=E0VZJ6_PEDHC"
gttgggcaatatcttattaaaaatgcaattgtgtttctacttatttttatttggatcaattaatatggcactaggcagaaagttacctgacttcttagaaccatgtcagaaatcattgaaagaagttggaccctgtatattgaaaaatgtagaacttgttcgacctcgacttccaaatggtattccagaattactcattccagcaacgaagccacttacattagcagaagcaaccttaaaaacaagcggatttgtgattacatttaccgacattaaagtattcgatttagataaaattgatgttaaggaatttcagttcaatacagagaccttaaaaataaaaatttctgtagtatttccggcgcttgtaggaataagtaaatacaaactaaaaggaagagtattagtgctagacgttgatagttcagtgacttctatggaaatttctcatcgacgtctgctaccgtagaaggacaaggaaagttggtcacgaaaaaaggaaaacaatacttgaatatcgatgatgcttccattgatgtatatgttgaaaccgcattcgttagttttgctaaactttttggtgataatgaggaattaactataaatgcaaataaaattataaatgaaaatattagagaaattcttga

SEQ ID NO: 11148 - DNA, 646 bp, Diabrotica virgifera
gaacttcttcctgtgacttgggcaatgatagtgtggattttcgtcttgcagcatagatatttcttcgaacgcaagaaatgtctttcgtcgtcagcggtaaattgctgaaattttccttcctcaattccttgtggacaatctttaaaggtctttcacatatatatcttctacagctttcctctttgtagaattactaaaaatttgccggtcaacgtggatatctggagcatgattatgctccaccgatgctttttcaagaataacgtaattttcatcaccttcctttgtgtacactttttgttgacacccttttttgatgcatcgccatctaacttttccatctttggagacatgggcctttgaatatttatattcattaattattaataaaagttctcccctttgactaaacatagtcgttggattcgccatttaaaagttaaacactaacggacaaaaccggacactataccgtaatacttgcaactgaagtgaataactgaaaatatttatattcttactttcaactataatcaaatttggaatttccggtcattaagacttaatccccaactttctcggcgatggggcagcaggtacttgggattaatgggcccaggtagttcgtggggcagttagataacgc

SEQ ID NO: 11149 - DNA, 646 bp, Diabrotica virgifera
  SmartBlast Evalue=5E-41; Info=Protein CWC15-like protein A n=3 Tax=Aculeata RepID=E2A4X3_9HYME
gtcccatcttctcttcaccttatggtccgttttatttgaacctgatgaataatgcaccaataaaggatttccacttaagatattctccattcttatcctctcttcctcatgtctcttttccacttctttctttgccatttcgtgagctctttcttgtttgattttgttaagttctgccaggagagcttcggtatcgtcattgtcatcatctgaatctgagtcatcttcttctagaggatcatctgcatccaaactagcagctggaacctggtcaatttttaatcgtttggcgtgatcaccacccctgcctgtagatctcttgtctttttcacggtcatcaagttcttttctgaaatctctagttctgttttcatcaacagttccttgtccatgttccctatattttaatttcgtgtgtcctggtaaatctctacttgaatattgtcgagaaatagcactaagatctttctcatttcttccttgtcctcctctagcaggctcaaatgtagggcgagctgcagtggtcattatttaaaaatagtgtgctacacttgttctacaattaaagtatttaaaatcaaaatattttgacaagaaataattgcaaaactataaaatcgagtttgacagctgatcaatattttca

SEQ ID NO: 11150 - DNA, 647 bp, Diabrotica virgifera
caaattcagtgtccgcattctgagatattagaaacgatatttttctgtgttgttattgaacaaaaagctgcctgcatgttttttctagaagaatattacaacaaatttttagatttgccaccattctttcatttccaagctgctttttctgataaagaaattttcaatttggaagcagattttacaagctgtcattgcgaagaagacatcgacatggcatcagtccctcagggagccttcgcggccaaaaaaatgcgccaaagagaggaacaaattcaagcggctttggatcccacccagtacaatagtaaatttatgaatagtatttgggggcaatataaccgatattcagtccataatttaaagaaactgatgcacgaaaatactcaaaagtactttgtggttccagttgagaaattctcaactggagagcaaattacattcttgaatgaagtacaaaattcacaaaaaatctacaattaatctgagtcaaggctgaaaatgatgattatagaaaacgtatttctatcaatatgtaatttttttggtaaatatagttcataaaaacaaaatctatttcactaaaaacaaaattgtacaataccaatgataacactaaaatccattcaataaattaatttattatc

SEQ ID NO: 11151 - DNA, 648 bp, Diabrotica virgifera
tgacaattatccagcaaccaggaccatatgattggcgaatataattaaaagtgcgaataaaagtgcagagcgaagaaaccaggtggcgcttttccgaacttgcacggtcccaataatccgtgtgtattaatattatacacgggttaaacgacatattatgacagacgctcgaaacaagtgagaaacgttgaaaagtcctattagcaacactttttttggcgaccattttgacagctgtcaagtgatttatgtttagcttggtttgacatttcagtatcaatagactgaataacgcttccaaattttgcaaatttattttgaaaatcaatacgtccattttatggtcaacataatcgtcaattgctactgctcaaagctactgttttcagatctgctatctgcggtcttagcattcgataaattattggacttcctgcagtgagaacaatactatgcgctgaaatgtttccatcgtttagtattatttccgtgtccaccatttcaccattcagatacatattgtaaagtttttcttttggcgtaattatagcatctgaagatattctcggcattgtaaattatttttgcagttctaaacgaaattcacaaatttagtcttttagtttatcagatgaataacaaggattc

SEQ ID NO: 11152 - DNA, 645 bp, Diabrotica virgifera
  misc_feature (622)..(622): n is a, c, g, or t
  misc_feature (634)..(634): n is a, c, g, or t
ataacttcaaaaattagccaacttctaaatggtctactttttgttcagagggattttggcaaaatttgaactttttttaaaaacatttacattgcgaatttgttgtgaaaaatctgttgggtcgatttaatgaatttggtagaccatttaagtaagttataagaattttctaagcgaattactaaggttctaagtgccaccaaagtggttaagaaacattgaataacaacaggcgtattttgcccccttattttgtatttattgctatattgcagaaaaggtaataccttaagacatttttgaccagtcgtatatcatacaaaattcaattatctttattttatttctctacgactttgttccaaaacgaaccgtataaagttataagcaaagaaagcagaaaaaaatcgatgtttttcgaaatttttaaatattttaatttttttattaatgttccgggcgtatttgagaaggagcataagtcaattattattactgaaggggtcacctaactttatctgcaaaaatccgaatgccacctctcacatccaaaaatccacgtttttttacagattagtcctggtctatactgcaaggaattatttttccggttttttttccncgtcgacagacnttatcatagga

SEQ ID NO: 11153 - DNA, 639 bp, Diabrotica virgifera
  SmartBlast Evalue=5E-18; Info=Cellular protein n=1 Tax=Glossina morsitans morsitans RepID=D3TML5_GLOMM
tgtgcttaacaacctttcgtaagttgtgaatgtctgtaacctttttcttctccaacttgactgctttccttgccttctccaattctaaatgttctttatgttttcgtttttgttttaatgtctttttgacattctttacaggtggatttattgatttaaattctgtatcacttccttcttcattgtcagatacaatgttactcttacttggtagaccttctgacatggatattaaccaatcttcgtcacgtttagactctgttactttgctgaacattccactggtaactctgcgtaaatggttctcttcctttataagtttttgttctttttctgctaccttttgtaataaatcttgatggtcagcatagctaggattgtatgacataccaggatgtgggggctcaattgctggaatattagtagccaatttctagacctcgtcttttttacagctacacctacacctctcaagttatgctttttagcgtttttatcaacccactcttcactagttgcctgtttgtcactatcttgccacaaatcagaggaaacatctccacgtttcggtttactttttctcttcaagtcgtctaacttcctattttcagcagcttgaagtgatttacgttttacaat

SEQ ID NO: 11154 - DNA, 646 bp, Diabrotica virgifera
  SmartBlast Evalue=9E-25; Info=Novel protein similar to vertebrate phosphoribosylformylglycinamidine synthase (FGAR amidotransferase) (PFAS) n=2 Tax=Danio rerio RepID=Q5TZ72_DANRE
ctgcacctttacccaatatatcaatctcttttatatcttcctttttggcaagtttttcgttaaagctaactttaggtatattttctggagtatacctgcattcagtcattctatcatagagtaaagatgctagattattctcaatttgaggtgtaagttttgtaccttgattaaacactaaaagatagcgacgtgagacctctaatctggttacttggaccaagccgagattttggcaaatagaaacagcatttgtggaacttgatgtggaaaaattaaatctaggtcctacctcaaccaaagccgtaccatttttcgctaccagcgttcccttttcgcttaaattttggggatggagaggatcttgaagaacccatttcaaaatcttaacgtcttttgcttccaaggcacttgttgattcgatatgaaaacatatttcggtttgaatatcctttagatttttacatgtttgctgaagtttctggacaatttcaaacttttttgctgctgtacaaccaggtgtgcggtataaccttaaaattccaccttgttttttcattttctctttcactgaacaaactaaactaatgatacgaaaaacaatttcttcatagaaaaattacaatctctctgacgtaaacttctt

SEQ ID NO: 11155 - DNA, 643 bp, Diabrotica virgifera
  misc_feature (91)..(91): n is a, c, g, or t
caccctgtatatagtagctaatacaccgacgtgggtgtagcactgccgttacagggtctctagattcaggttttcggggtggatcagtccnccatttctgtctcttactgttcttctgcatttctaattcccatgtcttctaggtcccggttcacatcttccagccacttagaccacggtgttcctcttctacttccagccggattccactttgttactatgtttattatcgcttcttccactgctctctgttcatgtccaagctatctcaatctttgtctttttattctgacttatatccagcttgcccctttaattcctcatttatttggttatttcctctactcttgtattcactatgtagtaaaatgtttattcttcaagcattaagaatcctttagaaaactcgaaccaagatctagaatctagaggttctgactacacctgaaattttgaatgcatcctcgttcagcattagtaatttttttagaaaaaccgaggcgggatcaaggcaaaagtcagtttaattaataaaagccctttggattatacaaccgaagtcgttatatttcactcagtgtataatccacaatatttcaactgtaaatggagttgtttcttttcattttctgactcatatgta

SEQ ID NO: 11156 - DNA, 648 bp, Diabrotica virgifera
acacgacatacgtttaaataattctcatagcgtacgttagaaataaacgtgactacactgacagctgcactgagactgtacaaattatgtgaaaagtctttagtttcaagaacttccgtcaataacgacaacactgcttttcacattcaactccagctgtcattgcaggctcacgcaaatttgttgtctgtatcaataacgtcacaatttgtaccaagaacgcattttaaaaggcgctgttgtcgttacctgatactatgactcttgattataggtttgttcgtagaacgatcagcaaccgttgccaaccatctgacgcatgcgcgttcgtagtctacgaactgtaactgttaactgcgcatgcgtctgatggctggccacggttgctgatcgtttggatcgtacgattacgaacaaaccttatattatttcactatactttgggaattttatataacactggccagcctttcagaagatttttctgaggtcaagagttttataggtgattttatattctcccacaggatttgataattatttgtaaatagtgccctgtggctggtgatacttgaactatagactcttttcagacgtggatactgtatcagagacgcagatattacatacactcaaatggaactcgga

SEQ ID NO: 11157 - DNA, 644 bp, Diabrotica virgifera
ggcgatgggtgtacgtgaaaatatgtgtaacaaaaagaaaattcacaataattatggcaaagtagagtgtgacagcacaatttccccaaaaaaatcgctataaacttaaatactttgaaaaattatgtttactaaggagtccaagatagagtattgatgattaaacaagagcgcagtgtaaatgaatccccacagaagttttataaacttcatcaaatcattcgacaaaatctggacctaccatagaggtaccactttaaaatattgatcattcatcaccaaataattcgacacaatctggacttaattattagcaacagaagcaagcatacgatgattattttgtacagtaaaataaattgattaattacagttgtcgttaataagacttttcatcgattgtcatttgtttcgagcctctctcacatgttgtataatctgtgtataatattaatatatacggattatacgacccgtgacagtagctcgaaacaaatgactgtgaatgaaaatccctatatgacactattaatgataaaaaatgttattaccatgcttctggcaaaaaatatcattcgctacatttagaaagctctcggcttcaatgtttagggtgttagaacaaataccgatatccaaatcag

SEQ ID NO: 11158 - DNA, 648 bp, Diabrotica virgifera
  SmartBlast Evalue=2E-49; Info=Host cell factor n=1 Tax= Harpegnathos saltator RepID=E2BBL6_9HYME
taaaatgtttgtttttgggggatgggttccttcaaatctgtctaaagatgtaaacgccattgaaacagcgtggaagtgtacaaatactttggcatgtctcaatttagaaacgatgagctgggatgaaatcaatatccaacaacaagctgagctaccttgtgccagagcaggtcactgtgcagtgggaattagtaccaggttgtatgtatggtctggtcgagacggatatagaaaagcctggaaaaatcaggtgtgctgcaaagatttgtggtatttagatgtagataaacctcctgctcctagtcgtgtatctttggttaaagcaggaacacatacccttgaagtcaattggactggagcactatctgtgcagacatacatcttacagatacaaaaatatgatttacccccacctgctgcatcgaaaactccagcaactgctgcaccagtaattccatctttggtaactgtaccaaaagtaattgctccagttctagccagttcacttcagactcagcctactacatctacaccaactattaaagcaatttcaagtactaaccaggttcagtcacctaaaattatttcaccagttgctacaagagtaccacaaatgaagattcaaggtactacaggaactattatcag

SEQ ID NO: 11159 - DNA, 647 bp, Diabrotica virgifera
tgtaataatagtgcgcagattgtccagtttttagtgtatttttagttttgcattattatgggtcctgataacattgttaaatgaaacgtaagaagccttaacattaaatctgactcggaacaggaaaactaaaatgaaaaaccttaaaattccgatgaaaagtcaatatattaaccaaccaaaatgcaattttaatttttaaggcacaatctaatgatttgaagaaattttgtattggttgtggtcaagaaatatggctggttaatatttacacatttttttaaattatttatcatttaaattattaatcaatatttacttctagatcttcgtttccttttatttacgattcgttctatttctgtatatatttatttcttgttctttcaaaataaatgaataattgcaaatgttaaaaaggacaaaataattgtacaatataaaagttacaaaaaaaaaataaaatttggaaatgtcgtgttcaactaaacatggtatataaataaatccatagtcaccatatcatatcaacaaaagcagaaaaaattcatttggcgatttggccaaaatctactaattttggactgaatcatttggtgtcggcaatgaaaaagcatatattagtaaatataatatatttgctgtag

SEQ ID NO: 11160 - DNA, 647 bp, Diabrotica virgifera
ttaacctgcattagcagtttcatttcactgcttcccataggctattcctgacactttcaaaatatgtatataaaaatatcgataaatcaaaaaacatcaatgttaatattatgaattgataaaatagtgttcgatgaatcaaaacaaaatcaatgttaatgttatgaatagataaaatagtgttaaggtaacgtttttttttgtgacatgtttccactaataggtattccttaactggacttttccgtattgttaaaatttactgtgatacgagccgatataccgtgtaggaactgcctgacttagtgccaacttagaagctgtggagctaatcaatcgttttctttggtttacacaaattgccaaaagacttttatgttaattattacacagtgaaagtgatgttaagattattatgttttgtattagtgtaagtttaaaacttgaaagaagatttactactagtcattttttggaaagactgaatttttcatcaagacatatattcctgaaatcctataattgtgatttatatttttaaattgtcttcaaacaacgatttggaatttaatttagaattttttatgctattgttttgtattcgtgtctacataatgtctacattttcgattcgggattgtttaatc

SEQ ID NO: 11161 - DNA, 645 bp, Diabrotica virgifera
gtaaataccccgtataacataccaaacatttacatttttgtaatcgaaaagttacgaagatttcgaatataaaataaaatacagggtgttctattaaaaaaaacataagtttggtctgccactatgttatcgaacaccctgtaacattctaactaattttgtaatatgaagctcaaagttcgctacaatttttgttattaagttttatcgctatactttactataacggatctacggagcttcatcccactatataattaatcaccctgtataatagcagttaaatattgcattgttagctagttctaagctatcctgaaaatttcaggtgtctaggtagcctagaactatttttaaaatggattacaaaatttgcggagtcagtgacaccaaccaagccaagtatataaaaaggttttaataatatatcgtccgggatttgaacccatctctggtccaatgctataccaaccgagctatcaagctccgtgctattgacgtgtcggatataattacacatcacggtgacaaatagatcaaagtgaagtataaaaatagatattttattatcttacgctcgatgaagacaaatccaaggacacaaaaattataataaataatacatttactaagaacactaatata

SEQ ID NO: 11162 - DNA, 648 bp, Diabrotica virgifera
  SmartBlast Evalue=9E-12; Info=Cleavage stimulation factor 64 kDa subunit n=2 Tax=Formicidae RepID=E2BR78_9HYME
aatttgttcctttaataccaaaatactattcctctgttcaggcggaagcatagagatctgttcatctgacagctgcaatacttgcataatgagtgcggccttttcttgatccgaagccccagcatttgcaacatttggactggccgttgcaggagtaggagctggagacggttgaggtggaggtgctgctctcgtcacaggaacttgaggctgaggcggcattacaggtggtcttgcgattggaggtggtatgggcatttggctttgaggaggaggcaccatgggtttctgacgtggatccatgcgtgcttgtcttggatctcctgcaaacgcctgcgctgctctaggatctcgaataaagctttctccgatagttggtggtaagggattttgaatagcagatggcatttgtctcatatcctggtcacccatgggtcttaggtttcttagatctggcacaccaccaatggatctcagatctatatcttgacttggaaatacttgattttgagatggatgcataacaggaggaggaacaggttggaagtcttgtcttggatggaacaggcggttgaacaggtgctggaggctccctgtactgattattaactggtacttggacaggaacattcttgtctccaggcataa

SEQ ID NO: 11163 - DNA, 646 bp, Diabrotica virgifera
ttgatcgagatcgtgttcgattcctaggaagagatgggtggcggataggagaacgtctacgaaccgggcgctcctccctctccacgtcagaattttttctagcttccctatctcttttagcttcaagatcccttttaacttccagatcctttttcgcgtttccatttaatgcttccttaggactgagttctccaggtggtactataattttggtctccttgggtacttctttactatttgttttaatggtattaggattaggtggattagtatttggtatcactggaacatttaagtagtctttggtggttagtgtttgaaacaccaagtccacaaatgatttagtgtcttcctcagaaaaacatctaactgctcaatcatactttttctgagttcatcttccgttttgtccttttttatcaatgcaatgatatatttcgccaaagcagctggatctgcttgacacagaggcttcagaacagctgttaaccatgtcttgaatgcgtctatttgttccacaatcattgtagagtcttaattgacaattattcgatgaaattataaatgaaaacaactttacaacgttaatttaatattttttgtaaaaattgataacacaatttatcaaacttcatttgtactcgca

SEQ ID NO: 11164 - DNA, 646 bp, Diabrotica virgifera
  SmartBlast Evalue=9E-89; Info="Sex-determining protein fem-1, putative n=1 Tax=Pediculus humanus corporis RepID=E0VRJ4_PEDHC"
tgatgatcgcctgttataagggccatatcaacatagccaaatatttacttagtctaaatgccagtgttaataggaaaagtgttaagggaaatacggcgttgcacgattgcgctgaatccggaagtctggaaattttaaaattgttacttgaacacggggcgaaaatggacgtagattcttatggaatgacaccattgatggccgccgcagtgacgggacataatcatatagtagaatatttaattaagattcctgatctagtatctagaaaagaacgtatcgacgctatagaactgttaggtgcaacttgtgtggataagaaacgtgatatgataggtgctttagaattatggagaatagctttacatgaaaggtacttttacgatcccaaacatccgatcgcaaaaccaccatcccaaaaagtacctgcatacgataacgtccaagaagtaaatgatattgacagcctcgatgacctgctagctgatcccgatcaaatgagaatgcaagcgttggtcatgcgagaaaggatattgggaccggcccatcctgataccagttattatattcgttataggggtgcagtatacgcagatgcaggtaagttcaacagatgtatcgaactgtggaattacgctttggacat

SEQ ID NO: 11165 - DNA, 642 bp, Diabrotica virgifera
ggtaacactggctgttgatatttgctcccaaatattttatagaagttatctgttctattatttgtcccttgtcatacaaatgtatatttattggtatcattgaagatactagaattttagtcttggaaacgttaaggcccagtactttatgtctcgattaacaggcggttggttaactttggtttaatcgggacctctttaggacctcttgcgttgtaataaatgcaattataagtattatacttatttataattataataatacttgtaattgcatttattacaacgcccgattgagccccggttaactgaccagctgttaatcgagacataaagtaccggctttagatttcaatcaaacatttcgctgtgacgaactactaaatttattatattttgtagttcttgtacattgcttgctattaagacggtataatctgcgtacctgatgtctagtttcattgattttgatcccactgtggacctctcctaatgcttctgaatgtagtttccgaatacagattatataatagcggtgataagatgcaaccctgtcacactcctttttcttgtgactttttgatgtcgtatttaatttgtttgggagcacgattgtgtttagtgataataaagacatttatc

SEQ ID NO: 11166 - DNA, 640 bp, Diabrotica virgifera
gtaaaatgtcacaatttaaaattaaaaatcgacctgtgttgggatttttccttacagtcgccggtttgcgaagtgacgaatttattccagacatttgcaccatactgtatgtttatttctcgtaccttaaaactgtatgtttcacatgaatatccagtttgtaatttattagaggcgcatacaaacttgacatgaatatgaaagaggtaccttaaaaacgcatgcgcaaatgctgatatgtaaacatagggaaatcccgattgccgtttggatcgacagattagtctcatttacaatggaaaaacgttaagatatataccttcactacaataataaaaaacaaactgttaagataatgtccttttagccattctgagaaactattagacatattttacaattcccatattgatatttagttttatcgtaaaaagatcaaagattagcgcaataacactatcaacatttatactttagacatttttgaagttatacttctttaggcgcgattgggagtgaatttttattattctgcgcgcatgcgcacacagacagtatggagttcgttgctaaatgttttaagtatttttatacttcgcttggtctatttgacactatgtctgagaaatcttgtagtccg

SEQ ID NO: 11167 - DNA, 643 bp, Diabrotica virgifera
tttatcattttgttcattgtttttgaattgattggttcaaagcaaaccagtataatagagtgagagatttaaaataattgcaaaatttagcagattacctactgattaatttaattagggaataaaaatagagcatacattttttgcagagtcaaactggaaaggaagtattttgattattttatttccacatggtcaaacccagtccaatcaagttgacatatttaccccaggaaatgaagcatttcaaaatcgtaaaaatactggccgctgtttttcaactggaatatctagggggagtcaatggaaaggacgtactatcttgtgggtattgaaattttatttcgtcatggttttttcttaacattttatcaaaatagtgactttttttcattcatttcaatattgtgaaaaaactacccattgtaaataaaaacgttcaacagacaactttcttgaaaatacttgctctttaaaatgagattttctaaattataacatgtttgtaaacgaaggagttgttgcaaattgaatccgaaagtaagcgttttttttttcaattggttgtaagtatttaaataagcaatggaagtatttaaaatgcatttcacaacatgagtttttatctagttactaaatgtgc

SEQ ID NO: 11168 - DNA, 644 bp, Diabrotica virgifera
ttttccactgtgatttttctttgatttctattgctttttctatgttgccactttcttttagcttttctatgttctctttctgtttctccagtttttctagtagtttcttgggatctttttctttcttaaccttcttttgcctgccaagagtatcaaaatcaattttggaatacacaattttatcttctttattgaacactggcttcttgtggacctcttcctgtgtttcaacttttacttctccattttcactcttcacctcttgttttaaagttaactgggctgctctctgtaactttttctcagcgtttctctgatcttgctgtgttttcttttttaatctgttctttaaaccttttttcgtcagtttctctttgtaggtctgctttttcttacctttgatggcatctaatctttgctggagttcaacaagggactctgctcgtgaagttttcttcttacttgcatcgaaaggaagtttagaggttgtagtttcaacttcttcatcactagcatcgaaatcttttctctctggaatacacgaccgctttaagagttctgatataaatttattttctgtccttaaacattgctccacctttcttatatccagtttttcgtttatcaattgcattttaaatatt

SEQ ID NO: 11169 - DNA, 646 bp, Diabrotica virgifera
  SmartBlast Evalue=8E-53; Info=Glutamine synthetase n=1 Tax= Methylococcus capsulatus RepID=GLNA_METCA
tttccgggccgaagaaggcggtgtcggcgatgccggtgctcttcaggtaggcctcggcgcggtgggccagcgagcgcgggtcgcggccgtagccctgcatggtggagggctcgatgacgtcgcaggtgagcaccagcgtcggctcttcaaagaacgggtcgatgaaggcggagccggcgtcgggcatcaggatcatgtcggattcgttgatgcccttccagccggcgatcgaggaaccgtcgaacatcttgccgtcggtgaacaggccctcgtccacggtgtgcgagggcaccgtgacatgctgttccttgccgcgcgtatcgcaaaagcggaagtcgacgaacttcacgctcttttcctgaatggtcttgagaacttctttacccgacatgggtgctgtctcctgcgaggggtgttatgaattagtgcctgccggttggccggaagtgcaccgaattgaagcagaaactgtgccaaaagcggcgatctaaagccgtcccgccggtaaaaaggcctgcggcgccggagcgccgcaggcggggattatacgggcgccgcgggggcctccgaccgatcgccggctcagcccttgagcaggtgctcatgaacgacttgcggtcggcgcccttgagcgccttggtcgtcg

SEQ ID NO: 11170 - DNA, 637 bp, Diabrotica virgifera
  SmartBlast Evalue=2E-46; Info=Solute carrier family 41 member 2 n=1 Tax=Harpegnathos saltator RepID=E2BPL7_9HYME
gatattttactcgtaactgtgatcgtaatatcgcacaaaataaaattgaatcctgacaacttagcaacacccttagcagcaagcgtcggagacttggtttctctgattgttttgtcctcgtgggctcgattattgtataccatacatgataagtatccatggcttatgggattaatattaggaggatatattttagtactcctaccgctctggatatacatcgttaagcgcaatgaatataccagaactatcttaactcaaggatggactccagttattactgctttatttataagtgggactggtggtttaatattagatgtaggtgtggattcgtttaaaggatacactgtctttcaacccattataaatggaataggggtaatttggtatcagtccaagttagtcgcacatcgacgatgctccacaaaacagcaatttttggtcaaatgccatcaataacaaaacagttagtttggccgtggacggctttaattaaaggagttcatcctgcaaagacagctcgcctgctcatcctcttatccattcctggccacacaatatttgtcttcgccgcagtacttttttacaataaggaatcaacagttactcctacatttgtcttcatgtacctgac

SEQ ID NO: 11171 - DNA, 638 bp, Diabrotica virgifera
gccttgtagatcgggtagaaacttcaggtactggttttggttggtcatcgctgtcttcatcaattaacctgtcgtgtccttttccgttgactcttttttagccttttttcctacccctggtttttttattttcttttggcgccgcaattttctcttctttcttagtaatctcttcatcatcaccaatatctgaatcgtgtgcatcatcattttctacattattctctaagtctaaatcgtcttcttcttcctcttctgttttcctagctctttttcttccaactgctttcttcttttcttttggagctgtattgacgtttttgcctttcggtctaccctttgatctacctttcgccttcttaggaacctcttcttcatcggataagtcatctaaattttctttctcctcctcggatgcatcttcttcgagatctagtttgggaacttttttcttagacgaagccgctgaattttcgtttttcctcttagctggagaagtcttgggtgatttgctctcaggtacaacaaactggaatggttttccaagagcatctccaccagttatacccgataaaaatatttttctgatggtcttgtagtcaggtgtagaattgtgttccaacgatacgaggcaattt

SEQ ID NO: 11172 - DNA, 647 bp, Diabrotica virgifera
gccgaatacacaaataggatacagagcttacatgtgtctttctaccttttatcaattgcttttataagggtaaaactatgtctttgtaataactatgtctggtattgctgaccagctagctaggaaggtagaaatcctaagactcttcgggttgtgatctttctggctggtcgagcaatcgcggaaattaccaaatgtcactcacacacgcaaaccgtgaaaagatgagaagaagggccaggatgtacacttgccaaggtaacactaaggaaccttaggaagtcagcatcagaaaaatacttgggaatgaccagggaaaccatacgcttgacagttggtttttaactggccattgtcaactccacacactggggcagtagacacatttctatgcaggatgtgttgtaatgaacgttgatttcattctcgcacaagtagtggatctgaactgaaaaagaattgactccttcgagtaattggtctccaaatttaaccaaagaattcactgaccacgatcattaaagtgacactatttaaaaaagttttaataaagaaaagtcatcatgcagaacatacaccagtagtcaggaagactgcgataaaactcaggaaagagccaaaaaggaccagcgagcgagcaaactgga

SEQ ID NO: 11173 - DNA, 646 bp, Diabrotica virgifera
  SmartBlast Evalue=2E-82; Info=Four wheel drive n=1 Tax= Tribolium castaneum RepID=D6X462_TRICA
cagagccttcgacaacggctgtgtatgttttgacagttgtcagagcgtagtcaacgatcttaggggagaaaagactgaatgcatttgttcggcgcctagactaaggcctgaattggaattcatgcaagcactgatcctcatcggcaaactacttagttccataccgactaaagaagctaaaaccacaagacttgtagctgagttgactacgctcaatctcaatctgccggccagagtatggttgccgttgaatagtcaatatccccactttatcgttaggatacctcctcaagtggcagctgttctcaactctaaagataaggcaccctacataatctacgtcgaggtagttgaagttgaagacttggagagctctcctgtgccaccaaagatcatgccaaccttgaggcataccaaatctgaagaaaatctgaaacacgaaagcgtctctctttccgcgttcagtatgtgcggaggttgctacgatgacttagatcccgattggagtcaagaagacgatgaaatctcacaacagtacaaccaaatgagaaagccagtagacagggatactatttcgcaaatgagtcaagaatctagcgattccagagaaccaccaatgtcaataccagccagtgagataagaagg

SEQ ID NO: 11174 - DNA, 644 bp, Diabrotica virgifera
  SmartBlast Evalue=1E-17; Info=KDELR1 protein n=4 Tax=Eutheria RepID=Q96H29_HUMAN
aaattcgcaatggggacgttatgaaaagaacaccatcaaggtttacctctcgttaaacttgatgtatgtatttgtctaagaaagtgtaaatttgtgcaatttgtgcctcgtttttattttctccgggtttttggtggtacatatacggaaaagttaatgtaaaaaggaagtcaaaatgcatttattgctaatagctggtgatttatcactttttcttggcacagtatattttgtattaagtatattcgtggaaaaatcatataatggtatctctgccaaaacgcagttgctctacatgatagtctgtactacaagatatttcgatgattccagcttgtttgtatgggttattaattttttctcaagctttgctttctttttatcgtttagaatgaaagagacgtacgaaaagaaatatgatagtttctggacagaaattcttctaattccgcttttgattttagcagttttcgtaaattacgatcactctcctttcggcatactaaatgctttcagtgattatctggaatcagtggcattagttcctcagctgtacatgatctggaataaaacaaaaattaccaaacacattaaaatctacctctactatatgtacgcgtatatatgcctaaagatgttatatt

SEQ ID NO: 11175 - DNA, 645 bp, Diabrotica virgifera
  SmartBlast Evalue=5E-97; Info=E3 ubiquitin-protein ligase UBR3 n=2 Tax=Formicidae RepID=E1ZZB8_9HYME
tacccgatatttctgtggattagtaagagctgtcgtgataacttttctcattaacccacccatgttgttaaaatccgacaacatggttatgaaggcgtcggcgtcctgaatggctcctttgtacgcgtccgccgttcccatccgactgttttctcgtagatgttgtatgagacgcaggattattctaggcatcatggcttctgctacgcacatcagatctgtgggcgcctgtcctttggtggatctcttgttagggccgtgtcgttcacaaaaacctgtttctttcattacagaagcatccccacaatcgcatgcaccgccggcttggctcaaaaacatattaaaatcgtgccgcgcatggttacccttcttgaagcattctgtacaaagtgacatacacggtgatatgccacatgttcgacacctgtaggccacgaaattcggcgtccacaccagaccacaagttgttgcattgtcgtatgctcgaactgtgctagcgaattcatcgggggttctgccccctgccataagccacttgcaccaatctatcgtttcccattcttcgatagacttctgggggttcagcagattatccaaaacttcgttcaagtgttgcggatttctctcgttggagcaatcggcatg

SEQ ID NO: 11176 - DNA, 646 bp, Diabrotica virgifera
  SmartBlast Evalue=4E-32; Info="Membrane-bound transcription factor site 1 protease, putative n=1 Tax=Pediculus humanus corporis RepID=E0VQL9_PEDHC"
tctcatacagtcgacgtccgtctacaattaatgatagacagcaaccgtttgcacatcttccgtttctttggcttcggtttgtaccatttgacgctataataaataacgacgagggatagaaagacgaggaaggtgagggtgaggtcgaagttttcgttcttgttggacacggtggtcggtttgttgcgccagctccattcgatgaactcgcctttgctgtccaggcccgatgcgtctggaaacgaaattaatctttaatattattatctagtggtagtagaacgttcacttcttctataagcgagagcagtttctgtgactggtaaagattgctaggtgcagaaacatttagcggtactggctgggtgtaaattaaatgaggacacgggggaattggtctagcttgagcttcgcctaagcttttttctagcacgtttgaatacctataaagacgattgccttccattcgatgtggattcgcagtctccgttacgctgtcccaactcaatagtttattatctttaaacacagaaggcatatgcgaggtagctgtgaattccaatattgcgtctaacaaccagtagcacgatgtgtccaaatgacttgagtcaatacagtttgaatcgccgtacacgacgattcgacc

SEQ ID NO: 11177 - DNA, 646 bp, Diabrotica virgifera
taacgattatctctcgatgaatttctcgccccaagataatcctaaaactcccgaagggtacgtagacatgagtttaggcaagagacaccagcgccagggaagtttggacggaaatcaagtaaacggaggaggcaacgacgattatttaaacatgtccataggacccaagaagaaagttacaaaaaatcagatggtgatgtcgtcgccgatatcaatacacccaactacgacgtcacaagccaccaaacattcatcgagtcccatctcaatatcatcgttgctaagcagaaaatcttccactggtacttctccaaaaatgcatctccctatctcatcttggacttcttcgttaccacgtaacagagctagaaagattcgaaagatagctccagttcaagcgttaccactccaagtagctcgagtatcatttttccgatgagtcctagttcccctcttaaggtaatcaagccagaaacgccgcctctaaatccaaaaccatcggcatccgttctaaactcattatataaaacaggtacaagacaaccttcatctgacgattatgctatcatgggttttgacagcggtcgtaacgaaagagacaaagaaaactctgactacgtcaactattcagcagcagtgtctaaca

SEQ ID NO: 11178 - DNA, 645 bp, Diabrotica virgifera
attctctgctgttaaccaacacaatttaagccatgcttgtctagtagtttcattttccggtaggggaaaaaattcagtacattcactcccagtcgatttattgttgcatccaggaacagaacaagaagtctcaatgagaggattgttcaattccgtgtcaattctttccgttggagccttatgttttctactaataacttcatgagacctttggggcaatttagctgatggaacagcatttttcttcagtcttttcaatttagtttcaggtgttattggaaagtaatccttttcagtaaaatgtaaactacacaccgtcatgtagttggatataggtttgccaatttgcaaaacaccttgccaaacttttctcatattctcgtccaacggaaacctatggaaggaaattggtatttttgaattataataggttgagcattgaggaacactgcagtagctgtgtgaagtcgaaggttgagtcgaagtcattgttaatacaatttacatatataaacatgtacaaatgtacacaagaacaagacacaaattaaaattaatgaccaatgcactatgcacaaaatacaaaatgcacatagataaataaacaatatcgatgcagattgcaggtgtcgattgcaggcagac

SEQ ID NO: 11179 - DNA, 638 bp, Diabrotica virgifera
gtcctatgttttggttatctgtgaacagattgtcggctgaatcgagtatgatgtattttgggaatggaggaagatgtaaaaatttattttaatgtattttaacgttttctaatactaaaatttgatcaaaaacttgttttgaatcaaagtaacttattataaagccatataatgacatttttgagtcccttctattagaatattgttttttcaattgatactttacgatataaaatgcaaatttgtttaaataaataccaaatcactgtaaaatcgcttaagattttgagaaagaaaagaagaagacaatttgaccttaaatgtcccacatatgctatataccaattttcagacaaatcggagatccaagtttttttatccaaaattgagtgatttgaaatggaataactcatttacattatgtaaaatgtaggcttaaaaataaaatagctttattttaatgagattttaggtaatttatttatttttaacgtatttgattcgtccgtcttttaaaagtactttccttgttaaatgggataagagaaggacataatattgaataaaaaatctaaatcagtaagtataactgttcgtcaggcaattgatgtaagaaacttcacataagaaagatattg

SEQ ID NO: 11180 - DNA, 644 bp, Diabrotica virgifera
  SmartBlast Evalue=0.000000002; Info=Metal resistance protein YCF1 n=6 Tax=Saccharomyces cerevisiae RepID=YCFI_YEAST
gtaacgataaaaaatataaaactgaaagtatttttactacgtcattgtgagttagttacagttttagcacatagatacttgaatatcattgttttattatctctttcgcgcttttaccaaagatacaaacgaacgcaaacactgtcgtgattattcaatttgccctaaaaataatcaaaaactgtgtttcagaataattttacaaatgacattgaacttgtaagtgatctgtggaaagagttgtgtcaggaaagagtggtcagctgtttacctacttattttatgttaaagtacaaaagagataatggaagaagttaaaaaaaaatcgaatacaaaagaaaccgcatccattgaaaagaactaatttattttcacacatatttttttgctggttaccaggatttctctctaaaggattaaggaaagatttagatgaaaatgatatgtaccaaactagacattcccaacaatccagatatttagcagatcaattagtagtagcatggaaaaacgaacttaaaaaatcgaagccgtcttttttatgggccctttttgtagtatttaggctagaattattttattatgccttttttaatatgtttcagattttataaaaattgcacaaccaatgttgatctccagac

SEQ ID NO: 11181 - DNA, 646 bp, Diabrotica virgifera
  SmartBlast Evalue=4E-47; Info=Protein Dr1 n=4 Tax=Apocrita RepID=E2AA31_9HYME
tttgcatttggcgacttcaactattttttatattcagacattcagattgaattaaaattttgttttgaaagcagtataaaatggcaaatccaaataatagcggacccctaggatcgggaaatacagaagatgatgagctgacccttcccagagctagtattaacaaaatgataaaagaattagtgccctcagttaggatagcaaatgaagcaagagaattaattttaaattgttgcacagaatttatccatttattgagctcagaagcaaatgaaatttgcaatcagctgcacaaaaaaacgataaatgcagagcatgttttaatggctctgaacaggcttgggttttgtgattacactgcggaagctgaagccgtcctcaaagattgtaaggcagtagcagcaaaacgcagacgacaaagtacgaggctggaaaatctaggtattccagaagaagaattgttaaggcagcaacaggaattgtttgccaaagctagacaggaacaagcacaagccgaccaacagcagtgggaacaactacaagccgcagccgcaagacaagcccaacagcagcaacaacaacaaggagaagatgatctagatgattattgttaggtgttgacgatagtggagtacaagaaggcact

SEQ ID NO: 11182 - DNA, 625 bp, Diabrotica virgifera
atcaataaactgattttgataatattaatatattggtattggatacagtcggaggaatgaagtacccatgaacgagcatatgaaacacgctgtgttttcctgtcaccgtgtctcaaggaaaattgtccagtgggaatacatgtaacaataattgttacatgtacttgcgctggccaattttttgtgtgacgcggtgacaggagagtgcagcgtgttttatgtgttcgttcatgggtgttctttcatttttcctactgtatctagtccatatatttaaataaaactatacagggtgtaacaaaaatgtaggtcatacattgtaccacatattctgggaccggaaatgggttggttggacctagcttgccttagtacaggtgtgcacacaaaaggagttacagctctttgaggttacaaaatgaaaatcgattttttccaatacatctaaaactattcgagattttttattgaaatggacatgtggtattcttatggcagggaggtcttaaaagggattatagtgaaatttgtgcaccccatgaaggtttggtgggggttttgttccctcggacccccccaagcttttgcatgcgttccaattaaatttgatattgtgataccatta

SEQ ID NO: 11183 - DNA, 646 bp, Diabrotica virgifera
  SmartBlast Evalue=2E-39; Info=Gametogenetin-binding protein 2 n= 1 Tax=Harpegnathos saltator RepID=E2BJS4_9HYME
gttagaggtctgctacgttgagaatctaaagaatgtaatagacatctaacgctctttttgtttctctttggttgattttcaattaattttgccaagcgaacagaatggtcatgaaaaatagatcccaaaattggataagcctgtttatcttctctgatagtgatagttccatcaggcttaacaatcagtggatccaaggttggatgcccataattgaataactgaaaataaagtctatccacacttcttctgcatccaacacatggcacattctgatttaaaacatgcattaattctgatttagtgatttgaagagcatttcgtaattcacaaggtggtaggacactccatttacaagcaaactcttcaagctctttcccacgtaaaacttgattatcacatataatcccagaccctttgatatccataacaagcgttaaattatcgtcaacaacaaggggcaattgcctcctactaagaggattcgactgatgatgtacatccaccagtttcggtagcttttccttgttattcatagcaatgcttttacaaactcctcgttattccaataccaaacaacgtttttaatgttaattttcaccaaataaataacgtaacaccttagaacaacatgacactactgcca

SEQ ID NO: 11184 - DNA, 642 bp, Diabrotica virgifera
  SmartBlast Evalue=2E-61; Info="N-acetyllactosaminide beta-1,3-n- acetylglucosaminyltransferase n=1 Tax=Aedes aegypti RepID= Q175J5_AEDAE"
tggttcatatagaaattcaaaattggttacggggtgactaatatgtacatcattattttcatccttagtagtctgccaccttgaaaaatttgtggcatactgattatagataaagactttatggtgaaatggcctggccagtcccttagtcgccatccttattagctcagtcttattatgaggaaacatcactctctcgtcaatttcataagttggcacaacaaaagcacacttccttcccttcttacacacatcatcattgaaaaacacatcaagactctcagccatgtttctgctgggaattatatcgacatcggtaagaaaaacgaatttcgtttgacaattcttccgagccaagtttctcagatgattctgaggatacggtaacttggctctccattgattagcacccttgtggaggtttctggttaagtgttgaagtatttctattggactatcacatttagcttctctaagtttctctatatctaggttaaacctcttcggtttgcggtccttggtcaatgctagatggaatgttaccttatcgttgattttttcattacattttttcaaatacgagatatagaacagcaaagcattgagctcgtcttcgctggctgcaaatgtcgcgagagaata

SEQ ID NO: 11185 - DNA, 640 bp, Diabrotica virgifera
cttaaataaataaaagggttttcaaaaaaacttttatccatttaaacttcaaaattatacaattttttgagatacaaattactggctctattcactagtttatctaaaatacccaatatatttgatacttctatttcagaagcttaaattattgggaaaaatagaatgactattatttccacaaccaaaaattatgtttaaagataggtgaatggaccggagagtaaaaaaaccttgaattactctctccaaaaccctaggaggaaaaacggccatatatctgctttttcttttcatctgcttttactctagttctttccttgtatgttatagcatgctttgtatcgttttgggacagacagtggggaaggaccttttacatccgacctacacagactgccccatctaaatgtcagaatgaatgggtggtaagtgtgtatagatgaaagtaaggaatgtttggagttgaatgaaagaaactatgaatggttggatgagaaatcatgcatagatgaaagtgtgattaactggagttgctcgtaactgccaactgacattctctggttagttccatcctgggttgggggacccaatatacggccaaccaattcatggaatacacgctagaagtgccagaggg

SEQ ID NO: 11186 - DNA, 637 bp, Diabrotica virgifera
  SmartBlast Evalue=3E-46; Info=Endoplasmic reticulum-Golgi intermediate compartment protein 2 n=1 Tax=Camponotus floridanus RepID=E2A0I6_9HYME
tgtattcggcaagcgtcgtgaggaacgttcggaatgtgacttcttggtggtaagtccccgaagtgggttgaaaaacggctcttccatagtaaatccttcactgcgtggtactcttctcttaaataagaattaaagtgtttcttattatcaaaatgaatctgttgatttggagccaattcaaaccaagtatcctcttcttcaagggtgccaaatttaaatgtattttgattggtagagtctaggatatcagcacctataaagtgacatggcatagcgactgttaaatcaatgttaattttcaactgttcgtctaattccacatctggcgaaaacttgaaaatgaatttgctatccaagtagtaacttatttcagaatatattagccatattattagtaagaaactgataattgaaaatgttccacctacagacgaagtttctttaaaggtttcttcaacttttggaaacatatccaacttcttcactttgtccaatttggaccctctataacgtaatagcgttaccttttccggttccattttttacgtgttataattttacgagatctttaaaatgccattttatagtttatttaagcttatctttaaaagcatttaatttctataatttacccaac

SEQ ID NO: 11187 - DNA, 643 bp, Diabrotica virgifera
  SmartBlast Evalue=3E-24; Info="BRCA1-associated RING domain protein, putative n=1 Tax=Pediculus humanus corporis RepID= E0VJY0_PEDHC"
atatattcttggggaattattgtacaaccctccaacatagcagttaagattttaaccgatattttatgtgtcttttttattatgaaatgtgttactttcttgcaatcgtatttttcttcaatttttattttgttctgctttaatttgtttttatatatggtgtccgtgtagtaacagaacgctaccatttgctttaaacaaaaaagttgaggctcttgacgtattagatctacctgctctagaaatatcgatttaaattcatttggatcatctatgcattctaaaggctttttcccaaagtaatcgactgcatttctatcagctccatattgaagcaataaacgtataattgacttatttcgacaagaaacagctttgtgaaggggtgttgtgtaatcttgaccaggtacgttagtcaaagcaccatgcttcagtaacatttctacaatttctaaacttccgctttctatagcttcatgaagaggaacccaaccagcaaaatcttgagcattaacatctacttttttttgtaataaagtaaaaactacttcaattttttttcttctgcaagagacatgaagagcactttctcctttgttatttactttctgtttatcaataaaattaacgtggtatgttttat

SEQ ID NO: 11188 - DNA, 643 bp, Diabrotica virgifera
cggtcttttggacctataggaagttggaacacggtccaaaagactacagtaataagcagcattaatatggtttgtctctcatgaagaaaatccagcaaaaaaggccactgaatttgtgttatggtcagtcgcaataaggtcatgaatgtggcgtcaatattttcctgagacgtgcttgtttttggacgtcgttgatggcttttgttttgcacggcatctcgtccttcacgaacttgtctatgcctaaaatttcacttgtgtactggacagtgttgattccccattttgattttttttcttcgctaaaatcagcaggaccaacattttgttttgtaaggaatttgataacaatgcgttgtgcaaccgaacatggtactactttctagtttatcgcaacagtaactgactgcacgtcattagagaacaagcggtagcgcgcattagactatataaccgaccacaggactaatctagacatataataatacataataataataatgataaaggtttttattacaaaaaaatatacatacaaataatgatcgaagtttagcctagacattccacaaatgtttacaatttaaatggcactaaattatagatatgaacatatagagtgaaacgaataaatttaaataaa

SEQ ID NO: 11189 - DNA, 643 bp, Diabrotica virgifera
gattacattgggtgataaatttattagagccttttatacaaactttctatgatgtccttgataagccgatcccagacaaccaaataacgtttaaaaaacattgaaaagacgttataattatcaccaaactacgtcagtttctcacgttttttcgacgtcgaaaatgacgtgaatatatcccaccataactgacgtcattttgtcacgttttaaatacgtgatataaaaaaacgtagtttttatgtcggttttttttatcatttttcattttatgggtttttaaaaatacacaataataattattcgtatgggcattggtggtattgcaatttttaatttaactgttttaaatttagcttataggctaaaagtaaaacgaaatgagagactataaaatgcatagaattacaataggtaccctcaatgcaacattatacaattttcactttttatataggtatacttactgtatcaaaactggaacagaaacaacatataaactaataaataacgtattaacaaattaatttaattaaactcgataacacataattagttcattaacagaaaataatcaaaaaaacaaaacacataacgtcaaaccgttttcaagaagaactattgcattaaactaactcacttg

SEQ ID NO: 11190 - DNA, 643 bp, Diabrotica virgifera
ccacactaccctcatccaatacctgattgtgactatccgtatcctggatatcctcatggccccataaatcctggtccattaccaccacatctaccacttcctcctcatcttccaattcctgaaccatgtgttggtctaccaggtgcctggccaaatgaatggccatgttatttcccatgtggttggccagatgattggccttgcgattttccacttggtttgcccaataactggcctattgattttccacacggattaccacatgactggcctaatcacttcccacatggttggctaccagataatttaccacatggatatcccaatgcttggccctgtgactggcctgaaaactggagggattactggcctgattgctggcctaattactggaatgattgtaaaattccaataccattaccacatggacatggatatccacacggaccatacccaggaccaggaccatacccatgcccaggtcccttatgaacatacccaagtccaggtcccttaccactatccagttatccagtttaattctgcattctaagctttgtaaggtattaggaataatgttcagttagcataagtaggtattgtgacttatattttattgaatatgtactaaaatataatggtt

SEQ ID NO: 11191 - DNA, 644 bp, Diabrotica virgifera
atctaactacaactgttgtccggcagaacgtcagttgctaataattatacaaattaatagtgcaaggcagagacggtctggtcatggtgacaactgcaactaacgtctgcagtctttgtcggaatcgtacctttaaagtagtttccataatataactatccagacaaaactttttaatgttattggtaacattatgtgaggaacaaaatagaaaaatgctctttgatttaagcgctcaaacaacatcccttaactaattttcaaaaataaccagctaacagatgcagtacaatcgacaagtcagcacccgattagataaaatacattcgatctgtcaatttacactttttatacctttagatatacaattcttaatttacaaaagtttccaatttgtaattggacaatttctaattgacaatactaaaaagtagatcagagtttcaatttttaaaaaagcatacagaaaatgaactatattttctggaaaagaagaattatttacaaaatgttacgttcaaagtactctacagagtatcaacagtttttatcttctaaataataggatattggaatggaaaaaatcacattatcgaatttctgcataacgcatatttaaaaattaactgcacagtaatacgtta

SEQ ID NO: 11192 - DNA, 643 bp, Diabrotica virgifera
  SmartBlast Evalue=4E-28; Info="Endoplasmic reticulum resident protein (ERp44), putative n=1 Tax=Aedes aegypti RepID=Q16I00_ AEDAE"
gttcaatatatttactataggtcttaatgcaaagttggtaaatcggtgcattttttatttgttattcctatagaaactatcacgccacgatgacttctaggatatcaaaaatttataatattagaactactctatttttattaactacgattatttacttaatagaaccgacagagagtggagctctacagcttactgaacaaaacttcaatactactttggattctaatgaattagcctttatcatgttctatactgactggtgtagatatagtcgagcgttgatgcctatatttgatgaaacagctgatgggatagccaaagaatttccagaagcaggaaaggttgtgttgggtagagtagaatgtgaaagagaaatgagtatatgtgcaaaatacgaagtcagaagatggccaaccctattaccctttagtaatctcccgccagaaaacagaacgaagtatacgggaaatagaacagtagaggctttaacaacgttcgtaaaggatcaatggaaggaattgaaggaactaaaggaaagaaaagaattaaaattagaatcagagtagacgattttcatcgttattagtcataggtatgtcaactatttatattgatattttatatgataataaaatatatt

SEQ ID NO: 11193 - DNA, 644 bp, Diabrotica virgifera
caggtctatactggttggtttgagtgtgacagcgcgcacagggatacatctgtgtttcagtttcagtgctgtttgttttgggcaatactgtattatttcatataatatttatttattttctgcactacttctttcgtaattattttcttacttcttttagattttttcaattacaatgcgtttaaaagatttgatattaattttgggtttcttgcgttcagttcacgcttaatatgatcgcataggaaagtgttttcgatgcattgttgccatatcgttaccaaaaaagattaacgaaatcttatttatgaaaaatatctagatttcagacttttagttcaggataggtaaagccagtgccaaatatttattccatgattttctaaaaatgttactagttatggacgtaacttattgatttacttgaaatattactttcaaatacgttttagtttagatatcagtattttttattaaaaccgtatttttaacattctaagttcttatgtatattaatttgaataatatacataccatcaaaaacaacacatttatttttgtatacttttcgttgtcgtgtttttgatattttctgttcagactgtgttgcaatacgaagaaataattttttttaaataaaatca

SEQ ID NO: 11194 - DNA, 642 bp, Diabrotica virgifera
  SmartBlast Evalue=2E-40; Info=Muscle M-line assembly protein unc-89 n=1 Tax=Camponotus floridanus RepID=E2AYP1_9HYME
tgagttcaccgtcgtcatccaggccaacccggagccccaagtggtctggaccaaagacggagtcgttgtccaagctagcgatctaattaagatcgttgaagataaagttaataagacctacaagttggtgttcaatcaagttctcttgggagatgaagggtactataaggttactgctacaaatgaattgggagatgctagctctgaggctcgccttaagactattaaggaagcagaaccaactaccgaaagaccaaaattcatcactggattagtcgatgatcaagttgaacataaaggagaagtgactttgatggtacgagctgatggattgcccaaaccagaaatacgttggtttttcaatggaaaaccaatcaccgaggacgacaaccgtaagatagtcacaacttcagatgcacaagttactagcaaactgattattacaaatttcggcgaatcgacagcaggaatttacaaagctatggctataaatgtggtaggagaagctgaaactacatcaagagtgacgatgctccaaactcctccatcattcggtaaaaaattagacagaaacatggacgtgaacgaaggcgagcctttagaacttaaagctaaagtcaacggaagtccaaaaccagaggc

SEQ ID NO: 11195 - DNA, 644 bp, Diabrotica virgifera
caaatattatctactggagaccaaatgggtagtttgattcttaccaaaggcgctaatggtgaaacatcatggacacgttatggaatatttgctgacaactcaccagagggtgccaaactaatctctgaattttgttcaacaaataatcagaactctggagattcggcaactgaaatgcaacctcaaatgccacctggaatgtcaccaccgccgaaacaattaccgacatttatgccgccgccatcgtcggaaccagattcagatgatgagtgtgaagacggaactggtgaatcgggttctccaaatgatagtgagtgcgatggaaatggagaagaatcacaatcaccaggatcagaatctggatcgacctcatctcaaggaggtctaaatagcgacgcgcctccggctgatggtggtataagtatggaacctgctggttattctccaggtggtggtggtgcaagtacgtcatctggtggcgctggtggcgctggtggcgctgggggcgctgggggcggctttaattttggtggtggaatatctatttcaggctaaagctcctcgtcgaaaggtagttcctaagagtatgcagtaaagaaaacttattttattgtatattatatcaataaattggaattatcggt

SEQ ID NO: 11196 - DNA, 645 bp, Diabrotica virgifera
tgaaaccacagacaccactctatgaagaaggaaaacaaggaaagtcaactctttaattacctataatatcgttttatcggcgatcaaaactcttcacgtctattattattaaaatggaagtgtttaatagatttatttgccattgatagagcggttattgatacagagattcatacaaataacgattaaaatataagagtggctacacaatattttaccctgatatctatttctgaactttctgacaatgttagtttacaggagcggcacatatataaatatgccgataaaataaatatgaactgttaacacagagaaatttaaaacatcttttactaacttaacttttttgactaaacagaaaaacgcaagaaatgaagcatatactatcgaaatgaaacaataaaaaaatgctaaacgtataactcgatctatataacttcagtttgtgtatttacttctttcctattagtaagtttttagggatgacctagaacaatcattttccggaggtgtaaaatgaaaaaattttatgctgtgatcgtatcatctttattgttacgtatatttttcttctgtatacgtacattgtgtcaatctaagaggttttttaccagaaaacattacctaagaaaataattgttc

SEQ ID NO: 11197 - DNA, 635 bp, Diabrotica virgifera
ttttgaataataacgtcctaaggaaataaatgatatttaattgactttgagatcatgtcattatttgtccactactatactagtcggacattaatactttaagattaagcattagcatagctagctaaaaattatattttgatattcaaaataatttctgtatggtactctattttttctactgtgccgtctttgtagaatttaaagctattggtgctataatggagaggcacaacttttttaaataatcaaaatagagaatagttcgctatgatattttgagctgcaagagtaattgaaagatttacgaatttttcattcgaatttagatacgatatcagctattttattaggttaataaaatactttaatacagatatatcatttacataaaactagagatagtaatgatgtataaaattatcttattttttgctataaatattaaaaagtttaacatctgagtatcaacgattttattattgtatgcgtcaataaatgagttagaaatatcagtttgtcaaaccagtttttactggatttgactgttttcatacattcaacatttttaggaaccattgccattacctacactgtattatttatcatatactgcaaatatattttatgttatc

SEQ ID NO: 11198 - DNA, 638 bp, Diabrotica virgifera
tttaaatgtgattttttacaggagaaaaagtattgtttacaaagaaaaatatattttttgccataatgactaaaaaacaattaaaatatgtacttatattacgacttatgcccgatttcaccaacgacacctaaatatttaagaattacctaagtgggtttaggtacttcctaactctaaaacggatttcaccatacgataagaattgcctaaaccgcttaagcattaccttacgttaggatacggatttcgatctccctaaactttaggtattacttatcgttgacagtcaggttatatttttacaattttgactaatgtacttgtgacgtttgtcaataatttgcttcttaccttaatttttctgttattctgtaatattaggtatattagttgtaattttgtattttcttttatattattaatataatatgtgttggaaaatatagaaaatatagaaaatcctttggagttttttacaggtctgttgacaaaattatgtagtctacctactatctaacaaactagtgttgtgtttcaaaaacccattcacgatataactaaaagtgtgtcattaaaaaattaataataaaaagcaattttcaacatattatttattttaaaattatttcattaat

SEQ ID NO: 11199 - DNA, 643 bp, Diabrotica virgifera
aaagagaccattttattgttcctcttatgaataaaactagtacacaaaaatcgtatacttacatggctcccaaactatataatactattccggactatattaggtacattgttaatttatatagttttaaacaccaattgaaatatttcttttgaatacagacagatcaattatacacaactactttgatatattataatgatccattggtagattgaattgttagatttaaatgtttttgttaccttttattatattattagacattaatatttttaacttaaattgatttttataaattttatattgtacatattgttgaatttatatttccctcgaattaaataatctatattattttaatttcaaatttttatacatagttttatagattataaattatacctatttatattattatgtaaccgaaacaagtgtgtagacacttatcggtatatgtactactttactcaaatattttatttatatatgtatacaaagctgtaatttttttttgaataaagttcattcattcatttattgcaagatcttgatctaaataagtaaagatctaaataagtaaaagcaagcaaagcaatgtcggatttagataccgagatgagaaaaaaattgtgcaaaatag

SEQ ID NO: 11200 - DNA, 639 bp, Diabrotica virgifera
gattagagatgggacggatcaatcaatactcaatctgataaggaacggcactgcgattaatcaatatttaatcgccgcggctggacggtttggccttaaatcagtactttatacgcccggtttgggaactgctactaaatcgatcctttagcagaggtgattggcctccagttaataaccttttggcggaaaaagttgtaccagatcaattctccggcagaactcatttctctattgtgacaaacgtcgttttatatagttgccggtgatccatctccaccgtacgtcaaatggaagtggtgggtagtgagcgcgtgtatacgcagcgctttcaatctagtggcgcgagttgttacccccttttctctttggaaaaatagttagtatacgttttttttgtgacgtacagcttacaacgttattgcctcggaaacggagtccggacaaaaaatccccacaaattatccctgggcaagggatcaccggacaaaaaatcaccacaaaaaatcccggacaaataatccccacaaattttttggacaaaatatctccacaaaaaatacccaagaaatatttgcagccgaataattctctaaaagttttcccgaaattttactaaatttcgaattccaattccat

SEQ ID NO: 11201 - DNA, 645 bp, Diabrotica virgifera
  SmartBlast Evalue=2E-32; Info=Glycoside hydrolases n=2 Tax= Aedes aegypti RepID=Q16ET6_AEDAE
cagcgtcaacagtccaattaggatcattggaagttttgactctgagatcattatcgtagctggatgtttcgaatttagcttctgtgtcgtcagcaactagttttgtatcaaagaattcgatcgccataaaatcaaatgtcccctttattgcgtctttttcggtttggttgaatatgggcaatcttgacttttgtgccccttctcctttgcttcgaaggtcagtcctgtcaatcacaacttgaggccagttgccagttttaaatattggatcagcgtagagaccaaactcaaacagatttcttctttcagcagcttctttatctgcttcattattcgatgctggaatcgaccatgaggcatccagggcaatggaaatcttggctccatttttacttgcaaattcctctttgaaaactttataaacagcagcatgagctttgagcaagacccttgcacattcatagtcatcaagcccggaatttgatgaaaatggagccaaactaccatctccgtacccatttttgcaaatagctcttggattatcgaatgttataaaatacttagcttcagaacaatacttgaacactttctggcgtacataacaaaagcgtctatgttgctttcgttggtccaacctccgtagtc

SEQ ID NO: 11202 - DNA, 643 bp, Diabrotica virgifera
tttttgggagtctttgtttggtcttacgaaacttctttctcgggatactagaggtgtcattgggttagaaaagtctgtgcgttgacttcttctaagctgtgcttcatgagacatttctacaacactttaacacactcggtaactaatgtttatgaacacgtaataatcgtttagcacaccgcacaccaatttaggcaaggatgccaaggttctacgccactttgtgatcagttagtgacactttcataattttcactgtgcactttgtgtattttagacgttgttttcagtttttgaataacaaacatgccgtttcaactcccgtgtctaattcggattcggatgctgtcagaacaacgcaaaacgccgcacattagtcgtaaagagctgacgcaaaattagaatgtatatttttaacgatgcacgcctagtattataaatagttttgtcattacgtacccactctatacgcatcgacgcgacgtctaaacaattatttaaagaaagatgagcttcatttaacaaacagttcacaatcacacaatgtatgttattatttggggatataggttcacattcctaggtgggagcggttattaacaatcggatgcaatttccgaaggtggcggttcaaacttccgcg

SEQ ID NO: 11203 - DNA, 636 bp, Diabrotica virgifera
gctagtggcaacgtgcttccagatttctgtgggagttggatgtattacagtcaatagtatttggttttattcaaaaagtttgttgctgctgtatattgcaaaatgtatgttttgttaactgaaaccatcacttattacaaattttcaagtcatagcatatcaagtgttataatctgtcaggatccatagacaaaagacaaaagacccaataagtaagaaaaagacacaattagtggtacacatttttattataacatataaaacaattaatttatattggcacttgacggttattcatatttttgagtcagatttaatacaacaatttttaaaaaatgttttcgaatattagaattttagttttgctttttgagtacctaccgtaattttaactttaccgcaacttatttatatattaaactttggtttaagttcttaatagtactatagcttttatgatactttgtaacaatatttgaattagaaaattaaaaaaggtccaagaaatgacaattttcttaaaatttgtttccggaacctgtacataactgatcaatgtcattaatgcagttatattttgtaatcttattaacagttgtaccacagtacaatgataaccaatacggccactccgcg

SEQ ID NO: 11204 - DNA, 642 bp, Diabrotica virgifera
gaaaacgtccatcggtagtaaattacagactcctttgtaggactactagtctagttgttttcttttttaattgtgaaggctttgttaaatgtttaacttatttttttagtcacgcttactaatttactaatcttgagtgccggcttgactggttcaagcaatctggttattctcaagaatgattattcatcattttgtatgtacgaggtcattcgtaagaaagcttccagcacgtcgcactctttttcaacgacatagggaacctttttttacgaatgaccctcgtaatttgtacaatttctagttaaaccgtgcatggaaattttcatatatttgaaaatatacattccagccatatttttcacaaaaatatttaggaataagagcattttttttatattttaagaactctggaggtgtcaacatacagtttgatagttactatagctagtgcatattcgctgatagatttgcttaaagttgatgttaagaatgatacagtacttaaatatttctgtgtggtatatgtatttgtttcgcaagaactaatatataaaacagaataaattttcaagcactgatagaaaacaaagccttttattggctgaaggaaacctgtgacctcagtgttatctaagaggt

SEQ ID NO: 11205 - DNA, 642 bp, Diabrotica virgifera
  SmartBlast Evalue=3E-48; Info=Mitochondrial 28S ribosomal protein S25 n=1 Tax=Bombyx mori RepID=Q1HQ84_BOMMO
aagatttaatggactaataattttaaatttaaacatttgttagtgttttttaaagctcaaaatgccttttatgataggaagagctcctatcaggaggactataaaatacttagaggcaggaaaattagttttaaaagacaaaataaaatagttacagtgaattataacatacatggacaaccacatcaaggaaccagagattttgttttttggtaccttccgcaaatccagtacaaaaatcctgaggtgcagatatccactttgaagaatatgacacctacacccttcatcagatgtttctacgatactggtgaacacatgctggtagatacttacaatcaagcaaaggaagacattctggagcatttaataagtgttgtcggaaaatcaaaggatgttttggaggcagaaattatggctaaggagaagaaagacaatcctgccaacttcggggaaggttacgacaaacagtgcatttgcgaaatccctgggcaagtaccttgctctggcacatgtccgttacccaatcagtggcgtggaaaatataaatataataaagttgttgaatagtttataggtattagaaataggcagtaacatgatactttttattgtaaataaataatttatatggtaaaaaaa

SEQ ID NO: 11206 - DNA, 629 bp, Diabrotica virgifera
  SmartBlast Evalue=2E-43; Info=Cathepsin D (Lysosomal aspartyl protease) (Fragment) n=1 Tax=Schistosoma japonicum RepID=C7TZL5_ SCHJA
ttgggaaattatcagaattcctttgaaaaaacagcaaaataatggagaaagaagattgggtaatgttgcaagaagaccactattcagtaaatttagaggtcaaggtgtagtgcctttagtcaatgaatacgatcttgattattatggagaaataggagttggaactcccccaaaaaagttcaacgtaatttttgacactggttccactgatctttgggttccttcttccaagtgcaaagtccattcaggtcaacagaatggatgccaaaaccacaaacaatacgattctagcaagtcttcaacataccagaaaaatggcaaacccttccacatccaatacggatctggagaattaagtggtttcctatctgaagacagtgtagaggttggtggtcttcctgtaaagaaccaaatctttgctgaagcaactgaagaaacctcccagtccttcgttacgagtacattcgatggtattctaggattagcttacccggctctatcagaagcaaaaccccagttttccaaaatttgattgaacaaggagctgttgacaaaccagtcttctccttttacctgagtcaaactgccaatggcgataaaggagaactcttacttggtggatcagactc

SEQ ID NO: 11207 - DNA, 643 bp, Diabrotica virgifera
  SmartBlast Evalue=1E-111; Info=Draper n=1 Tax=Tribolium castaneum RepID=D6W8W0_TRICA
gtgccttgaacaatgccgatgcgagaatggtgactgcgaccacatatcaggggagtgtcggtgccacgctggatacatgggaccactatgtgatgacttatgccctattggcaaacacgggtctgaatgcaaatcggactgcaggtgccaaaacggcgggacatgtgacccagaaacaggattctgtttctgtacgaatggttggacagggtctgtatgtgccaacagatgtcctttcggattctggggtgaaaactgtggggaacagtgtgattgttacaatggcgcttcctgtcaccacattaacggtacctgcgagtgtcaacccggttttacaggagataggtgtctagatgtttgtccggaaggtaccttcggaatcaactgtggtgaaaagtgttcttgccagaatggtgcgaaatgttccaatagagacggcacttgcacgtgttctaagggatggactggaaaacgctgtgatcagaggatttgccctgatgggtactttggcccaggttgccagaagatgtgccaatgtaacaaggagaatacagaaatgtgccatccatggacgggcgattgcgactgcaaagcaggatggaattctcaggactgcaccagactatgccctatcttgacttac

SEQ ID NO: 11208 - DNA, 638 bp, Diabrotica virgifera
caaatataaagtgaataatttataccatttagtgtcaaatacctacttgttaccaggaccttcccttagcctcgagtgatgaaaaacagcgtgtctcaagctgaggttatgtcacagtaactaaaccgaaattattcatccgcacacaaaatttataggttcaaatccgtcttcgtcttagacgatggtttttcgtaaaaccaacctattttatggcggatgaatctggatcagcaaaacacaacttaaattttgcaatccgagcactgtcgtcaagacaaaaaccaaaatggacagaccggatgtcatccgtctttgcttaatgtcattcgatctgagttccaactcagacgaaccattcaagcacggaaccactgattgattcagttacgtgacaagaacctatgcacaacctgtgaacgagggaaagacagcatatttctagaatctcaaaccattcctaaacaaatcaacagaacagaacctttttgcgaatgaaccaaatgttttataggaactaccataggcgtaaccagggggttttaaagtatttaaatatctttcaatttaacataatatataaatgagttgtgaaggtttaaaaaaaccgtaacattctaccgtttgagctatccggc

SEQ ID NO: 11209 - DNA, 643 bp, Diabrotica virgifera
  SmartBlast Evalue=1E-17; Info="Juvenile hormone-inducible protein, putative n=1 Tax=Aedes aegypti RepID=Q17LW7_AEDAE"
tttgcattcctgaagtaataaatgcctttaatctctcttcatcactataagtcgcatttccttcaaaaacatttttataaacattggcgctaagtttgctaaattgttcaggatttttatctttcattgccagagaaacagcatggaatttggcatattcttttaggactgctttgatatgaccagggttcattggaattttcttattccaaagtttgtatccttgtgtttttagattctccattaaaagaccttcgtggccatcttctgaagtacacaaatatgctttaggtacactagtaaatggatctacaatattgtattgcttttgaaattttttaaactcctcaaacacatgttcatacagatatatttctcgttcataagcatcgtgaagaggagcagcttttctaaaagcttcgtttgtatgtgcagattttaaaaccagttccaatgttttgtcaccacttttgattaaaattgtgcttattattcccataaaattgtcacctttgaatgatcctgcatttgaaatcacttcgtaatcactgataccgttctctttggcgaccctgtcgatcagttgtctttgttgttcgcttaattccattgtcaatgttaatgttacactcacactcaacgc

SEQ ID NO: 11210 - DNA, 632 bp, Diabrotica virgifera
ttgggaacttgcatagtgtctagtgtcatacagggcacaaatgtacgtacaagaaatgatacaagaaaatgtatacaagaaacgatatcagaaacgatattagaaatgatacacgaaaatgcatagtatcatacagccttttaaagtggtatgatgtatcaaaaaaattacgtatcatgttatttagggttctgtcatgtcctgactgtcagttacacatcactggtcagttaattcatgttaacccaactttttgcttgttttttttaatgtttatattttgaaaagatgaattttgtaaatcggttatttatgtacttaaatgctttggcagaaagacataatttaaatctagagtgacttcagttacgagatggatgacgagacaaccagtaatccgtttttatgagatatttcagtgccaaaaactattactgtgatataaaattaaataaaacattgtaattactaatagattaacaatcttatattttttatgtttagtgataatgtttaaaatttaatggactaagctcatgttgtaagtttttatgattcttttatacaatgcttttttgtcttaatttcattgtatttactgagaaaagaattataaatatattttagacttg

SEQ ID NO: 11211 - DNA, 643 bp, Diabrotica virgifera
  SmartBlast Evalue=2E-47; Info="Aldose reductase, putative n=1 Tax=Pediculus humanus corporis RepID=E0VMR6_PEDHC"
cattgtgttgggattttgtaccatgtttcttatatgtcggaatggtacattcatcggtcccatatatgaccatgaccggaggagttaagatgcctgccattggctatggaacatttttgatgatgaacgaaacagtgttaataaacgctctaaacgaagcgttgaaagtaggctaccgtcatatcgacactgcacaattttatatgaacgaacatgtggttgggaaagtcctcaaggaatggttaacttcagggaagttgaaaagggaagagttatttgtcacgacgaaactgcatataattaatgagtttcccaataaagtagaatcttctttaaaggaatctttacaaaagctgaatctagattatgttgatctctttctgattcattttccaatcgctgttgatctaacgaaagaaggaggttttaatcctaggccgaccgatctagttggagtgtggaagaaaatggaagaacaagttgattcgggaagaacaagaaccataggagtttccaacttcaacttaacccagatggaaaaaatcatgtcaaacgctaggattaggccagcaaaccatcaaattgagcttcatccctattaccagcagaaagaaatgcgccgatattgcaagaaacacgacat

SEQ ID NO: 11212 - DNA, 643 bp, Diabrotica virgifera
tgcaactgctcggtattgtaggtgttttattgtgattttctgtgagtgttgtggcaatatactttacgtatggagagaataaatgcttcaaacaaaaacctttttgagtgtcaagttcaatcttgatgttgagtttacgaacatactagttttatagattagatgacgactgaaaataccgatggaagctaacaatccatccttacaacttagtgttgacaatctagaaaaaccacatcgcttcagtcttcagcacaatcgatcagaattggtaccatcgagtttcaggcaaacacaatcgcaaagatatgattcagaaggaagaagaaaaataaagaaagcaatagtgattcccccgtcttcaacaatcgctgaagtatctgaagaggctgaacccgacgagaagaattttgaccaatttaaagtagaaaatgaaaaaagaaatagcaaagtttcgaagaaaagcgaaaagtcaatttatgcattcgataacgcagcttacgatggaaatttggacaaacggagtatatccagcagagcagggtcttcaagacaaccaagtgtacagagcttagaggttgttcgcgaacaatactgctgctttgctagaagaacaaactgtgaaaagaaacttttagttaca

SEQ ID NO: 11213 - DNA, 638 bp, Diabrotica virgifera
  SmartBlast Evalue=0.000000001; Info=TRAS3 protein n=1 Tax= Bombyx mori RepID=Q9BLI5_BOMMO
ggagtaataaggagttaggagcctaaggaaaggcctcaactcagcaagaatatttattgcatctgatagtcaggctgctttgaaggctctgaagtccacaacttacgagtaaaaaatgcctggaattgcaaacaatcccttaaacaactgacaagtcgcaacaaactaacgttgctatgggtgccagggcataaaggaattgtcggaaatgagattgccgatagtctcgcaaaggaaggagcttgtactcctttcatcggacctgaaccattttgtggcataccaaaaagccgcataatggaagaagttcgaaaatatgaaaaggaactcagtgcagcctactggaaaaatgttccaggccaaagacaggcaaaaaggttattacgaccctctgcccggtacgccaaattactcttagagcttcagaaatctgatctcagagtaatcacaggaattctcactggacactgctcactcagatatcatctctgtaaaatgggcatactggacagtgggacatgtagattctgcgatgaggcagatgagacgtcagaacatattatctgcaattgcagagtaattgttcggcaacgccataaatatctggaacaggtattccttgatcctgatcagattac

SEQ ID NO: 11214 - DNA, 643 bp, Diabrotica virgifera
  misc_feature (625)..(625): n is a, c, g, or t
  SmartBlast Evalue=2E-33; Info=RNA-directed DNA polymerase from mobile element jockey (Fragment) n=1 Tax=Harpegnathos saltator RepID=E2C5Q1_9HYME
gttatagtcctcttctatttcttccggttttttcagcctcgttgttatttcgatagtatcgtgaattatttgtcggtaagtgtcccagtttgttttattgttgtgcaggtggagttttggttttttagtgataactgttgtacttaccgttgctattattgggctatggtcagtagttaggtcatagcttggtgttatatctgtataagttataccgataccgtttgttatgaagaagtccaataaatctggtttttgttgggatcggtcggccagtatgttggtgttcccgttgagataaatgagtaattcttattttgtataacatgtgccagttctctgccttttgttgttataagtcgtgacccccacaaggtatgcttgctgttgtaatctcccccagcaatgaattttggtcctaaagtttggaaaaattcttcatagtgttctcgttttagattatggcgaggagggcagtacacagctgttacgttgacattatatggaagtgcttcaacgcatactgtcgttgcttgtatgtgttcttctttgtacttcagttagttcatgattgtttaattatttttctttgatgagtattgctgtacctcgtgggctgtgcgtnaggatgctcagtatgata

SEQ ID NO: 11215 - DNA, 642 bp, Diabrotica virgifera
  SmartBlast Evalue=9E-81; Info=Cationic amino acid transporter n= 1 Tax=Culex quinquefasciatus RepID=B0WQN0_CULQU
acatttcttacctaacagtgatgtcacccatggagatgatgaccagtgaggcagtcgccgttacatttggcaaccgagtactaggtgtcatggcatggttgatgcctctgtcagtaacagtgtcgacttttggctcggctaacggaacgttattcgctgcaggccggctttgtttcgccgccagtcgagaggggcacttgctggacattttgtcatacgtgcacatcagaaggtacacgccatcgcctggattgatatttcattctttgatagcaggtgctatggtaatgtacggcacaatagattccctgatagacttctttagcttcacagcgtggatattttatggcggatctatggtagctttgattgtgatgagatataccaaacctaattatcctaggccctacaaggtgccgattatcattccttacctggttttagtgatctctgtgtacctgataataggccctataatagacaagcctacaatcgagtacctgtacgccacttttttcattttgggagggatgcttttctacattcctttcgtgttcattacaaattgcgcattccatttatggacggcgtaacagtttttttgcaaatgttactagaagtggccccaacatcgacaatgtt

SEQ ID NO: 11216 - DNA, 635 bp, Diabrotica virgifera
agaaggaaagaaaataaatttatatgttgaaaatcaaacattatttttaaaaacaaaaaaaattaatctctgatctctctgttacaattagagaccagattaccaaataacaaagatgaaacgaaaaagttttacaaacataaaaattataccttacaatgaatgtcctgttttcttctgttggttggttggtaagtccaaaacgctatttcactacgcgaaaaaacacttcactgttaatagctacagcaaacagtacataaggttatccattgtttaaaaaaattatagaaaaattcagcattcaactcgaacaaaattatttagttaaactcgaacaaaattatttaaagttcaataaactggaacaaaatttacttttactcgaacagaattatcaaaagttcattaaactgaatccaaataaaaagtatgagcatacttcatgatttaactataatgttaaacatagtaatgcaaaaatgaaacttctaactcctacttccggatctgactgcataaaagaaatttgttgataccaaaagtggtatgagattttatcgacgattcgcttaaaaacagcgagaaaatcgccggagctcacgatacacatatacgccgggctgaatcaactc

SEQ ID NO: 11217 - DNA, 642 bp, Diabrotica virgifera
  SmartBlast Evalue=6E-23; Info=Low-density lipoprotein receptor (Ldl) n=3 Tax=Aedes aegypti RepID=Q16GY3_AEDAE
tattaacaagaaacttttatactatactaacaaacaagatgaaagtatacacgaagtaagctacaaaggaggaccggttaaaactgtattttcaaatatctctcaaccagaaggactcaaatttttcgagaaccaattatactatactgttgcaactggttatatagtcagttgtaagctatatggagacagatcctgcaatcccagatataaattacacacgtttgccagtggtcaatttgttattgagcaggaatcgcttcagcctaaagtagaaaatgtttgtactggacacaaatgtccatacttatgtgtaccagcagaatcaggatatagatgtctctgtcataacgggaaagttagtaatcattcagaaatttgtggtgaaaacgatgataatcagtcaggaaataaccacaaatttgctgtacacactacaccaatacagactgcatccgataaacattcaggagcagtggcctcagcaatattaattccactactattagtattccttggagcagtattttattatttgctaaaaaggagaggtgatactggattaaatataagcatgcgattttataacccactctacgggaaacctgtccgtgaagaccaaaaacaaatccttaaaccagg

SEQ ID NO: 11218 - DNA, 643 bp, Diabrotica virgifera
  SmartBlast Evalue=4E-48; Info=Mitochondrial ribosomal protein S12 n=1 Tax=Bombyx mori RepID=Q1HPJ4_BOMMO
ttttgatgttgcgatgttattattattaggagtagtaaacaaacatagaacattaaattatatttacactattagctttaacaaacattattttctattaataaccacgtgagataagtcatattttcctcggacacatttgattttcacaccgggacaatcctgtagtcttcctactctgcaaagtactatattgtgttcctgtaaattgtgtccaattcctggtatataggctatcatttcttttccattggataacctaactagcacacattttctattggcggagtttggtttcttcggttttctgatcaaggtttttaaaacgacgcccttcataaagggttttccatcaaaaggattacgagattttctctgttttatgtgaggtcctttcctgtgcatttggtataaagaagatgcgcatctttcttgaatctgaagagctgaaaattgagttgaaagtagtgtggaaaaatctgttagacttttcttttcaacaacacttttcgcgattgaaaccagtgtttgacgtactggcactttaggaatgagttgttttaaaaagttcattgtagaatgtcactacacaagaaagttaatcaacttattctttaataaaaatattggttttaaattatac

SEQ ID NO: 11219 - DNA, 643 bp, Diabrotica virgifera
  SmartBlast Evalue=2E-63; Info=CYP4BD1 n=1 Tax=Ips paraconfusus RepID=A1BPR9_9CUCU
caattcaaaatttcttaaaattttcgatagcgtactttttacttctagtattgcaaatttttgacctatgcaatttctcggaccagcactgaaaggagtgtatacgtatgggtttgttaattttgcatcttcaaacctttctggaataaacttaagaggttctggaaaatactcttcacatctatgcatagcaaaagtggacagcaagatattcataccctttggaagtagatttccatcgtattccatatcttctggtaatcgtcttcctaatacaggcactgaaggatacaaccttagagtttcttttattaccaggtccaaatatttcatatcctgaaactgagacacagtgggtttagcatctacaaagttaccaaacatttccttttgttccataaatgctttttcctgaacttcaggatgattggccaaagcaaacattgcaaaacttatggcagacgaggttgtatcgtggccctcaaacataaatgtatcaacttcctccctaatgtcggtcctcaataaaggttccccatccattgaataatctaggagcaagtctaagaaggcctgttttttctttataccaatgttggtattttcatcaactaaaatttctgtctttttcttttttcggata

SEQ ID NO: 11220 - DNA, 642 bp, Diabrotica virgifera
  SmartBlast Evalue=0.000000001; Info=Polyprotein n=2 Tax= Pectinidae RepID=A2TGR5_MIZYE
cattgtgttgggccattgtgttgggagagagacatgttcaaacagtcaaagctgcattggaaaaatgttccattcaacagtcggagctcactatggagcagcaagtggtaaatttcctatttaagtatagaaatacaccaagtgctagtactgggttaagtcccaatgaaattgtcttcaaagttaaacctagaaccagaattgaccttttaaaacccagaaaggaagggaaagttatgttcaacaaaaatgttgactatgtaaaaccagatgtctttactacaggtgaaaaagtgttagtgggcaaattaggtccatatgttcaggacaaatgggtagaaggggttattgtaagatgtgtaagtgcaactacatattttgtaaaggtagatgataaaattatgtataaacatgtgaataatttaagaaaattaactaacacacgtgtaaacttggatgttgaaaaatgtacggagcttttaccagtatcacatgcaaatgtaggcaatgacatggttcctatagctaaaattccaaattcggatgaacaagacaaaggaaatttgatacaggtaaaatctccatccatccaaacagaggcacaccctagtagtagcctgtcacaagcagttagtggtgact

SEQ ID NO: 11221 - DNA, 642 bp, Diabrotica virgifera
  SmartBlast Evalue=5E-22; Info="CG9134, isoform A n=2 Tax= Sophophora RepID=Q9W0I2_DROME"
cattgtgttggggcattattcaattcggttatactgttgacctttgttggtagcacccttgtaacatcttgcaagggtcttcttccggtgtcgcctaaccgttccggatgttgcaatgtgataaagtgggaagagatttttaccaatagtaaagtgggaagagatcaccaagcatcagttattcctctcgaacattggggaaataaaagctactggataggctccagctttcaggctacttggtttggagcaatagacttttgctctcaaatgcatatgcagttacttaccatcaactcagcagaagaaaatgaagcaattttcggatatataaaagaggccaagaaaggttttgaatattggacagcaggtaccagactagtcgacgaaagtaagtgggtatggttcccctatggcgatttagtaaattacacaaattggtcgaaaggtcaacccgatcatagaaatggagaaaaatgtttacaagtttggaaagctgataaaaacttacagtggaataacagagcatgcgatgtccgctttcatttcatttgcgaaagatacgactgtcaaaattaggcaaaactaccgtcaagattgtaatgtccttgaaagtaataaataaacattagcattaccagt

SEQ ID NO: 11222 - DNA, 642 bp, Diabrotica virgifera
taaacactgagaatatctacaataggtataagcactgaaacttaatcgagtagtttcctatatttgggagatacaatttttgccccaaataatgtattccaatttatttgtcgaatacagaattgtggatatgcaaaggaaattttaataactaggtgttaaaaaaaaacagagtagaacgaacacactgacaaaatggaaaaaggaacaatggtagagaattgcttgaaataaatcaccagtagggcatcagaggatcttacagtgggtgaagataaaacagacaaattgcgtaaaatcaaaaaggaagaattgttaaatgtgtaaaatatatgaatgaatcagtagttattcaacttgacaacatagagaggtagattacgttaggttgggttgtacgtttttccaatataacagctgagattgcagaaaaccacaaagttgttttcgaaacaaaaacgtcagtaactggcatttagatagtcgctttagataggaaagatatcaaactactaaaaaaaaattgtactgcaatcaacacgccagagttacgaaggttccacgtccgcagaagtagaaattaggagggaagttagacaaggatgtgttctgttacccctgctatttaatatttactccaag

SEQ ID NO: 11223 - DNA, 636 bp, Diabrotica virgifera
aaaaaagtagcacattatctgcgagctttgcattactatattattattacatagaatcatcatagattcgattccagcagtggaattgctggtaaataacttttcccaaaaatggcctattctccgataatctgcacagactaaaactaagggaagattcattttgggacagcatatgtcgtgagaatcacatcagcgaaaaccaaatttaggattcaatgactattagaaggactataatataaatttcttgtttttgtcattaggattgctacttacaaacatcacaaaaaagtctacgtttattttaatttatttaaagtaagttcttgtagatatttgtgatgataatcatttttggaaataaacttaagaaacatattttttacaaatttagcaatctaatttattgaatgtaattaaagcttcagaaatattaaatattttgtttaatagtgtatctcgaggcttgatttattcctatgtcgccgcgtctatggtcaggacccaaacaattataagagttaatttgaattcattttgacagttaacaaaaaaatttcaaaatttttcgtcaaatgtagatttaattttcaaacgactgatctgtttaccttctttaaaaaatgtatacga

SEQ ID NO: 11224 - DNA, 638 bp, Diabrotica virgifera
agtagctccactagctatttatttattgtattaaggatgtgatatcccttatatttacttaaatttggttatatgccttttattttatataaataccagaatatttgcaatgcaattcatttttattatgtctacattatttgactatagttacttacttacttttggattattaattaaatttgattattacttacactttatacgataagtctttataattttgaattaatttcatacttttttaaagtacatttattttttttaccagagatagatattctctgatgtcatttatttataataaatattttatagtgtgatgaatgctacaattcattgggtaatatttttattttccccagagtaacatctgaaaattattttggtactttaaaattttttatgattaataatttaaattaactatatacattgacttaataattactttattatgagtatttatttttgatttgttttgaacgattactactgcatatatttatttctagttagaactatgtcttcttattttctttgagaaaaatttctcacctgtcttcgaaatttttctgatgagtggagggagtgtgtaacattcctgttttctgtgagaaaaatttctcacgtgtgtt

SEQ ID NO: 11225 - DNA, 640 bp, Diabrotica virgifera
  SmartBlast Evalue=2E-31; Info=Putative homeobox prox 1 variant 3 n=3 Tax=Neognathae RepID=B5G0L3_TAEGU
accccatacattaaattaaatattcattccaatattcaattaaatatttattagttaatgtgtttatttagaaaccaacttttcctagtttggtgtccgtcttagggttagctgtaacagattgtacagctacaataagttcgttagctctcgtctgcaaatttcgcatatcttggatgtagatcatcctcaatatttttgctgcttgattcaaaactggatcatttaaatcaaagcccagatcagcgtcttgaataggaaagggtgttccctttaacacatatttttcgggatgttcaacacaatctggtgacattctttgaattaccacttttcgtactgctttcagtgtaacaaggggatcgggatgacaaactacatttagaactttagcaagttcttttataccttcagcaaactctggactgcgaaagtctaatttatccaatatattctctgcaactacagctggaacattcttggcttgtaagttttctactgcatgtttcaaataaacgtttttattcttttgtgtttccaactgtactgcataacccaaaatccactgcaattcttcagttcgatttttcaaaggaggacagccaattccatctttatatttggaaaaagtattatgcca

SEQ ID NO: 11226 - DNA, 641 bp, Diabrotica virgifera
ttgatgatgatgttaaaatttgctctaaccttttctattctgatttcctggaagtaatcatttgtagagttgatgatacttccaatacatgtatattggtctactcgttcgacattggttacgtttatgagaagattctcattatttttttgagtgttcgatattctcataaattttgtcttcttgacgttcattgttagaccgtatgctcggctattctggtcacgaccctaaagattttcaataatttcgacaaagatgacagtgtaatccgcatatctaatgttgttaatgggaactccatttacctttactccagctgtttagaatagaagataatagaaggtgtttgctgctgattcttaatcataaatcttaaactgcacaaagatgagagataagtgtattgataaaatgtagatgtttacaaagatcaatttatatttgataaaatagttattagaccataagaatttattgaagaatctctaaagattatttaaagataagtgatattctgatataggaaaataaaaataactttataaaaaaaatctaaatataaagggatcctaacacaacattgtgcggcaaaaaacaactgagtatgttgacgcaacgtagagtgccatctgacggtg

SEQ ID NO: 11227 - DNA, 638 bp, Diabrotica virgifera
ctgaagttcctgtctctactttaaaaactgaggcaattttagttctcttggttatataccaatcacagagccagtacaatccattcctcaagttgctactgctaatttatcagaaaaactttggctacctaaaactttgtataatttgcaatcttctggtagttttgtttattcttttttagaaattattctgaaaaattttgcttatgaaggagttaacaacgatttgaaattggctagagatatgattaaggcctgtttggattacatcaaagtaaaggacacatttgtagcaactgttttaagttgtatcttggatgctgttcctactaaaatgaacatatcctccgaagctaaagaatggctgacagaaatatttgagtcaatagaaaaccaatatccttctcctttcgataaggaaatatataaaattttgtcagtatctacaaataaaacattgataaaaagaagaaaatctctctcaaaaattttaaaaaataccactacttaccaaggaaaatttgatatttttgacaaactttatcatcctaatccagcaataagaactgaagcattgaaatttttattagttgattatgattcccttagagatactgacaaagaaataataaataatt

SEQ ID NO: 11228 - DNA, 641 bp, Diabrotica virgifera
tttccaatcatgttctatgttatacactgtgtatccgctttttctcgctagctcttcaatatgggtcaaacgttcctttgttggttccaaactgaaggcagtgagaacacattctcgctccacttgggtatatactgtaaggaaagtacctaatttacagtaacctttggctagacgagaacttgctgctgaagtcatttcctcattttttttctgttttgtatttttctaattcgttcatgtcggtcgtcagtgctcttatatacatttgtattatacaaggattcaattttttcgcaggcacttctttcaatttaacctgaaagccttgaaggaattcagacaagcaatagagtaagggtgcctttacaaccaggatcgccaatttggctatatttttaccaaaatttgtttccagttcgtcagccgttgaactgataattaactgttccagaaagtatttgatatagttttttaattcttctgtttcgttctcattacattctgttagagctcgtgtaagtaacacttgacaagccacatgagcaatagtcttactgtatctccaaacctttgagatttttactcgttttttcgtaaatctgttcactagcctcagaccgctttcaaaactcaattct

SEQ ID NO: 11229 - DNA, 642 bp, Diabrotica virgifera
  SmartBlast Evalue=9E-30; Info=Vacuolar ATPase M9 (Fragment) n=1 Tax=Simulium nigrimanum RepID=D1FQ69_9DIPT
ttcattcaaggagtggttagattgtatgcactgaatttctgaagtcatatgattttgacagattttagtttactctacttgtaaagtgaaaatctattcacgtgaattattttacacttacacccttcaaaaactcatttataaactaaaaatgggtgcatctgtaattcctttcatagttttcactgtattatggggaggagttggagctgttctacccatttttgtacctaaaggacccaatagaggaattatccaagttattcttatgataacaggtgtgtcgtgctggttgttctggctgtgttgttacgtagctcaaatgaatcctctgatcggtcctaaactagaacaaaacatcgtgctgattatggcaaaacaatggaaatatgcattaccatcgtcagcttgaatgaaggtgtgagtgaccattccatctggatagtgtgtagaaatttcaaattgcacagctattgcattgtattatatttattattaatttcctttttgtgatcatccaatatctgtatgtagtatgttttaaagtgatgtgtataatattgattattgtttatatactatcatcaaaaccaaccattaattgtaaaaaaaatattgttgaattaaattaatttgtcagtt

SEQ ID NO: 11230 - DNA, 639 bp, Diabrotica virgifera
  SmartBlast Evalue=6E-69; Info=Smad anchor for receptor activation n=1 Tax=Culex quinquefasciatus RepID=B0WAF7_CULQU
cccagcaaatgctaatatgtggtcgcttgaattatttaaagattttatcacctggtcatatctattaactggaatggtaagagtagtatttttgtcctccatatgaatagtcaagccgttgatctgcggcagagtatatgaaaaattcctaaaatctgctaacaaattaattatcgtatgtccaatttctacaaacacgctgtctcggtgtctcgtcgatatcacagggcttggatagtacctatattctgctcctaatctcaaaatcagtcttaaggggaaaagtttggcccacggcgtctcccaccgatgtattaaaatacctatcaaaaaaggttctttgggctttatcacattttctaaacattggaaagtgggccggatatagacgaatcccgcgtggttcttggaatccaaaaagttcgatgaattgtggagtgataggccaagctctttaattgacgtacctttcactgcatccgcataaacgttattaatatggtaaaaaacatctttcggcacaaagactcctcatctatatactctaaaataattacaatctcgtcctgtccaacgttgatgagtccctctgtagaaaagcaccatgccgtcttgttaatgcagcaactcatatttatg

SEQ ID NO: 11231 - DNA, 640 bp, Diabrotica virgifera
  SmartBlast Evalue=1E-56; Info=Probable cation-transporting ATPase 13A3 n=1 Tax=Camponotus floridanus RepID=E2ADC5_9HYME
ctagaagtaaatggggatgctacggaggattctgcttctgataaggatatgccggtgtgggcagctctaagggcgccacaatcgttagcgccgtcaccacacatagctacgcagtatcctagcccttgcagttcttgaacgagctgttgtttctggtcaggtgccattctagcaaatatagtacctctggtacaaattcttggtatcaactctggatagtaatcccttataacgccccagacctttccagtcatggcgaaccgatagttattcaacataatgctgggccgtttagaactgggatcgggaactattgcactattggtgatggtttggacttggctctccatagtttccaggctcattatgctagccgaatacgacatgagactgttgtctgttggcaatttgactttattgctggtcagagtgtagacaaggtttggcgggtaactgttgtcgcaattaacggtgatgatactttgtccgggggtcacgatctcgcagtctttggcgacgcttagtgcagttaaaatattatcccctgtaaccattataatcctaatatttgcatcatttaaatcttgaatacagggagtggtcagtggtttcagtctgttttccaatactatcaatccca

SEQ ID NO: 11232 - DNA, 642 bp, Diabrotica virgifera
ctatttaaacaaggtgaagaaatatcataaaaagtgctatatgcaatataataagataaaaacttatggttgccttttgctttgatctaacaatatcttcaagtgataaaatataagtagaaaaaaatcattaaaataaattttaacacagatctcaaaatatacacctagtagcaatattgttatagtatagtgactctttttcataaataagtaaaaaacctttaccactcgtctaaatataaatacataatacttcttgggtaccacaggaccacttacactaaattataataaagtattcttaataacacactgccattaatgtcactgaaccgaaacatcgagttttcactgctttcggagtaactttctccacaatgacctggtcgttctgaggctccatctgcactcgatcaagatgttcttttataagaatctcctcctggatatcaccgttcgacattacaatatcgtactccattggaatcatctgaccccctaacttgtcttcgtccataggcacatcatagtagtgtctcttatccagagtcctggctaaggcaacggtaatacatagaatgatgcaaaggaagctaattctgaaaaccattgtggtggtacggatctgctactgctgct

SEQ ID NO: 11233 - DNA, 642 bp, Diabrotica virgifera
  SmartBlast Evalue=3E-46; Info=Trypsin-like serine protease n=1 Tax=Zabrotes subfasciatus RepID=Q1PAE8_ZABSU
tccagatcctagatatcccgcacataacataccatttgttacaatttcttccatgtatagagattgacacttttcatttgttataataggaacttctaccatttgaagtacgtctgatacttcaccttcttcagcttggaaaccccatccacttacaatgcccatttgtttaacagggactttgtcggtacttctaggcaatgctataggtaatatacactcactgaaagataatggactgcaaagttttaaaattgcaatatcattaatcatagtgtcagcactatagttttggtgtacatgaacagagcaaactttcattaccgttcctcctctgttactataattacttcctgctctaatcgtgtaagttcttgccgtatttgacacacaatgtgcagcagttaagatgtaatagggatggaatatggaacctccacaagcatgttgcgctgaccttcttaaagatacctgatatggaaatgaggtaatattagcatcttttcctccaacaattcttccatctaagtgaggaatattagcattttgacagttatcaataaacttaacgatgaaaaagaaaatagctgtacacagtttcattctgatgaatatcacatacttttcacacaatcattttct

SEQ ID NO: 11234 - DNA, 640 bp, Diabrotica virgifera
gtgtgctaggctgtaaaataggatggttaatggtgggatttaagtttaagttaggatgtggatgtgacacgataggattggttagtgtagtaggcatttgcatcatagtagacgccgtaatgacgtccataggatcattctgcttaatatcgtgttcaagactagccaatgattgttcgatagggtcggtaaaggtaccaatgggagaaataatgttaggtttaggtttatcaggagaaggagtcggtagcgctaccgatttgggagcttgaggtactgttggaggcgttatcgtaggaacggtaggaggtaagagagttgtgacaggcagtttctcgattgacttgataagaggcggcaccgtcggagcgataggggcggcctgtagtgatggtttgatggttatgctcggcgtgaaggcgggtgcggctggcgtcgtttgcgcgggaactgcgacgtttggaactggcgccggttgaattggtggagctatcgtatttgtcgttgtggtagtaagcggtggcacggttacagttgtggttaaattagcggttgctgctgtcgtgatagctggtgcggcttgtgacggcggtgcaggtgttgccgtcgtttgaggcggcggcacttttatagtcgtagt

SEQ ID NO: 11235 - DNA, 629 bp, Diabrotica virgifera
gcatctctcattttgaaattaattactcagtcatttgacaaccgatttaaaaaaaactttatatcgcttgataggtgaatgaccgttctttcaatttacataaggagtgtactgggtgtttcattgaaaaagggtcaacaatgttttttcaagaattcgccatttttaacgtaattcaaagcgttataaaaaattcagtccgttcaaacagatcttttaccggaatgaaatatttcagcgaaggccgcatatttctatcttgagccgtttggaggtttagtcagttgaaatgggggaaattataagaggacacccggtactattttcaaatctctatgccattaatatttcacgcgtagcaatgcctgtaaacgtatctacaagcttgttattatctacgtattataaacatttatatagtatatatatcagcattaagattagtctgtcttgaatgatatttatttggatgactagggagcactttgccgtcaaaaagatattaaactattggaaatccattcaaataatatttcctctaaattacacaaagtataaagaaaaaattgcagctatatgcgtatttcataaatgtgttccttggtcaaacgacctcctttgtatgtttg

SEQ ID NO: 11236 - DNA, 641 bp, Diabrotica virgifera
tgttgggcaccgagaaatttttccagatttcaaagtagataatcgttggataatcaaccctttatgcctatctcgtctacaataccagctttttttattttctgatttcctattactgtctgtttgagttttaaactcttctatctatcttaaaatcctcatgacataccaaatactttttatttatataaatatcttatatattctcatcttcttctcgttcttcttcatcttcttcttcttcatcttcttcttcttcttcttcttcttcttctttttcttatttttcatccattcctttttttttctcttatcaaattattatcaactggtctttgcagcgtatcattattgagcatcaaagtttgttatttcgcatttatcagtagcagtaatatgtgcatgggctaggatagaatcgacttgacaatttaggaatcagtaaaagaaaaaataacgaagtaatattagaatgacaaaaaccaatacgaaataatcagttatgggttacgttcaagcttatttacttataaacaccacgtgttgataatacctatatatttaaattatttatatttaaagtatgtttagtgataagaattaattgtctttatgatatattgccgtttgtgataagtata

SEQ ID NO: 11237 - DNA, 641 bp, Diabrotica virgifera
  SmartBlast Evalue=1E-107; Info="Glutathione-S-transferase theta, GST, putative n=1 Tax=Pediculus humanus corporis RepID=E0VJ12_ PEDHC"
cctctggtggacaatcaggttgattgcttggatgtgctgctcggatagctgggtgagcttctagctctctatcaactcttaaaatagttggataaggtcttaagtctacgtggaacctccttgcattaaaaacttgaggaataagacaacaatcagctagagttatttcatccccgacacaatatttcccagcactagcagctaagagtttttcgacggctttgaaaccgcgtttaatccaatgtttcgcccattcatctttcttttcttcgccgacgtggattagaactgtaagattttgtaatggctggataccagatgctattacttcgcatatttctcttacttttgctcttttaatacagtcattgggcattaacggcctatgaggtctggtttcttccagataatgcataatatttaaagattctataagggtggttccgtctatgtgcaaagctggaacctgttccatgggattgacatctcgatagtcgtttgaatgttgttcccctccagcttttatcaatgaaactggtttgatatcataggggatttcttttaagttcagtgctattcgaactctccacgcacaggaacttctccaataggaatacagaataggcttgattaacacagac

SEQ ID NO: 11238 - DNA, 640 bp, Diabrotica virgifera
  SmartBlast Evalue=2E-36; Info=Schnurri n=2 Tax=Tribolium castaneum RepID=D6WSD0_TRICA
aaagtacggtacatagaacggttgggttttgttgagtgtgcaatacacgggccgcgtagaactcttcaaccccaagtagctgaagtagttgccgtgaagaaaatgctgggcgtacttcttagctacccttggcgtatcaggactgattaaaatctggttgaacatggtcggtgttaacccgtggtgttgtttcagagaagccatcgtcggtttgagggccaaactgttaggtctaatgaactttttaacttcttcaactgatttggtttctaaagactgttctagagatttgttggtctttgtgctcgtctcagaactgtctgatttaggtgacctactcattctttcattgaacttttcaggttgtaggaagtttcccgatgattttaccaagactctttccatttgtaaattatttggagactttaatctgtcgggttgtagaaaaaaccgggtaccatttttttcttgctgtgtatagatttcagctaatttaggagttaatggagaccggtctactatcaagggcgttagaggtgtcttgtccacaactagcggagagagaggagccatactatgctgaaccgtcctagcaacagctataatgttgctagagtattcaacaggtggagcttctgca

SEQ ID NO: 11239 - DNA, 632 bp, Diabrotica virgifera
tttttggagaagtattttgctattttgaatagtctgttagtctgtattgttttaaaatggtgctattaaatactggttcgcctgatccagatcatcctaacgaagatttaagagtatctaatgaagatgttctggttataacagacgatgattctgatcaagaattagatacagaaaatttagatccttcaatgttgcagtatggtcattatcagcttttgccaacatttcctcagcctttgccaacatttgctaatgaggcattagatattgattattcggatgaagacgcagataatggtgatgaaacacacaatgaagtaagtaacgcaccaaataatttaccagaaattccagtacctcctgtaactacaatcgaaacaactctacttaaagaagtatggtctgcatcttcatcaagaagctgtgatattgaaatggatagcaaaaaagtggatgaagtaaaacaagcaatgtcgaacatagttcttcctcctagtgcaattcccgattgggctgcagatattcctgaagaagagtggaaacaacagttaattaagaggttagaaaatatcgggagagaacaaacacatcatactactattggtaatatattatataaattatatatg

SEQ ID NO: 11240 - DNA, 641 bp, Diabrotica virgifera
  SmartBlast Evalue=7E-12; Info=Endonuclease-reverse transcriptase n=1 Tax=Bombyx mori RepID=D5LB38_BOMMO
tctcttttcatttcccttcaaagtattttacttgcgccttgttttagcgtcgtcctgatctcgtggttataatctcactgtatttattgttatctttgtttttacgttgtctccgttgtttcatcatctttggtaaccactttctctgatctgaatatcatccaaaactaaacagattaatatataacttacgagatgcaattctccaatacaccaggaatttctgcttcttaaaaaatataataatctgtggatcttcttctggtgcgcactccactaatgaaggttagtaaatgccattgaaaatgcgtctccatcttctgcttttcttaaaaccgtctgtgtgtttaatccggtccggtcacaaatgtttttcaaccaagatatttgttatcgtctatggggaccccctttccttcgattttactcttcataatcggctgcaacaattcctacttgtcatttctaagcatgtgcccctaatatgctatctttctccgtttaatggtggtcaaaagttctctgtatcttcccattctatgcaaccctatttcgttcttaatataaccagtccgtggtattttcaaaattctcctaaaaagccatatctcaaaagcttccagctttctcattaactcaac

SEQ ID NO: 11241 - DNA, 641 bp, Diabrotica virgifera
cgaattaatcagattaatctaaagtaatcaaagtaacgatttgcctttctgtatagtaattaactttgtaacgaatagttacttttcaacatcactagtttttacgctgccgaggtaataaaatagttgcgagtgcaatcagtttcagacggttttaaaacagttgtttcgatgccgtgggaactagaccttagtgttttaaaggagtaaaataaaacaaccgaattctctccttataaaattttcttacttgttcggtaggtactcgtccacgtagctttgactttagcagaatgatcagtgtatattatcttttaggaatttttttcgttatcattcctttattataaatatatttaaaagtagtatgccgttgtggtaatatgttctctagaacagtaagacctacataaaaacaatcttaccagtgtctattactactcccctaatttctagaagtttaaatccaggcctccactgtactaagtacgacaggcaggacatatcatctcaacttaccgacggaaaatactctatgttttcatgagtaagctcctatgtactccggtttccacaactggttagaaaagaaattgtggactatcgcaatatctctatcgtgatctggagttgctatgacg

SEQ ID NO: 11242 - DNA, 638 bp, Diabrotica virgifera
  SmartBlast Evalue=9E-11; Info="CG2371, isoform B n=4 Tax= melanogaster subgroup RepID=Q9VYV9_DROME"
aaattattatacaactgttgaagttcgctctgggtaaattccatgaatattctttctttcttactattgtctaccgattgtgcaagctcaaattgcattcgtccaacagggacactctgtttattatttatttgatctgcaacctgaatattcaactcccaagaaacattttcaagcttcattctgctactaaaatcaccaaaatcttcattagtgtgattacaccatatcttcacaaattcttccgctttttcatcctcaaattccagctgttcgcaaagctgcttatatagaactgtgggtttaagaatgactttactggattgcttgaaaatatgtgaaatagactgcactagaagttgcaatgcatcctcagttaacttcaatggagtcttttagttttttcagttcttcatctgtaaacggattctcgccttcagcttcaactatgtggcccaaaagcagctggaatttttttgttgagagggagtttattaattttactccattttttaatctttcatttacattaatccattttagattcattgttatcgtgtttatcttggtttatgttcttgtttaataattgttaaaatagaaatatctacaataaaaactaatgaaaatataattcc

SEQ ID NO: 11243 - DNA, 639 bp, Diabrotica virgifera
agcttgatacgctttttgtaacttccattattaaagagtacggtactctgaaccttttgacttccatccacaatatgttaatcttcatatgccagcggaatattagacacataaatgaatcaaatgaactactcggcagccgcgttgctggtacctaaacaaagtttgtcaaaacgcgggagacgcgttgctagcactcaatagattaattaatattggagccggtacctattaataaactttatcgacaaaattaaggtaaatgtaaatcatttttggacgctagtaggtggatccattgctctctaaatcaatcgtatttttgtttatttgacatattaatatttcgacagaagaaatcagaggcgtcacttttgatcacaacaacatatgtaacgcagctaccgtaaagcctacttgaacgtgaaaaatcttgaaaaattagttcaacatgatacaaaattctctattcgatttcaaacctatttgtagtatacttgtagatattttatttacatgactcataaatacacaaacaaattaactatacaactatctaccaatatattctaataggttaagaaggaaacagtagcgatcaacaggtagcgaaaacgcgttccaagatttcggctgcaa

SEQ ID NO: 11244 - DNA, 637 bp, Diabrotica virgifera
cccggttttatttcaagattttttatttaaaaattataattagaaatggtttttgcggatgaacagaagcgatctatgttcgaaatgtattttaaaaatggccaaagaattatcggagaatgggttttctccagccgagatgctttgaaagattttgttgaagaatttcccaatgtcattatgacgacttttgcagaactattcgtcgtgttgtagatgttcatagacaaacgggaaacgtaacaagctagtggcagacaggcctaaagtgcgaactgaagaaaacatcgaactgggcagaacagaagccttccatgaaatcaccctaaacgaccatctccaaggctagccttctgtaagtggtttctgaacaatctcaataataatgatgtattagacaaaaccttttttactgactaatgtatgtaggtttcatctttctggtacacaaattctcagaatatgaagatgtggagtgcagataacccgctttattttattgaaacgcctctacatccacagaaacttggagtttgggctactataagcaagcaacgtattgtaggacccatattttccgaagtgattctaaatgttggaagataccgtcaagaaatttcaaatccgtttataaatc

SEQ ID NO: 11245 - DNA, 640 bp, Diabrotica virgifera
  SmartBlast Evalue=5E-33; Info=Small ubiquitin-related modifier 3 n=4 Tax=Apocrita RepID=E2AC05_9HYME
tgttctgctgttctttcacaccgactgccggccattatttgtaagcggcgaaagattcggcgttgctttgtaaaattgttgtgaatctaccggcatcaaaagcctaaaaagcgtgtagcttttacgtagttatttaactgtagctactttacaaatttcatcaaaatgggcgatgaaaagaaggccagcgatagcgaacacattaatctcaaagtacttggtcaggataatgcagtggtacaatttaaaatcaaaaaacacaccccattaaaaaaattgatgaccgcctattgtgaacgtgctggtataagcacacaagtagtcagatttagatttgatggcaaccccataaacgacacagatactcctaattctttagagatggatgaaggagacacaattgaagtatatcaacaacagacaggtggtttcttctatcggtttctattcatttaaataatcacactgtattgttcttgtattttcttatttgctaaattaaactagttttaaataagtaagttaattttaatatagtttttatttcatgtcaactgaagttacaatagttctgtaagaattcgactatttgtgtttttggactcttattttgtaattaaaacacttagaatacaaacat

SEQ ID NO: 11246 - DNA, 638 bp, Diabrotica virgifera
  SmartBlast Evalue=8E-13; Info=Variable lymphocyte receptor A n= 1 Tax=Eptatretus stoutii RepID=Q32QQ9_EPTST
aagatggtatacgtttttatgttgttattatgcgttttaagtgttgtttcggaaaaaattacgtttgtggatgttaaaatcacgctaagttctaagaagcaacaagatctaagtgagcaaatcgtaataacaacgaagaatcttccaagtagtatcaagaattataatatagacacctacgatgccatcaaaattgaacatcaagttcttcccattgtttacgaaaacgcttttcaatatttgaacacgtcgcacctagccatagtcgagactgatttgaaggaattcgagcctggtgcctttaacgatctaaagaaattggaaactttaacagtaggggccaacctcctgaagtctattaggaaagggatttttaataaccttccgattacgaagttgtatttggatgacaataaaataaaggttattgaaggtggttcttttgatggcatgcaacgattaacacatatagtactaagtatgaataaaataatagtattagaaaaaggtttatttaaagatttggccgaacttgtctccattagactggattttaataaatagaacgaattgaagaattggcgttccaaaacttgccgaatttgcaccgtctggatttagacaataataagataaaa

SEQ ID NO: 11247 - DNA, 632 bp, Diabrotica virgifera
  SmartBlast Evalue=7E-14; Info=Reverse transcriptase-like protein n=1 Tax=Glyptapanteles indiensis RepID=B7S927_9HYME
gatcttattaagtagttgagaacaactgcatataccatttaagatcttgaataatagcaaaaggtccctttgttttctcctgcttgcaagagaagggacctgcagttgatgctgccatacagcgtaatcttgataggtatgaagcttaaaagcaatgtaacggaagaaactattttggacttgttcaagtttcctaatgtagaccaagtagtgtggggaccacactgaagaacaatactcaaggtgagacctgaccaaagagaagtaaagaactctaatactggatatgtttgtaaaatcacgagttgttctttttacaaacccagcattttcatagatgtttgaatgacattgatgatgtgagtattgaaacaaagagagtttccagtgtaatccccaagtccttgattttattccagtgttgagcaattggccatcaatgtaatagtttgataatattgggtgtgagtacggttaaagttaattacatgacatttgattgaattaaggttcataccgttaagtgaacaccatgcagagaggttattcagttctgattgcaatatggcagcatcataatgattttttataactttaaagcacttcaagtcatcagcaaatagcaaggcgtt

SEQ ID NO: 11248 - DNA, 637 bp, Diabrotica virgifera
  misc_feature (514)..(514): n is a, c, g, or t
tgacataaggtaacaaccaactgagttggaggattgatagcttatgttggtaccaaattaatgtatatttctaatttgcctttgaatgaaagttactaatgtgatattttgctcaaattaaaatgtgaatttaattgtcattcacaacgaattatgagaacgatagtcatgttaatcagtttggtgagaattttttttttatcagtttacctaatttataaaaaatggaaccgaatcttaagatgctagaatatttttgtatctaatttatttattaaaataaccagtgtttttgggttactattttgtaaagggggttccgttattgaaaatatataaaagtataaatttgtaattggtgataaataaaagattaaagggggaattaaagttgatgaaaaatctcagaaaatacgattttatcaaaaaagtccctaattttatttgtagtggagtttttaaagttatgttgagaacctctttaaatttgcccattttctcgtttactttctgngtttatctatttcgtaatgcctttatagcttggttgccgaagtgttcaccgtccaattgaagcttttcttgcacgtgatttttctgaggcgtctcggtcattcggatgtaataaacggcactg

SEQ ID NO: 11249 - DNA, 638 bp, Diabrotica virgifera
tattttatatacttaattattaatattgtaaaaggaatttacaactaaatatttttcaaaattttctaaggtaaatgtttgtcttttatcagaaaacatatgttatacaagaagagctgggctccacatctactgaagtaataggcgcatattttaattttggcaacaggtttccatcaatacacgtttctatatcaaaatggcctctaaaaatgcatgacacattctgaataattttgaagccttcattattttctaaaacctgcttaagcttccccaaaacttttgtaccaatgttgccgtttactttttggcattccttctgaaaattttcaattagttccacacaatcaactagaagttgcgaattcttttctagtaacgtaattatttccgggataaaactataattcgtcttaataaatatcagacttttatgcacctccttattatcgaaaactgcttttgatgatatgacagcctgtgaagagtctgagatgtcgtttattacgtccttaattctatcataattttcagcgtaaaaaatagctgtacttaggtaagtcctccatcgagttaataaatacaggttggggaggtagcggtacgtcacgaagcctctctttatatatttgaac

SEQ ID NO: 11250 - DNA, 639 bp, Diabrotica virgifera
  SmartBlast Evalue=3E-69; Info="Methyl-cpg binding protein, mbd, putative n=1 Tax=Pediculus humanus corporis RepID=E0VRJ1_PEDHC"
attgaaattgaaaataaacaaaaataaaaaatacccagtccaaaattaaatggcaaatattacaatagaaaaaacaaaatatgaatgtgctccagtctcaaaacgttgccagagagatgatgttttacgtaagaccggtctgactgttggaaaggtagatttatattatggaagaggcgtccgaaatgatggatctcttgtacccccgattagacaaactgcaagtatttttaaacagcccgtaactgtctataagctacaagagagtaaagtaaaaaatgattataaaaacgggaatcaagagaaaccaaagcaactaatttgggagaaaagattggaaggtttaagggcttgtgatatggatggctttgagttcgaagctatggaactgccaaaaggtttaaaaccagtgggacctaatgtaactgaagacaccattatccagagtgttgctacagcactccatgtttcttctcaaccagtgacaggccagacaagtacaaaaacactacttgaaaaaaatccaggagtatttctcgatcccaaacaaccattagtacacgctgtaaatatatcagagtatgatatcaaacgtcaagaggagagagttgcattagcgaggaagaagttacaagaggc

SEQ ID NO: 11251 - DNA, 640 bp, Diabrotica virgifera
  SmartBlast Evalue=9E-57; Info=DEP domain-containing protein 5 n= 1 Tax=Camponotus floridanus RepID=E2AFB4_9HYME
tcgagaacgaatggatggaagtgaaagtaaaacctgcgctaaattggggactcgcagctccttcttctactttacatgttccaaatagtttttccgatcgggaacacggtgtaccgcactttttatgcgacgacatcgacgccgaatatgcagaacgtgatttagatggaccactctacaaaagaatgagattagagactgatgtagccggtaagagtgaccgcgtagaatggggccatgctcgatatcaaacggtttttaagccagaccaagcttacgaattagttgtcgaatggctgacatcttcaggttccataatttttgaattgctctctggttgtcaaaggaaagcccaatcttgtggatttcaactaataccaatacctcatgatccgctagcgttaccttattcaaataagtctgatccccttagaggaccaatttttataccacttgacattagatgtttagaagaaagaagttatcccttatttaaagagtttagagaagatacatatgcagacagaatgtttttattccaagaagccatcgtccaacgttttggtttcatacactgtcaggtagaacattccgacaaggcaagtagttcgagggagcaccagtacgttcacgcaacagg

SEQ ID NO: 11252 - DNA, 635 bp, Diabrotica virgifera
tatcgaaatattgtatttttatttaaattatgtaatgtaacctttattcattgttgtagtattccgacttacagaaaaaatctgtttaaaattaaacgtccaaacttccgtccttacttaaaatttaattgacttaatttaaaaaatactctaaatatttgttattagtcattataattaaaactaaaaaagttattttatttaaaaatatttaaataaaaagatattttcttttttctaatttagataagcattggtttcctcagacttactgattggaagtaatggaatattttcggtaaaatattttctatatccttaaatgtctcggcaacctgggatattttaaacatattgccttccaataaagtaatccatttcacaattggtgttggcataactgctactttttgcaacattatccaaaatatttcatccagacagtttcgtttaatattccgtgaacatttttaatgttctccctctatgaccataagcatttgtaaagcacttttagacgcaataaggctatttatacagttaaggattgaaccctacctggtttttacaggaagttttaatgatataaccttattgtagttttgaaggtggattttattaaatcgggcaagaga

SEQ ID NO: 11253 - DNA, 639 bp, Diabrotica virgifera
  SmartBlast Evalue=7E-38; Info=Isoform B of Protein vav n=1 Tax= Drosophila melanogaster RepID=Q9NHV9-2
accctctttaccaataataatgacaacttcgtctactcttaaactaacttgaaatttatctttcgcatcataattgttaacaaccactgctttcaattgtcgaaacggccataatagtttcgtgtcttcggccaacccattaaaattttcgttgagactgtaattttgataattgagcactagttcttcaatactgttgaaaaacttcgattgagacaaataatactttttggagtcccttccctggggttcagttatacaacatatcttcatatgttttattgtatcagtctttaatgttagggcatatatgtcgtttgtgtcgcactgaggcctgaggcgaaccataaatgtcccgttctctctcctttccaacttcatactagcgctaaccctatccatttccccgacgaaccacaacttgtcccgtaacggatcattgaatccgtttgtcatggagttgctagtaactacattgtggccgcattttcccgctttgtggatgcacgatttatgcacgcttatgccacacgtagaacacttgtaaccttgagaaattaggcctttaaggtacttcgagcagaacatacagggagtgggttgaagaaacgtgtgaagctcaaaattgtggctggtgtg

SEQ ID NO: 11254 - DNA, 639 bp, Diabrotica virgifera
ttattagaaataacccgcatcaaccataaaaggttattagctgtggtacaatgatacatattaagacctcgatgccgaggagctcgttccggtgggagaccgtgaggcgatagcctcgtatgtagatcaatactttcgctcaaaaggcaattggaataataccgccaaagaaatctttagattatcgcagctagcacatgctgagaggcaacgtgagagtgtcagggaactactatcagaatatatatcagctgaaataatatcggtaaaagcagggaagcgtcgtccgactagatctaaccagtcaaatgctgttaacgcccctgctatagaaatagagaacagacgtcataaacgtgctcttgaataccgtctgacacaaagacgatatcatactgatagatcagctctggctcatgctgtccttgacgacaagccgctctgggagaaagatgttcaccctaagatcaagacgatagagaaggaataccgcaaaatcttctccgctaggtcgccagaagatgatgaaccgatttctgatcaaaaggatcccacgaccgtgagttacgcggtcacggaagcggaaatccttggagccttacgaaccacgaaatctcaagcagccggtcctgaactttt

SEQ ID NO: 11255 - DNA, 638 bp, Diabrotica virgifera
  SmartBlast Evalue=9E-12; Info=Reverse transcriptase n=2 Tax= Ostrinia nubilalis RepID=A4KWG0_OSTNU
cattaaaaacatgctaaatatgtgcgcccgtatatacagcgcaaaaatcaaagacacagtagaacatgtagctaaaaagaaatagagatgggcagatcatgtggcaagaacaccgaatgataggtggactagaagattattgaaatggcggcctcgggcggaccaacgaagcagagcgaccaccaacgcgctggcgtgacgatgtaaagagactgggaactggatgatggtagctcaagacagggagacatggagaaacttggaggagacccatgttcagcagtggatgataacggctagatgataacggtttgatctcataaactcaattcaaagtctacgcttccagtgtacagcgagctaaaaccgttactaagatttttatgagtatgcccagttctttaattagtacaatataattcttttacgattaattttaaaattacaaaaactatatatcagattgtgttccatctcatatcgatttttcgtacaaatacataagttttgtactttctatatattatatatcgtttcaacatcgattatataaatctgcttaactgaaaatttacttaatctctctagcaaatgtataaacattattggtatttatttgtatatagaatggaaacttt

SEQ ID NO: 11256 - DNA, 640 bp, Diabrotica virgifera
ggttcgaagaagtgctgggtatgtttattgtttgttggtattggttgttgcccgcaaagtagttcatttgattcattgggttcataggggcgccgtagagactttgaagttgttgcgggttaagcttcatgtttcctaatactgcttgttgttgcttctggaacagatactgctgttgatacagcttcatcatttgttgttggtacatagattctttcaatctagcttgttgcatcaagttgatttcttgaacaacgcgctggtacatcgacatatcctgttcttcgatttgaacttgtagctgcttgacaagagcaggaatgatacctttaatctggtgctccgaccatgtggggttgtcccttcgaacaatgttcatcaacgctgaattgatagcttgcgcactcattccttggatgccggcgacacctggtatagcttgtccaaggtaggttgtagctgaagtttttctgagcactttctcgttttcgaattcctcccaggcggcttttctctcctcctcattaagaccttcggcctctttgttctcgagaagcgattgatgcaagtgatacttgaatatgattgttttcgttatttctgtagcatctcaccctagtaagacatcctttgtaccata

SEQ ID NO: 11257 - DNA, 638 bp, Diabrotica virgifera
tggcgccaagactgagaagagtgacagaaagcaaacgggaactcccactggtgacaaaattaaatctgatcagaaaactacccccaagtcggctgagaaaaatactactgagaagaatatcgtcaagaaacctgttgccaaaccgaagacaccgcttaaatcaaagagaggtttaagtgaggtggacagattgctgatggacgaaggggcagtgaagatgctctacgatctgaagagcgacgaaacaccaacaaagaaaaagaaaaccatctattctgtggaacgagctgcgaaggacatcatcaaaaaggcgaacgttcttaaaaatgatctcgtccaaaataccggtggcgaatcccagaaaacgttaagaaagaaggaaggatcagggtcaaatacatcttcgcccatggttaaaccaccccttcaagaacctgtacctattatggagcgtaagatgtcaaaagattcgacgagaagttcggtccacacgccgcccagatcgcccacgtttttcgcttcacaaacttcgatgttgattcgaagaaggtcgagcagttctttgtcaagcgactctgaaagtgactctcagaaatctaagactaaatcgaacaaaaagacagaatcttccaaattga

SEQ ID NO: 11258 - DNA, 627 bp, Diabrotica virgifera
  SmartBlast Evalue=2E-31; Info=Dimeric dihydrodiol dehydrogenase n=1 Tax=Aedes aegypti RepID=Q16UC6_AEDAE
tttaggattagcacaggatagaaaatgttgatattgtctacgtcggtaacctaaaccctcaacatttcgaaacaaccaagatgatgctggaacacggcaaacatgtcttgtgcgaaaaaccttttaactatgaacgagaagcaaacaaggagattatatcagatagcgcaagaaaaaaaattgtttttaatggaagccatatggtccagattctttccggcaaccatggaaatgaagaaacttatcgatagtggagctattggagaggtactgcatgcttccgttcattttggacatcagatagatcatgttgatagaataacggcgatggatcttggaggcggagccattctagatctcggcgtctacattctgcaatttcaacagtatgtcttcagaaatcttaaaccgatcaaaatagtcatcaatgggcacgttaacaaattcggaacagatgagtcctgcggagctgttattatatacccagaaggaaagatggctgttgtaagtacatcaactcggttaaaattacccaacgaaggaattgtggtgggactaaaggaacgcttagactgcctgacttttggtgtcctgataagctgataatgcctgacggtagtgttaaaa

SEQ ID NO: 11259 - DNA, 637 bp, Diabrotica virgifera
  SmartBlast Evalue=5E-31; Info=C-type lysozyme n=1 Tax=Glossina morsitans morsitans RepID=Q2PQQ7_GLOMM
gtcacttataaaccgaaacagaagtgaatagttcctaattattaaaatttgtgctataacctttgaaatcagtactgttcagtgatcgaccatgaaggtctcatcattttgttgtttcattgtcatcgggctagtgatagttggtacagttgatggaaagatttatacgaaatgtggcttaacccaggaactgctgcgtattggatttagcagatcattggttggaaattgggtttgcatgattgaaagcgaaagcggcaaagatacctcgaaacaagtgaacaaagcgaatggaggaaaagctttaggactttttcaaataaatagcaaggattggtgcaaatatggctcacccggtggaaaatgtaacatgaaatgtgaagatctaattaatgaagatatctctgatgatgcacgttgtgcaagaaaaatcgaagccgaaagcggttttagaacatggaatggatggaccagaaattgttatgggagggtcgtatccatcccgaattgctagtatctgtttgccatttataccaattaactaacgtagtactgttaaatgtttaaagccatatatgtacattccgtgtaaaatgtacacgaaattaatatcagtttatgtttgaaaaatattttt

SEQ ID NO: 11260 - DNA, 640 bp, Diabrotica virgifera
ttgttaattgtgcagcgaaattgtgatagtaaattaaatataaagttgtttatagcctacagaactgaattatcccatagtaattatcagtttgtgtcaatttgtttgtgtgtaaaaaagaaaaaacacctttccttgtgtttgaccgacttgtagcaagggctttcttgagaagcctgtaaattgcgggaataggacagacagggataaaatcctcactttttactgttcccaaggctatacatttcccccatgcaatacatttaaatgaattttatccaaacaaaggcaggaacattggataaaagcaataaggagaacagacctcaaattaaaatatgagagtatacagtaaacattttataagtggaataaacaccagctattttaaatgtaggaaaaggagaaactgctggaacctaactttacacaaatgtttttgactattgaagatttggataaacaacagaagttactttgggctatagctatgtgcagatttatttcattgtggattactatgtttattctttttaactatacttcctacgttgtttgtgagattaatattattatttaattgattatattaatattttgtaataataatcaatgctttggtttaacaaatagacaactt

SEQ ID NO: 11261 - DNA, 638 bp, Diabrotica virgifera
  SmartBlast Evalue=1E-101; Info=F-box only protein n=1 Tax=Aedes aegypti RepID=Q17BQ9_AEDAE
gcaaacactctagctggagtttggataactactggaagtacacctgttctaagaaggaacagaatccattccggaaaacaagtaggtgtttacttttatgacaatggccatggtaaattagaagataacgatatcttcaaccatctttactctggtgtacaaattagaaccggaagtaatccggtcattagaggaaacaaaatttggggagggcaaaatggaggtgtgttagtgtacaatggagggcttggtttgttagaacaaaacgaaatatttgacaatgccatggcaggtgtttggattaagactgattcgaatcctacattaaaaagaaataagattttcgatggacgtgacggaggtatatgcatttttaatggaggaaagggtgtattggaagagaatgatatatttagaaacgctcaagcgggcgttttaatttcaactcaaagtcatccggtattgaaacgtaaccgtatctttgacggtcttgcagcgggtgttgaaattaccaacaacgctacagctacattagaatttaatcaaattttcaacaatcgattcggcgggttgtgtttagcaagcggggtccagccgatcgtccgcggcaaacaagatattcaacaatcaagacgccg

SEQ ID NO: 11262 - DNA, 638 bp, Diabrotica virgifera
attatgttctgcattacagcaacataaatgtttattattaaaaataaacaatacaattcatatagcctaaaaaatcataacatttacctatttaacaatgaatcattacacattattttttcttagagttttttgaaactttacccttagacttcttcccctttttatctttggattttttagatttcttaatttttcgtggatgaacccaaacggggtaggcaccatttgcatccatcaatgttttagcgttaaatttctttaaatcttctaatgtgctctggtccattatatctttatcctgttccttttctttccgttttttcttgatttcgtctgctgtggtaaaggttatcacgtctgatagatcagtcatggtagcatctgtggtgctcgttgaggcttcaccaggtttatcttctatacccaaagtcttttttaacctgtctagttctttcttaccatatctctctcgttttacttggcgcattttacgcttccatttacttcttaaactctttgccatcttgagaaacttttatttccaaaaattatttaatgctgctgacgactaaaaatgtttcgtccctaaaattttctttttatttacaaatataaaagcatgatcgttcttaacc

SEQ ID NO: 11263 - DNA, 638 bp, Diabrotica virgifera
  SmartBlast Evalue=1E-54; Info=Deoxyuridine 5'-triphosphate nucleotidohydrolase n=3 Tax=Culicini RepID=B0WED4_CULQU
ggcaaattcgttacttcttcattttgtaagcatcttttgtccgggaaactttgatttttatcgaataacatttcaattatgccttcagcaaatggagccaatattttacttaaatacaccaaagtaattgaagaagcttatcctccaaccaagggttctgtaaaagctgctggttatgacttaaaaagtgcacatgatgtcgtggtaccggctaggggcaaagccctggtggatacagggctgaaaattgaactaccagaaggttgctatggaagaattgctccaagatctggtttagctgtaaagaacttcattgatgtcggagctggagtagttgatgaagattaccgtggcctactgaaggttgttctattcaaccattccgacaatgattttgaagtaaagagtggagatagaattgctcagctgatctgtgaaagaatcttttatcctgaacttgaagaagtaaaggagttgactgatactgcccgtggtgaaggaggctttggatccacaggaacccagtagaaatgtattattttagttaccatgttctgagtatttttaagatttaatgtttttgtttcctatgtagtatttaaaattcgtttgtaaatgtttaatcagcagttctttgt

SEQ ID NO: 11264 - DNA, 636 bp, Diabrotica virgifera
gttagaaatcggttttaagaaatcactgctttgtgatgggaaaatactgatcaaaatcttgataaatcttactcagaattttctgcgttaaaaactgctccgttaagtaacaactgataagagcggaatttgagcgttatttaaaactgtttcagtgactaaacataagttttgcgcctacatacgagcaattacatgttgttgaataatgaccaatttgacaaaaagttgttgttttattagtcgagcccaagacttattaggtaacgtgttaagattactcaaattgaacggaagatcaactggggagcaggttttgtttctaacataattgcagaaatcttcattaataaatttagcagattgtgaaagtgataatcctcctatatcacgttttattctatagcaaaaattattattcaatctagtacaatgaattatagattctttctaaaaacgaaagttctttcgttagtagtgagaggtaaaaataaataaatactgggaaaatttagtaaattaatcagatctacagatttactacctgtcaaaaaatattagcaatatttaggtaaactaagaggttccctatgttatatgtttgaggcggtcaaatgacatctcgtaacgcgacag

SEQ ID NO: 11265 - DNA, 630 bp, Diabrotica virgifera
ttaatttatgttcttaaatttgaccctcgtaggataaatactacagtgttctagtgaaagggagcagatcattatctgttaacaactataaaccgtttatcccttttgtaaaatccgtgaattgaaggttcccgaccatttgtggcacctttaacattttaacattttattaaaatacaggggcaataaacaataatccagactcaagaagtggtctgaaggcaggcggcaggtatcgatagcatgcaaaacacaacgtgacacaaccgaaggccggcaattgcaacaagggttgtaaatgctggttttttcctactgataaacattaccattataaaaatatactctaatctctgtatatagagagaaataattagttcattaggtgaatgtataatgttaaaattggtatccgtttgaaactacattctacattctgttaaaattttaaagcaaaaaatatagtttcattcttcacatctttatttatttcaatgtacattttattcgaaattgtttggctcaaattattactaccaaaaaagcaagaccagcaagactcttgcagcaagaccaagaccaagaacaagaccggctggtgcaagaccaacaagaccaagagtgcctttt

SEQ ID NO: 11266 - DNA, 640 bp, Diabrotica virgifera
ggctatttacctacaagataattaagtcaagttggtaaactaatttggctgctacaaagcgttaattaataaacgtttccagattgatataattttataattttcttgaaaatgtatctctggattggaagtcgacatgtcataaacaaatgtatgtaatttttgttacaatcggttgtgatttaatcccatatgaataaaataataaattaaatacttgcagtttcaaataaagttggaattaaaaaacgacttctctaaataatgaaattttatatggttccaatttatgtagatacacatgtataatcaggtctcgcaagttcagttttaaaaatggaaaccctacaaaacatacaaataggtatcctgaagcatgccaccctgtgcccatttagcaagattcaatcgtcgatccggagatggcgtcggttagcaaacatggacaattggaaggtagattctcaacaccgtgcctgatgaccatgccgagatgaccatgccgagatgaccatgccgagatgaccatgccgagatgaccatgccgagatgaccatgccgagatgaccatgccgagatgaccatgccgagatgaccatgccgagatgaccttgccgagatgaccattgataatattttc

SEQ ID NO: 11267 - DNA, 639 bp, Diabrotica virgifera
  SmartBlast Evalue=9E-99; Info="Hect E3 ubiquitin ligase, putative n=1 Tax=Pediculus humanus corporis RepID=E0VFB3_PEDHC"
gtggcaaaacaatggtacgattatgaccgcagcacttttcaattcctcaaaaagttgaaagaatcaaaatatcaagttttcaaacacacccatgattttgatgagaacggtttgatatacttcataggaaccaatggcaaaacgagctctgaatgggtaaatccaggacaatatggtttagtagctgttactagttcagatgccagaaatctaccctatggaagagtagaagatattttatccagagatacatctgcacttaactgtcacaccaacgatgataaacgtgcgtggttcagcattgatctaggagtatatataattccgacagcttacactttacgccatgccagaggttacggaagatctgccctgagaaactggcatttccagatgtccagagatggtaacacttggaccacactatatactcatacgcacgatatgtcattaaatgatcctggtagtaccggtacttggccaatagaagttccacaagaagaggctcaaggttggaggcacgttagaatacagcaggccggtaaaaatgcttcaggtcagacccattatctaagtttgtccggtttcgaaatctatggacaagtaacaagtgtctgtgaagatatgggcaaggcacac

SEQ ID NO: 11268 - DNA, 638 bp, Diabrotica virgifera
gggagtacaaagacaacataagaaataaaccatactggtggtacttagaaatagccaccgaaacagacgataagagagaaaagtaccggaaatatatgagtacacagaaagattccgataaggttttatacaaagaagcacaagcaagagtgcggaaaaaatcacacagaagaaaaacgaaacgtggacaaacaaatgcaatcaacttaacgcctatataggggggacaagaaacacagagagctggaaattccttaaaacgttgagaacagataccaaaagggatataataacaccgattactctggaaaagtgggatggctatttcaagcagttactagtagaaaatagagaagattttattaaaaacgaagatcacgaaagtttcaatgtaattgtcagtggctcaccgattcggttaagactggaagaagtacgaaatgcatgcaaatccctaaaaaatagaaaagcgtcagggcctggcgacatagcaccagaactgctcaaatacggtagcaacaccctgtatgaatacctaagagatctatttaatagatgtatgaatggcgaagtcataccaaaagaatggcaattgtctgtaatttctacaatacacaagaaagacagtaaaaatatat

SEQ ID NO: 11269 - DNA, 632 bp, Diabrotica virgifera
gccctatcgcccgtcttcccataagtaaccttcctcattaataattaaaaaatattagttttcagtctgctgggatgtagagtaacattatgttgttttatatgccattagagtgaaaatttagtcaattaaaaatatattttagaataaaacatgtcaaaaattattatcgagacctgatagaagaaggtttgaacttgaatttagatgcttgatgattacaaaaataatgttttttacttatgtttttcagccttaaaaatcgtctattttccgtttttttttagttttaaattgtttattatgtttattattattaactcgaaaacgattaacttatgtaagagaaaaattacaacacttttttgtttcgaatgatccaaaagatcctaaaatatctacctgacccgaattttttatttataaaaaaaagcaatttctaataataattattaattagctgtactcagaaaaaaattatatcgggcacctcttgtttttataacttttaataccgggtgtccactattttcccccatttcaacagccctacaacttccaaagggctcaagacagaaatacgcggaaatgtcttattttagtaaaagcttttggttgaatgaattaaattt

SEQ ID NO: 11270 - DNA, 633 bp, Diabrotica virgifera
aactgcattgcatagccaaagattcgaaaattaagaaatgaacggttaatgatgtcatgtcttttaatctgtcctcgtatcgtcgccccctaatgaataaatataatgtgctgtcagcttgtaaatattatctatccatttaatcttttagttacttgtatgtacatatacataggccgaaaaattcgtttatagtcttaaattcgatttatgactgttacaataaattaaaatcttgttcgtaaagatttctatcctgttggtatccataggttgctctatttgcaataggtgaatctccgagttatactcttaaaaaaatggttagtaccagagtgagtaattaaatagtatctcaagatataaaaaattccggtcgaaacagtttgtacctggattacaaagtacaaaatgcgcaaaagataaaaaatactctacagcacttaaggcaatcacgttacctcagaattccacctattactatagagtatagagtttcttatttttatatctaaatattattttagcttaatactcataaacaacttatacataatacttaattcgctgttagaacaccaagttgataatattcgaagaattgtaatcactaaaacaaattataatcaatat

SEQ ID NO: 11271 - DNA, 637 bp, Diabrotica virgifera
  SmartBlast Evalue=3E-77; Info=60S ribosome subunit biogenesis protein NIP7-like protein n=1 Tax=Harpegnathos saltator RepID= E2BWU0_9HYME
tttctttaaaaatttaaggaaataaatatacgaaaaatgagacgtttatcagaagaaagaacaaaaatattgttcgaaaaattagccaaattcattgggccaaatattaagctgttgatagaacgtccagatggtttgtactgctttagagaacaaaaagatagagtgtattatgtatcagagaagattttgaagctagctaattctattccacctgaaaatttaatttccctaggaacatgctttgggaaatttacaaaatctaataaattcaggttacatgttacagcactgaattatctagcaccatatgcccaaagtaaaatttggttaaaatcttcagcagagcagcaatttttgtatggaaatcatgtagccaaatcaggattaggtagaattagcgaaaacacagaaaaataccaaggagtcgttgtttatagtatgtcagacttgcctctaggatttggagctgcagccagatcaactacggagtgcaaacatgctgaacctttaaccactgtttgttttcatcaggccgatattggggaatatattagatcagaagaagatctattgtaaataccaattggtagtttagtttttatttttaataattattttgtaatatataagatac

SEQ ID NO: 11272 - DNA, 638 bp, Diabrotica virgifera
  SmartBlast Evalue=1E-36; Info=RWD domain-containing protein 1 n= 2 Tax=Formicidae RepID=E2AB33_9HYME
gacagatgttataaggtggtgaaaaagttcattaaataaaaaaaaaaacaaatttcattttatagtcaattaaaaaaatatttgtatatccgccacaaataggttctaatagatcctactaatataaaagtaatctagtccttattctttataagtaattatggattatcaggaagaacaaaaaaatgaaattgaagccctagaatccatttattatggagattttgaaattctcgcatttgaacctctacataaattttcgatacccataaaaacagaagaatttgagcctgaaaccgaaaatggtttgagttgtgatcttgtaattacctacactccaaagtatccagaagaagcaccaataatagagctagaaaattttgaaaacttcgatgatgaatacgaacagttacttttagattatcttaatgaacaaattgaggaaaacttaggtatggttatggtatttactttagtttcgagtgcgcaggaatggttaaatgtcaaatgggaggagattaaaaagaaaaggatgaactggtagcaaggcgactaaaagaggaggaagaggcagaattaaaacgatttgaaggaactaaagtaacagtggagacatttatgaagtggaagaagctgtt

SEQ ID NO: 11273 - DNA, 634 bp, Diabrotica virgifera
  SmartBlast Evalue=6E-76; Info=Cleavage stimulation factor 64 kDa subunit n=2 Tax=Formicidae RepID=E2BR78_9HYME
gagaggccgactagatagataaataaaaataagaataaaagattttcatttgtggaaattaataagtgaaaatcgccaaaatggacaacttagaaaccaatattatggataagtcgatgagatcagtcttcgtggggaatattccatatgaagcaactgaggaaaaaattgaaagatatatttggcgaagttggacaagtactatcttttaagctcgtgtttgatcgtgaaactggaaaacccaagggatatggtttctgtgaatatagagatcaagaaaccgccttgagcgcaatgaggaatttaaacggttacgaaataggcggaagaaatttaagagtggacaatgcttgtactgaaaaatctagaatggaaatgcaaaatctcctcaaccaacctccagtagagaatccctatggagaggcagttcaagctgaaaaagctcctgaggctataagtaaggctgttgcatctctacctcctgaacaaatgtttgaattgatgaagcaaatgaagacaactattcagaataatccaacagaagcaaggcagatgcttttacagaatccgcagcttgcctatgctcttttacaagctcaagttgtaatgtaaaattattagacgcagctactgc

SEQ ID NO: 11274 - DNA, 638 bp, Diabrotica virgifera
  SmartBlast Evalue=3E-43; Info=Superoxide dismutase [Cu-Zn] n=1 Tax=Prionace glauca RepID=SODC_PRIGL
cgaatctatttaacggttacaactccaactacaccgcatgccagtcttcctcctgcatttccagttttgagcgaatctggatgtcctccttttcctaaatcatctactttttcgtggacgacaacggatctaccaatcatattggttggtccgtcaaaggaaatcttattatcgaggaaatcgaatactgcaacaccattttggtcagcttcaatatttccaagatctccaacgtggcggtcagcatcatctggaccaccgtgttgtttgttgaatgggttgaaatggccaccagcagctaaacaactaggttggatattgccttcttggtgaatgtggaatccgtgttttcctggtgtcaggccgcggatgtcacctatgacattaatgccacttggtagttttaagaatctaacggtgccagtgactccgctctttccagtaggatccattagatagacgataccatcctcggcataggctatcgccaagatggcggcacatagagcgattttgaacattttgctacagttcggcttcttgtttccacaacaactgatccactttaaacgtcgtaagtcgtctaaatactccttaggaaaagagactaaggagtcaaggtgatacaatcatataat

SEQ ID NO: 11275 - DNA, 632 bp, Diabrotica virgifera
  SmartBlast Evalue=4E-12; Info=Rad21 n=1 Tax=Tribolium castaneum RepID=D6W9B8_TRICA
taaggtcattttagaagaacttactcatcgaaataataaaaaattggctgcacaaaaattctacagtctattggttctcaaaaaattccatgtcttggaactagagcaacaagaagcctatggtacaattagtatttataaaggacctaaattcgacaacccttcaatgtaaaccaatccgctttgttagttgttttaaattttagataaagattcttttcattttaatatcatcttttgatacatctattatgatgaaagtacaaaatataaaaataagtctgttgtttggggtaagaaaatcattgcaaatattttaatctctcgaacaatgttgcgtttaaatcttttacaaaatttgatgtttatacagggttgtaaaaaagtatagttttgattttgtaaaagatcttacaagtattgtatataatgtttacaactaaactgacgagaatgacccgattttggctgttttaaaattattttatctattttttcttttttactgctacagtttaaagcatattcttctttttttgaaattctttatatattatattaatagcgaatactatctttacactctaaaaagtgaacagttctcatttattgaatatgcttatattatagat

SEQ ID NO: 11276 - DNA, 632 bp, Diabrotica virgifera
gtggttcttctcttcaatctatcaagaaatatatcactgcaaattaccaagtaaatatttaaaaactgcagttgctactgggtcgttggtgcagacaaagagaaaagaagcgtcaggatctttcaagttagcgtcgacctcctcgtcttccggatctgccaagcttagttcaggagacaaaaagaagctggaggagcagctaacccgaagaaaactgccgtcgctaccaaacatgctgctaccggtgaaaaagcaaaatatgtaaagaaagtgactaaggctaaaaaagccgcatcaaagagaaaaagccagccaaagcgaagaaagttggaaagaagtcagcacctaaaactgtatcctcattcgcagttccgacaaaaccgccaaggcttctgcaagttcatcaaaagctagaaaggctgctcttaagaaaaagaagtatttatgaatatcttcgaattattaaaaacaagtatgctttttctcatgaggatcagtgcgtcacagtttttcgatttctttctaacgcattaaattgtatgtgacagaaaaaaacgcacgtcggtgattacatttcggtcggtgacatttataacatttattctagttgtcaatagatggcgccataatcg

SEQ ID NO: 11277 - DNA, 639 bp, Diabrotica virgifera
taacaaacaacatcaaaaagttctattcgagaagtgggtgcttcattttttattaaacaaatgaactacgaaattagatgttttttttaaataactccgaaaatataaattttagaaaaattgatgacttgaccattgaaaaactcagaaaattttacaaaaaaaaacttttacaaagaattctctaaaattaaatctgtaccttctataattttttatttataacgtcaaagtcacccttctcacaaacattggctcactgtaaactagcgttcggcaaagtgtacggttgagttattttaatgtatttctttaactaatggatcaaataaagttttacaaattgaacatgaaacagaaaaattaagctatcttatggttattatagaaagaaataaaatgtatggacataagtatggtgtgggcggacggtgagccttacataaattttgtttaaaaatgatttataaatgtgtaactaatacaatttttcttataaaactctcaattttgcacaacttaccttttaaccatcttactaaatgatgtttcactcaaaaaaaaaatctcaaaaatttaattcaaatgatgacatctcaaaaaatgtaattttttaaatcttcgtagttttatagaatt

SEQ ID NO: 11278 - DNA, 638 bp, Diabrotica virgifera
gagtttagtcataattcattagtttattttcatttgctgtaagtcattgtttctgatcgatacaatatttccttgatttattatgagttagcgggctggttggcaggaaggacaacaatctccagacacaagtcttaaaactgtgcctgctgggcagagtggaacaccgcattggataccggcacatcgtgggttaccgaatggttcgcatgagggacaacaagcattttctttgagcttcactacagatccaggagcgcactttggtacatcgcattgaatacctacacattttgggttacgttcgcaatagggacaacaagcagtatcttcatctccaggatacttcaatgtatctccaggagggcagtttggtatatcacattgtataccttcacattgtggtttgccattattagctaaaacttccgaagagcagtaaagtactaaggcaaaaagtacgaggaacttcattgtgaatttgtatgttacaaaaataactgatggtacaaaagttgaaacttctgcttttatatttggtgaatacaacgctaattaaactaataacactgacagcaaataatatgaataattcataattattagcgattatatttattacaccataaattaaaaac

SEQ ID NO: 11279 - DNA, 637 bp, Diabrotica virgifera
  SmartBlast Evalue=4E-51; Info=Vacuolar protein sorting- associated protein 13D n=1 Tax=Camponotus floridanus RepID= E2AVZ1_9HYME
aggtccaggtggggtgtctaatacgtacaatatgtctactttaggctcagtgcctggactgacgtatgagaattttatttatattgctttcactggaacatttaagaaatcaaggggtgtttatgaccccaacccgacatggaaagtcaagaactggttcttagtgtaggaaaaaacactcgagtgcttctttctagcaaaatggcaagtgatagatctcagctatggagaatgacgtctgagggatatttggaacacgagggcagcagtccaccattacatcctggtcagactagaaatcaagacagcattttagtgcttgatatcgaaaacaccgctcctcaacccaacacctattcccgacttatgctgagaaggatcgatccaagaagacaatcgacgcaaaaatggagattcactgaggatggaaggttatgttgtgatcattataatatgtgtgtgcaagctatggatggatcttatggtttgcgtagtggaaatgcagtggtattaggtttaccgcaggcagtaagctacatgtttgtaagtaacggtttgccgatagaacaagccatagaaagacaatatctacgccctggatctggtttactttctgtaaatatctacatggacggcc

SEQ ID NO: 11280 - DNA, 614 bp, Diabrotica virgifera
  misc_feature (90)..(92): n is a, c, g, or t
  SmartBlast Evalue=3E-32; Info=HypX n=3 Tax=Burkholderia pseudomallei RepID=C4KPY6_BURPS
taaaaacacctcatcctattcattttgccatgacgggcgaactccagataaaggttttgaaagtaatgagaaattattaattcatccatnnnactggcttggtttgaatctaaatcgtaatgcacttgctccagaggaagcagaggagataaatgacgaatatgatattaatattatttcagataattcagccattagaaataaaacaataggtcaaataactactcatctagatcagataccgataggaaatgaagggccactgaatttgaacaatggtgtttagacgcactaagaatagtatttgcatcccacctaacagacatcaagtcccatccaaatggtaacgcagttcaagacgagatattataggcaccaatggcggccaatctgatttttggaaacgagtattggaggactataaaacaagacaatgttttgatgctaaaaattttgaagaattaagtccatctgagtatacaattacaatcatatttaacaggtccgtatggaaagctcggttttataattaatagagatgagagaggtattgaaatcaaaaagatttatattggacaaaggaaatgtatcaatcccataattcattaataata

SEQ ID NO: 11281 - DNA, 628 bp, Diabrotica virgifera
  SmartBlast Evalue=3E-20; Info=Mitochondrial ribosomal protein L54 n=1 Tax=Antheraea yamamai RepID=E3UPD5_ANTYA
ctcacaaaatcaaaattcaaaattaattttttgtaaaaatatcttaatatcaaattaaaaaactgtgttgctatattgcgttaaaactaattaaatgaattattccagtgtttataccctttttaacgtaagatgtatggtattaaagtttacatcttatatttcaaaaaatacctatgcaaagaaggatagtgctagtgtcagcatgataggaggagcactaaagaaaaagaaacttggcaaggtaggacctggaatggaaaagaaagtggtacctgggaaactgatcctgaaaaattagtcaaatatgcctgtggagtaacatatataaaactggagaggacgctattttaaaagaagataaagaataccccgattggttatggaacgtaagggtggggcctcctccaactttagaagaattggacactgaatctaaacaatattggaggtatatacgaaaaatggcaatgaagcgaaataatcagttatcaaaaataagaaagttttaattttatatgatttagccaagcctggtgaatttaatattgaagaggccattttagaagatctaaaatgtgtgttaactagacttaaatggatgcacaagcattgttaattggtggac

SEQ ID NO: 11282 - DNA, 639 bp, Diabrotica virgifera
  SmartBlast Evalue=2E-40; Info=Transcription factor Dp-1 n=2 Tax= Formicidae RepID=E1ZYK5_9HYME
ttgttggaaggcctatccatctaatttctttcttttccttagaaataatattcattgccattagaacatttaaggcatcatatacccttctcctaatatttttttttgatcatattgatcagccaggctattatttgttgaattcgtaaattccgtaactagttcatctgctacttcattataagtagtggtccccttctgttgtaccttctcacaaaccttcattgaaaagtgacggagcccttttcctactttgtctgattttcgcggccttttcgattcaggtgcatagtccagttcaacatgatcctgtcgttttcttgataaaattgggggagtactatttttgggcattgttgatggctgagatgtatatacaggtaccgtggtcgaagtagaattgagctgtggtgatagttggacttttattgagttggctgcagggctaatcttgatgccgggcatctgggaggttgccagctttatggtctttaatccacttggcaatttgtttacttgaagagggacggtttttgtaactactctagaccctcctatcgtccgtaaaatgtgatttgcaggtgatatattagatgcatatatctgttgagtttcatcagctatagtagcaggagatgt

SEQ ID NO: 11283 - DNA, 637 bp, Diabrotica virgifera
  SmartBlast Evalue=2E-69; Info="NADH dehydrogenase (Ubiquinone) 1 beta subcomplex, 8 n=1 Tax=Tribolium castaneum RepID=D6X4J3_ TRICA"
actgttataaatattttattcatatttacaatgatctattaaaacaaattaaatatattaactattctgctggctcgaaggtataatgcacctttccatctttgggatattgcctgggtacagcagcatggaacatttttacattttcaagaagatagtaaattccaaaggtgccaaacattactcctaaaaattgagcccacaggaaccacaacggccttcttagtttggcactaacatcgtatctatcttctctcaataaatcataatctgcatggaatgtttcaccgaaattcctcttcaattcgggattatcccatgggtaaaatggatctctagactcaatagattgcataggcaatttaggataatccccgttacctgtaccatcatctggatatggctcgtattctgaagggtgtaatccgtatttttcggctgcggctcttctttgttcttcggtttgagggtatggaccaggtttatagtccttattccagtgatttcggacggctgcaaataagattggatttgcttttaaccatgaattaggtggttttagtgtttttattaaggtactcatattttttcttacaaaatttgatctaacgaaagacaacaacagcgactgtcaatg

SEQ ID NO: 11284 - DNA, 623 bp, Diabrotica virgifera
  SmartBlast Evalue=1E-24; Info=Pancreatic triacylglycerol lipase n=1 Tax=Harpegnathos saltator RepID=E2B986_9HYME
ttgctctatgctcttataataataagtacatcgtttggtgaggaaactccactcaatcctcagcgtgttgacgatgctactataaactcaaaactgtcactaatttctgaagatgacgtaaaaatatattttagggatcaacaaaaaccacaaaatgatattcccgtaagtacgtcagaaacttcacaattaggatccagtgggttttctgcagaaaggatacagtggtggtaatccatggttggaaaagtagtgtcaaatccgaatttaacgtagtactttccgaagcctacttaagcaaatacaatatcaatcttttagttgttgactggagccgtgtggccaacgatttatatctaatagctagtgcatctgttgaaaaaattggacagatagttggaaattatattaaaactctgcaacaaaaattccaattagatttaaataaaacggctattgtgggccattcattgggggctcatgttgcgggaatcgcaggccgcaccgttggtggagaggcaaattaccttataggattggatccagcgtggccgctgtttgtagttttgcatagaaacatccggataagaccaaccgacgcaaagtttgtccaagttatccat

SEQ ID NO: 11285 - DNA, 619 bp, Diabrotica virgifera
atagacgtagtattgtgcaatggtatgtggcgttccggcgccgcatgtttcggtacaaacccgtgagtagttcagagtttctgtacaaacctctttcaggtcaacacttgtttggaaccaaatgtgtcttgccgtttccgtgtctgatttcagccgcgctgtcgtgaatgaaaacgcaaacggaaatacgccacccggccaaatgcgattttgctaagattattttgggaatctcatgtatatattgttagtaagtggattttgcaaaatgattttcagtaacactaactcattactattgtcaattctcattttttctataagttctgattaatatagctttgaatgtggacgtaatctttgtacagtaaaattatcattggaatctcatttttttttaagaaaacttcaaagtagcccctaatcttgccttttcattcatagtctgtatccattgaatgagaaaaagaaaaaatatgttacctgttaagtcgtagttcatctgttttaatttgaattatcttgtttgtagattattgtttacttgtgccaattttggaagtaatagcttaaaccttaatcatattctcaatttaatttttttagtaattataacaga

SEQ ID NO: 11286 - DNA, 636 bp, Diabrotica virgifera
  SmartBlast Evalue=9E-91; Info=Vacuolar protein sorting- associated protein 29 n=2 Tax=Culicini RepID=B0WW53_CULQU
tgatacaaaaatttaatttaatttttcttatattcaatcctttcaactttaacatcttcgccaactaattggtatacatatgtgacaactgttgtattctgaatgtccattaatacaaacgatggagttattgacgtttctaatgcattgtacgctcctgttgctgatcctgggttgatataaaacttgttttcatgttcatacgcttcaaacttatgtgtatgaccagatattaatatatcaacatccaactgtctttggattaacgcaatcgattctgggtctccccaaggtactacttgatgaccatgggatagtcctatcctaaactggcctactgtgactactttttgttctgggtaattcaaattatcatcaaaatcacctcgtactacatggacatcactagctaaggtttttaaataatcgtatgattctttcgtacacagattgccagtacataaaatgtgctgtattcgaccgggcaccagcaactttttgaattttgcaggtaaactactacatctatgtggtatgtgaagatcacctagtactaaaacaagcattatagttaatgttatttattcaattaattattaatttgcacgtatctttttaataaaacttgttataaac

SEQ ID NO: 11287 - DNA, 636 bp, Diabrotica virgifera
cgatgtccaacttaatcaaaccatgagaataatcactggaacaataaaatcaaccccagtgagatggctgcctactttgagcaatattgctccaccagatctacgccgtacagcagcattagtgagagagtaccagaaaattgtagccaacatacaattaccaatccatcaagacataccagacattggtatgtatcgaacaattggtgattcctatgatatacaaaggcaatggtccacaagatggatgccaacaatagcagcagactatattcagatatccaccctaacccagggtttcatcggatcgggtctgccccggtccacctgggcgaggcttaatcgcatacgtaccggacatggtaaatgtgctgattctctgttcaaatggggtcgtgcggaaagtccacagtgcgattgcggatcacctagacagactataagtcattgtgtttcagattgcctaaatcgtgcctaccgtgaaaacctccaggactttgtggaatgctccccagaagcaattgaatggctatgtaaattggacattaatatttaggttcattcattattttttagtgtttgaataatatatgtattatatttgtgcatttatcgtactgtgaaactccatacgct

SEQ ID NO: 11288 - DNA, 637 bp, Diabrotica virgifera
  SmartBlast Evalue=1E-51; Info=CPD photolyase-like n=1 Tax= Xenopus laevis RepID=Q3C2L7_XENLA
ataatattgtacctgtatggatcgcatcagacaaacaggagggcatggctaaatttctgcgtcctaaaatatcaaaaaatctagatgaatatctcacgggattcccaaatatatctaaacacaaatattcaggaaaactaaatttacaaaatgaaattgaacttgaccaggctgtaaactactacactccaaagtacgatgtacctgaaataaaatggggcgatggtccaggtcctgaagctgggcttactatgttacgtaaatttatcgtagagaatttaagagaatatggaaatacaagcaatgatccgtccaaagataatacttcaaagctatctccatggatcaattttggacaaataagtgcccaaagatgtgccttagaagtaaagagtgttagttcacttttcaaggaacaatgtgataagtatttagaagagcttatagtacgaagggagctgacggataacttttgttattataacagcaactacgacaatctaaatggagccgctaaatgggccaaagaaacgttgaaagttcatagtaaggacaaaagaacttggacatatacaagaaaacagctcgaaaacgctgagacacacgatgaaatgtggaacgctgcacagttacaagc

SEQ ID NO: 11289 - DNA, 627 bp, Diabrotica virgifera
cttagttatataccagaagtaataccacctgtcattgttgaaccagaacaaatagatgcagatactactgaaaaagatgaacctacacaagttaaacctgaagatagtttacctgaagatcaaattgaacatacagagtctatcaaaaagccaagaaatcggtctaagtcaaaacgccaaaaagcccctaaagagcaagaattgtctgaaactattgagcattcgccacgtgtattaccagctatagctactgtccaatctaacgaacagtttgaagttaaatcaaggtctcctagtagaacctacgcatcagttgtgaagtctcatatagaagaagttactcctgaatacattcagtatacccaagttattacttctatcgataataaaccccagaccgttgaaagcattactgattcaacagtcgaagaaactacagaagagataacatcagaaaaagtagtggagcaacccacagtgcaagaattgcaaacaacagagacgagtaagaaaaagaaaaccaagaaacataaaacaggtacacaagattctcctaaaatatctgtagatcaagaacaatcatctattgatgagtcgtcaataagaatagacgtagaagaaacatct

SEQ ID NO: 11290 - DNA, 629 bp, Diabrotica virgifera
  SmartBlast Evalue=8E-18; Info=Transposable element Tc3 transposase (Fragment) n=1 Tax=Camponotus floridanus RepID= E2AGZ7_9HYME
acggtagaccaatgatattaaaaataaaaaaaaatcaaatgttgaaaatgtttgctgttcacctcctgacaacgtgcaagcctataaataaattcgtgagtcactttttgcaagatttctccacgtattagttcacattcatcaattattctttgtctcaaatcctgcaagcatgttggtcgcctaacgtaaacacgtgattttagataaccccaaagaaaaaaatctaacgaattgaggtccggagaacgagcgggccactctatgaatcctctacgtccaatcaatcgatttggaaaactcacttccaaaaaatgaaaattcaccacaaccgatttattattaatatttcaatacgatatttttcactcaaatgaaccatttttaatacaacttatttctgtcaattagttcggtaacggttttacctactatactaaattcaaataagtcatgcagtgcatgtaaacaacaattttagtctacagtatagatagtactcgtttatttcctactacgttgtattaatacaaaaaattatctacacactttttaagaaatttttcttccaaatttaattgtatgaattaaaaataacaagttcttccaaaatctgcaaaatatacagg

SEQ ID NO: 11291 - DNA, 636 bp, Diabrotica virgifera
aatgctacctttagacaactttacagtgttcaagctatctcttgcaacttcacgctgcagttttccataataattttcagcagtttttcgatgtggtcgggaataatagcatcatttgacattccggagcgctcagcatcattggtgtcggtacgaccgcgtttgaattcagcaaaccatcgattaattgttgtaatcgatgaagcagagtccctgtaacactttttgagctgttgctcggtttggatggtatttttcccatcaaataagtggataaatcaacacgaaattgctctgtatccattgttcataaaaatcacaaaagtagcgtcacttcaaacactgtaactcggtaaataataatctgaatgacacgaacattttgacagtctgcttttgaagggtaggacgagcgaaatgtcataaattcaatatgataaattcattagagttgccatctctggatttaggccctgaacttattgactgattacaactcaccgctactctttctaacttctattgtacgattgttcggccaactaatatgccgtcctaaagattatcacgtagtgctcatgcatttgacgcgcattttcttggatgtaaacatatagtaattccacaacatattgc

SEQ ID NO: 11292 - DNA, 626 bp, Diabrotica virgifera
ctctatctggtatatgtttcagttataaaaaagatagtctctatactttattccattacatgccataggaattgtcaactcttcagttgggaagacctaggaaaatctaggaattgtcaattcatgccgctctagataagactgaaatgctggtcatatcaaaaatgatgtcaattaatgtaaacgtaaccaattgtttattataaataataacgaaaagttaagctcaacttttagtctgctaagtattacgttggtattttggaataaagtatagtgctagaaaacattttgtttatctttcttcattgtgttgttttatataaaacttgatcaaagatatatcaaaaaaccttttagaaataatgtaactctacaagacttaggatcaaatgactgagtgaaacgtttttaacaataaaaaggtttcaatgtcctagaatacattttgggaagccttgctgattaagtctgaagatagagttaatactaaaacagtaagttttgtacaagtatctgaatattgtgatttttgatgttcagttgattaaataaatgaacatacagtataaaatatgtaatagtaagtttgtaatttaatcacctatggataataaatagcttac

SEQ ID NO: 11293 - DNA, 635 bp, Diabrotica virgifera
atctacatttggcccagattaaaaaatatgctaatttcacccatagtttgacctttattatgtttactattctaactgggaaataagccacaaatttaacttaaaaaattattttattgacgtttcgacttttacctcggacgtcgttatcaaaatacaacatattactctttcttaatattgtttgttgcacttctacatataggctgaaagaaaatgcattaaggaatgtataggtacaataataaaactattgctcacattgaatttattcgttcaacatgggattactaatatcagtcaaacaacaacaatatttgctttttaattgtatttataatgattatattcatttgaaaaatattataaatcgggaagaataacttaatggtaatactatttattattcttcttgttttataatcacagatctgaaatgtaggcaactaattaataaagaataatgtaagatgtgatttaattcttaagattttaaatttaggctttttatatttatttctttgaaacggtaattagactgtggtctgtaacaagtacaaaagactttatactgcctgaagattaggatacttaccaatattggaccaaaattcattttacagtcaaaagaggct

SEQ ID NO: 11294 - DNA, 637 bp, Diabrotica virgifera
  SmartBlast Evalue=5E-22; Info=Vitellogenin n=1 Tax=Anthonomus grandis RepID=VIT_ANTGR
aaacactattctgattagcccatcagtcaatgacgaacaaaaaggcgccgtttacagttacttagaagctacaatggaggatgtaaaatctggcacacaaaaaattggagaagttaatcaagctgtacacttggaaaatctcgtatattcatataaccaacccttttcaaaggataaccacgttgaaggagatgaaaaccaaaaccaaagaaaccaaagaaccagcgatgcttatagatacagctctggagaagaagaatatgaagatcgtgattcctataaaagattatctcatcgtcgctaccaacgctctcttgctaagaaatatggacctaaaaatgacaactctgaagaaaacctacaaaatcaacccagaattaacgaagcccctgaaagtcctttattaacgttaactactggatacaaaggaatgtcaattaaaaattcagttaacgtagtcaaggaagcagaaaagcttattaaaaaaattgccagcgatctccaagaccaagaaaaagatcaccatgaaaaaacattggaacgttttgtcaatcttgaaactctaatgcgcctcatgaatttcgatgaactcaaacaagtatccgacaaagttatgaggcaatctcgcaacgctcaa

SEQ ID NO: 11295 - DNA, 632 bp, Diabrotica virgifera
agtaaataaatgttacatttgtgccgaattttgaagactaattaagtattatgcaacgtgccagttgtagttacactgtggataacaactggaatataaatgattagtaatagttaacatttgcacttgaacattatacactagaacattgtagaacattatacactagatatattttagtttattggctcctagaatttatataaaactcaaacaattttgaagctgattatctcagagctatcaatagtggactcatatcgttttacgtctgacactatcaattcttctttttaagccatctccgcggcggaggtcggcaatcataatagctattcgtattttagagatggctgctctgaaaagttcatttgatgtacatccgtactactctctcaggttgcgcagccacgatgttctgcatctccctatgcttctctttccttgaatctttccctgcgtaatcaattggagcaagctgtatctgagatacagcttgcaccatcaattacagtttaatattagcatgttcttttagtacaaactagctacatattagttccagaaatgttgtaaattttaatttataattgcgctgagtacgcaaattatattgaagaacaaaatagtgc

SEQ ID NO: 11296 - DNA, 634 bp, Diabrotica virgifera
  SmartBlast Evalue=5E-63; Info=Cell cycle regulator Mat89Bb homolog n=2 Tax=Xenopus RepID=M89BB_XENLA
gaatggaatatgaaacgacaactctcaaatggtgcacaccgagaggaatgaccggatcagaattacaaaattgtacttcaatgcatcggataacaccagtagacgttaattcaagaccttcgttatgcttaattaatttcttgttaaatggtagatccgtcatgttagaaatgccgagaaaggcaggtggaaaaattaccagccatcttcttgctgcacatggtggagaaatttttattcacactttatgtacagccagatccgtcttggaagatccaccttcaatttctgaaggttgtggaggaagagtgactgactaccgtattaccgatttcggaatgttgattaaacaaaataccttattgcccataaaagtaaagagtgaagagagtgaacaacctattcaaaaaataaaaactagactaaatagagtgactcgatactggcctctaactataagctcgactttaatatttaatttaaaaaattatttcgacccattaccaaccctaatcacgaaagaaaaactaacagatgaagaaatcttccaatgcaaaaaagtcatttacaatttgatttcgctagaatccaaaatggaacctatacatccgcctaacacaggacaacgagtcaa

SEQ ID NO: 11297 - DNA, 628 bp, Diabrotica virgifera
ttacaactaattttatattggagtttgaatgaaattttatggtaagtgtattttattttgctattaatttacatacaaagttaacctcattcacgcatttaaggaattgttttgtttaagttttcgcaaaagtgaaagcaaatgataaaaagtatatttaattatagttttttataaattgtttatttatttcactaatgatattaaaagaatttgttaagctacttcaaatgtagctgtaattctgcaccaaaaattttaaagcaaaactaacattctacattatatttatttgataacctcaaattttataatatattccgtgatcggagcagtagccacttactgtcacttgctgttgtgtggtgtaaatttccggtttatattcattaaatgatgacgcatgtttaaagaagcatggactcaacggtatatattaaggggaatggagcaatgcaaggaattttggcgcatgtcagaattttcaatgcgttttgattgtattcattgttttcgaatcctgagaagaactaataagtatttttgaaaggtttggacgcggaatgaaagattacattattaccgagtgccgaaattcccggaaaacttctataatgttgatttttat

SEQ ID NO: 11298 - DNA, 636 bp, Diabrotica virgifera
agggtagaaaaagactaatttacaagacgctctagacaatttggtcgttaatgatcaaaacatgtcgtgggtttacggttatgaccccaaaacagaactagagccttagagcataaacgttgaatttttttattctattaagaaggagtggtgcactatgaatacgctcttagagatcagccaatcaacaaataattttaaggtaagttctaaaaagatggcgtggagtagttagaacatctccatttgtgacaacaggttttggcacaacgaaaggctgcataactccaaacagattccatacagtcacaaggtagctcctgtgactttgtcgtgtttccaaaactaaaaatgccgctaaaggaccgtgtttcaacgatatagagatgatcaagaaactgaaatgccattaaaaaaactgaatttcagaactgcttcagtgacttaaaacattgatggcagcgtgtttttacccaaatgaggaatacaaatttcctcaattatgcgatatgctagataacaaagaataaagccccaaaaatattttttgtaacagacctcgtatgcataaatataacctgcaatattattaatagcacagttaaaatatgtaattgtcataatttagtctattac

SEQ ID NO: 11299 - DNA, 634 bp, Diabrotica virgifera
  SmartBlast Evalue=1E-11; Info=Transposable element Tc3 transposase n=1 Tax=Lepeophtheirus salmonis RepID=C1BSK0_9MAXI
atgcaataaacatgattagttaaaaatactgttttgtttgcttccattctaaattttcagagttcatttctaagattaggacaagacgaacacacacctgagtgactgagctaagctgagggtgtagcgatggctatcttagatgattgaggtaatattttcgaatattatttcaattagctggggtagtccatcgcgtatttcgtttcaaccgcataacttcacgtttcggacccgtaaattagcctccaagatcatgcgatttaacaccgctagactattttctgcggggatatgtgaagtcgctagtctacgccgataaacctggaaacgattgaccacttggaggacaacattcgccgcgtttttttgccaatatacggccacaaatgttggaaacagtcatacagtcatcgaaaattgaacctccagatgagactacgtcagagccagccgtggcagatatgccagaaatcatatttaagagtaaacagtagcgcatcatcaatttttttgtttttcgaaagttctgcgaactttcaacagtgaggcaacaatgcgtcggtaaatcgacactgccagtgacattatactatcaaaaacaataatgtttatactcaaaggcgcgctaaat

SEQ ID NO: 11300 - DNA, 632 bp, Diabrotica virgifera
attcagtcattcacgtaagggacgaaatccagctggcagcgaccaaccatgaaagtcgaacaagacactgattgaacatctctaccagaatggaccaataatcagaagactccagcgatcgtggccacaagatttaacacaacagtgaaataaacctttaaggcgaagcatcattggatgctcctccttgcttgcttaaaaagttcattcaaatttacttaaaactcttaagaagttgactgtaaataaaaactcataaaaaaaaaacaattttttcgaaatgtctgtattggacgaaaaaggacgagtgacaacatatccatcgagtcctaaaaaaacggtccagagattaggagtaaaatataccagtatgtaagtgagctataaataaatttttgtatacagtaaaagctccttattcgcgcttcctttattcgcgttttcactattcgtggattaaaaaaatgcgacccaattcccatattcgcggcccaagatttcttaattcgcggatcgaattttataatatacctaaataaaaagcatttggtactatctgtcaatgagtcagcaaatcgactaataaaaaaattaaattgaccttattacaactacacctagattaaatttcc

SEQ ID NO: 11301 - DNA, 635 bp, Diabrotica virgifera
  SmartBlast Evalue=6E-87; Info=Ras-related protein Rab-39B n=5 Tax=Endopterygota RepID=E2A7C8_9HYME
ccgctttgtattctattaaaaacctcttgagttacgcatctgaaagcctcctccacgttgtggccgtttttggcagatgtttccacttggaagagaccgtggtgatcggcaaaagttttggcttcttctttggacacttgtcgttgttctccgttattgacaagatctaacttacatcctactagagcaaatacaggtctgtgtggttcaatgtgtcttctcgcttctgacatccatgcggggatgttgtcgaagctgtttcggttgcatatgtcgtatactaaaagagcacccaccgagtttcgataatatgacttcgttatggacctaaatctttcctgcccagcagtatcccaaagttgaagctttatcctagtgccatctttcacttcgatgagcctagcgaagaaatcaacccccacagttgggtcagacacctcagcgaatttgccatcagtgaaatatttgagtaaagaactttttcctactgtactgtcacctattagtattaggcgaaattggtaatcgaatattggttctaccattttataacattatttatcactgggattaatttagtttagaaaataatacgaatgtactattaaaactctattgtctagaccaaattgaac

SEQ ID NO: 11302 - DNA, 634 bp, Diabrotica virgifera
  SmartBlast Evalue=6E-54; Info="RNA polymerase II ctd phosphatase, putative n=1 Tax=Pediculus humanus corporis RepID= E0VQI4_PEDHC"
catatatgaagttcgtaatagtcatgaatattacgtaaaaacttgtgtgttccaggccttaacctggtatgataccaaggagaattggatccatgtaactgaaaatgataaacgtctttaatattaggaggtatgttgtcatttgtggtgtggattaacgtttgatctagatcgactaacaggactaattttctatcttttaacaggcgttcgttatcagcttttcctattctttgtgccacttcctcgctgacttttagatctgggatagcatggatcataggtactgaagcaatactaatatcatcgttttttctaagatctgctccacattcggcacacatgtcattcattattgtaggatgggaacatggtattaattccaaaaggactccccgggttttacaatttgtccttctaggactaaaatctgatgcacagttccagcttgtgttgattttaatttacgttgttccggttttgtagcttcttcaaaatcataaattaatattggacatcctatagaaattcgtgttcctgttcgtattttccatttacatatttttataggttttgtttgttgttgaaatatacttattgttctttccgccatttttaactgatcgatttcgat

SEQ ID NO: 11303 - DNA, 635 bp, Diabrotica virgifera
  SmartBlast Evalue=2E-41; Info=Mitochondrial intermembrane space import and assembly protein 40 n=1 Tax=Culex quinquefasciatus RepID=B0X6P5_CULQU
cttcatttccggaataacaaaactctagtaatgataacattctcttctactatggaacctcaaacaaagaatataaactgtacacccaatgttaattgtccttactatctacggagctcccacttgttaactgtttcgcatcactactttgtatggcatttgaatcagttgctgatgccgaggccatagcacttgcactatcattatcatcgtctcccatatccttattatacaaagttggaaacttctgcatacaaccttgcatagtcttaaaaagatcataacaatcactgcctttgggttctgcttctgaataatggaagcagctaaatgcgtttctaaactcaaccccacaggggcccgtggccattcctcctaaacaagggcaattccaattgatgtccccattgtctaaaatcagtcctggtggaggttgggcttcaggaagtttgactttgcttggtattttgtggtcttcttttgtagcgaatatcacgatatctttgttgttaggacctaatcttcgacaatgggacatttttgttgaatattcgaagtttgtttttttagtatttaggacctttcaagagtattttgacttaaataagacttctgaagttctgaagatttaattt

SEQ ID NO: 11304 - DNA, 632 bp, Diabrotica virgifera
  SmartBlast Evalue=6E-15; Info=Copia protein (Fragment) n=1 Tax= Camponotus floridanus RepID=E1ZW23_9HYME
ccccttttcttgacctttctgatcatatttttctttgaatgacattgttgccagtgcttgttctgtctcttcatatgcagttaaattcatttcttcatctaacagtcttgcggtgaggttacctatagtttgtttagcactgtctacggacaaccatgcctgtctaacatttctgtacttttggggcaatgtactcagtatttttgtcataatagcaatatcactcacaccatcacctgcttctttaatttgcttagcaagattctgcacttttgctatgtgttgagcgatagtatctaggctactcatcttatattgatgaaaccgttcatgcaacatcattttatttgattctgatttctgctcataaatagactcgaaggtctccataatctctttagcagtattacaactttcaatcaaagtaatctgatttaaactcactgcagattttaaagtgaacatagcctgggcatcctttttaaaccatgcctgtaattcgtctcctgctacgtctggtttgattaaccagccatcaataactccatatatacctttggcccttaaggcacatttcagctggaacttccactgttgaagttaacgccatcaaatttaccaactgtggatat

SEQ ID NO: 11305 - DNA, 634 bp, Diabrotica virgifera
tttgtctgtctgttgtttaagtttcatgtcagcgaatatatatttatttcaacaatttttttcttaatttttgaccttgttaggggggtaaatttcctcattttccctccatgtactgccgcctctgttaccaagaattgctgctgcatcataatgaaataaagacatgtaagaattttggtactctggcgattgatattttctatcaaagtttgatttaatgtattttaattcataaaaaagtttttgtttattgttttagaaaatttgtgcgaatctacactatataattgtattttaattataatttcttgttgctttgtactacatatattttggttttgtggttaagtcatatctgctgccaggatgcgacgtaacagatatgcctttttatcatatctagcgattgcttgaacaaaaaatctacaatatacgatgatttaatgactgaacttaatgtacttgtgttgttaatatcattttacccagataaaatttaggacgaagatgcattaagctacctgggtagaaattgaacaaaaaaaagataatttattttttattttagtattttattctaggagtataatgtgttagcttgtattagtctagcaataaagttttaatgttt

SEQ ID NO: 11306 - DNA, 635 bp, Diabrotica virgifera
cagagatgagagtattgagaagaattacaggaaatacgctgagagatcttaaaaaggaatgaagacattagaagccaatgtaacgtacagtgtataaacgaatgaagactaaacagaaaaaagaatggaataatcacataaggggagaacatgtggttaaaatagcaagagattaaatcaccaatcgatagaagaagtatcgcgcaaaagatggaggggcaaccttccataaagatattatctagatatctatagagattgtaaagcatacgaccgtcaatttaaatttcaagtattcaactggtgaatgcagaggtccaatcggtcatgaaagttggcacaaaaaaaactagaagtcagccacttcattgatcctttgaatacgtttcgctttattgttttaaagcatcatcagttcactacaataaaaaagttgacaatgtttatataagtacatctaacctgttataatatacttacaagaacaatatgtagtttattatttgatgttataatataaattgtagatttactcaacatagaaataaactcaaacattaatgagaaccgtgcactaataatgttcataataaactcgataatccagccatttaaatttgacggctggcttcatt

SEQ ID NO: 11307 - DNA, 635 bp, Diabrotica virgifera
  SmartBlast Evalue=0.000000004; Info=Alpha-tocopherol transfer protein-like n=1 Tax=Camponotus floridanus RepID=E2AUQ1_9HYME
ttgacatactctcaacgaccattgccatcctatgtacaacaaaaggagatattttaaacacatgactccatgccaggttcctgtagtcgacaataagtatttcaccaactgataagtcttcacaaatccgtatttcaaatagatttgatacatgcgcatgatacctattagcatgaaatttggcggtatagggtaatagtttgagaacagatactctgtaaagtccttcatgtggtatagctagaggaacataaacccccatttcccaacattcctgcattttaggtaatctcggatgtgcgtttttaaaaaattcaggtatattttttcgtactgcataatatgatttaatattatccttggtcctttctatattatatttattatttgtaacaaaaaattctagcatactatcacttggtatttctggaaactctttcctacttgcccattctctaagtttcgtcaaaacttcctccacctctgactctgttttatcccagtgttttcttattttatccctattagtttgaaaaagcttcaaacattttttttcttgtttattttcttccattatatcctaaagtaaggttacctcattaggaaaattactataatcatatatgatattttta

SEQ ID NO: 11308 - DNA, 634 bp, Diabrotica virgifera
atgagaccctcaacctgtatatttataatgactattttaaacagtctttcttccaacttttcatgcaaccatgtttttaaatatttgtagctaagacaggattcaaattgttacaccattcacgttgttttttcttttcctttgtatctaagcgccaaacagttcgtactagatatacacgctttcagtttcttatttttccatttttttagcttccatgctttctagaactggtcaacaatatgtattcatccttcaacagtattcattaattgtgcgcatcacatagaaatacttcaaaatcttttgatattccgatgccaggtatgttatacatattgaagcatataaatactggcaatgtccagatgcagtttcaaacgttcactaactaagcgtgtcataatttatatgttgcacgtttctaaacaaatctacctggaatcttgtcgatgtaagtgcccagttgttgtttcatccccaaaaaacaagagaaaattcgagataacagtttatccggtatttaaacggcacccgacttttttgaaaatatataccatagtcggtatttgattttgaaaaagatgcgtgccagcattcaataattttctcattctgccaccacagaaattgt

SEQ ID NO: 11309 - DNA, 629 bp, Diabrotica virgifera
agatgatcatgagaaaaagagtatatgtatacttttatataagacaggagaaatgtcattacaaaatattacgatatgacgtcacaagggttcgtgcgctttttcgatcgtttgaaatgattgaaatgaatgtaaatacacagaatattttaaatttgtacttctacgttattgtgagtttttgaggcgtgaaattttgaaaattttatttttaaacgaacctgaacattattatgaaataaaacaaaaatgtgtaagttcccttatgtatcgtttattagaactgaaaatgcttttgtttacatatgctgcatggatagtgagaacgaagtagcgtagtaattttgaatactttgtatcaagaatactggatttgcctcttaaaaaagtattttttagaaatttcgacatttgtaattagaattgtcctcagtaaggttcgagtttccaagattatttagttaataatgtttttcataatggaataaaaacgttatgccatgtcctcttgggatgcattgtatatatgtatatctagattgacctatattctattattaagatcatattttttcttgcaatgtatttttttagatgtgtaaatatatatcaataaatagttacactgt

SEQ ID NO: 11310 - DNA, 628 bp, Diabrotica virgifera
  SmartBlast Evalue=2E-21; Info=PQ-loop repeat-containing protein 1 n=1 Tax=Lepeophtheirus salmonis RepID=D3PIA6_9MAXI
tgagtttattaactttatttttcgctcgttctttgtaagagacgtgctgaatgtgttgggtggttgtttttttgacaccatttaccgtcaacttgtctacattattaacaatatctacatcactatctctactaacagccttgctagatttataacagttttctgtatgcacctcaacgctggtgatacagttattttctgcatctttattactaatagaattacagcttgaatcgctgtgttttagaggatcactgttttcagtcgcggtattaacgttactattgtttttatccacttttttctcgttaactgttgctacctcggcacttttgacttctttgcgatgtttctcgtcctgggtccagatgataactactcaatcaagacgatggggtatcgaccgcgtcgattccacattccctcggtaaaggcatacttggaataatattagtaagtccacggtcacttgtattgaaccacacacccagaattgcacgggagcatcacgcaatagaaagtatgtagtcttgaatatatcaccacacgtccacatcaccaccatgcttatgctcattccttctgtggatttgttcctgtaattcttcatgagttggggcgttcctaa

SEQ ID NO: 11311 - DNA, 635 bp, Diabrotica virgifera
  SmartBlast Evalue=1E-48; Info=Transcription initiation factor IIA subunit 2 n=3 Tax=Apocrita RepID=E1ZWR8_9HYME
gaaaaaaaactgtgactgcgttttgtggggtaaacattgctaaaaatattaattttttaatgtttcctgtcgaatgagctgtacgctaaaccaattcgtatttttatttgtataaatttgatttagaatgtcgtatcaattatatagaaacactacgttaggccacactttgcaggaaagtttggacgaattaatacagtatggtcaaattacgccacaacttgcttgcaaagtacttttgcagttcgataaatctataaatcagactctggctaccagggtgaaagctagattaacgtttaaagctggtaaattgaatacctacaggttttgtgataatgtttggacgttcatgttgaacgatgtagaattcagggaagtgcaagaaataaccaaaattgaaaaggtgaagattgtggcctgtgatggaaaaaatgtcaatgaagaagggggatccaaaaagtagatgtaaaaaacaaagtgaactgtatgacattgtaaatagactgttttattatttaataagcctatgttcttcgtaatgcaagtaaacaacatatactcccaatcaacacttaaagaatatgacaattttataattgtaggtgatgaatgaaattgcaaatatgtatgta

SEQ ID NO: 11312 - DNA, 634 bp, Diabrotica virgifera
  SmartBlast Evalue=4E-19; Info=Alpha-tocopherol transfer protein- like n=1 Tax=Camponotus floridanus RepID=E2A8Q9_9HYME
tacaccagacaccaattagtttattttttcatttgaagtaatttggtgatagtattaaaggttataattttaaaaaactccagattaaagcatgtccctaatacctcagcacgattttaaagccgaagatctaataagagaaggtagaactaccaaatcgaatgtggaagaaataaggagatggttgtcctttaatacaaaaatacctccagtatcagacgagcaaatagttttatttttactctcttgcaataatgatttggaacaaaccaaatatactattgaatccttttttaagatcaagaccacatcacctgaattgttcacgaatagggatattaactataaggatgtcaagtactcgcatacagtatctcatatagtgatgtttcccaaacgaacgaaagataactacatggttggactgggcgttttaaaagatacaacttattataatttttgcatagagccgcagataaaatctcttttcgcagcaatcgagggtcacttgtacactaacccaccaagcggactaatctttattatagatgtcaaaggagttggtataatgcatcttacaagacttaaacttgggccactaaagaaattttttcaatacgtacaagaagcactc

SEQ ID NO: 11313 - DNA, 629 bp, Diabrotica virgifera
tcaaccgtagtagtttttctgctacagcagcttgcctgtaccaaattaattgttagttaaattgtatttagttaaacttttaatttacattttaaatttacttacatacatcatacatcttgagaatataaaaattattataaagtatgctttaaaacagctgaatgttaaatgtatcagccaaattatttattaatataaatagtatttactggtgtcacaaaagctggtaatacttttgtagttgaaatttttgtaacaattttttatattttaaattttaattttttaaccgaaaaatttttggatatgacatttgttttgggcgaaaccattagaaattattaccagcttttgtgacactagtaggtacatagatactatttacttcttaatatacttccataacgttcatttgtttcaaagcatactttatatgttctcaagatgtaggtaaattaagaagttattaactgatcttactcgtaaatacaatataactaacaattaatttggtacaggagagttgctgcggtggaggaattactacggttgatttgaaatttggttgtttgtttgatttggtgactaatttatgcattcattgatatggtaaaatattttttgta

SEQ ID NO: 11314 - DNA, 632 bp, Diabrotica virgifera
ccgcttcgggcgctggcatagtttcgtgtatccccacgcacggagcccataggatggtcagcttgatgaaccatcttttaaaagtcttcttgtgattggtacatcaggaacgtgactacacacaactagacgatagtataaacaggaacccaactggtatttagaaaaggctttggaactagagaggcattatttactatacaaacaaacagaacgatgtagtgatgtcaattgtgacatgttcaaatgtctagttgactttgagaaagccttcgacaaaatacaacacataataaggcttgcaaacatattacggaatatagaaataaatagatggtcaggatgtgagaatcattacaaacttctactgatatcagaaagtcataatacgagtagaccaacaaaaatctaaagagataccatgacaaggatgtgtactatcccctctacgttttaatatgcgctcagaagagagcactgtttaaataggtcctagaagacatcaatgaaggcataccaataaacggacactaatgagtaatctcacatatggagacgatataatattccttgaggacagcaaattttggttgattgcactacgcagtactgcgagaggtatagaatcgcgc

SEQ ID NO: 11315 - DNA, 636 bp, Diabrotica virgifera
  SmartBlast Evalue=6E-42; Info=Mitoferrin-2 n=1 Tax=Camponotus floridanus RepID=E2A4R6_9HYME
caccacatgacataaatgacagtgcagttgtgaatgaagggtttaatggtggaaattgtttaaatgttaatatatattttaattggttaaacataacatcattccatttttgtgacaacgtcactaaccgctaaattttcccttttcttgttttaccgtttttaacttatttcaacaagatgaatcctggagattacgaaacgcttcccaccgataatgtatcatcccatatgattgctggcgcgatagctgggattatggagcactgtgttatgtaccccctcgattcagtcaagacacgaatgcagtcccttgcaacttcaggaactgaaggtatcagtgagacgctattaaggatgattcggcatgaaggtattttgaggcccattcgaggtatgtcagcgatggtagttggagctggaccttcacacgctttgtatttcagtagttatgaatttacgaagaatatctttgcacagtatttcaacgcttcaagatatgacatgttaatttgtggtagttcaatatcaggttgtatagcgacattaatccatgatggttttatgaatccggcagaagttgtgaaacaaaggatgcaaatgataaattccccttacacatcagctttaaggtgtt

SEQ ID NO: 11316 - DNA, 628 bp, Diabrotica virgifera
tgggccggatatgaacggataagaatgggagaggataggctaccgaaaagagcactgaatgctagaatgcagggaaagagatcggttggaaagccaagaaagcgctgggaagacacagtaaacagcgacgcacaagcccttttaggagaccgtgtatggagaagaacagtcacagacaagtaaaggtggaggcaaaaaataaaggaggccaaggctcaatttgagctgtagtgtcgtagaagaagaagaagaaaataaaaaaattccctactataatttaatgaggtagcaatgccaaagcgtttacacagattgtggtttagtcagaacccagatattccattttcaaaatagtctactcaaaatgatgaatctgtaaacattacacttatgtgcttaaataatttaaaggaatatgaaaaatatgacaaaaccagaataagtggtttccatactgtacatacttatttaaaaagaaaatataatgtcttattgactgaatgttgaagtaataacaaaaaacaagtgaaatagaatgacttatttacgtggacactagaacaaactgacaaccagattttaaactagcagttaacgaaacgaaatgtatttttgaaaatctgatatt

SEQ ID NO: 11317 - DNA, 631 bp, Diabrotica virgifera
tagaataaactggatgagaatactttaagaccgtttatttcgagtatgaatcgtcgatgccaggatgtcactcgtagcttacttacttactccgtgacgttacaactctttgtgtggtttagctgactcgacaacatgcctccactgttctctggcttgagcaacctttatccaattttccactcccatagtgttcagcagtgggactctataatttttatagcgaaagcgtaagcaagtcgtagcgaagcgtagcaaagcaacggttcagttcgaatcgtactctgtattgtgtggcttcgcttcgctattcgcggtgtgcaagtacttggaagggatatgagaaacgatcgtgcgcgaatagcggagaaatattgcaactttcttaaataattcatattgtcaattgaaattgtcaaattgacgtacatttcatatctactgtcattgaaggagaaaaattatatgttgctccacaatattgatatgatatgcaattattatataaaggtaaatttaattaattgtattttgcttgcagtactgcattttaataactaattttatttatacatacaattgtttacgttttaatcacataacctgaatcttatttttcttcttattattt

SEQ ID NO: 11318 - DNA, 626 bp, Diabrotica virgifera
  SmartBlast Evalue=1E-21; Info=Pol-like protein n=1 Tax= Biomphalaria glabrata RepID=A3FMR3_BIOGL
tatatacaagtaatcctataagtattttaataaaagaacaattacatttactgaagaacacgatgcagcaagtaagctttatatgggttccatcacacattggacttcaaggaaacgaaaaagcagatttccatgccagagaagcaatacacagtgcgtcttcagtgttagtgaacttagtgcctgtttccgattacaaaccattccttaaagaaaaagtgttaaacaaatgggaaaacgaatggaatctttcacaatcatctctacacacaataaagccctcaattgaaccttggtgtgagatagacctaaatcgccagctgtttgtgaagctaaatcgtttacgcatagggcatagcagacttactcacagctacctaatctctaagtcaaatcgccctatttgtgacctgtgtaattgcgacatcaatgtaacacatatattaatagagtgtcctaaatatattaatgaaagacaaaaaacactccatacctctcaatataaaagcagtcttaggatcacactgtaagcttgcgcatttgtttaattatttgaaagacattaatgttttaaacaaactataaccactgttaacattttgtaaaccccatttttaatttgtaaa

SEQ ID NO: 11319 - DNA, 632 bp, Diabrotica virgifera
  SmartBlast Evalue=2E-17; Info=Microsomal glutathione S- transferase 1 n=1 Tax=Culex quinquefasciatus RepID=B0XG85_CULQU
gtgtgagtttgcagtacctgttttcattgactttaatcaatttaataggtaggtatttatagtcgaaagtcgaaggttttaataattcagtcaatttacacacaaatttagttgataccacacgacactcaacttcattgttttatcgactcataaaaatagtattccacaatgaataccgaaaagttgtatttacctattaaacgtgaattgttggagttttatgttttttgggtggcaatcctattgtccaagtacttagtgatgattgcccaggtgggcatatccagagcatacttcaaggtaccactaaatgaagaagatggtaaagttctacgaggtaaagtacgtgcgcatgaagctgtagaccgaaatagaagagcacacctcaacgatttggaaaatataccgttcttcatcatcattagtttcttgtatctactaacagatccttcagtgggttcaactaaactgattataagaatatacgtattgtcaagaattctatatacgtttacatatacgattttgaagtctgctataagaattcccatgtttcaattaggcatacttataaattcatatttaacgctaaaagttatatatcattttagttaataaatacttttagt

SEQ ID NO: 11320 - DNA, 630 bp, Diabrotica virgifera
gggatactcgaagtcccaatccgatgatgagtatcaacttgccggaaagatgttactgtgctgatgtggattatcctatggctgtagtgggaacagcaggaagacagatcattgtctatcaattggatagtaagccacaagaatataggaagctagacagtcctttgaaatatcagcatagatgtgtagctattttaaagataaaagaagcaaccaacaggctatgctctaggttcagtagagggtagagtggccattcaatacgtaaatcccacaaacccaaaagataacttcaccttcaaatgccatcgctcaaatggcacaccgaacggctaccaagacatctacgctgtgaacgatattgcattccaccctgttcacggtactttagcaactgtgggcgcagatggttcgttcagtttttgggacaaagacgctaggactaagttgaaaccttctgaattaatggaacagcccataagtagatgcgcttttaaccacaatgggcagatatttgcttattctgttagttatgactggagcaaggggcatgagttttataatactcataagaagaattatattttctgagaccatgttatgacgaactgaaaccaagaacttcgtctt

SEQ ID NO: 11321 - DNA, 635 bp, Diabrotica virgifera
  SmartBlast Evalue=6E-50; Info=Phospholipase C n=3 Tax=Ralstonia RepID=B2UJE7_RALPJ
cggcatagccgaccggcgcgtacggcggcacgacatgatcgaagaatccgccccactcatcgtagttgatgatcagcagggtcttttcccactgcgggctggtcctgacggcgttatagaccgagttgaggaatgcctgccccttgcggatgtcggccagagggtggtcgtcgttggatgttcccgcgccttctccaagcatcgatggatcgacgaatgacacatccgcgagcttgccgttcttggcgtcgctgaggaactgggagaatggctggattccggacaggccggggttatggccggccaggatgaaggacaccagggcccaaccggcgatgtcgccatagtagtatcgcccggtcttgccgacgctcttcaactggtcccagacagttgactgggaccatgccggcgtcagggagttggtgatgcgatcggtctgacccgcgtgcatgtacaagcggttgggccaggtcggcccgagcaaaccgcagtggtaccggtcgcaaatggtccagtggtcaaccacgcccttgaggaaaggcacgctggacgcggtgtagtacccgatcggaaactggtcgccgaccggctgggtgagcaggaagccgtccacgttgccgccattgagctga

SEQ ID NO: 11322 - DNA, 629 bp, Diabrotica virgifera
  SmartBlast Evalue=3E-72; Info=Eukaryotic translation initiation factor 2C 2 n=1 Tax=Camponotus floridanus RepID=E2A5A6_9HYME
agaaattcaaatttaggtagaggctgtgtttttcgtatatgtatgttagttatatgcaatgatttcaacttccagaggtttatataaagttgttgtacaacaaaaattatttacaaatgttaataacataactcgaaatatagctgcaaggcataagtcctatacaccaattaatacagtaattatgtttgtaccacaacaagaagcctgggttgtagaaagaatgggtaaatttcacagaatacttgaacctggtttaaatgtactcattcccatcgtagacagggtaaaatatgtgcaaagtttaaaagaaatcgccgtcgatattccaaagcagagtgcaataacatctgataatgtcacattgagtcttgatggtgttttatatcttagaatcatcgatccttatttagcaagttatggtgttgaagatcctgaatttgccataacgcaactagcacaaactactatgagatcagaattaggaaaaatattactggataaagtgtttagggaaagagaaaatttgaatgtatccattgttgattcaataaataaagctagtgaagcatggggtatgacatgtcttagatacgaaattagggatataaaacttcctccgagagtcc

SEQ ID NO: 11323 - DNA, 633 bp, Diabrotica virgifera
  SmartBlast Evalue=1E-22; Info="Protein SMG5, putative n=1 Tax= Pediculus humanus corporis RepID=E0VJH4_PEDHC"
ggcccactctatcgcttctatctttacatcaccagtatccttcttctcagagtgtatcattggaaaatcaatgaatgttttgatatctaaattaaaatgatattgcaacttagataacatatggctgtaaaaacctattccagcatttatgtgcgaagcaatgaaactgatttcctcaggaaggtactcctttttcttcagtttctttgctgttgaaactacatcataaaaccccttcctccaaagtaactcctctcctttacgaccatatagtgaaggatctgaaaatatcaatctttcgcagtattcacagaactttttgcgctgtacttgtaaatttggtgaaaagaggtctcccactattctggcacaactcctagtgtcatctaaacgtttagcttgttcacttatggaccgatataatttttttgagagctcctggccctgattttggttaatatctgttgaggtgtagcttttcttcatttcaactcatgcttttgttcttccctcgtcaagaattcaataaccttttttctattttcgttaattccaaatatctggttacgggcaaaatcattgttagttcataattaatttcacaaacgtattttgacaccatcacagtttctt

SEQ ID NO: 11324 - DNA, 633 bp, Diabrotica virgifera
  SmartBlast Evalue=3E-78; Info="Dynamin, putative n=1 Tax=Ixodes scapularis RepID=B7PM12_IXOSC"
cgacaaattgggtactccatacctacaaaaagtgttaaacgagcaactaaccaatcacatacgaaatactcttccttctttacgagataatttacagaaacaggtgattattctggaaaaggagcttggcgatttcaagaacttctctcctgatgatccaagtatgaaatcaaaggctatgcttcagatgatccagcagttcgctctaagttttgaaaaagtcctcgaaggctccagatcggacgacgtgaacactactgagctgtcaggaggcgctagaatcaactgtgtctttcacgaaagattcccgtttgaagttgtcaaaatggagttcgacgaaagcgagctgagaaaggaaatagcaatcgccattgcgaacattcatggaattaggataggtctttttacgcctgatttagcatttgatgccatagtaaaaaagcaaatctctagattgaaagacccttgcttgaagtgtgtggatctagtctcaaccgagttgttgaatgttgtacacaactgctcagaacagatgtcgaggtttccgagattaagagaaatcgttgaacgagttataacgaatcacgtgagaaaaaagagagcaagaatgtagggatcaactatcggtataca

SEQ ID NO: 11325 - DNA, 627 bp, Diabrotica virgifera
gatactagatagctaaatacatttgtttattttcgatgttgtttgattcttccgtctgattactcattacatgattacaataatctgattactcattacattttttagttttgctgaagttaaaagaaccatataatatatgtttatgtaacagttaaaagaaacatttacataacatatcattatttcttattgccggttacgtattatttgtcgtaattatttaatattttgattttgtcagtgtttaacagaaaaatgtccagtcgtagcacaaaactttgtatgacacgaagcactagcgggtcgtggatcttctgaggtagcctcttgccttacaaatacaatgaaaagtgaagttactgggaaagacttcgcttttatgtctgaaagttatttgggccaaaatgtttctgtttgctgttgaaacactaaatatttcaaaaatcgaccagttattttttgagcccggatattcccaaatggaacgtgatatggtccatgcccacatcgaaaacgcgagtaaaggcttggaaatttacgatccatcgggatggtatatgtacagtgattaaaatggctttaaagaaatcaaatacgaagtagttgaaatagatcaggaagaca

SEQ ID NO: 11326 - DNA, 633 bp, Diabrotica virgifera
  SmartBlast Evalue=2E-27; Info=Excitatory amino acid transporter 3 n=2 Tax=Culicini RepID=B0W240_CULQU
gtcgatactgtacttgtaaagatctgtgccactggtgttggttggatgtaatttggtacgagtttggaaaattgtggcttctactacatttggtgggaacatattcctgattaaatctaataaggtatctacagttaaaacctcccgtttttcttccttaccatccgagtcttcacttttatgacccacacccggcctcatggtaaccaccacaaccatacctaacaccacagcagcgaacgtagtagtcatataataagctatcgccctaaaggcaattttccccgaaagggacaagtccaagcttgctatcgcagacactaacgacgaaacaatcaacggcaggatcagcgccttcaacatccgtagaaagatctgtcctgcaagtccgatatatacaatttctcgctctgtccattttccctggagtatcgaagaatgatgccgacgactgccccgagaatgactcctaacattgtggctatggtgagggcgttttgtcgcagacatgactgcttctttcttggtttccccctgtcagactcaacttcgatcatgtcgaagttgtggtgtaggtgagccatggtttagtttgtgaatggtcaacactcaacactgtctatgtttaaccac

SEQ ID NO: 11327 - DNA, 634 bp, Diabrotica virgifera
gaaatatattgttctggtattcttaatttgttatttgagtggttgttattctgctcaaataggtgaaataggtaaactagaatgtaaacctaacgaagtagaagcttgccgtccgtgtccttgtccagaaccaacctgtcaaatcccaaaaccgaagtgccctacagatgttgcgtgtcttcaagcctgtttcccatattgtgcgtgtgcaaaagggttcctaagagatagttcaactggaacctgtgtacctgataaaaattgcaattagaaccaatagtgaaaattgaggctaaatacgttttgtttccaaaatttttattacttcagtttcataatactgagatttgttaccttagttctaaaatagacaaggaagtataacacatttcaaatagcgtaccaataacattcgcacaataaataacatttagtactctaactctaacaaacaatactctattttgtagcactaaaatattacctaacatttacagttacagtttcattggtgtaaccttgtcctaaaactaagtagctactctcgttataatgttttgttactttttcaatagtaatttaagtaagttgtaaaatgtatcctctgtttcattaaacaatgcttgttaactca

SEQ ID NO: 11328 - DNA, 635 bp, Diabrotica virgifera
atggatatgaaaaaataagattaagttatagcgttgattaataaataaatgtatagatatacgtttatatattattatagaaagtaattagctgaaagttccacgttccagttccaagccagaagtgtatagtacaaccgcgtcataaaatagtgcgtactgggtaatgggcgtgggtgctgctgagattttatgaatatatcacctcaaaaatataatgcacaatctacaacacaaatctacgccttgtaacattcggttacctatgcagaaacaggtgcagcaacagcaacaaaatcagcaatacgcttatcagcgaccccaacaacacatccggacgtaccaacaaaaaactaattcacaattacatcctatttacccagcaaattttccgtctactatatcgtatcctcatcaacaacctaaatttcaacaacaacaccaacaacctttgataaatccttattatacatcgtctcaatatccttattatcctaatcagacttcggcatgtaaatatgaatattttacggagcaaaattatcccaaatctataggtacaatgtccggatctactattgttgcaccacagccacaacaaccaccaccacaacagcaacaccaaccaatgacgc

SEQ ID NO: 11329 - DNA, 634 bp, Diabrotica virgifera
tagttatgctctgctaatcttggtcttggaattttggttactagcatgtatttcgtcttctcttcatttattcgaaggcccagactacctgtttcttcctcgagttgtgaaaacacccctctcacgtcttttgtagaatgaatgagtgcacctagatcatcaccaaaagccaaccatagttttgatcctcgattctcaaatcccctgtattctcagatgatattttacttattacatattctaagaccaaattgaataggtgataaggggtctctttgtctgagtcctgatgttacaatttgtctttgttatttgttgtcagtaatttaagacattttgaaatacaaaaattaaaagtaattcaggtacatttattgagagccacaaataatccttcaaagagccacatgtggctcgcgagccacagtttggccacccctggtatatagattgctactattaggcgaatataatatttataatcaatgtcgtcaaaatgttcttactctgtgtatagttattattacgcttgatataaaataaattatatttatagtacctctaactcttatcttataactgattttaaaaacatttaaattcaacaagacatatttatattcgtatcttcatg

SEQ ID NO: 11330 - DNA, 633 bp, Diabrotica virgifera
  SmartBlast Evalue=3E-77; Info=Protein GPR107 n=1 Tax=Camponotus floridanus RepID=E2AKS8_9HYME
ccggaacttgtacgctgtaagaacgaagaagacataggtcgccatttccttgaacatttcatgtagccacccgtactggaacggcactgttatcttcaacagatagacgattattcttgtagagtatatataacaaacgatcatgacgtaaaagtggcggaagagttttagttttctgagattcatagcagctttgccatctgtctgtgatgcttcctgcaaatgacgaatcgaccatacaacagggaataaaatacagccacagcacaacaaatccaccaaaatgacgaagttttccaagctacatactctcgagcgctttcttcactctcttccagtataatatcagcgacattggctaaaacctgtagaggtatgacagccataaacagctttttgtctcttggtgttaaaacgtgcttcacgaaagtccatcctgtaccgaccaatactaggatgacgaataatagggcacctttcaataaatgcgcaatataaaatagtatcgcccatgtagccagatgtacaccaagtctttcgatgtagtgataattaactccatggaaagccaatgtaatagccttaagaaatacgagtaccgccatcatgtaatggatcttatacaccgggtgt

SEQ ID NO: 11331 - DNA, 631 bp, Diabrotica virgifera
tccattgtgttggggatgaaggtattttgcatttttctgagtgttttgttattagcttctgcatataagcttaaaggatctgcagatccaccggaatttcaccatgttcaagctcgtatggcattacgccctggctgttactatagattgatttgtgaccatccaccacccgaatttcaccctcacgttataccacctttagatggagcacgtagtaaaccaagactgacaagagatactgaactaggaatagctagattcaaaagaataccaccacctagcccctatccttggtgctaccacattgtagaatgtaacgacgaactaaagcagaagatagatgaaataccgaaagacacaaatgcagaaaatcattcgcattcacaagatgaacaagccaaaaagatagatttggaaaaaaattcacaaacaagtgaaaaacctgaaaataagaacagcaaaagacaaacagaagaggaactagaaggatcaagggccacagctgtggctgaagcacaatctgatggtggatatgcaaaagcctatgcatccgcgtccgctagagctatatctcatcaaaataaatattgttattattgtaaaatcattgataaatctaattaaatgtttc

SEQ ID NO: 11332 - DNA, 619 bp, Diabrotica virgifera
  SmartBlast Evalue=1E-27; Info=Probable RNA-directed DNA polymerase from transposon X-element n=1 Tax=Drosophila melanogaster RepID=RTXE_DROME
gtctgttatagagcgtaacactttggattgcaatctttccattatggatatgttggattttgctgctgtacaccatagctggattccacaggtccagaccggtttgagtattgtattgtataccaacagtttgttacgtatagacaacttcgatgttctgcccagtatccaataatgtttacgaaattttaaatttaactgttaactggcgctttttccatatatgtgttctccatgtcaaagttttgtccaggtgcatgccaaggtatttaacgctttcggcttgtggaattgctttgttatttatttctatattaggcgatattttacgacattttgtaaatatgatatgttgtgattttgattcattgatctttattcgccatttctttgtccttcctaatatgcctttgaagagattcggtagctgttgcgggattttcatctgtgactaacatagctgtgtcgtctgcaaatgttgtagtcgttacattttcgtttgttggtatgtcgtgtgtaaatatcaaatataatataggacccagaacactaccttgagggactccagatcgtatagggtagatttttgatgtatctgcttcatgcttgacacggtagt

SEQ ID NO: 11333 - DNA, 634 bp, Diabrotica virgifera
  SmartBlast Evalue=1E-33; Info=Apolipoprotein D n=1 Tax= Camponotus floridanus RepID=E2ABN0_9HYME
aagtaaaattatatatttatttatttaaaatccctctaaaaatagagacattatttagttgcaagtttcttggtctgttttaattagtaaactttcggaaagattattcttcttgactacgtcgagagctgcatctataatatcttgtgatggattctgagctctggtgaggatccagacggtttctccagttatacccaaaactgtatcacaggaaagcaccacagcataattttcatagtcggtactaagaacccagtaaggagctgtaacctctggattatggaatgtaaccaacaatttagcttctcctttatcagaatcaagtcttgcttctcctgttatatcctctttttgtcccaatatatttatttgttgattgtaaactttaactgtaccatcgctgtttaaagagtagttggcagtaacacactttgctccaagttcccagatgattggatacttttgttgttcataccatttacccaaatatgcagcagcgttgaagttttgttcaacagacacttctgggcatttatcaactggaatttgacccagtgttgatgctaccatcaagaatgttacggcgaaaaacaacattttttaaatctttaaaatctttgtactaaatagt

SEQ ID NO: 11334 - DNA, 623 bp, Diabrotica virgifera
gtcctcattagatggatttttgttacaagattttaagtctgccatattctcatttaaaatgtaaattctaattttttagatactagaatttgggtatatgatacactataattacaacccgataagtatctatattgaccaaacttttttcaatgagtctgtttaaaatttccctaataatatatacttaatattaagtaatataaacacttaatattaaatacaaaaatataatttacaaatagctgccacacatggcacacatttacaatgcactgcaatcagctttccacattcgaataggactaccatttgacgttgccaaatttctacttcgtggcttgtaaatgtaggaggctgtggaatccaccagtccagcgtttcaagagctttaagaaggtgtagaggaattggaggatgcacaggaagaccagttccatgtgcacgaaccccgcgggctgtggagggatcatttcgcagttgtctggctgtagcatgacgtgtacgcggggtctgcagatgtaaatagcgttcatttgcgggattcgtgcagctgaaagtcctggaactggtcttcttgtgtatcctcgaccttctctatacataccttcttaaagcacttg

SEQ ID NO: 11335 - DNA, 630 bp, Diabrotica virgifera
caagctaatctgtacctctggatcatctctggatttcaagctaatctgtacctctagatgttgatcttactttttttaatttgtacgtaatttctacgcacatcacaaacatgcaacttgtttataaatttattaattaataaacagtcagtttaaacaattcttgaaaaaatattttttttacaaaaatctatttttttaatcatagtatcaactaatgatcacagaaaaagttaaagtacactttaataaataaattattttattagataattatttattgaagataatttatttattaaagtataccttaacttttctatgattaataatgatagtatgattaaaaacatggatttttgggaaaaaactatttttttcaaaatttttttaaacaaattagactgtttataaattataaatgtcaaactgcaaatagacaaattgcatatttgcaatgtacagaaaaattacatacaaattaaaaaatgaaagatcacaatatattcagtagatcccgagatatagaaaatgatagtagttttaagttgccttttttagtttttgaatagacggccggagtgtgatgtcacggccaactgcggctatatttagtgttattatcacttt

SEQ ID NO: 11336 - DNA, 626 bp, Diabrotica virgifera
gcccgggaattatttgtggggattttttatcctatgttcaattaaccaccttcactcataaatgaagatttaatacaaacattgacgaaagagcaaaagggagcagatccccttaactaaatcagattaagtcacttcaaattgatatctgattatttggtttggaataatttagccaccctacagtcccgatttagctcccaagaactaccttgtttctacatttgagaagtagtatctaactggttgcagcctcgaggaccgtaatgagtgtttatttaaaggcagacctctatgagaattggattcaaaagatgactgtattataatgtcttaatagtggtaactatgtaagaaaagtagttttcaacaaaatgtacagattttcacataaaaaattattaagacagttatacctgcttcctttatttcaaaactactttaaaaaatgcctactagaatgaaaataccataaaaaattctgaattgaataggatgatatatttttagtagtttattttcaaagctctatattttctgctgctttgaaaaagtttactaaatatctgttttttaggtttactgcaactcaaaattggtttggttgcaatttactcccaactata

SEQ ID NO: 11337 - DNA, 633 bp, Diabrotica virgifera
  SmartBlast Evalue=3E-11; Info="Thioredoxin M, putative n=1 Tax= Aedes aegypti RepID=Q16V30_AEDAE"
atttgcggacattttaataataacgaaaaaattacaataattttaattaccctctttaatttgtttacctgcaatacaacagaagttaccatggaataggcctttttattttaattatactttggataataacattagttgtgtttatagtgagtatcaaattacaaagcaatatttcctggataagtttaggttcagccactgctattaccattatactattaataattcccactgataagggaattcctttggaagagtctgaagtgtttgaaaaagattattgttttgtttacaagaatcttctactggcaatattgttattcagtggcttacttggttttggaagctttttcattctacattgcacagttccagtgcgtccaaaacctatacatagtgcttatttagaagaaaaatatgaataaaattgtgatatctcttttgactaagagaactttttcctctagtaatgttctgaaaagaataattaacataacaaacaatgatgagttccttgcaaaagttatgcattcaagtaacccagttatagttaattttcatgctgagtggtgtgaaccgtgccatattttgacaccaaagatgaaagaattgattgaacctaaaactaat

SEQ ID NO: 11338 - DNA, 632 bp, Diabrotica virgifera
  SmartBlast Evalue=9E-35; Info="Glucose dehydrogenase, putative n=1 Tax=Pediculus humanus corporis RepID=E0VK19_PEDHC"
gggcacgtcacactcaaatccaagaatccacttgatgctccactgatggtagcaaattatttatctgagccagaagatgtacaggtattagttgatggaatacgagtgattcagaaactaatgaatactaccgttatgaaacaaaaatatttaccagaacttatcaaggaagattatggagaatgcaacaaaaaatataaatatgactctgatgacttttggcaatgtgcaataaggtactacaccggtccagaaaaccatcaggcatgttcgcttaaaatgggaccactctcagatcccatggcggttgttgataatagacttatggttcatggtatcgatggtataagagttatggacgcttctgcgatgccaattttggtatctggtaatactcatgccacgatagttatgatggcagaaagaggcgtcgacttcattaaagacaggtggaagccacaacagattggtaatagatttggcaataactttcccataagtggtaataattatcctgtccaaaaccaaaatcctccagacaataacggcattaaccacgtagatattggagatagattttgggatactcatccatcatggaatccaaacagcggaggagtaaaaggacacag

SEQ ID NO: 11339 - DNA, 631 bp, Diabrotica virgifera
cagtacaacctgccatatccagacctgtcatatccggacctccccatgtccggacagttctgccatctggatctaccgaaatctaccgagaaaggcaatgttgttagacaacgcaccctctcatcccgacccaaaagaactaaaatatggcaaaataatgtattatagaatctataaaacgtgtctatcaacgaaagttactgacggcgttgattactggaatctatgaaggagaaaacgtttaagagacactataaaagaagtggtcttgatatccggattttttcatatccggatcagtctgtcgccacattgatccggatatggcaggttttactgtataataatttgtgtgtggcctaaatttggcaaatactttgataaaatttatattttacaaaattttggaatgtgtttaattcttagaacaattttaacaattgttttcaatgaagatttcaatcctctacaaatggtttctcatgtcttttgatgtagaataattggggaagcaggaattcaacagtttagagttttacattgagtttcctatggcccgttttccaattcaccaccctgtataagtacaaatgttagcagtaaacattaaaattaagactaaagaactttt

SEQ ID NO: 11340 - DNA, 631 bp, Diabrotica virgifera
  SmartBlast Evalue=2E-16; Info=Peritrophic matrix protein 14 n=2 Tax=Tribolium castaneum RepID=D1MAJ8_TRICA
ggccagtcgcaggctgaaactttgaagttgaactggaagggtttgggacatttcatcaacacctttttgccgttgatacatttatagaaatggttgcaactttcttcgtgaggtagaagtgcagaaggttcgtacgggtctttcttttcgggacactcgccactttctactgaaacttcttggtcgctcaagtctaaagtggtggtttcatcgggatcataaaaatcaaaactgcgtacaaccaacttattaacattgttatgtatgcgattattacaatctacgttataactattatcacagtttgagatctgagtattgaataacttccctgcgggacattccttttgtactttaacgccatatacacatctataatacagatcacaacgggattcgtgggctgtctgctggttctctattttacaagagttggtattgtgtttctcttcagaagaacgttctggagaagagtcaagctttaagtttttttgtaccaaatgttttccatcaactccttgtagcaccagcattagcatcgctatccagtagaattccatggcttgtctttcgatcaatcaaaaattatgaatctatcaaaacacacaatggtattgtctactataaaacc

SEQ ID NO: 11341 - DNA, 633 bp, Diabrotica virgifera
  SmartBlast Evalue=2E-44; Info=Dual specificity protein phosphatase 10 (Fragment) n=1 Tax=Harpegnathos saltator RepID= E2BRF2_9HYME
ggggcgggcttctttcacttttttgtaggcttccaccatcgacatctgtttgtatttcattatgtaagctatggctatagttgcgctgcgggagattccagcttggcagtgaaccaacactctagaaccgcttttcctagctgcttcaatgaactcaaatgcttcttcaaaatactgtttcaggttttgatgttcggaatctgtagcgggtatctgtttgtacgtgatgccgtactcttcgtggtaccccggtaactgtgaggtgacgttgagaacgcaggtggtacccaatcctcggaggcaagacggatcggtcgcatctttcagattacccagatacaaaaagggtaaaactttcgaagcggggaaagagtcgacatctgcaagagtggccggtgaggaaggtgagctcctattcgacaaagccgacatcagagtgtcctcgcacagttctttgtattttctgtggaattccctgtgacctctatttttgtgtggatactggaactatccttaaaactaaacaagaactaggccttttgagcctcatattgtctgttcaatgtttgtaaaacactcaaaaacgaacacaactgtttccgagacctacaccataccaaaattgaaatgtac

SEQ ID NO: 11342 - DNA, 631 bp, Diabrotica virgifera
  misc_feature (115)..(115): n is a, c, g, or t
  SmartBlast Evalue=2E-67; Info=Sodium/solute symporter n=1 Tax= Culex quinquefasciatus RepID=B0W5X1_CULQU
tgaatcggtcttcaacgaaaaatggaaggacctcgtcatatttgtcgatgtatccagatgaaaggggatcgcagctggcgtagactgcgtaaaccaccattcccactacccaggntaaaactgaataatacggtgattacgggaatgttccacatcatggtccttgttacttgtttttgtgagtccatactgcaataccgttgtacaaaattttgttgacacccaaaaattgacagcgacataaaaaagttgaccaatgattgctgacgtagtagttactcttgcagtcaaatccatattgaagttgaaaaagttcagtcttccgtcctctttgttaacttcaatgacttttaaaggtccgccagcttcaaagcagccttggaatatgatcgccatactaactactatcattgtaacgccctgcattacatctgcccaaatggctgctttgagacctcccaatatattgaaaataatgctgactagtgaaataccagtgatcgaaagccaatacggaattccaataacagtgttaagagcaacacaaggagtgaaaactgtcactccctgattgaggagcgctcttacgatataagttcccgaagccagctgtttaaccaatcgagatttg

SEQ ID NO: 11343 - DNA, 626 bp, Diabrotica virgifera
agagaaataattaattaattatccgtaaaaataggttcagactcgtttgtcttttgcgaatatactgaacggaaacttaaggtgtctgatacgatacgtgcccgacagtgtgaattgttctatttaaaatcattaaatcgtatttttcggaaactaaacgctacgtactggaatcgctacgtgcatgataatatgcaccaaccttaaatgttaagtgctggaacgctacgtgcatgataatatacaccgacctttaggtcgaatcgattcgaaattgaccatctgtcttttattttacattaaaatttacgattagaaatattaatacccataacaatcaatattcttaccagttgatttactgtgtgaagttcccattcgtaattaataggtgcaacttaatattaatgcatattactgtatatgagtacatgtcatattctttaaaatgttttagtctatcgtatcataacataagcaaccaatccatctaagtttcttacggtttttcaaatacatatatcatgggctaattgctaattgttattaaactaggatactttaagcacaaaaactcagtcattggggtgtttctttttattcaaagtctgattatttttgaggct

SEQ ID NO: 11344 - DNA, 632 bp, Diabrotica virgifera
tccttatagtttagttaattttgttttcgattttattttacgatgtagattcatatcgctaattcttaagtttgggtaaattagttccagaaatctcttaaaagattaaaatacattcatttttacaattctggggaacatttgtctataataatccttctctttagaaagtaggtatttggaaattaacagtaagtcgactcaagcggttattgtcagcttctgagaaggacagtgatgaacgattttgtaattacgttttcccaaggtgaaattgtgtcgtacagatagacatttttgtgttccccgccatcagggatttctggtcaagagtcttttgtatttttagtagtattcagtatagtatagtaatcatcatatagttagtatagtaatcaataaatagttctatcgaaaattgtcgtcgtgtattattttaatttgctaaagtaatatttaatagcaactatatctcacggtaaactaatcacgggtcaagacacatagttttcactcttttttgtgatttttgcgaggcgtccgacgttttcggttgcttttcgaggattttcaacattttaatgctatttcttgacatggaaacatcgacaaaactacatacaatatattat

SEQ ID NO: 11345 - DNA, 633 bp, Diabrotica virgifera
  SmartBlast Evalue=1E-11; Info=Putative cuticle protein n=1 Tax= Bombyx mori RepID=C0H6E7_BOMMO
ctcgacccagtcaacataagcatcatgaactcttacagtgtggtatttgcgtttgcattggccgctgttgttgtagccgaaccaccttctggctacaactacaaccggcccagcgggggtggcggcatctccttcgggggaagcagcctctccttggggggtggactgtccggcggtggtggatacacggctgtatcgtctggtggtcaaactagcgaaggagcttccgtagacccacagcttctcgaacaagtccgtcaaattctgctcaaagaagaacagagctcttccagcggcggtggccatggtggtggtggtggatacccaggaccatcttcccaatacggtgctccatctcctcaatacggagtacccagctaccaataccgcgtcgttggaatcgatctagagggaatcaaacaagccatccaagttgcccagtacaaccaaatctcacagggaccaagctttggaggataccccagcggacctagttcgataccatccgggtcttacggagccccttactaaggctctagaactgatttcagtgtgaataccatcttttaccatctcagacgggtcatgatgcattcaataccatcaagtttcaaccataccatcaaaagttga

SEQ ID NO: 11346 - DNA, 631 bp, Diabrotica virgifera
  SmartBlast Evalue=5E-51; Info=Mitochondrial ribosomal protein S7 n=1 Tax=Aedes aegypti RepID=Q17CL6_AEDAE
gggaatataaccttagaaaatgtttaatttaacgaggaataaactatttagaactaatttaaaagtattaagcaatgctctccaacagaatggcatgtcccaatatcctagttattatattaaacctgtctatattaaggaatcacaggaggatttaataaaaagcggtgaaatccagaaaatagcgcatttaccaacaagggctgcccttaatgaccaaacttgttccgtgtcacacgatccactggtaaacttaatggtaaactattgtatgagacaaggaaataaagtattggcaagaagcttaattcaacaatgttttgaaaatataaaacgactgcaactagaaaagtaccacaaatgtcaatcggaagaagaaagaagccttattaacttggatccgaaagatatatttcacaaagctgtagaaaatggtaaacccttgcttcagcttatgggcataaaaaggggaggtgttaggtatcaggttcccgttcccatcacagacaaaagggcgcagttcctatcgatgaattggctgataaatgcaggaaaggaaaaagacagtggtgtaaggtttcacttacagttagcaagagaattaatagatgcttcgaataatacaggtaag

SEQ ID NO: 11347 - DNA, 628 bp, Diabrotica virgifera
  SmartBlast Evalue=2E-40; Info=DEAD box ATP-dependent RNA helicase n=1 Tax=Aedes aegypti RepID=Q16HL1_AEDAE
ctttgtacgcttccacttcttcgtgagtcattttggcaatctcaggcacttcgacgtaaaagttttttctaaaagaaatataaactatgttattgtgatcaattctggccaattcctttttctgtttgtttgctatattcgcagcagtatctttgagatcttcttgctcttcttccgaagaatactccagtccatcttgattctgctccattaattccccctttttgacattaccttttgatttggcaactccagttactataactaaggctcctttcttctgggtagcttctccaggttttttattaacatcaaatttgtttattttgcgaacctcagcctgaacctctttcatatattcatccaggggatccacttcatcttctgctttaacttcctccttagcaggcaccaccataggtgtggaactaactgatggtggatcagaagcatcattcgactgggaatcaccagaagatttagttcttctttaacttccatcttatcgtttttgtcttcgtcctcagaatcatcttccagtgaccactttttgataatggtttctgtatcaggctcggatttaactttactggcttctctctttaaattctcctgttcctttttcttt

SEQ ID NO: 11348 - DNA, 632 bp, Diabrotica virgifera
  SmartBlast Evalue=1E-20; Info=Spindle E n=1 Tax=Tribolium castaneum RepID=D6WP54_TRICA
ggtttaattccatgtaaagcacactcaattgcaaggggctcaaacgaacattctggtctatttggtaaaagataaatctcttttataggtacccgttgcatgtttccatagtcaataaaacgtacctcagcatatgtgggcgaaactgaaaaaactttgcacctataaaacatattatcctcgacgaatcgagctgcgtaggttgatcctacttctacggtttgacctctagaaacaacggagtgaagaatagccttgtttagtatttcttctattgcggtaagataaggttcactttccaaattattagcccaaaaatgacccgcatcctcatactccgtaatttttagagtaatccattcgacgtctaatccaggtatgggattatgtgctcctaaactaaaacagtttctatccgcaaaagttgagggcatgggtatatcctcatgggcaagtttctgaagtgcactttttcttgtaaatcccttttcttcagcatatttccaagcttctttttaatggtaataactgtagctgaaattggtgctgcagttgtctttttctgatagcttcataaacttcgcgtggaatctttccaagaatggtgtcggccaccatctgtctaccattga

SEQ ID NO: 11349 - DNA, 622 bp, Diabrotica virgifera
  SmartBlast Evalue=6E-15; Info="Alcohol dehydrogenase, putative n=1 Tax=Pediculus humanus corporis RepID=E0VWT0_PEDHC"
gacgtttacaaatttcttgcaggagtgtttcacagacaagaatggtcagaacttgaattcatcggtccagcccacagatagaagaatgactgccgaacgatgtggatatctcaacgccgttgcgcttgtcaacaaaacaagagagtcgtggatggccatctttcctgttacattattcacttactgtgctgtatattgtcccatgttattttactggggtgtgaagattatcggacctgatatcattttcaaaatgagagagggtagaaaagaggctatgcacacagactgaatgaaggtggagggtgtagaagtagatagcctaatctttccgtagaattaattattctattttatgcacataattcacttcttcggttgatggtactatttcttctaagggtttttcatttaggtggttaaaggtagattagattttaacttttctttgctaataatgtatgtaggtacttatacattcatttcatcattcatcatcaattcattcaatttggagtttataccatgatttatagatcacaaagagcaatcgaaagtaaaagaaaaattcctgtccaatcctttttctttatacataaacttgcgtggatagaaataggcc

SEQ ID NO: 11350 - DNA, 632 bp, Diabrotica virgifera
tggaaaacaatcgaatttgtctaagtcagttaataatttgcattggttgtaatcaggtgctggaggaactggtagatcgtgcaacttccaaggtcttttggtggtttgatctttaggctctttagtacttgtatcactgtagatagctggagcattacgatggtaaaaatcttgattgtcaaaagtgaatctaaagcaattaactagatatattatcggtagtattataaaaacagatattaggatgaaaatcaccagtattatagggagactaggacggaatactggtttcgcctcacttgtttctttaaaacgtacataaccaccaatgtattcttcattctgggacggattggactttgtgcaagactcttttatatcgggaaatttgttacccctatcatcgtaaaacgcttcaaaagaaaccaaattggtcgtcgaaatttgtcttccttttcgaattccaaacgatttgataaaatctcgtattttcattttgtgttattgaacttttgtacatctatcgataaaaatgttaaatgtttaactgaacaaaactcctgtttatattcacttcatatttacacaatcgaactgataaacatttcctatttctccgataaacagggatt

SEQ ID NO: 11351 - DNA, 627 bp, Diabrotica virgifera
  SmartBlast Evalue=3E-48; Info=Integrator complex subunit 8 n=1 Tax=Camponotus floridanus RepID=E2AIH7_9HYME
tgtgtcatatgcttgataaatctcggacggtgggaatttctgacaaatctggacaaaaggtgggccaccttcgaaataccttcagcgatagctctgtcatgccaagaactcactaaacataaagggaccaagaagttatccaaaaatctgtgggatttagtgttaccacttttcgcgtcaacctcacaatcgaaaagaagcgccgcgagcttcaacgattcgtcaagccttaagaccaacctggtgtctatatttttcaaattgaaggaatcttggtgcctcaccactgtgatatctatgttaacgaaaatgtttaacatactgaaagatgaaaacggcctagagctacaggccgagtattgcaatttgtggccagctaccgtcagcaacgcaaattcatacaatatcgtagctgtcaacgagttacttcttgaggtaatcactcacggtttgaatcaatatccgaataacgttgcgtggttacgattgatgggtgatataaactttgcaaacggtcattaccaaatatcgttaagctactacctcaagtctctcctcgtcttccacgattacttcaacactcccatcggctatgacgaccacgtattccgcagaatgataaagtgt

SEQ ID NO: 11352 - DNA, 632 bp, Diabrotica virgifera
gagaagattttcacttccttagtaattttttattatggtatacagccaatgagaggaattttaaattatgttaaggtttcgtagctaagatttttcatctaattttaccgatactggtaaaacaaatcgtccatctgaacactgttgtcatacgaacccttcacaaaaacgaaactaattgaatttccagcttggaatttggaatcatatcgctgatgggaggagtcaggtaatctcaggcaaaaacaggtcttttgcgcacttcatcataattcgtgtctgtagtgcttattttaaaatgtgcccgtaccttcgaatctttattatagtagcaaataacatatctagctttttaaatatcttttgccacagtttttgtagcaaattgttgtttcatttatgttgtttcatagttttagtgggttattcttgctctttctatattttaataaaacaattatataaacaacctgtttgaaattacggtagtttcaaataatcggttatattttgttgattcatgcttttgtaaatgtattattcaatgtttgtcatattggcaagaaaaattcgtgatttaatgactacgtcaaaaaaattttatacataattttaagttatatattttcctc

SEQ ID NO: 11353 - DNA, 620 bp, Diabrotica virgifera
agcacgatgacgatctgtaatcagatcgaaaacttagttctgcccttgtgatgtagtcctttttaggtaattttaacaaatataccccctataagggattttacttattttttgtgatacatatatggtatacagccagctacaggaaaacctttttcctagtggatttcagacgccatatgatttaaaaaaatttctggctaggatgtggcttaaatcatgaacatgaatcatatggaagtgataaatgttgaagttactatgtggctatcttcgtcttcccaaatacacattttcttgagataaggctttttccagagactgcaataatacttaaagaaatacaaacaaaacctcacgttttcggttttaaacctggaaaatgcagctcacgaataaaaaatcagtcattttttgttcattaagcaataagtgttattttgtttctaatctgttaataaaacaatatatcagtgaagaggtgcagaaaatataatttattaaatgtgattaatttgttaataatacgaataatttgtaaacttttgatagtttacaaagacgaaaaagaacggaccaatttgtggattgacattcaaaatattgttctgaagctattt

SEQ ID NO: 11354 - DNA, 617 bp, Diabrotica virgifera
aagaagaagacgcagactcggaaggaaaattagggaaaagtggacgtgcttcggcgcgtagtagaagaaaatcatccgcagtatcggcattgtctgatttttcggaaagtatgtatgatgatcctgaagtaattgaagaagagtcaggaaatactaatattggcacaacttttaaacagtacattctgtctaccaaaagtctttgttttgtaacttttacaaccattctgctcgttattgctcagggtattaatgttttggttgacctatgggtaacttactggacttctcaagagcaaatacgtcattcaaacggtacagttatttcattgcaatcagcggatattaatgaagtagaattatatctaaatcagacaactatcgatgcaacccatcggttggtttacaatactgagaataatggctcacaaattttaaagcagatcagttttgatgacatatttgacaaaattgatcttcatggacaaatacaaaagatcattaaaacagactacgctatatatatttacagtgctctaatggcactagctattattttaacgataatcagatcttttcttttctacaaatgttgcatgttgtcatctgctaatttg

SEQ ID NO: 11355 - DNA, 633 bp, Diabrotica virgifera
  SmartBlast Evalue=4E-80; Info=Glutamate synthase n=1 Tax=Bombyx mori RepID=Q0KIX8_BOMMO
cgcaatcagcagatccggaatcagataggtttggttccactactggatacaatgttttcaatttgttacccaaatcttcgtttttcataacaccctctctagctttcatcaaattaacatttcctcgtaatgtatttatttctccattgtgtgccaacattctcaggggatgtgctctttcccaactgggaaaagtattggtggaaaatctagtatgcacaagggccaagtaagtatcatacatggggtctactaaatcggggaaataggtccataactggtcggaagtcaactgacctttatagaccacagttctccggctcaaagaacaaatgtagaaacgttttcctggagctgggatttggtgactggcgcgtttgcgcagtataaaataagtcctatcttgttcggactcacctactggattcttgagggttataaacacctgcctcataaacggttcagaatttctcgcaaccgcgcctatggaggaattgttggttggtacggtacgccaagccagcacggacacatccagttcctctgccaactctgcgaatttctgttcggattcttggtgatgcagtttgtccaaaaaaaaagatgccagtggcgtattggccaagctggcag

SEQ ID NO: 11356 - DNA, 629 bp, Diabrotica virgifera
  SmartBlast Evalue=1E-12; Info=Zinc finger SWIM domain- containing protein KIAA0913 (Fragment) n=2 Tax=Formicidae RepID= E2BDW9_9HYME
catgttgtattcatctccagactgcggagaatctgagttggagctagatgtcgaatcgtctttagagtctcttctcgatgacacccgttgcggttggggcgtccacgagacagacgtgttcggaatcggtactgtttgtgttggtttataattttctttgctagtatcgttgtcgctggagagagaatgttgcgccgtgggcggtgttcttccatcctgactactattactcgaagaatcacttccgctgccttcttgggagtcggaatcgttaaaacggttttcctgaaggaggttcatatcatcgtccacctcgcaaaatccttcactactgacgcttgatcgattgccatctctttcgttaagttgggaatgtggggtgaattcgataggattcatgctcatgacgttcacgtaatcatatcttgcagtaactctaatgagggaatgatggtgatggtggtgatgatggtggtggtgggaatgtgtcgtatggatatgaggatgttcacaatttagaacagctttactggaatttacctgagtaacttgactttctcccctactgctgtcagctccatgtctgaaacaggtaaagggacagtgatacattggatttatatcctggg

SEQ ID NO: 11357 - DNA, 632 bp, Diabrotica virgifera
  SmartBlast Evalue=2E-24; Info=Endonuclease-reverse transcriptase n=1 Tax=Bombyx mori RepID=D5LB38_BOMMO
aataacactttacactggacgataacactgatgatggtcagttttgaccaaaaacgttttgggcattgtaattttccactgccttgtggataaattttaaggaattttttaataaattcatatacctagacagggtgtccagaaactctcccgacaaacgaagaccggagattcttcagataattttaagacaatttaacccaattcacctagtacgaaaatgcttcctggcggagttagagctctttgaagatggcgccttgaaattagtttttcttaaatatctccttcttctttacatgccatctccgctacgaaggttggcaatcatcattgctattctcacttttgacactacagcccgaaagagttcagttgagctgcatccaaaccattctcggagatttctcagccaggacatttttctcctccctatgctgcgccttccttgaatctttccctgcataattaattttaggagttcatatctgtcaccacatgttatatgacccaagtattgaaattttcttattttgatggaatccagtatctccctgctgttctgtaatcgccgtagtacttcctcattggttattctgtctgtccaggagatcctcagcattcttggatcc

SEQ ID NO: 11358 - DNA, 628 bp, Diabrotica virgifera
tccaagagatggtgttagcttttttgaaacaccctgtagaagatacaagttggttcattaatatgtttagtagtaagtaaattttttatgtgccttttagtgtctcttgatgaaatcaagattttaagtaaaactaaaatatatttactaatatgataattttaatgtcgatatttttcattaaatttcttgtcttgggtagagaccgatgtttattattaagcaatcatttcacttcttggaacacttttggaaaatagattttattagttttgaacaatcataaattagttacaggcgaaaatatgtgctcaaaaagcaaaaattttcgaattgttttttcagattttgttaaaataaaaaatttgtgactggacaaaacacttaaaaacgagactttcttctgcttgcttattagtagtcacttctctctactcttctctgtcatgcagtttaacagtgtttgtaagtcttctggtgtgttcgttagacatatattatcatctaggtatcagttaacagtcataccttgttatctttcatatatactaccgtcctcaattaaaacgcggtatctgcaaaaaaaattgaaaatcgagtgtttgctatatgtggtttccttgtgacc

SEQ ID NO: 11359 - DNA, 630 bp, Diabrotica virgifera
  SmartBlast Evalue=2E-16; Info=Protein FAM38B (Fragment) n=1 Tax= Harpegnathos saltator RepID=E2C9W9_9HYME
gccagtgttaattggtttactcaaaactaaaagatatgcaggcagtatgggatctgttgttgctgctagtagtatttttccacagagttcttttgaagtctatgggcatatggagttcaacggcaccggtaacagcagcccttatacccgatggcgattataaagttgatgacgaacagttaatacctttagatgataatatggaagaagacgatgaaataaaatccgatgaaagtcaaccatccacttctacaccaaagtccaagtctgtcacaagacgttcagcggaacaagaagatgttgtagttataaaaagtgagagattaagaaaaatacataatgccgtcatggcaattcgtatggggttgggtaaatacgccgaggagttaaaactatttatacaacaactactagatcctacttcaagagtcacagctgatgtatactctttcatgttcctgtgtgattttataaacttctttgtaattttatttggatttaacgcatttggaacgcagcaagatggaagtgtttctgactatttaaaagacaacaaagttccacctctattctttttatgctaatattccagtttatgttgataatcatagacagaggaatatacctaag

SEQ ID NO: 11360 - DNA, 629 bp, Diabrotica virgifera
  SmartBlast Evalue=4E-44; Info=Protein phosphatase 1G n=1 Tax= Camponotus floridanus RepID=E1ZZA4_9HYME
gacgcaagttaacaagtcgattacccgccggtttgtagataattaattgcattttacgagttaagttaaggttacaaacaataaaatacaatgggttcttacttgtcggagccagtaactaataaagtatctacagatgagagtaacgataaattaagttgtggcgctagttctatgcaaggctggcgtgtaactcaagaggatgctcacaatcacatcttggactttgacactaacacatctttatttgcggtgtacgatggacatgggggtcacgaggtggcccaatattgttctcaaaagttacctcaatttataaaagacacacaagcttataaagatggtgatatcatgcaagctttgattcaaggatttttggaatttgatgcaactattcctacaaaagatgtggtagcagttctgaaggaaatagccggtgaaaaggagggtgaagaagaaagtgacgaagaagaaaacgtagataatttgtatgaagaagctacgatgcccattgaacaggttatagaaaaatacaccaacctagtaaatccagttctgaaaagtcttaaaaaagatggcgataaatttccaaaatctccgaacttaaagagcaaacaagaagaagcggg

SEQ ID NO: 11361 - DNA, 629 bp, Diabrotica virgifera
  SmartBlast Evalue=7E-43; Info="Transcription initiation factor TFIID subunit, putative n=1 Tax=Pediculus humanus corporis RepID=E0VC09_PEDHC"
agtgagagtaaattttaccagtacattattttcaaaaatattgaaattatggctgagaaagaaaaagccaaagctgttcagtccaagcacattccaaaagacggtcaagtaatcatggctataatgaaagaaatggggataacagattatgaacccaaaacaattgtgcagctcacagaatttgtgtacaggtatgcaacatccatactcgaagaggctagaatgtattccaataattcaaaacagaaatttttgggagtggatgatgtccgtctagcgctgcaactaacctgtgaatctactttcacgacacctcctccacgagaagtattgatggaactagcccatgttaagaattattcacatttacctcaagtcaaacgccactgtggcctgagactaccccctgacagatactgcctgtcatcttgcaattacaccctcaagagctccaagaaaggcaaaggaaactttagtatggctggtagtccggccataaaaatgactccaaaagcgaatataaactttttaaagagaaccacacccacaatctcgaaacagactgttacgataccaaaaccaattacaaaagttattacaacacaaccccaattgcaaaagacattact

SEQ ID NO: 11362 - DNA, 630 bp, Diabrotica virgifera
ataaatcaatcattttttatcaaatcagctttcagcaccatatatgataacccgtttgaatgttgatctgtaaattttctgttttctgtatttagtgggctacttatctttgaaaaagttggtgtgtcccagtaattgtcagaagaagaagtttctttaataattaataagcgtttagtaattgtacacaacaaattataaccaataattggctttttcgatcattaattttctccgtggataaatgaggaggaaatagtaggttgacggaaaaaggaagaaatgccatcactaaaagatataaataatataaaaatataatccgtaaatttacttattcttttcattatcaacgctgattgttttgatgaaattgattatgtacaaagtacagtaaatccgtctggtgtaacgtgttataaaatgattatttatgaataaaagggtaaatttaggaaaattttatttagaaaatattaatttaaatttggatctatgtaaatgctgccctcattttgttataaaaaacaaatataatacaaaaaggcaagaatatgaagcgaggttataatccttagccaccttagtcacggatgttgaaatttcgtagagaataattgtcaaaacctt

SEQ ID NO: 11363 - DNA, 626 bp, Diabrotica virgifera
aacgctctgtattcatcgtttgttccgtatctagttctatgttcttttctgctatgcctatgccataattcgttttcctgatcacctttataaatatgttaagaggattttacttccaaaatagtctaaatattcttcatccctttttgtcatcatccacgtttctgacgcctaagtgaggatgggcttgataagagttcggtattatcaattagtttttttattaagtagtaggaacccagaacctcccagattgggaggcggttctgcccactttctcacactggggaacattatcacagccccctcatgaagagcataaaaaataatgagaatggcagtaataaagcagaaacgaagaagcagacaaattagcaaccctcctctacttatggtccggaactttattgttgactaatgagccaaagccaaataaagcttttttcctgtgacaatgtattgctgtaatgttgcagttttttcctagtttaaaaacgacttgtaacctggatactgaaacgtcaaataaaataaaatcgcttaatacctgataaagtccttttcatgagcatttttcagtgcgtcacaaatgatagaaaaaaaaaggtaatccgtgataatacaca

SEQ ID NO: 11364 - DNA, 626 bp, Diabrotica virgifera
gattgaaaaagatttattatacaatgaaaatacaaacattcttcaaaaaagcgtttttccaaatttggatataagttaaatttgctgtttgatccaaagacatcccaactaagagtttgaaccaaaatttggtctaaaaacaatgtgtattaagctacaccaactagctaatatatacgacttgtaagctaatctacatttgataactaaaattcaaacataacaaaattctagcttaaaactcctatcctatatacgtgaaatataaacaaatattaaataacattaaagaataatacgtaatacttatcacagataaataaaatatgcaatcaacctaaacgtgagtattcttaaagatcttacgctactaacaagtacggggtgtttttaaagcaattgtctttttaaccgtcagagcatcaagctttttttgcgacgttgtttaccaagcggggacccaaaaggaccccagtttgtttattgacttttttgtcctaatatattttttgtactttaggccctaaatacacgtgcaaaattcaatattaaaagtttttatgttgttctgaagctatttccttgtggcatttttgtaatcaactattttaaatgggaaataagcc

SEQ ID NO: 11365 - DNA, 630 bp, Diabrotica virgifera
  SmartBlast Evalue=4E-40; Info=Talin-1 n=1 Tax=Camponotus floridanus RepID=E2AHI2_9HYME
cagtgggattctcgagcaagtatttcattgccttcatttgcctgatagaattgtcacactcgttttggcctggtgcagccgacgtgcagacattgactagatgattgatactgtctgtaacagctcgagctgcagctgcgagttggtttttaccattagggagatttggatctgccgaaagagctttggcagttgtcaatagagtactggaggaagttgagaccgtttttaatgaatgcaccatttctcctcttactgacacatctgaagtttgtcctgccatctccacagtaacattaagtaagtcttggtaagcagaggcaaagtctctagatgtagacgctaactgtatcggactataaacagattctacaacgctggagctagcttcattcaggtttgcggcagctgtgttcaattcatgctgcaattctccataacttttctttgttggtggcaaattggtcgttgttaacattgacgaccactctataatgttagttattgatgtatcaacatccttctggccaggcaaacaactaacggcagaattcaaagcttgagacatatctttagcagctttttgtagaccaggagtaactccaacggtcgataaactcttttgagctt

SEQ ID NO: 11366 - DNA, 630 bp, Diabrotica virgifera
gctccctcacttattttagtagtatattatattctccggtgtggtctgaccacagtctgattcggtataattaacacagccttttttggtgtcactccaaaataggtctgaaggacagtcctgagggccataccattggttattttcacaaaaataaaaactcttgcaattcttggggtcaggttttaagtcattatcgttacatgttgacgttgaagttgtttcgccgggagttgttgaaatgacttttgttgaagttggttcggaagtaccgaaagttgttgaaatgacttgtgttgaagttgattcggaattacccgaagttgttgaaatgacttgtgaacagtcggactcttcttcacatccttgtatgtggttatcccaaaggagtggagaaacacactccatgtgctgtttggtgccatttatacattgaaaaaatgagctgcaatcgtttggatcaggataataagcatattcgttgtcacaagatacattggggttttccgtttgagccaatataacagctggtagtaaagccccctgcatcaaaattgcgagaacccatccaataggaccatttaatcgcatcatactcctagtttcaacacctaaataaatatctgtttg

SEQ ID NO: 11367 - DNA, 630 bp, Diabrotica virgifera
  SmartBlast Evalue=1E-40; Info="WD-repeat protein YNL035C, putative n=1 Tax=Pediculus humanus corporis RepID=E0VQQ9_PEDHC"
tgtgatagtgaactatttgttgagtgtaattgtttaagtgaagtacaagtaaccactgactatatatttaatattgatgctacaaaagacaacaatcccaacattgctgtaaccacagcaaataaaagttgtttggtatacagtctagacaataaccaactagcgaatatttgggaaagtaaaaaagataaaagcaaattaattggttgcaaatacagtagtagagagaaagaagtgttgtatattggtaatagtgacggtgttataaaaacaatagatttaaggacaccagataaagttgcagttcaatttaaagatacaacagcagaagttaataaggagaaaacctttaattgttttgatgtatcatccaatgacaggcttctagctgctggcacagatgtacttgggggagatgcttttgtattattttgggatataagaattaacaagctgttaggaggatattggcaatcacacactgatgacattactcaggttcgttttcatccagacgatatgaataaattaatatctggatcaaccgatggtctcataaatttatatgatttgtcccaggagtcagaagatgatgccttaatagacacccttaataccgaatcttctgta

SEQ ID NO: 11368 - DNA, 630 bp, Diabrotica virgifera
  SmartBlast Evalue=1E-23; Info=Juvenile hormone-inducible protein n=1 Tax=Culex quinquefasciatus RepID=B0X5N9_CULQU
attgtgttgggatgcagtgtcatttgctatgaaacacaaaaatcctaaattatttgaggagctaacttctccgatagaaaggagtattgataaaagtatcagttatgttaccacactttttaaaaacgtttatgaggcaatagaaggtgatacacatcttacggaatacgcgaaggaaattgagactaagttacctcaacatctttgggaaggaatcagaagaaaagatgtaaaatgtgttgtttctcatggtgattgttggtgtaataatttcatgtttaaatacaaggaacctcaaaaccgagtcacaccaagcaagatctgtataatcgactggcagttggccagtcttaattcccctctttatgattttgcatacttcttcctagtacacgcagacaaagaaaccttaaacaaatacgaggagtatttagacttgtattataacaccctatccaaacaattggagaactttgactgtgatcctcaagaagtatttccgtatgcaacatttgaagaacacgcgaatttttatgggttttatcaggttcttattgccattatagtactaaaaataatgctatgtgatagtgaagatgcaccagagttttctgatgctctggaggatat

SEQ ID NO: 11369 - DNA, 626 bp, Diabrotica virgifera
  SmartBlast Evalue=2E-25; Info=Sodium-dependent phosphate transporter n=1 Tax=Aedes aegypti RepID=Q17LW3_AEDAE
ggtgaacctgaataaacaaaagtaccaagcctactcctttctggaaccggtatccacttgcccaatactgcgtgcatagatggaaacaaaaatccttgagatagaccttgtagaaatcggcaaaccataactcctttggagtcaaaataaatagctgcagaaggtattagcaaaccggcagtggccgtcaccgtggtacttccgactaagaaccatttggcgccatatttatcagatacgtatcctgcgactatttgagggatgcagtagccccataggaatgatgccataattaagcttttgtcattccagtcgaaaaggtcggtatatctttattactactggcttctggattgttcatggctactatggcgacagtcaatgctgttctgatgatgaagcaaaaatgtattaaaacacaaagaataagagcttgttgatgtctctttccaatcgttggtcccttttttataactacatccttatttaacaataatcctaaagcctcctttggccttttcttcggctatattctgtgcttgatacgtcattcttaatggtattttttggcggtacttattttaaggctagaggtatctgtccataccaggaccaaacctgcagat

SEQ ID NO: 11370 - DNA, 630 bp, Diabrotica virgifera
  SmartBlast Evalue=7E-20; Info=Apolipophorins n=1 Tax= Harpegnathos saltator RepID=E2C0B0_9HYME
gtcatcagattgttgagatgtgtccatacaaaagatccaacttgattaacttcttcgttcattagcgcatgtttaatagttttaaccatcaaataatttggacatctcataatttgtaaataagatgcaatcctaacttcagaattaacttcctgccttctaaatatatgttcaaagtaacttcttgtctcttcacaccgagttctcctaaaagtttctacggctgcaactcgtatagccacgtcgatctcaggattttctataactttgaaaagttcttggttgaagtcttccgacatcacgccaatgttagacaatgcctttagcgtgaccataatctcgtcatgtgtttccctgttaaagggagagtttttgatcaattcattaaaaatgattttgaaaatattcgttaatggaatatatagaataatcactgctgcattctttggtattactgcaatatgtatgtgccagggtagatacacttaaagctttatttgcagaaaaaagtttcagattcctctaaaagactttgagctatttccatcatttcgctggtaggatttgggataacgcctattgatgttataaattcgttaatcgttgtttctgatgctaatttttcagtta

SEQ ID NO: 11371 - DNA, 627 bp, Diabrotica virgifera
cagtaagaacaacttgcataacaacgtcattttccatagctgggacctgagcttctacccagccaacaaaaggttcgctgacaataatggaaagaggatcagttgacaatgaggaatatttcgatcagtgcgtagaaattaatagaaacatttgggacaatgaagatgaacttgataggatgaggatttgcctgttgtcgttatagatttactcgattctccgagtccaagtgatgatacaatggagatgatgaatatcacaaataggagagataatgagaagcgaatatttacctcttacgggacgaacattttgagcttcatatggtcaactgatcaagatgtaccttttgacaataacttcaactcaaccagcgatgcctcacagaatgtcgccaataatacataactagctctatactttaaagttagcgcaatctctattgacaatccatctgtaaattcctcgtttgatgaattgctgccagtaaatcctatggttaaagacgagaccaacgctctgttcgaaaccaacaaggatttcagacgtaaatgtgcctccaatgatttccatagccttcatggtaactggagcgtttggaaatggaaggaaggtgtacgcagaaa

SEQ ID NO: 11372 - DNA, 630 bp, Diabrotica virgifera
ttttaaattattttacaataagcgttgtagtttataggacatgtaaatgttgtttttagcatttaatttatttaggattaatatacctacatatttttaataacataattaacacataaccatacccttactagtcaacgtcatttttgttaccaaatcgtgtgactactatttgtgaatattgtatatttaatgttttccatgtcaagaatttttttaacgttatcatttattattttaacataaagtgaaaaatgttatttagaggtattttttgaacacgtttataatgtcaaattaacagatgataagttcatggacaataattcatcgaagaaatattttgtaagtgtacaattcgtcgaaaagtatatcgttttcgtagtaggtctatcgtaactgggtactgagtaaatgctacgtctcctctgtcctgttctttctatggtgttgaatcatggactttgaacgaagatatgtgcagaaaattggaagctgattggaaaattttggtgtgtctataaatgataatacttaaaattccgtggattgaccgggtcacaaatgaggaggtcctcggaagaatgaagaagaaccgagagatactgatcaccattaaatctacgaaag

SEQ ID NO: 11373 - DNA, 621 bp, Diabrotica virgifera
  SmartBlast Evalue=5E-27; Info=Ligatin n=1 Tax=Harpegnathos saltator RepID=E2C5I3_9HYME
tttcttccactccagattttactttatacgcatttttcattgcagcacacactttttcaattacttcttcccatgctacagagtgttcggtcttgcatatccgtgccagtgcctccttaggttttatgagcttttcattttccgcatcttgtaaattattctctttgacatattttgaaatatactttcttacatctatgagttgtacagtatctccttttctgtgaccatcaaatataggtacaacagagtcagtgataacaaaggattcaataacattggtcgaaggcacattttcagtctcatttgtgtcctttttgggcctttcttcgggcgtcaaataaaatgcttgatacttcggatgatctttgtttacggcagtgatggtttcaacaccagtttttacttcttttatagtaaccagaccttcctcagacattttctttagaaatggttttaacttcttgaatgaagtctttttaatatccaaatttttagtaggggggcaaattggaagcatgtctaatttaaaaaagtttgaagtaagtacaggcaattttagtgtctttgaatatttgatagcgcctaaaaagcagaaaattaaaagatcatccatatttt

SEQ ID NO: 11374 - DNA, 621 bp, Diabrotica virgifera
ttagctctttaagatggtataaagtgtttttcatcaagaggttgtctgaattggtccaaatattgggcaacatatggacattcgagagaaagagactgagaaaagtatatggcccggtacaagaggaagacggcacatggagaatcagagaaacgacgaggttaatgaattgaatgaagggtatgatattgtaagattggtgaaaagccaaagattgtcatgattgggacatttctgtagataagaaaatctttgctgctgtgacgataatataattttatcgtctagaatacggcaatgtattaatcaaaacgtgtttttataccgtctttaaagtcggaacgaaaagcctagttgatgcttattcctggagcgttgatcaaaaataataaacaacaacgaggtataagaggtgagttatcccgaccattttccgccgtcgttttgttgcgctgaacacgctgcactaaacaatttcaaattgtgcagacagcgtttattctgatcacctatgcgtcattcaacatttcaatgggtatctagacctgagatataataaaatatcgaagtaaaaatatcgccggtctgcctatttatttcctctttatttattgtatcctc

SEQ ID NO: 11375 - DNA, 630 bp, Diabrotica virgifera
  SmartBlast Evalue=3E-38; Info=Nuclear distribution protein nudE- like 1-A n=2 Tax=Formicidae RepID=E2BMC6_9HYME
ggtcccctttctttttctttaactgaaagttcttgttttaaatctctagtttcatctgctaatctctgtaacttttctttaaggccttctttttcatcaacttctgattctaatatagcatttctttccactgcagaattaaaggcagtttctatacctgctatgctttcttctataattctcctggccctttctaggtcatcatttttctgttctaaatctctaatatactgggacatctgtagtttctctgtctttatattctgtacttcattttgtaagctacctatttctttattactttgttctagtttgtttcttaatgattcaatttcattctgagctttgttatttgctaatgtcagttctctaatctttttttcatcttggtctatagttgcttcatattctcggtccaattgttgagattccactataaattcatcagattctttctgtattctctgggcatcttgtagatattctgcagccaaatgcttccagtacaaaatttcctcatctttattggaaaatatcggttcgtcactcgtactcatctttattatttggtattattctttcagaattaaaaagttcattccaaatgcagaatacctaaaactaacagtc

SEQ ID NO: 11376 - DNA, 631 bp, Diabrotica virgifera
  SmartBlast Evalue=4E-16; Info=Centaurin-delta-1 n=1 Tax= Camponotus floridanus RepID=E2AZR0_9HYME
ggttcacacaagataactctgctccaaagccagctcccccagaaaacaaaaagagttggtttaaacaagtcaaaggggtattagaaaaggctccggatgtagttagaggcctcaaaaataaagacaactcagtggacagagctgccatagctgtgaatatggtcattcagaagaagggaatgttgtacaaagttcaaaatggaccagtggaggatttatttggagaatacagtggaaggtggtgtattctggaaaattcgaattttctttgctattccgacaatacttgccaacatttgaaggagaatattaccggacaaaatattttaagcatacagttactgcaagacaaaaagtacaattataaatacgataatgatgaactgtactgttttgaactaaatacgactggaaaaactagaggtgggcacatctatggtacaaggaacagtgccgaaagaaggatatgggttcaattcatttgcgagtctttgacgcacagattttcatcaaaaataactacaaatatcaatagaatgggatgggcctatgttagagaaggtgtgagtggtaaatgggcaggtgcctggatagtcttagctaagagagaatttagctatgcgatagatgg

SEQ ID NO: 11377 - DNA, 627 bp, Diabrotica virgifera
gccattgtgttgggggtgccatgtcctaacctaactaatctctctggtctctgatagataatagatacagtacacagttgatgcaagtggtttgattaaaagtattaattttccttgaaatatgtgtttatagtgtaataaataaatatgtttaaatgaaaatggccaaaagtccctcagatatacttaaagaacgagacacctacctacagcatttaggtgaagacataaataaatatgataaaacaatccagacattaacaaaggaacaagaaacaatagactctctaattactaatttacaaacacttaaaacctacccagagcaggaagctcttattcctttaggtaaaaatatctatatgaaaggcagaatagtgcatactggagaatattttgtgaaaagaattgcccatcctgattccatagtaatgttacaaactgccgatgacactataaaacgacttgaggaagaaaagaaaaccaaagaggaagatatcgataaagctgagtacgcaaagttccaaatagaggagagaattaaaatacttaacggtgaagactcatttcaagccgataagtcagatatgcctaaacaaattaagtctgaaaaaggagttgctgtta

SEQ ID NO: 11378 - DNA, 629 bp, Diabrotica virgifera
  SmartBlast Evalue=3E-18; Info=Protein takeout n=1 Tax= Camponotus floridanus RepID=E2AYI9_9HYME
ggtcgcagcgttactgtgtagttgtagaaatgccagtattctttcccttttttctgaatagactctgcatagatggtgtgattgatatgtgtatttataagagtaatattacatttgccttcaccataaattggtaaaagcatcactttccccttcagtgaataatccccatccaatctcaagtatggggtaatggacgttgaatataaaatcttattgggtacatcaacatggcccataagacttttggattctgttaaaccatataatttgatatttttgaacttttgtgttacgtgtacaggtccggtcccttctcctattgttaattcaggtatatctaggggatctagactaccaagaccaagctcaggagtggctgtttttaataggcgaacggtacgttctgtattatttttaaaacattcatctaaatctggacttttaaggctgcatcttccaaatccgcttggtaatttagctgcatctgttacgacacctaaaaatgtcacgaacaaaagactagctttgacacaaaaacccataattttaatgacaatctgcaaataatgacgttcggcgatagccagcaagtgccaaggttaaattttctttgccggccggtgact

SEQ ID NO: 11379 - DNA, 623 bp, Diabrotica virgifera
tctctttctcatactgagaataccaatatttttagaaactgctaaggatttcagagtaattcaaatgcttttttcgtcgtttcatttattgtcataaacgtttgatggttcgtactatgaatttaagaataccatcgtatcgttaatttgcagaaaatatattgtatttcgaaattttgaaaataataccccttttttaattacagaatacctaccttctgttttaggaagacaatattcaagagtattttttaatatatttattgttttgacttaattgatttacaaaggagatcccaccatgtaattaagtcatacagtaggtactaacatgaagatcaaaaattctaaatatagtgatagtgtcccaaattgtaaaccagctttttctcaaaattaatgttccataccagagttttatttaccaaatattacaggaaaaataggtacatagtacaaaaaatgtaaatgtatgtttcagtattacgatttagcaaacatagtaaacgtagtgtttcaaaattaattttttcatatgcattatgaagttacgtaacaaaatagttgaagcctttggtgggaactattacataatgttcgtgaaaacaatatgtaaatataac

SEQ ID NO: 11380 - DNA, 624 bp, Diabrotica virgifera
  misc_feature (548)..(553): n is a, c, g, or t
ctcagacgcaaggtctcattctcaaagtcgttcgtcgcctacaacaaaccagaacttacaccattcccaacagagttcatctcatggacatagagaacagcagcatattgtacgggaaccgctgtatcaaaggcatggttacttacacaggcacgcagaacaagttcaggtcattcctgaaaatgcggtagctcctcctgttaaatataggcaaaattcttcggaacatagaaggcacgatagggaagcgcataaacagagaatgacccaaagacacacatattatcaaagcgatgaaagagacgtgtacgatttacggcaccagcaaccacagaggatagatccatcaaatgcttatgtagagtatggaagaccaggaagtagatcaggcatcaccgactcagttccatttacccattacgtcaactataaggaactccagaaccacattaggtatgataaggacttaaatgtaaaaaggtacatggaaaaaacagactcgtggatatgaaagaaaatttttaattttattttttatttaagttatnnnnnncatataaaataataaatttttgtattatgattaattggtactatatttgaaaatatataagtttttattcc

SEQ ID NO: 11381 - DNA, 630 bp, Diabrotica virgifera
tccattgtgttggggtatcatgttgcctagatattttaataaattgtgcataagaaattattcattcaaaaaaactattttagtacaacaaaaacaaaaatcccataatattgtggcagatataattgaagaaaataagataacaaattcacaagattggaagaaaattcgtgatacacttcttggaatcgagaataatacaggacattattcaaaaaataatatagatgcggtaatattagaatattgtataaagaaaaacaaacacgagctgggaactaattatataaactttttaaaagaagaaaatataaaaccaaatcttgggtttattgggaaatattttaagtttctttataatattaataaagatatatgtcataaggaggggaaaaagtgccccaaagaccaagaagaaattgtcttaaaaatgtataatgatttgagaattgaatacccacttttagattctgttagtttagaaaatattattcctgctttatccctaacaagtgaatggaaaaaatgtgtcgatctattaaaagaaatccattttagtgcaacaccaaccggtgaggtatacagttctgtggcagctgcagcgtttttaaataaacaagaaaatttgtc

SEQ ID NO: 11382 - DNA, 628 bp, Diabrotica virgifera
attttaaataagatttttgcttaattgggccctaaagcaatagaatgctaaaaggaaattatcatgctttgcggatttcttctcttgggcaaaagagggttaacatttcaaagcataagtcgttttttaacattctaacatgccattcactttataacatttcaaacatttttttgagttgatttcagcaaaactgcagtaatcgctttattttacaaacttactgataacaaaatgtggatataaataaatactttattttcttttagacaaacatagtctgtatataattagtcaattaggtaaataaaacaaacaaataaacaaactaacaacaaaaatagtagaatttagaattgaagaaattcttcaactgaacaaaaaaatgtttgcaatcaaaaagcttgtcatgatcttacacaattttatatgcattggtaacctattaaagagtctttgtcctgttataatagggacgatgaattttttgctgatgaaacgcgatgaaactatgcgattctatatattagctattttgattgtcatttagcccagtgaatttgaaatatgtcaaatcgccgttgataatgtctgccacagtttgaaacgtcacgccagcaagcaatta

SEQ ID NO: 11383 - DNA, 625 bp, Diabrotica virgifera
  SmartBlast Evalue=2E-55; Info=Xanthine dehydrogenase n=1 Tax= Ceratitis capitata RepID=Q9BIF9_CERCA
gaccgatgttgtgatggatatagggcagagtataaacccagctattgatataggacagattgaaggagcgtttatgcagggctatggcttgttcgttctcgaagaaatggtgtattcatcgaatggagacattttcaccagaggtccgggtacctataaaataccgagtttcgggaatattcctgtagaatttaatgtttcattgctgaaaggcgttggaaatccacgagcagtatattcttccaaggctgttggagaacctcccctcttcttggcgagttcggtgatgttcgccattaaagatgcaataaaagcagcaagagaagaaaacaatgtaccttctgagtattttagattagatcccccagtgacctcagccaaaattaggatggcatgtttagatgaaattacgtccaagattcaagaaccagaacctgaaagttatacaccgtggaatatagtagcttgacgtaaaaaaagaaattatgttgtttattttaacataatatattacgtttatgacatctgcagaaattggtgtaaaaaaaaataaattaggataaattaaataatttaatttaaaaaagtaataattatttttaaatttgtaagtacaaatgtaaat

SEQ ID NO: 11384 - DNA, 621 bp, Diabrotica virgifera
  SmartBlast Evalue=8E-97; Info="Gpi-anchor transamidase, putative n=1 Tax=Pediculus humanus corporis RepID=E0VQW5_PEDHC"
agctaaaatatttggtgaataaaagcgttcatacattgaagctgcttgacaggtatcaatcatgaaaaatatttcatgatatctttgtttctgccacatttgttctaaagcatcagccatttcttgactggtaatttcttctgaatcttgaaatttaagaaaaccatcgcctccatgcccagttaagtataccaaaacgttgcttccttcatctgtcaatagctgttttgatcttggtgtgccaggatgaaggcgtccggttaaaagccttacaaaattctctactgtaacctcatatcctctatagtctacttctacatcatctccataaacatttatatgctgatcagcattattgaaaacagtggcaggtcttggatttctgggattacaggccatatcgtccgcaatcattagaataatttgactatctggtattcctagacgtttaacgcttctgtatatggacaatacattggctacatgtctatagttaaaccaaaatctactagtgtctactagaacggcccagttatttgtgtggtttttatttaaaaaacactctgcttcaataaatccaataattattaagaaaagagtaaatttgaaaactcccatttt

SEQ ID NO: 11385 - DNA, 630 bp, Diabrotica virgifera
ggcgtcgaaatattgcaatggaagccgatagaaaggcgaaaaaaaggaaggtcgagaatgagatggttggatgacgtggaagacgtcctgaaaaccatgaatataagacaatggaagagagatctgaatggaaggatatagccagacagacaaagacacatccagagttatgatgacaaaagaagaagaaaaagaatttcacattgtctttaataatgccttctgcatctatagacaaaactacaggaagagaaaaatccctatcacggcttataagcccggcaaacaatgtattgttataatattcactcacacgtgaaagtctacgctgaatctgtatctttctttaaatgctttgtttataataataaagatatgactcaatcattgtccttaactgttgaagtatatagacttttattaaatactctataaccgattttccaacatgctctaagaatcacagcatcaaacaacgctcttcagatccggccattcctgaacacaattgtttttgattacatatgttattcttctagctttggttacatatatgtatatagaacaaatgaagaaccttattttcaagaattatgtatttataattttcgagtattccaatagcagtaa

SEQ ID NO: 11386 - DNA, 625 bp, Diabrotica virgifera
  SmartBlast Evalue=1E-40; Info="Brain protein, putative n=1 Tax= Pediculus humanus corporis RepID=E0VNI9_PEDHC"
tgattagatgatagaggaaaaatactacagataaccttgtaaaattactttattttgtagttaattttatttttctaatcgtgaataatgtctgccatttatcataaaacaatgtctgcattagataaagtagtgccaccaaaattacaaccgttatggatgcatcctgcaggaccaaaaactgtatttttctgggcaccagtatttaaatggggtttagtcatagctggcatagctgacttgcagagacctgctgacacaattagtccagctcaatgtggagctcttcttgctacaggagctatatggtctaggtattctttggtgattatacccaaaaactattccttgtttagtgttaatatatttgtagcaatgactcaatgctatcaaatgtatagagctgtgagctatcagcaaaaacataaatcttcctaactgtgattagagatctgtagaacaaattgtaaatattcttttattgtttgagaatatatattatagaatgtaaaaaatataaaatttattatatttaatattatttaaaacaaattttattatatttaatattgttggaaattatctcattgtatccactttagtttaataaagtataaataaagtg

SEQ ID NO: 11387 - DNA, 630 bp, Diabrotica virgifera
tccattgtgttgggacgaaatctgtcagcgattctgacgaggagcaagaggtgaagaagaagaagagggataagaagcacaaaaagaagaagaagcatactaagaaacacaagaagcaaaagttaaagaagctaaagaatcttctggtgtgttcggaatatttaaacgaaaaggacagtcagtggaaagaaaaactgacgatgtccaagaaaaatttgatctatcagaatctaccgttaaagacatggcagatagtaataccttcttgaaagatgaagtagaaaaatatcatgatgtacatactattaaagaaactactgctgttaaggtacccgttcaaactactgatatcaaaaaaccagaacacattccgagaaaatctaaaagtaaaaaggaacccgttggtccaatatttggagtggacaaaataaaggaatccacagaaacggatcaaataactattcagaaaccaagacccattttgtcaacagatgttgttaaaaatatggttgaaacagacacatttttaaaagacgaaatttatcattatcacgacgttaaactacttaaaacacatgacacaacgacagtgtcaccaaccaaaacaaaagatgaaacagtgaaatcccc

SEQ ID NO: 11388 - DNA, 629 bp, Diabrotica virgifera
  SmartBlast Evalue=1E-55; Info="Guanine nucleotide exchange factor, putative n=1 Tax=Pediculus humanus corporis RepID= E0W126_PEDHC"
attattaggtcaggatcattgatgtgttaccaatctagaaacgaagataccaaatgtacattcggaagacgctttagcaaaattaatttacacatatttttatttaatgatctgtttgttgtttgcaaaaagaaaagcgaattcctatatacagtaattaattactgcccaaggaattttatagaattgaggagcgtcgacatgtttccaggtttaaggaaaaagatgttatggacaaaaatttattgtacttatccgtgttggagaatcaccataaaaaagttgtggaatttctgctttctgctctaacggaaactgacaaagaacgatggattgaagcttttagtcccccaaaatcagaaaatccagatgaaacgctctatgaatgttgggattgtccccaagtgatggctatgcacaactacaatggctgtcagcctgacgaattatccttatccagaggagatgtaattaatgtcttgagaaaaatgactgatggttggtatcatggtgaaaggttgcgcgacggacacactggttggtttcctgcaaactacacagtagaaataataaatcctcacgtcagagccagaaacctgaagcaacgatacagattgctcacattttcg

SEQ ID NO: 11389 - DNA, 630 bp, Diabrotica virgifera
  SmartBlast Evalue=4E-15; Info=Protein tyrosine kinase (Fragment) n=1 Tax=Codonosiga gracilis RepID=B3XVY4_9EUKA
gaacgtcaactgcatcacatgcaacagaccaaatgcaactaaagaacgtccttgattattacattgttttaaatcactcccaactgatttaagatatcataagatctcaactttaatacaaagagctgccaaataggccggtaaatcgccaagatctgtaaaaaccgttaatgtccattttacaatcttctactaaatactgtagaacctctaatgcgcctccctgagcagccgcatgaataggtgtacctttattctggttggaaatgcttaggtttgccccttgctgtttaagataccttatagctttaagtgcattattaccagctgctaaatgactgggtgtaagtccatcattatcgcgtaaatttatatttaaagaaaagttacatttatttttaagaaaatttagaacgttaactgcgtcacctgcagcagccaaatgcactaaagtctgtccttgattattacattggtttaaatcacctccaactgatttaatatatcttaaagtctcaactataatagacagagctgccaagtgagcctgtatttcctgattttctgtaaaaacgttaatgtccattttacaattttctacaccgagagaaaaaaattcttgacataaag

SEQ ID NO: 11390 - DNA, 628 bp, Diabrotica virgifera
aggttcggatggtgcaatttcggtattttgtacctctgtctcaggaactatatctttaagcaaatttgtttcagcagattggggttctaacgatatttcagactctacactagttattttagattcagaaattgaagattcggctaccggtattttttcaggaatatttttttgttcgggttcagaaagttgaggatctgggagtgatgtcaacgattcactagctgctttaatttcagaaagagaagtttctgatattgttggctgagattcggattcttctgtaattgactttataatttcagattcaacagctgccttagtgggggattctatcaccggtacttctgtagaaacacctgattcagattcaggctttgtggctaccttagtttcggaagacttttctgataaaatatcggatttttgagaaatttcagtgggaagtttaggatcactatctgtaggagtttcagactttacaacctctttaggagcctctacaggggcggcctgtagtaaatcgatttgagtagttaaaatgtcagctttagtggattcggcaaaaacggttaccgaggatggagggttagaggatggcaagggtggtgggagctcctcattacgc

SEQ ID NO: 11391 - DNA, 630 bp, Diabrotica virgifera
tttagtgattcagtctgttctgcgtccttaatttgttttgagctgtctagcttgaagacattagtaaatatgtccacattttttgttaaagaagaaagagggtttgtgcttgttggttgagtctggaataaattgttagattccatcggtttggggctagtggggtggttaaatatgttatttaaaacaactactgtgtcagttaacgtgctgttgctattatctcctactgtttcactgttttctatatcttctgttactgtaatatcgaaatcagcagcagaaccgacggtaagatcattggtgttgaaatcaacttcggatccagatactggagtaacatctccactttcggaaccttttggtttattattattggcataatattcggtaaattctatcgattgaggaacatctttttcaaacgaatccaacagcattccaacattttctaaatcttgatctaatcccggcactgccggaaacattttgttgaagttatccacagtaataccgtcggcgctgataatactagaagacatctcactgctgctgcatttcgatgtgctttcggagtaaccgggtgaagatggtccactgctggacataagactgggcggtccactccaa

SEQ ID NO: 11392 - DNA, 632 bp, Diabrotica virgifera
  SmartBlast Evalue=2E-69; Info=Angiotensin-converting enzyme n=1 Tax=Camponotus floridanus RepID=E2B155_9HYME
aataaaaaatattcgtttaatatatcatttataatacatattaatttcacttttcctgaaatttggctaattattctgtggattccttgggtttatcctttgagactaactcctgcctagtccttacgcatactcttttgctcttttcccaaccaacttgaactccatttttggcattctcttgcttcaaccatgtagtaagatggtttaaaatattccaaaagtccactagcgtccatggttctttgacctgtcaaagcttccattgcatccggccatggtttagaagcacccatttcaagcatcttcttaagagcgttaccagcatcagtattctgataaatatcacattcatgtaaaggttttttaggattatttggctcatattctcctgctttttcgcacacagctttatggaactggaactgaacgacgaagcttatgaagtacctgagatatggaacgtctgcaactacgtggtactttgcagctggatcaaaatcttcttcagaccgatcaactggaggttcaagtccttggtacttttcccttagttcccaccacttacagttgtagttttcaggagtagtttttcctgcaaagatatcccatcgccacaagtcgatcaagta

SEQ ID NO: 11393 - DNA, 629 bp, Diabrotica virgifera
  SmartBlast Evalue=4E-25; Info=Histone-lysine N- methyltransferase SETMAR (Fragment) n=12 Tax=Harpegnathos saltator RepID=E2C6C7_9HYME
ctcacacctccgtcgtcgccatggccaaactggtcgaattgggctacgaactggtatcccatccactgtatttccagatttggccctgtacgacttgttttttgtttccaaacttgaaaaagtgactcgccgggcagaaatttaagtcgaatgaggagttcatcgccgccatggaagcctactttgcagacctggagaaaacgtatttttcatacgggttaaagaagttgcagcatcactgtgtcaagtatatcgatctaaaatgagactacgttcagaaataaatcacaacttttccaaaactttcgtttttctcttgaaggctaagtacttatcggaccatcctagtatatgttcgaatttgacaaaataaatttcaacgacaaacatttcaaatacgctcactgcaccttatggagggacaaggaaacataactattcctttgtcttctgattaaacatacaatgtgaattcgacaaggtttttgtacattccacactgtattctaatgaatatgtactataatattgaacctttccacttggccctcacttcccctaatagtttaataagttacagaacataaacattcttctaatttcagacatacgcctctatggttcatcat

SEQ ID NO: 11394 - DNA, 629 bp, Diabrotica virgifera
  SmartBlast Evalue=2E-25; Info=Centrosome-associated zinc finger protein CP190 n=1 Tax=Harpegnathos saltator RepID=E2BN36_9HYME
gtgaccttttaatatgactcagaagggtcatgccagattgaagtttcttcatacaaaagtggcaatcgtaagtaactcttcctggcttgccataatggcccgttatcctaacatgagaagttagaaactggtgattcaggaaagctaagtgacagccttggcattgggtttcattggggccatgcgattctttatgtttggttaatcttgcagcagatatagctatatatggacacttattgcacttagggaaattatatgtagctggtggccttagtgcatgcttcgtatacaaatggtacaacatcaaggtatggttattgcattgtcgtccacaatatttacacaggcgtgtgtcgaaaacttcatcgtgtacatcagtcatgtgtttacgataaaggtagtacaatacaaactctggaacttcaccgtgttcagaaacacatttcacacatacccagggtccatcatcgtcgtcgtctggtactactttggaagatctcttttttaatataggaatctcttttttagtactgggaagtggtttggccggcctggctactggttcaagctggggtggagactgcttaattggttctataacagcattcacaatcttcttatctccg

SEQ ID NO: 11395 - DNA, 627 bp, Diabrotica virgifera
  SmartBlast Evalue=8E-42; Info=Vam6/Vps39-like protein n=2 Tax= Formicidae RepID=E2BU92_9HYME
aattcaacgtcaggttgagcagttttggagacagagtcagaccaggaagcgaaagaggacagctgtctggatccaagataagtttatgagagatacgtagacatttttggctcccaggtacattgttttcaaaaactttcttgcaatatttctcagccttttctatatctcctaaagctctaacgtaaatcgtaacagcttgctcgtgtttaccaagccttccgagaataacggctctctcctctaacaatatatcagtcgggaaactgcttagtatgttctcagcagtgtactgcttactgttttctaaaaattgcaacaacttttttcttgtaggctctgaacctgccgggccttcagcaactaacttttctcgatactggtgaatcaacgcgttgtgaaataacggattagtatctttccaaatatgaaccacgtgttctaagtaaggaataactactgacttatgagacttaagtagaaaatcgagaatacgaggccgaggaaatgattccacttctgctacatcctcagtaaaatctttaaaccttcttcaggcgactcatttaatacccaatcggcaatatccagaattaaacccatattctcagatcccaaatgttgtag

SEQ ID NO: 11396 - DNA, 630 bp, Diabrotica virgifera
  SmartBlast Evalue=1E-49; Info=Putative accessory gland protein (Fragment) n=5 Tax=Gryllus RepID=Q0ZC26_9ORTH
ggttattttagttgaaaactgtggttgatgctagaaattcaattttttactgaaatttgtagtatttttataaccaaaatatgtctgtcgaagagaaattgaaacaaggcccaagagaaggaattacttaccccttacaagtagtgtattgcggtaattgttcaatgccaattgagtactgtgagtactatccagaatatgaaaaatgcaagcactggctagaagttaatttaccatcagaattcgaaaaagtaaaaattggcgatgataatcctgtcgaggaagaaaagaaaagacagaaacgtggcggcaaaggtatgatcaaaacaaaaaaaaaaggaggatggtcccaaacaagtgtgtgtttcgagagctccaagaggcaaaaagaagtctgttactgtagttacaggattgagtagttttgatattgatttgaaagttgcagccaaattctttggtacaaaatttgcatgtggttcatcagtcacaggtgacgatgaaattgttattcaaggagatgttaaagatgacttgtttgatgttattccagaaaagtggcctgaaattgatgaggatctcattgaagatctgggtgaccaaaagagataaactatttatattttttta

SEQ ID NO: 11397 - DNA, 629 bp, Diabrotica virgifera
  SmartBlast Evalue=5E-71; Info=Ubiquitin carboxyl-terminal hydrolase 47 n=1 Tax=Camponotus floridanus RepID=E2AUU9_9HYME
gcccctgaatagtatcccctatgagggccaccaccatatgtttttcttatatcttcttcggtaatccctgtaacactttggtcgttaaagcagtaccaaagatttttatcgaaatctttgatataggcataataatgaccacctgaagcgcttccagagtgtatcataatactgaataattcgtacatgtacggacctttggcttcgtcatcgtgattgtttcctgaacttacatcgataccttcatcgctatctgcacaattgtcgtcctggccgttagctgtagaggatacatctgttccttgacagctttcatcgtctgctgaccccgaatcggttgtactacaatcatcacacttgacaacattttctctgtcttcgactgtttcattctccgatcggggcgtaacgataaacgaatttaaatttagtttttctgaaaacacaaccttgtcattgagtttaattcgatgcatagtagtataatcaaaatcgaatcttttaaatgcaacgtgagcaaatatggaaacttcgtaaacttcaaccctttatgagcgtcacatttcttattgcatttttcgcaatgatactgattatttccgtctaacgtctctggttgaacgaacgct

SEQ ID NO: 11398 - DNA, 629 bp, Diabrotica virgifera
ggcgtcttggcttatcttgagaatgaacgtagcataataatattcaaatataataaggtgcaaaacgattaggctgatatagataaacctattaaagctaatagttctattttatcacccggatatgtaaggcatttaaactgttacgtgggagaattgttctttcatactatttagcacgacttgtccgctttatgaggaattaagacattttatttaagtcttagtaaatatgttcttaactaacggaattcttgctaacattgctgattaagaacaactcttctaccaggattagatgggagtcatatcgaaaaaattgagcaagttcaatagaatatcgtgtacagagaattgtccaaagaacatactaatttggggttgtgtgattgacatccttatatctgaagtacacatgttgaacacgtttaagctcagttttgccgataagtcgttatttcaaaggtcaaaataaacttgtcttactctttttattattggcagtcaattcaaacgtacctacatgctcattattaaaaagattaagacaacgatgatttgccctttggaaatggaaaagtagttgaatatccgctttctgcatatttaagaaaaatacctgtcaatcg

SEQ ID NO: 11399 - DNA, 629 bp, Diabrotica virgifera
attttcatctacaaaaatcgaagaaaaagtagacatgagactaataggggaagcagattaatctccaaaataccgtaaaaaacgggaaaaaggagaattttaagttcagtatttataatatcctaaaatttcgaataacggtaggcccatgcccacttcttgatattgttctaaagctattaactatttttaatggaatttaaacaaaatctcagtataaaatacgtttattttgacgtttagatttccacttcagaactcaatcttagatacatttttattgctgtttgtgttttgtatattaaatttataaacgcagttttcaaccactcttgtaatacccccatatcgtatattgtgttgaaaaatatgccaatatttccaaattattctcttcttttatctacagatatttcatctacttgagctgtcgttcatgtctttttgagttattgatatcacattttctatctatagtctatagaattatccgaattaaaacacatatgtgataacaaaacaccagaatacaccacaaaggttaaagatggaagaatataggataacacttattatgactgaaaagttcttggtgagagaaatataaaaaaaataaaaccgtttaccaa

SEQ ID NO: 11400 - DNA, 628 bp, Diabrotica virgifera
  SmartBlast Evalue=3E-47; Info=Mediator of RNA polymerase II transcription subunit 1 n=1 Tax=Camponotus floridanus RepID= E2A6Z0_9HYME
accatattgatttcttcgcatagattgtttctcccacaattttatcacagatcttagagttatgggaattgaaaaagatttgtttaatattttcgaacataattctgtagcgatatctggtgtggccactggcggtggagtacctggattatgaatgcgacaaattatattggaaatatccgatagatctatttctgcagttgccatggtttcttctacaggatgttctagagatatagatatgtgggttgatgaaagtgcacttatttcaaacatagtcatgttttcaaaatcttgtttactattgggcctaacgcagctactaataatggtgttaaacaaagcttgttctctaagtatcgttagaatactaccaacgttagcagggtgagtaaaaggtatgctagttactaaaacaccctccatattcttattttcagtcataaagtacaatgattttgatctggaagtgtaacaaagagtcctttattattactggaattcattttatatcgctgcaatgagtaacgataagattaagtagagggtatactggagcagtgtctatttcggtccatggatatatttgctggatttgtctaactaaagccagacacataggaagtgg

SEQ ID NO: 11401 - DNA, 623 bp, Diabrotica virgifera
gccaacagtaataaattaattttaaaataaatatttgtttagttgacatgttgactgtattttcattttattaaatgacttaaaaccataggatgggaagtacaggtataaaggggcttaaaaatgaaaaaaatgaaacagtctacttagtgcaagttcttctacacaactaacgtgttttacatattctacatattttcaatgatatataaatgtgttatttattgactaaacttaaaaactctgtgtgaatatgtactacaggttgtctgtgttcttatccacatcgtatttacactttttaatcattttatatgattaaaaatgaatttacgaatgctttagtttattgcaaacctgcacagcaggaattaagcttgtgattccacggactattgctagagcacttgtattggtgttgttgaaaaaactaagcaaacttacaaccacttagttttttgttaaagtcttattaaaattataaatatttttccataattaattacgtagtattttttgttggataaaaattatgaaaaaaagttcagtatatggaccttatatgccacagatacgtataagaattaaattagtacacacaataaatttattttaaagttaag

SEQ ID NO: 11402 - DNA, 628 bp, Diabrotica virgifera
cggaatggcaataagggtcgtaatcatcaaaaaaattaaataagaagttctgagtgtaatgaccgttgaggtaaaatttagttcaagatctacgattatgaaacggtttttagtgattgccgtggtgtttattttattttccataacggaaagtagtgttaaacacgaaaatggctgcttagataatatttgttacaaagataatacctatcctcataaggaaatagaaatcatgtggaaaagcagctctaataaattaaccaaaaccttcggggacattcaacatgtctcagataatgaaaacgacgagctggtatcaaaagccacttgcgaactttgtccgacaagtatacggtccaaggtgcagattttaagtatcattggcgataataatatgagactctatattgctcgtacttcaaagtaccatccagaaattagagtagaagtttgtggggatgaagcaaaatgtaatccaaaggacaagcgcgacaattatgaaactttttgtcaacaacagacgtccacgataagtcttttagcttataacaaaacatctaaacagtttcagactcatcaagttgattatccaagtggttgtgagtgtgttttaagtgtatctgatcca

SEQ ID NO: 11403 - DNA, 626 bp, Diabrotica virgifera
gaaaacaaaagcaatgaagggaatctaagatttttcaaatttgtaactttgtttattttggtttaataaatgacgcgtgttgcatattacgtatgattcgtgtttgcatgttcaaatatttaagtaactaatagcaatgtgaaaatggaatttactattttatccgggaacaaaccaaaattaagtttgaaattaaatttatttgacgtttccatttccacttcgaaaatcgttatcaaaatacaaaacattaataaattaaactaattaaataaatgcttaattaagtaatattttgtattttgattacgattaccgaagtggtaatctaaacgtcaaataaatttaattttaaacttaaattgtggctattcccaaataaaatagtaaattgcataagatgtcacaaggaaatagcttcagaacaatattagggaaaaataggttcatatgtagataaaataaaaataaataaatatatagatacacagagggaaataccatgcttaattaagtgtgaatgttattggcgaatggatttagtgtccgcagtcatataaacccaaacaaacaacaaacaaagtgtgaatgctgtttagggcggagggatacggtttggaacattt

SEQ ID NO: 11404 - DNA, 626 bp, Diabrotica virgifera
aattaattaaatctaatagtttttggaacgtagatgtataagctctccttatattttgccctggtataaccagggtaatgggtataaactttctcatagcaacagtaatttatattctgattggggtcattgacaactttttggggcagggagtccgcgataggggtcgccctcgacatgttatttccatttgtaaagaggtatttatttttgaatactcttctgtcccatttgttttctccgtgtccattgtggtcccacgagatttgcaggtacgtcagccgtcaaggctataatccccaagagatcgctagctctctgcaggctttgggataaaaacttccccacctagcttgtcatgtgcggagaactggagtgctcagactagcacagggtggtgaagatggtttatgatagaaaatatattatacaagtttttttttaattttgctcgcaccagaaatacaattttcggtttcataatttccccctacataagttttagtgctgaatccgaatcacacaatactattttttttttcaaattttttagatgccaaaaactattattttaaattgattttctttatcaaacataatatcattgttgctttagtaaattattg

SEQ ID NO: 11405 - DNA, 629 bp, Diabrotica virgifera
gcatgtagaatgtttttattgtggttatagagatctagtacatttttagatggaacattttgatcagtttctgttcgtgttaataaaaaaaaatgttcgtaattaaaaaatttaattacaaatcgcatcattatgaacaactaagacatgagcactggcaaagttgcaatcctaataaggtcttcttaatatcggcaagtgtgcaactgtttgcctcgatattggtctcgagtacattttgttcctggatgatgacttctagttttgtctcaatgtcgacgatgatagctgtatggttattgacaacggtcacagtttggttctgttgttgttcaatgactgtgacgtctgcttcgatcgagttaaccagacacgtgttctcagctacgttgttttgaagttctgttgattcttttctaattgacactagttttacctggagtgtgagaatttctttagagttttctgtcaattggcacagaatcttgtcaatgatgtccccgcattcacattttggtgcaagagctgctagacttggagactcttcggcatttatatagtagaagtaagtgatcaagacgtatgtcaagtaaaagtatttcattgctgacgctggtctttagttgttc

SEQ ID NO: 11406 - DNA, 629 bp, Diabrotica virgifera
tttaaactacttaaagactgttaaaacgaagattatattaagaacatgattagatgtttaaaaaaagttaattatgaatattcaattcaaattatcaattacatcttacagtatacgtgttgtctaaaattttaaatatgtataaatatcgtatactctaaatagcggaagtaaagatataacggaagatttttatacttaacagagtaatggattaaacatttactacagaaagacagcattacgtttatacatttaatctaaactaccacgtaaatttcatcttaataacaataattggcagattggctaattgatataatcacaaatacaatcattttacaaattgttcaaaatataaaatatttatgtgatatacttcgtagagacataatcacataatattgcaatcatgattcatgtattctaatatattatggtttgtattatattataaatttttatgatttatagtattttgaaaacgaggtacatcgaaactaaaccaaaatctgaataattttcataaaacattgattgtttatatcatacaatagctctgttttaaacaagttgatatttaattacggtgtttattcagatacaatctctacaccacataaataggc

SEQ ID NO: 11407 - DNA, 626 bp, Diabrotica virgifera
atgaaataagaattagaaaacctcgcaacctaacagcaacacaattagtagtaggttctcttttaggagtcgttagtggttattatatttggaaaccggtgtttactacagagagatacgaccacattcaaccattaagtaagcctacagaggaatggattgaagctaaataaaatgtcttggcatcgatcttttgcttcgaaacaatctgggaatccagtgtggcttggcgttgcttttgttgggtttttgggaagttttctagggttttataaattgacttatgccccttgggctaagaggaggaggtatgaggaagcaaaaggctacgcagatacactgtatgaaaaagaaaaggagacacaatcgaacaatgaatattttcagtgaaggaatggaatgtacgtaaaatttattagtgatattaaaacttgtatgtatctatactaaatttgaattcaaggtctagtggaggtaaacaaatcaagacacgttgaatactactgggagcactcaggaatcataatttacaatgtgtaaacgttggaaatcatgatttgggatttacaatgtatatacattgtaaattatgatttgggagtgctcctagtaacatttggcgtgtc

SEQ ID NO: 11408 - DNA, 627 bp, Diabrotica virgifera
  SmartBlast Evalue=8E-17; Info=CG5639 n=5 Tax=melanogaster subgroup RepID=Q9VB21_DROME
cgaactgcaaggaacgttcggtgctaagcttgttgtgcgcgcgcaagtttgacttcgcggtcctttttgtttaattttgtgatttgcgcctcttgaaggacggacatttgtgattaatttggataatagtttatgagagtacgatgattattcgctggaaactggtgtttggatttttacttgtattcgtacttcactggctagtagatgctaagaaagattcaaaatcagacttgacctcaaaatgcccaatgctaacagaatgtcctttaagagctgaaagctgtactgacgatgacgactgttctgttgatgctgtctgctgcaagagtccctgcggaaagtttgcaccaaacaattgtttacaggctgtcagacactcagaatggctgcgtccagaagagctaagtctttaggcgtagaaaccaaatcaatacgtatgcccagatgtaacaagattggagggtttgagcctattcaatgtgataatgaaatagtcagttcctgttggtgcgtagacgaagctggatttgaactggctggaaccagagctcctgctgcagctttggtgaattgcactgctcccaaaccatgtgccgatcacacttgtagaatgttctgtccaca

SEQ ID NO: 11409 - DNA, 626 bp, Diabrotica virgifera
acccgccttttcagaaaatctaatcttcgttctaatttggtgtgcttggtttgtaataaattgattatttctttaccttgagattccttctgcttatcaacagtgtccaattcatcttgttggtcatccatgctcatattcattacatcaacattttccaacaatgccttttcaaaagatgataagttgttagttaaatctgtcccagcaattggaaatatatcatcatttcagcatttatatcattggagctgttgttcagtctatcattaccttctattgactttatcacctgcattatgtcctctacatttgtttccaaatctggtggaactgacaaattctccagtaattgttccatatctatctttctatctttttgaatcatagaaatttctaatcctgtcttttgaaggcccattttattttcttggtcgcccatagatgatgggctactattcattatattatccgaggcactatttaacttcttatagtaactactaagcgttttttccgagtctaatgttaaagaacttattatttcgttactgtttaaatgaaccttacccacatattcatcaccaactttcaagtaagcctgtttatcttgcactatgaatttg

SEQ ID NO: 11410 - DNA, 615 bp, Diabrotica virgifera
tcaacaatctcttgcccatcatttgctttatcctcgccgtatattattatttggggaagagaatggttggtttttaagtcctttatgtacctaaaagtatctaggatttgatttgaattctatatccatcagtgagatatactgagaccaacaaacctcccgaactttttgcattctgaacgcagtctagtaaaaatattgaggtcagatgagatctggactgaatataggtgtagtgtgctctccttttttgagaaataagctgtcttagttactttgaaaaccacctaggataagtgctggtttggtattttttcacaggtacaaatgaagcaataccaaaagccaaaatttcatagaagtaatcaacagctaaatctacatcaagacgagacaaacactgctcccagttaattccagctaaaaaattatttaaacccacataattggcgttattgaaatcatagtacagatcctggcagaagaggctgtcgtctacctgttttttgtgaatatttcttaaactacactcataactagcatgatgtaaactgctgtttagaatagagtcatttcctaacagtacctcaacacttttatcgtttgtgaacataa

SEQ ID NO: 11411 - DNA, 617 bp, Diabrotica virgifera
acttgccgaactatattaattagcaacaatattatcatagtgtaggtgtaggtataatcattaaaatagattatttcacagctcacagcataattgaccgcaaccagcaacactgaactgtcatttgcgtttgaatgtatgagtagtgtacgaatgtctaaaatatttaactaaaattattattttttggaatattgaacttaaatcattgtttcagtaaaatttatattattgaataataataaatgtttttgattatttaatcaatataattctaaaattctcaatgtaatcgcgattacgtttttttttattaaaataccatgtggacgcttatacaagatcggacagttccgtgttggtgtcgtattttagctgtgctacacaaatttcaattctagagttgatgttatgaaatatcattattttcgttaacattaacaaatattttggcatatggttaatatatttcggcaattgatgaaatccgattgacaccaccaactagaataaagaaccatagatattatgtttatagtaaacaaaaacaaagaaaaatatctgacaagtaatgacatcaacgcggccacgatgaaaagtcacattccaatgttttg

SEQ ID NO: 11412 - DNA, 624 bp, Diabrotica virgifera
  SmartBlast Evalue=4E-60; Info=Lactase-phlorizin hydrolase n=1 Tax=Culex quinquefasciatus RepID=B0WNN4_CULQU
aagctatttatattaatatgtttaattgcactatgttttagtgccaatgcaaaagatcccataaacaacagaagattcccaaagacatttaaagttggtgttgctaatgccgcgcctcaaattgaaggagcatggaacaccgacggtaaaggagaaacgatatgggaccattttgctcacactcagccagaaaaattcatagaccgatctacacccgatgttgcttgtaattcttattatcagtacaaagaggacattgctatggtaaaagaaatgggtttggatcattaccgactttccattgcttggtcaagaattcttcctactggttatttagatagtcttaatcagttaggtgtccagtactacaagaacgtttttcaagagctgaaaaagaacaatatagaacctctagtaaccttataccattgggatctacctcaaccacttcaagaccaaatgaacggatggataaatgagaccatcattgacatcttcgccgattattgtaaactgtgcttcgagctctttggagatgatgttaaatggtggattaccattaatgaacccaaacaagtgtgtcaagctggttacggttccggagcatttgcacctggtattgtc

SEQ ID NO: 11413 - DNA, 625 bp, Diabrotica virgifera
  SmartBlast Evalue=3E-14; Info=Endonuclease-reverse transcriptase n=1 Tax=Bombyx mori RepID=D7F170_BOMMO
gctgcttattttgatagatcttttttttttggaggtgagaatcttctaaagacttctgggaaggtgttccaggtgtgttggattcaactctctaggcctaaccgtagcgagccgcctaccatctaaacttacctcctctttctccaaccggcgggcaaggaaccgaccttagcgggcatagctctgacccagcagctttgctcgtcaccccccatccagtactctctgcgtgcgctctgtgactgtcatggcaacccggtctcgccaccccatccacgcatgcagccagccagggtccgtaaggcaaccgacctatctgtatgataatacatgtcaaggggtgtgggggcgcgaccacgtcatcatcccatccaccgtaaactggcaaagaattactagacagttagtgagaacaactaaactttcattccaatactaggctcactataaaggtagtaaagctcaaaattatagcgtctacgccataatccgttttcctgcacgcctttataggtatgtctgaggattttacgtttaaaaccgcctaaccgttcttcatcactttttgttatcgtccacgtttctgaagcgtaagtgaggacgggcttgattagagttctgtata

SEQ ID NO: 11414 - DNA, 627 bp, Diabrotica virgifera
  SmartBlast Evalue=1E-115; Info=Pre-mRNA-processing-splicing factor 8 n=1 Tax=Culex quinquefasciatus RepID=B0XAY2_CULQU
gatacgagtttgtattttattttcacactttacaagtaaatctagtagttcctgggtgttgactacggcttctcggaaatatgtcatcaatcctattagagctgtgttccatttatttacaatcttagtaaatgtagttgaacctgaagccataagaatctgtcgaactctattatgaaatcgactcatggattcatcgtctacccgcaagaaacattgagccgttctttctttacttccttcatgttgaaggttccatactccgtccctatgggtgaattcttcgtgttgcgtacggcactttggtagtattctacattcaaatccagacatattaaacaacagattgggattatccttagagtacacgctaacaaagctgttctcccattgaatagttgtaacagatctcggcaatctgtttttaatgtcccaaaatactgctcttcccaaattaacatcgtgcttcattagacgcattcttgcatctctgggccagcattttttattattgtaaccgacaatgttttcattattaggatctggatgttctgttaggtatctttggatcaaatctttggcttcttctgcagaaaatctgaaaaacatatgaattctgtccacata

SEQ ID NO: 11415 - DNA, 627 bp, Diabrotica virgifera
gcctgaaatacagaggtatattctcctagtggaaaagaactgttgaaatttccaccgctttgtcagtagatataatctatcgtgtgataatacccggtccaaatatttcatttcatcctcggcttcgagttttgtcaccttttttgtaagaattgcttgcacgacccattttaaagacactaaactaatttaatatacaaaacgcgcatacgctttcacaacgcgcatgcgctaaaactgtacgtatagctctaacataaatttgaatttcttctttgattttttataatctgtaccgactttgactactatcaggcattatataccatatatgttaggttgtccatttgcactgcaagtattagccacacaggttgggcgcggtatatgataccggtccaactttaaatatattctaaaacactctttacatgagcaaatatgtttctctgtattatttcaaaatcagaaacgaattcatgaacaatttaattgataaatatatgaaaactaaacaattgacgctgacaaaaaaattacactgtttgttttcagtgtatatatggatcgtacttatattagagattagggattttatttattgtgtttttgttagacgacttttta

SEQ ID NO: 11416 - DNA, 626 bp, Diabrotica virgifera
  SmartBlast Evalue=4E-73; Info="Hypoxia inducible factor 1, alpha subunit n=2 Tax=Tribolium castaneum RepID=D6WMG7_TRICA"
cctatcttaaaatacagaaatatgatgacagctgttcccgactttataacatcgaacgaaactaaaagtcaggaagacagcatggcgtttctgaagagtctagatggatatgtgatgattttatctgatgaaggagatttcgtctatttatcagataacgtacacgaatatcttggaattaatcagattgatttgatgggccaaaatatattcgaatatagtcatccatgtgatcacgaagaaataaaagaaatattgtccgggaagacaagtgaagacgaaaatccaaaaaaatcgcttttcattagaatgaaatgtactctcactaataaaggaagatctgtaacattaaagtcagccgtctataaagtaattcattgtactggtcacgtagtcaaatacaaaagtctcgccaacaaggacgacgaagaatcgaccgaaacgaagacttgtttcgtagctgttaatcaacccatccctcatccgtcaaatatagagtctcctcttccgaagcaaacgtttttaaccaagcacagcatggatatgaagattactcatgctgatgacgaatttatgaaagaagtgttgggatacgattctgaagacttattgggaaaatctgcata

SEQ ID NO: 11417 - DNA, 626 bp, Diabrotica virgifera
  SmartBlast Evalue=1E-33; Info=Buzidau n=4 Tax=melanogaster subgroup RepID=Q9W4X8_DROME
atgttctttaaatatagaactagacattccatgtgtgatttttaaaatgtcttttgcctttttcaaatggtccaaagcatcttctgaacaatcttgatgcaacaatagttttgcaagttttaaatgcagtaagcctaccattggatgaacattgccataatactcataaaaactttttattaactgtaatccgtactcggtggcttcttcgaatttaccaaattcaatgctgctgtcaaatgccaaatctaaagttttaatgtgttttacattatatttatataaaatgcctttttgtttctttaaacacactttgcaaacatctagaaatgtagtttctttcatattttctagatgcatacatgtcatatccatcacatcttggaataactgtataaactctccactgatgatcgttccacatgctgaacattcgtcatctggttttatagtaaaactatcaaaacaattgttacagtctgagtttggacaggcggctcctgtcatctctattatcggttctggattaatacacttcacacaacgacaaaggaagtagtaggcttgctcgagctcctgtagtctctccttttggttgccatgacgtctatataactaatataaat

SEQ ID NO: 11418 - DNA, 624 bp, Diabrotica virgifera
gttaaacgctttgtggaaatctataaaaactaataccagaggtgttctgttgtattctttggatttttcagtaagttttctttttagtttgcaggtggtcgttggtgccaaactgtgatcgaaatcccgcttgttctttcgcttggtacgtgtgtagttttcatccaagcttgttgttatgaaagactactcatatgtatttacatttccctacaccttttaacctttccgtatctagtaatatggtagatgttttcgatcgttttaattattcctctctggcgtacaataaatggataacatcatttaatttaccctgtcaaatgtcttctgtaggtccacgaaacataaatatgccaacttgttgtattctaatggtttctctggaactaaatcaaattagtactattaattgtgtcaatttaaacgttttttgttaacagtttaaaaaatagtgtctatgtaagtacgttttaaaaaacgaaaaacgattgtatgaatatatagctgcatttatattgtatataaatattagatatatctgttgcattattcagagtttaaaatattttatacttattatattgttatacaattgaacatatatttaggagtgtttagatt

SEQ ID NO: 11419 - DNA, 623 bp, Diabrotica virgifera
  SmartBlast Evalue=3E-35; Info=Probable RNA-directed DNA polymerase from transposon BS n=1 Tax=Drosophila melanogaster RepID=RTBS_DROME
ccctgtggtacccctgcctttatcaatgtgatttctgatgttgtctgtctgtacctcacagtaaaatatctttcttttaggtaggattccataataatgtacagtgtttggaggagtgattttttaaatttaaacagtagaccaccatgccaaaccttatcaaaggcttgactcacatctaagaaagcagtcgtgcagtaacttttttgcttaaatgtttcatttatttcgtccactactctgtgtatctgttcaattgttctatgatcctttctgaatccgaattggtgttcaggaatcaggtggttttcgtctattatgggattaaatcgggttatgagtagttttcctaggagtttaccaaggactggcagcaggctgattggtctgtatgaagttacttcatttgtaggttttccaggtttcagaataagtataagttcggcgactttccactgggccgggaagtatcctagtcgtagtatagtcgtgcgttgaatattgttgttactagcacgataccttttcttgggagttttttaataagacggcctttgatcaggtcaaatcctggagctacattactcagtgtccccctagcagccttgaagatggagttcacg

SEQ ID NO: 11420 - DNA, 628 bp, Diabrotica virgifera
  SmartBlast Evalue=8E-81; Info=CDP-diacylglycerol--inositol 3- phosphatidyltransferase n=2 Tax=Formicidae RepID=E2AND4_9HYME
caatatcaaaatatcataaaatccttttaaaagtattaaaaattaaattaaaatctatttttagcgtattctgcaagtaattcgcaatgtcggacgaaaacatttttatattcgtgccaaacataattggatatgcaagaatcgttttggctataatttccttttattttatgccaacaaactatattattgcttgttcatgttatgtaatatcagccctactggacgctttcgatggacatgctgccaggtactttaatcaaagcaccaaatttggtgctatgcttgaccaactgacagatcgctgtggtaccatgggattggtggcagtactggcccatttctaccccaagtatatgtttctgtttattctatctatgtgcattgacattgcctgccattggatatatctacattcgtccattttgcagggcaaaacaagccacaagtttgttgacatgtcagaaaacccaataatgagactctattacaccaataaaaacgtgctgtttgtaatgtgtgccggtaatgaagcattttatgctgctttatatcttctccactttactgaaggccctattattgcaggtttgggattatggaggatcatcatattcctttcagcgcc

SEQ ID NO: 11421 - DNA, 626 bp, Diabrotica virgifera
  SmartBlast Evalue=4E-49; Info=Cytochrome P450 305A1 n=1 Tax= Tribolium castaneum RepID=D6WFY5_TRICA
ataatgttcgttaatagttcccataagcaatgtttttagctctttgtttaattgtactataacattgtaaccagatttctctggagctatgtatctcaaccaaggaaacgtattcaggactcctccagccatattaaacgctaaagcacgtctgtctagtaactccaatagttttatgagactaggatcatttctttctagtcttgaacccgtcaaagatttccaaagtacatttaacacggaaacggatataatgggaacaatcttaagttcctcatttttatgttgtttcaggattgtcataatatcaccaagctcttctcggaccatgttatccattgatttaaaaccaaatccaagcgatttaagatgcgtaacaacaaagtgtctttgtattttccacagctctccatcagtccctacaacacctttcctagttcccatagatcgaatccttagaaagaagttatttggtcgtccattaaagtcttgtgaataggcaacttcttttattaattcccatgaagaaacaattaccaatttttccgctcccaattttaaacctactacattagaattgtacatttctgttaattttgtgaacgctttgtgttgacctccacacg

SEQ ID NO: 11422 - DNA, 628 bp, Diabrotica virgifera
  SmartBlast Evalue=2E-18; Info=Protein split ends n=4 Tax= Drosophila melanogaster RepID=SPEN_DROME
gcctgatcgttctttagggccaaaagtccttgccacatacaggggtattgcttcaacagcattaataagctttccgcttgtggtggtacttgactagcatgcggaggtgtagctgcttgcaatcccctctgacttgcaggagcgtcagctccaatgtgcctggcgacagctcccatgagatttccagctgctcccaagccagcccccatcattccgtgacctgagagcggcctttctatatgcgtcatgccccgatctggaccgaggcctcccatgtgggcctgaagagccgaatgactgctgagcggccggtccggcgtaccgatgggcgccatgtgggcaagaccccggtcgctgcccaaggctgccaaagaaccgtggctcgtgagcggtcgatgggctggtggaggttctgcctggtcataataacggttcgggtgtgcgtatgggatacgtgctgaggaatggacgttgtatacttggccgacttgtggtgaatctgtcgttctgtcgtgcggagaatgtaaactgtgaggtactgatgtacctctaccagttattacatgcccaactgaacctggtcgcctcaattctaagggtggtgatgttacaggagcttcttctcctt

SEQ ID NO: 11423 - DNA, 627 bp, Diabrotica virgifera
aaaacatggctacgaattacatttgcgttgatttgtgatccgtcaaataataaacttaaccctatacattggtgaattaaggtattctaacctaagtttaacaatttttaaattaatttgtgactaaatagacatacatatttttacggtgaactaaaatattaaatttcttttcttcgtgagtacaaaatggcggcttacggtgcaattgaatgattcgagtataaaattcaaaagtggttttaactaactttgggtaaatatttagttgttttaacgttatggtgacatcgagggatgtttatactatttattcaattgttttaaaagtaattttttagcagaaaagtctaaaaatcagaaaaattcagcaacaaaatacaagagatggaaggctcagagtcggaaaattcagcttctggttccggttcagaaaatgagagcaaaagtgattccagtaacaactctggaagcgcttctggtagttcttcttcggacggttccgatacaggcgaagaaactgtagaaaatggatcggccaataaaagtagtagtaaaagtgacggagaagaagtacttgaagaaagtaacgggtgtagccaagattcaaactctatacctcctgct

SEQ ID NO: 11424 - DNA, 628 bp, Diabrotica virgifera
  SmartBlast Evalue=3E-42; Info=Proteasome-associated protein ECM29-like protein n=1 Tax=Harpegnathos saltator RepID=E2BPU0_ 9HYME
cacaaccaggagattctcaaaacgtacgccgaagtgatactgccgttagtgttactttgccatgctatgcggaaaaacaccggaaacagaaaaaaccttagaaatttggaatgagatatggtcagaacaaagtccaggaactgagactggcatcagacaaaatttgaaaaatatctgcgatatacttaagactgcacttgaatctccttcgtggaccatgaaagcacaggctgccaacgctgtgtctacagttgccaacaaactaggaagttcgatggatgccaaacatagaaactctttaatagagatcctactggctggtttatctgggagaacttggaatggaaaggacaaacttttaaaagcgttggctagtatctgtagcagttgccaagacgcaatcaaggctgacactgacatcaacacatcgaacatagtagaagcagttctgaaggaaagcaaaaaggaagaaataacctacaaaatcgtagccttacaatcactgggggaaataatatcgtctctacaaattgataaatttgaagatgtgtacaccatcatacaaacaattttgacagatcagaatagtaaagatgaaagtgacgatgtaatctagtcgaagaaacga

SEQ ID NO: 11425 - DNA, 625 bp, Diabrotica virgifera
  SmartBlast Evalue=2E-35; Info="Myosin light chain kinase, smooth muscle n=1 Tax=Camponotus floridanus RepID=E2ARB0_9HYME"
gtgttgggcagagctgcaccgcctaagttttatgcctatccacacaatcgtgtagctgaacaaggagagactgtaagattccaaagtgcagttgctggccacccagatccctgggtgacatgggagaaagacggagtaccggtcacaccctcagcgagactgcgtatgaccgaacgcgatgaccttaggactctggaaataacagacgtcatccccagtgattctggagtctacaaaataatcttagagaacgacgtgggcagagtagaaacttcggcaaagttagatgtcattggtcatagaataccttcaagtagaggactcagagctagaagtttatctccaaaacctgctccttactattccaaaggtttagttggaagctattcaagacttactagcaaacctagtttatattctgattatagatcttcacttgtgaatttaaaacgctttaaagaaactattgattctcaagatcacgaagccaacgcagatgatgcgttaacttgtaataataataaagataatagctttcttcgaccagaaattatcaaaagtcttccaaagaacttgaaagtttctgaaggggattccgtcgtgttggacttagatattattggag

SEQ ID NO: 11426 - DNA, 626 bp, Diabrotica virgifera
  SmartBlast Evalue=7E-32; Info=Transmembrane protein 35 n=3 Tax= Aculeata RepID=E2AJ43_9HYME
aacataaaaatgtgttcacatatcaggtacatatgtatatttctcaattgtgcagttttccgacggtaacttgacggtaaatgatgacatgttttaagcatgcaaatatgttttaaaacagaaaaatacaaaaagtttgtagttttgtcataataacgttaaacgttaacttaatacactgtacatatttaattttagtacagacttagtaatttcgtccgaacagtcaaaattgtttgttatagctatttacttgacacatataaacagggatctactgttacatcacattaacaaatttattcctgtttgaatccattagctattggttcacgttgttcttgttctcgtttctgaagttggaagaataccacaagtcttccactcaacatgaaaaggaaaactaacgccggggctgtcctttctagtttatctgctaccatataatgtgaatatacggccatcagcgttagaattaggaggactatgttggaaaggttttttatcttatgatttggccaaaatgccattgcactaccacagatcatttctagccctccaactgttcttcggtaccattttgaaggaattttgaaatctagcatctcagatagcggaaatacctt

SEQ ID NO: 11427 - DNA, 627 bp, Diabrotica virgifera
  SmartBlast Evalue=1E-33; Info="Polynucleotide kinase-3'- phosphatase, putative n=1 Tax=Pediculus humanus corporis RepID= E0VFJ9_PEDHC"
ttctttaaaatattttcaatttttcttttgaatccctttactttagatggatctttcccaatacctgactgattggtgaaaaacacaattttaaaattgtcattgtacaatttctgtaattttgaaggaatatcactaaaaagcatggcccaatcatcgaagtctttaggaaatcttgcacctgattgtgttttaataattgtgccatctatatcaaatgctgctattttgttttgactctgaatgttgtctggggtataaatcagtaattctctttggtcaatatcttcccatttacctgctccattaaaaaaggcactattgtttggctcagcgtacataacttctaactttggtctcttagcggtttgttccagtttttcttctagatactcaaaaacaacttcgaatggatgaaaccccaaacggaattctataacatgaccaggtcccaaggtgtatgtcttatctttgactacagcatatccatccacaccacaaatagactttccgactggctttacttttactgtacatgaatctgtatccgctatacattcaatttgttcttttgaaacataaacatcatctactttggtttctacactgcgccccactgttgttagc

SEQ ID NO: 11428 - DNA, 626 bp, Diabrotica virgifera
  SmartBlast Evalue=8E-57; Info="Protein pob, putative n=1 Tax= Pediculus humanus corporis RepID=E0VC64_PEDHC"
aagccgatgatacccaactcgcatctaaatgtgacagttctattcctctttgtaacatagatttgaatctcagggttagtggaaatggtacttttgtggttatgaagccggaaaacatccaattaatccaacctccgattacaatcataggtagaacatttgtgaggttacctttgagcatatctgtcatcattgttggatcagtcatcatgttttgggtcactgcggggcgtttttgcattaaatacccatcctctttgttgaaggcttgctttctgatcaaaaaggaattctttggaatatagccacaattttctctcaaagccctggctcttaacagaagttgggagtctgctaactgctgaagttcaatcttcttttgactagacaataatatagaagcatagtgccttaatatgccagttaggaatgtaataactacaataggtaaaaacacccagaaacgaatctggggatctacgattaaatctgcacccatctttgaattctctttaccttttcctcaaagatacgactttaaactattttgtaattctttcaaatttatagtaaatggaataattcgttaattttttatttagaacatttttattgattcactactg

SEQ ID NO: 11429 - DNA, 624 bp, Diabrotica virgifera
  SmartBlast Evalue=1E-55; Info=ras-related protein Rab-18-like n= 1 Tax=Saccoglossus kowalevskii RepID=UPI0001D3A15E
aaaatattatctgcgtcacaggtgaaaataccaatttattaaatagttaattaaattcgacaatttggttagaaggcatatacttggaggcaattctacaagaaattcgtctcaagtgaaagtttgtttgaaagttttcgagaacagtgatttttgttaaattaaataacaatggaggaagatatacttacaactttaaaacttctaattataggcgagagtggtgttgggaaatcaagccttcttcttagattcacagaggataattttgatccagaacaaacattgactatcggtgtagattttaaaaccaagagacttacaattgatggcaacacagtcaaactagctatatgggatactgctggtcaggagagatttcgaactttgactccttcgtattatagggatgctcagggtgcaattttagtgtttgatgttagtagttatgcctccttctcaaaactagaaatgtggttgagtgaactggagacatactccacaaaaagtaatattgtgaaaatgattgttggaaacaaaatgatgtggataaacgtgaagtatctagggaagaagctatgaggtttgctagaagacatcaaacattgtatattgaggccagtg

SEQ ID NO: 11430 - DNA, 622 bp, Diabrotica virgifera
gacgtttaaaatttgattcagattgcccgcattggcattaattttataacaactaaaataattgtaattttataaaaacgaatccggacaaaaaatatattcttattacacattacagttattggccaccctgtggtttagtgattggcagtcggccaaccactagttattgccataaaaaataagaaaaaaatgcttgaaatatgttgtgttgggccaaactaagctaaaagagcctaaattataataaatattttaatttaaagtaggtacagtaattggccggtaggccaatcattataatgcggacatatttaagatacagtgcttggccactaaaatttaccgccaaaaaattataaccttactattaaaaccaccgataacgtaagatgtaccccactaaatcatcacaaaacattaatataagcagatacacaatattattagccacgataactcacctcatgaatggccttccttaacaaattctttaaaaaactcttaaaactggatgcacctgttaagcttccaacaacacacgctgtcacaactagacaatattaactgagagagataatggctagaacaaatatatagcaatgttgccgaattgcaatgc

SEQ ID NO: 11431 - DNA, 626 bp, Diabrotica virgifera
  SmartBlast Evalue=2E-34; Info=Signal recognition particle 9 kDa protein n=1 Tax=Tribolium castaneum RepID=D6WEI1_TRICA
gacagtgacaacagccaacaacatcactattttattaaactgacatgtgtttaatttatcaataaaaagtatttacaaaaaggaaaatgacttacttaaaatcatgggaagagttcgaaaaggctgccgaaaaattatatctccaatcaccatcaaaagttagatatacaatgaaatatgcccattcaaaaaaccatctaatacttaaaatgactgatgatgtagtttgcctgcagttcaagacggaaatcgctcaagatgtcagaaaagtagataagtttgtaaataacttgctaaggcatatggtatccaaggaacattagtctaaagcttatgattaggaaaaaattaaattaaatggttcatacaaaatgtatatattcactgtctgtgaaatcgcataaaaatttattattttctgggttgttttaggtttttacaagaatcactaaaattttatttttggttatcaaaatgttcaaaacgaagtgttctactttgcccttcactttgtgtagttatgtgatttcaatttaaacagttcatatattgtgacaatgtgttaatattaagattgttcccatgtataacacatgatttttataataaatatttttcaacttgtt

SEQ ID NO: 11432 - DNA, 627 bp, Diabrotica virgifera
gatactggaatggagaccaagagataatgcctaccgaagcagaagtcgtccaccaacacgttggactgacgatctaaaacgtggtcctaggaattggatgcagaaggcacgaaatcgaaaattatgaggaagatatatgttcagcagtggacaagcgaagattgaatgatgattaaaagcaaatatgaccaacagcaactcataaatttgtaagacatttgtgttacaaatgtatgcatatattggtatgttttaagtcactgaacattgtgcatgtatcatgttttaaaccattaaaagtatgtactcgtggcaatttaatggggttggcaaccgtttacaccacttaaaggtgtcacaataatgcgtagaaatgcgcaatatccgtattatagaaaatatcaaaaaatatgtttcaacaatttgaccatattcccttttcaccatgtacagcttgttcattatttggagcagttcctagtctgagcagggtaacattggggtattattcgcatatccaagattcgtggttattttgccacatattgttactccgcctctccatatttgctagacttttctatatacatactttccatatattgaataatatgggtctaaaccaga

SEQ ID NO: 11433 - DNA, 619 bp, Diabrotica virgifera
gagagtgccttaagtactgtacttttacatgttccaattatgaataaaagtaatttttggttttcaagatataatttttttaatataatttttttaaaaggtcactttttttacctgcaagacctatttaatcccttaagaaatacctatggtaaaatagagagaaatagagagtataataggaaggcgacgcaaaacgttcaaaaaacaaagatatataatccgatttcaaataaataattatgtaatgtaccaattggacctcccaagatataataatgtaccaagagcagttgcatgcaaaacaatgtattatattggcgtaagagaaagaaagattgaagcaattggaagaaacctacattcagaagtggatgaaaaatggttgacaaagaagaggaagaagactaattatgtcatatttatatcaaaattaatgtaaaactctaaaatacaactaaaattcaaacagaaaataaaccccgactctagaaataatggaatataactctggtgaataaagagataataaaataagaagtaaataacagagacagacgggatccaagaacactgttttgaagtagatatatccatcccaagttcttaaataagctca

SEQ ID NO: 11434 - DNA, 615 bp, Diabrotica virgifera
  SmartBlast Evalue=7E-44; Info="Sin3a-associated protein sap130, putative n=1 Tax=Pediculus humanus corporis RepID=E0VFN7_PEDHC"
ggttgatgatgtccgtatggactttatgctcaaatattctcatgatcgacgttttcgcttctgtcaccgtcgtttataattttgattctttgcagattaccctttatcagttcatttattcgattaatctccttgtcgaattgtttacaggcttcttcagattcagtacatttcagtagttcattcaattgattgtaaccagtttgttcttgattagccaaatcttccatttgcgttgaaagatgatggattttccacccattcactttatcctgtacccgatgttgatttgccaaatccataatagtgggccttctttcatctttaggttttacatcagaatgcctcaagtagtgattgtgtgtcgccttccaattttgcttataactattgagaagacttgctgaagctggtttcctgacagtcgtcacctgacccgcttctggagctccatctttgggttcgtctgattgattcatatcagagtcgtcctcttttttgataggatgatcggaaataaactgcatatcgtctttgttttcgtctaaatcattgcccgttagttgttgttttcttggcttttttctagggctcatttccatggggggtttagtt

SEQ ID NO: 11435 - DNA, 627 bp, Diabrotica virgifera
  SmartBlast Evalue=7E-72; Info=Methoprene-tolerant n=3 Tax= Tribolium castaneum RepID=B5U9B2_TRICA
gcagacctgaaccatttatagagaggctaatcgaagcctccaaagaagagtatgtaacccgacatttgattgatggccgtattatagattgtgaccaaagaatttctattattgccggatatatgaccgaagaagtgttgagtcactctgcatttttatatatgcatagggacgatgtacgttgggtgatgattgctttaagacaaatgtacgaccgaggagaaatgcgtggatggtcatgctatcgtttgcagtcccgtaatggacaattcatattcctaagaacaaacggtttcttggaaatagatgatcagggtattgtggaaagttttatttgtgtaaatactttggtatctgaaatggaaggtatgcaattgatagatgatatgaagaaaagatattctgccctttgctcacttgaagttagcaatcttactcctccaccaagcaacgattctattgacatagtggaggatccggcgcaagtagaacaagctgtagcacatcttgtggcaaatctaccttcaccaagtgcagaagaagctcatcttaatatcccaagccccttgatacacacagagaatcaagactgtacattatcaacgaccgactgtactgcatcaatgc

SEQ ID NO: 11436 - DNA, 626 bp, Diabrotica virgifera
gtgcagtatatagctactaccgagaaatagctactcaatatttggcaacaatatttgttgaatacatcatcaaccttattacaaatatgttttattaccgagtggttagagattaggtttaaaattttgctgtagattcagaagtttacatatttataacacaaagaaattaatgtatgtttaaaatatcaattggaatagatacaataattctttacaatggcgcagctttttgcatgtcgccacacaatcacacaattcatcacagggaatacaacacattagaaaataaaaagttatagtttatcacaatttataaagactatgaccattctgccgtttgggttctatactgtttagaaaaaaacctacagaataaaatatttatcactattacaattctataaaaccatgtttaagcaagatgttattgtcccaacttggaacatcttgtattcgttaagccagccactataactatatctgtctgtatctgtagagcagggaaggcgaataaaagttccacagcccttaggccacaactgagccattgtgtatccttctcaggggcgtaacagaggcccccgcggcgtgaagcttgcggtggggccccaatcgtgcaggga

SEQ ID NO: 11437 - DNA, 622 bp, Diabrotica virgifera
  SmartBlast Evalue=2E-35; Info="Bric-A-brac, putative n=1 Tax= Pediculus humanus corporis RepID=E0W2L6_PEDHC"
gattgaagaagtttgtcttagatggaatagccatcactctaatatgcagaccacttttcccagtttgctgcttagagaacagtatgtcgatgccaccctagtagctgaaggacaaactctgaaatgccacagggtaattctgtcctcgtgtagtccctattttgaagaagttcttgcgagtatcagtccttatcaacacccagtactttttatgaaagatgtgccgttttggacgttaaaatgcatatgtgactttatgtattcaggagaaattcacattattcaaaccaaactagatgaactcttagccattgccgagacattaaagataaagggattagctggccaaaaagatgctcaaaccgttgacaccaaaccagatctgacaattcctatcaaggaggaaaaaaacgatgaaaaaaaagatgaaaaagaagtgaagaaaaaggacgaagtaaagaagaaagatgaaaaagaaataaagagaaaagacgaaaaagaaataaagaaaaagaagagaaagaagtaaagaagaaggatgaaaaagaagttaaaaaagaaagaagaaaaggaatataaagagaaaagacgagaaagaaataaagaaaaaggaaagagaaag

SEQ ID NO: 11438 - DNA, 626 bp, Diabrotica virgifera
atctacttttcttaaataaaatgttatgttcaaactccttttttcctatttcttcgaacttcttttggacgtcgtgggtgatgttgctagttcgtgcgggagactctagggcttcttcggcattcattattatcgtttcgtcggtgtgtatgttcatgtcatggttaaagatgttttctacgattgggggtatagctgggatgatgctactggactgtagtttcgaagtgaggtcttttaaggaatttagaggtaaaaatgagtccgtagtggtggagcctacacttcccatcgtttccggcctaaatgatatcctaactaggctcctatcttcttctaaaatgaaaatttcatctctgtgcgtggcaacatgtagaacgcctcttaaatgactaactgtagctataatggtcatttctttgggatctaatatgtatacaatgtcgttgttgtgagtaactaaaagtttttcattgaatggtagcaggactccaaaagaagattccttctgtggctttaatcgttttaggtttaatgatattggatttatgagcggcacttctgggcattcctttgttagcagttccttaaataataacgttttttgaacatttccatcaacatct

SEQ ID NO: 11439 - DNA, 625 bp, Diabrotica virgifera
aaaaataaatatctttaacaactaatggcacgtaagcagtctcttattatcagatcttagagtaaatacaaactaaagaacgtcaccagtgcaagtgcaaagaaagctaaaacgtacattatagtgatgcgtacaatcttcttgtgttccgaacgactgatctgcagcttggttcttcgctcgttcaaatcgagcaataacggatccagtaacagaacgtttcgttccaaatacggctctggttcgtgctggcgcggactgtgttcgatgtttcggtacatttcgtccatcatcgggatgatttcatccaagttctgcactgtcggtcttcgtttcttcgacagacccattgtacggcgagatatgtaattatttgtaaaagatttgaagtgattattggtaggtagagataaaaatataggaacgtatgcatcgtaactactaggatcataagaacattttaattccttatacgacaaatgtccgtgtttgctgtctaatattcctatgcaatatttgggaacctcttggtaaaaaggcacaaaattagacgaacaaatgagagaatcgttgcttaataataaattatcactctgtataaacttacttaaacttacaaccgcgt

SEQ ID NO: 11440 - DNA, 626 bp, Diabrotica virgifera
  misc_feature (569)..(571): n is a, c, g, or t
tccattgtgttgggagtaacaatgaagatttttgtagcagttatctgtttttatggtgttctaggtttaatcctagccgacgaaggatgcgaagagcgaattggtagtatttgttataaagatagtacctatccaacacacgagattcacacagtttatgagagtctgggtacaaagttgatttcggcatttggtcgtcctctaccccaaactcgagtaattgaagaaccagaaccttttcagtcttgcagactctgtgaaacggaacaaaatattaagatcgtacctctcagtataataggtgacaataacgaacgaatgtatgttatgtctacaaaaaattatccgaggccagtacttgaaataagcacgtgcagcaaagaggccaaatgtcgtctcgaggaacttcagaatgattttgaaacgatttgcgagcagaagataacgcacattaacttgctggtatacaattcaacatcaaaagaatttcaaggacaaagagtaccttatcctagctcctgcgagtgtgaagtgcgaggacaggggctctgaagaggaaccacatagannnctaagttttttgagagttagttgtataagtttgtgtaatatatgtttaccttttt

SEQ ID NO: 11441 - DNA, 609 bp, Diabrotica virgifera
agttactacgttaatgtattattctattattttggtctgttttttttttggagtgttttctggtttcagtggttctctctgtactaaattcgccattattttagttttcgtagtttatttctgatcctactttttaagttactggtaatttatgtaacctttcctgaggttcttttaggttgtcatttattaaaattgtatcatcggcaaatctggggtgattgaactgtttgtcatcaatcttaaaacctttatattcccattgtaacatttaaaaagcatgtcaagacaaagtttttagaattgatagtgttctcacagtctctgaagctttttgtccacaaattgtgggacaatggactggttgtattcaatgattttttcatctgggcatttatgtatgttagataaatttctttctttcgttatttatgtaaatagctgccttggaatggactctatcgtcacatcctgatgtgaagctattgagcatagcgacatttattaaaaaaaacgttttgtttgtttcttgtcttgtttcttcaaaagttttcctttctgtagtccttagtttcatatttcttgtgtgcttagtttcattcttgtatg

SEQ ID NO: 11442 - DNA, 626 bp, Diabrotica virgifera
caaataatcataatagaaaatcattaaatggcagtgtttatagatcaagagttacttacaacagccaattacttcacctggtactcaattttttatagaacatcagactttttatttatacatcctgtagatttgtttactttatacagatgaatactgagtggcagtattatacatagagcgggtggtgattttttttaaaagtcgccatcttaagtggttgagaaacgtttaatagccatataattctttatttattatcggatatagtagtcaatgtgcaaactaagtgtcagtataactataattatgttctctttgtatattagatgttaaccagagatctgttactaaatatatttttaagtagtagaatcagttttattgttgacggtttgtcacttagtctgctatgtctgtttaaatgcaaaggctattttaacctgacttagaatacaaataaattatttaattggcttcacgtattatttgaacaccaacatgtaattcagatatttttcaaattatttattgatgtaaaaaggttaatagtcttaaaatttatatgtcggttttgaaatagtttttgcatgtactttatatagatagtttactattgtacagag

SEQ ID NO: 11443 - DNA, 626 bp, Diabrotica virgifera
  SmartBlast Evalue=7E-24; Info=Phosphatase 1 regulatory subunit 7 n=1 Tax=Culex quinquefasciatus RepID=B0WUA8_CULQU
cgtttttaggcagattaataaaaggtagaggtagaaatttagttggattgaaaattcaattttataatattaaattgacagaatattcaggttatgagtaatcaaatgctcttatacaatcaaaagtagaaaattaggtattttatttatcaagatctacaactaattttattaattatgcctgtacctagtcaagaagaaacaaataatgtaaaccaaccagaaggcaatcaagctaccacttcaaataatgcagcagatggagatcacaatgaaggtaatagaggtcccacaacaaatgatataacaataattgatccagaatgtctagaattagatctaaatcatggccgggtagataagcttcaaaactttgagccacttacatgcattgagaggttgtatttaagatggaacctaataacaaagattgaaaacctggacaccctaacaactctaattgagctcgagttatatgacaatcaaatcacgaaaattgagaatttgggatgcttagtaaacttggagattctggatttgtcgtttaacaggataaaaccatagagggattagacaatttggtcaagctgaagaaactctttctttcttcaaataagatcgctaaa

SEQ ID NO: 11444 - DNA, 625 bp, Diabrotica virgifera
  SmartBlast Evalue=3E-18; Info=Myosin-1 n=1 Tax=Camponotus floridanus RepID=E2AJY3_9HYME
tgaggtcagaaactcacaacccatttgaaagtcagcacttgacgaatgggatcttcaacagtctgtgtcccgacaatgacgtgagcgatgacggcagcggtcaaaacgaagcgaaagttatatcagaactgtctgagctacggaggcaagtgctattcctgcaaggtcaactggaggatagggagaagacggtgcaaaatcttcaagaacagatggtgcggctcgcagaagacaactaccacgccaattccgcaccagcttccaccacgtgcgaaagttccacgtgtaacgcagctacacaaacagaaaggatgcgaccaatctccgcaggcccctcccttctaggtggatcaccagttgatggtagtgcaggttctctagtcagtgtgactgaatttctatctccaacatcgcccaggaccgcaaggaagtcgcgccctccatcagtaacgccaccagggacgagtgactcgacgccctcgaagaagattccttcgaggttgtggaggcaaccaggggagccgccctcccctcaacgttacgcctttatttctagttctacttcttctatcccaaggcgggcccatagtcgtactagaacgcctgcttccacatcgtgatattc

SEQ ID NO: 11445 - DNA, 626 bp, Diabrotica virgifera
  SmartBlast Evalue=5E-15; Info=Phosphatidylinositol-specific phospholipase C X domain-containing protein 1 n=1 Tax= Harpegnathos saltator RepID=E2BH78_9HYME
ccctggtatcattaaatcttcgatatttcgagttcctaatatgtttctattgtcggtcatccatgttggctgaacggcaaggcatcttgaatgtataacgtcattattatgggaagaagctatccagtaagggaaacagtgaggaccgggagctctggatgttttttcgtcttccaagtcccatcctcccggcagatacggttgaccgaattttgcagtggtttttaaatacccagaaggataatcacttggttttatcctcaatatgatgccatgatcctcgtcacttgattccatattttttctagataatataatttcatccggaacatttgtcgcaccttcacacgtcgtcacccagttcatctccaaaaatgcgtctcttggtgaaactgtgagatgcacatctccacatttcgaggcatctgtactaataacactattcacaaacaaaacaaaaagtacccgacacactctcgacatcgtttgacctcttaatcaagccaataaacataaaggctaccttgtttaagttaaactgtgctgtcagtgactcatttccgaacagggttcttctgctacaaaaatacgatcaaaacttagcaggaaaaattactgtaagcgct

SEQ ID NO: 11446 - DNA, 626 bp, Diabrotica virgifera
tataattctgtacataaacggaaacgtcggaaactactaaaactactttaatatcctaatataaaacaaaactatactacgggaaaaacatattgatgttaagcttttttaaagaacttttcaacccacttttattttttatatcctttgataatttgagtttttataccatatttttcggccaactgttgtgaattgtaatcatacttataaatagtgacaaacgtttctcttttacaacacttttacgacattttattctaggattttaagaacctattgtgaccaccgaccagatgaaggttactctcctgtttaggtagatacaataggtcctaataaataatactgggaatttccatcaacaaataaacaaaattattttaacaaaattattttggctaacattcacattcaatttctataaaatgggctttaaaaatatgtgattatttggccgtattataaaggtggccgtaaatagtaggtcataaataagcgaatatagtatattgtattacatataattggtttgcggaattttgaaacaggccgtacgtaaaggtggccgatttttgcaggtggccggtaacacaggttttactgtaatcagtataacaccactc

SEQ ID NO: 11447 - DNA, 618 bp, Diabrotica virgifera
tgtagttgtaattctacactaaaatttaaaagcaaaacttacatttgttgacattctatttatttgataacgtcaacttttataatatgtataacccgtgatcggagcagtagcaactttctgtcacttgctgttgcgtggaatagatttccaacttatttcgtatgctttaaatgatgacgcacgggtaaagaaccttggactcaaccactggttatttattctgtgactcaactgtatatgatatttgaagtaattttagcattaaggcggatactcactacgcgccatttgtcaagtacttgtcaaatgtcaaatgacatgaaagtcagccgggctatttgtacttgccaaacagtagtgcagcatttacttgacagttatctcgtagtggataaaatatacttgaacatattcatatgcttaattaaatacaagtacttgccaagtaccgactttagtttctcataagttatctgaaattagaataacattgccaacgaagcatgttaatgtttattttgatgttaactcgtaaatgtcttcaacgcatttactgggatagctgtgacgagttgtagtgacatcttgtcgtcttgcctgacatctattccgata

SEQ ID NO: 11448 - DNA, 626 bp, Diabrotica virgifera
  SmartBlast Evalue=4E-36; Info=Valacyclovir hydrolase n=1 Tax= Camponotus floridanus RepID=E2AQX5_9HYME
gcttatatctcgaagactttcacattgtttaacctcgtcagcgactagatatgcattagatccccaacaaaccaatttttcaactttttctggatatgctgctgctaaaatcatactagatattcctccatcactccaccctagtagagaatatttgtctattcctaatgtattcataaacttttctgcacatatagcatcgtttctataaaaatgaattccaaattttctatttgaaggacgactgtaaccataaccaggggatcccatgctactatagtaaacttttctctatctaaattttccacttgaggtttaaaatcgctccaaattgttcctaaggctccaggaaagcacaacactgtcttcggaccattcccgactttaacatagttaatagtttgtccatcaacatcaattttttgtgtctgaaatcttcctttggacagtctaacatggttatggaagtcatctggtgtgtccatgtccattgcatcaatatcaactgactgagctaagatttctacagctgcacctactacgtttaaatcaatatcgtcttcaagtaactctaataaaagcgcttctctaatatttgcattgcaacacatgatacatcacatccc

SEQ ID NO: 11449 - DNA, 624 bp, Diabrotica virgifera
atcttaatttaaaataaaaattgacctgtttcaggatttttcctgaaaattgcgggtttacgaaataatgaatttattctatttgggtttgccagactgcatgttcatatcattttttatataaatagtaaaagtttataatacatttgatttcacatttataatttcactgtaagtggtggtggtggttttacaaccagacattgttctaactctggtttttatttgtagcatttagtttttgtaaccgttgacctgaagatgctctgcatattatagagcaggggtcaccaattatgttccctgagggtccgtttcgaaaacttgtgacacttgcggggtccggacttaatgctacctgtgtccagttattaaaaaatatattccccatcgtaataacaaataagaagggcgccggacgaaatttttaggcagaaattgtgtaacactttttttcaacaaattcaaaacataaagttttctgcccccgaaaatatgtttttagcatttttgggccatcttaaagaaaaaacatattttttctcaaaagttgatagatttcgagttccaaacgatttaaaacctgaaaaatgcgaaaataagtattttcaaagcttgaaaact

SEQ ID NO: 11450 - DNA, 625 bp, Diabrotica virgifera
  SmartBlast Evalue=1E-68; Info="Histidyl-tRNA synthetase, cytoplasmic n=1 Tax=Lepeophtheirus salmonis RepID=C1BV62_9MAXI"
cttaacttcacaactccatttttaatttcactttcgcctaaaactatagcaaagggtatgccgttttcttcacagtgttgcagctgcgctagaagcttaggattcttcttatacgaatgttccactttgaagcccttatcccaaagttcagagcacagtttcattctttcctccagtaaatttttttgcgcagatgctacataagcgtcgatatctgtctttctgcatttggtagttgaatttgcttgccttgcttctataatagtaaacagcctttctactccaattgatgctccaacacaaggaacgtctttacccttttgattgaacattcctaccagattatcatatctacccccaccagctactgaacctactgagatatcacctccaacagtatcatcttttagtaatacagcttcgtatataactcctgtataataatctagacctctagcaaggctcagatcaaataaaattttatccgacgtattatacaagtcacaataattcaatagtagtttcatagcttccaatccttcttgggcacttttatttttactaagtacttcgttttgttgtaacttttcgactaagtcagcttttccatttaatcttacgtatt

SEQ ID NO: 11451 - DNA, 624 bp, Diabrotica virgifera
  SmartBlast Evalue=2E-14; Info=Endonuclease-reverse transcriptase n=1 Tax=Bombyx mori RepID=D7F160_BOMMO
agaagtatttctttgaaagtggaagaagaccctacagaaagacgacctgatacagagagaataaaaagagtgctagaaacaccagagatgaaaacccttagaaaaatcgatggtaagatacggttggacagagctagaagtacagacatacggcggaggtgaagaaacctttgtcaatggactagcttatcaggttatcagcagatgaattattatatgatgcgcaagatcgagaacgatatcggcaaattgtcatggagcaatccacgccttagatttgggcacggtactccaagaagagtaccgtagtttagacctaaataccaaataaagatgtttcttagcatggacagcctttaatcgattaaaagcagtatttaaatcaaacttacccaacagtttgaaggcaaaaacctttatgttctgacatatggaactgaaacttgggctcttaacaacagcatagtcaacaaacttcaagtgacccagagagctatggaacagagaatgttcaatattaagcgcagcgatcgcaaatacaatgaagagataaaaagacgatcaaaagtaacagatgtgatccagaagattcccgtgttaaaatggaacttgggaagaacacat

SEQ ID NO: 11452 - DNA, 622 bp, Diabrotica virgifera
  SmartBlast Evalue=9E-13; Info=PITSLRE serine/threonine-protein kinase CDC2L1 n=1 Tax=Harpegnathos saltator RepID=E2BWR8_9HYME
ctctagctctatataccacaccatatgttccttcttctatcctatttaggcactggaattcctcaactgacctacaaccctgtacagcaggaagatatggtggtaacgattcatcaactttaggtttaggcttatctgtcgctttgtcatctttatctttcatatccatctccatgtcatcgtcgttatcgtcactcttcggtgttctcgaatctgaagcagaccgcgacctagatctatcactttcacttctactgacacttggactacgacttcggcttctacttcgacttcttgttactgatctcttatcggaatatggactatcgccacctttagaccgtgaactgcccctggaggagtcgctatgaaccgaaggactcttgtcataagcaggactgtgatcactttcgtatgacttgtgttgataaacttccggctccatatctgaagtgtcagacactatgacaggtgcgtcttccactttctgtcgctttctataaatatcctcctccagtttccttttagttgccttctccaaatgacgacgctctctttccattcgggattgttcttttaacctggccattcccgttccgcttccatgaattttgctttctct

SEQ ID NO: 11453 - DNA, 625 bp, Diabrotica virgifera
gagatgggaaagtatgaatttgtatattgtctatgttacaaaatatttctgaagttattatagttattaatttattatcgataatgtgccattttccctaaaattacaaataagacgtattagtgctactgaaaatggtttcgttcaaaatgactagctatattatttatagtgcaatacgaaattattttttttgaatttattttaagctgttgttttctgctctttctgagttatgttctagtaatgatggtgatttagatgggtaaactgtttatgcattagtggaatagaaatattcctagcatcgcctttagtagcgtgattacgctaaactcacttcatctttcctcgttaagaggtcgctaaaggcgtgcgttggtatatttcaatatatttaccaagcagtcagtgcgttttgattcagttcagtcttctttcgagcctctctgatgacgggtagacgtagaaacacgtgtcagagaatggtaagagactcgaattgaatcgaaacgaaaccgtctactttgattttgttctaataacattttgctcatcgcatcaaactattttttacattgcctatatgtactttataacaaaattgaacaaatgtgccgacaaa

SEQ ID NO: 11454 - DNA, 625 bp, Diabrotica virgifera
gtaggttgagaacaagtgactgtaggggaggaggtacccgcgtcgatcagtacctgggtggcctcctcccccaattcgcaagaggtcgacgaagcggtcgatgatgttcgcttgtgtccgccaccacctgacgacttggacgagtgcctcgttaaggatttggtccaagcatggatactgcctgcgcgagtactgcccttgctggtcgtacttgactcgctgctcttgcgtggaattgtagaactattgaacgctcctgaatcaagttttgggcaagactgtcccgtgtttttgatttgttccggatggcaagcctgacaacgggttccccttagcacctgcttgctgttagctctctttcttggcgtgccatgtttcagaatattccgtggaaattttgataattcgtccaattccagtatgaaggctgaatagtttactaatcgctagtcgagtgaaaattgttcctaataatttacaagcaccaactttcaaaaacctattattctacaattttttaaatagctactattttagtccagtcttttatcacatatttcacttagttttgctagggaagatttagacttcgtagaaaagtatttttagagaaaaatgacaccac

SEQ ID NO: 11455 - DNA, 627 bp, Diabrotica virgifera
  SmartBlast Evalue=5E-15; Info=SCAN domain-containing protein 3 (Fragment) n=1 Tax=Camponotus floridanus RepID=E2A2L6_9HYME
ctgtcgggatgtattttggtcaaatgttcttgtaatcgtgaaggtttcatggcttcatttgagaaaactctctggcaaattaaacacattggtaatgccttattagaaggcgactgaataaaaccatacttcaaatattcgacattgtattgtctgcacttcttctttggatcggacatactgtaggtatatctgtaaaaataaatatgctgtagccaccgctttgataattttaaataataaacttttaaatattttttttagttagcaaaatcaatatttcagagtggcggaatatccaagcaagtagtcgagaaatttaaaacatgccacaagtaaataaatatacactgagagaagaatttaaggaaaaattacaaaacaacttattaaaaattaccatactgtacacatattataaaaataactttatattcagtaaatagtttatttttggcggcagtctatgatcagatactattcagtatagtaaattttattaagattttttgtactttttccccaattcttctctcagtgtaggtaggtcctaattaactttttactttgatccagtttgtgcaagttggtacttttttgaatattttacaataactatacatataa

SEQ ID NO: 11456 - DNA, 626 bp, Diabrotica virgifera
gtaaaagcgcctttcttattttcaaagtttcaaacaaatcgatccattctgtaaaaattgcgaggttttgtcctattttaagctttattacttggactataaggtaaagtgcatccagtactttttcataaagagtttaaaaacaatataaggagcccatttttattatcagcagttgtatttttcttcaagttctggaaattttgccttcttgttcaagaatgttgcttagtatgtggagtcatgacttttttcatttttcttcaaatcgttatgcaactctcactaaagatattgaatttcttcgatgctgtttaattttcgattagttctgccgcataaataattttacaagtttttcatttagtgcagtataagaatgaataagagtgccatttccaaaagtgttctatcttacggttccaaaaattaacaactatctgtgaagtagtttctgacaaagttctacacatagggagattcccaagtcgtccagtagtctgacgataattttccccttagcactattaaatattttgtatttcgataatgacctccgaagtggaagtcgaaatgtcaataaatttcatttttaaattaattatatttccctataaaatagtaat

SEQ ID NO: 11457 - DNA, 624 bp, Diabrotica virgifera
  SmartBlast Evalue=7E-64; Info=Four wheel drive n=1 Tax= Tribolium castaneum RepID=D6X462_TRICA
gcccagactgagtttcgtcgcgttgggagcgctcttcttcagacctggaaatagagcggaagcgtcactgtgcgacctctggtgggtttttttgatgtgctgtgggacggtcagtttatcaccggacgcgctgttcagagacgtcgtcattatcttgtggtctttcggcctgagttcatcagaaaggatgaggttgcgcagtttgatgccgtgaggcttctttttagttggtacggatgcgtctgaactaaaggcatccaataaccaggcacacttcagcgaaaaatctatggattttctacatctatgaatgagatacctatgtataacttcggctacgtcgtgcatctgtatgtacatacacaccaactgaggtaaataaaagtccacctcgtgattatcaaaactaaacatcttgttaacaatataacacaacactcccggttctttgctattgaagaggtaatgcattgccatcgaaacgtcgaacactttgctctcgagcaatcgcaacataccggaactcttcggtgcatcggagctcgaacacgaactcgagctggttttagtccgttccgagtcatcgtcgttatcttcctcgcaatcgacttcttctttcgattc

SEQ ID NO: 11458 - DNA, 622 bp, Diabrotica virgifera
  SmartBlast Evalue=3E-40; Info=Protein CutA-like protein n=1 Tax= Camponotus floridanus RepID=E2B264_9HYME
caatttatagtaatttaatcagatcaatattttacgttttattatatcagtacattagaattaataactaatcagttataacttatttactagggactacatcgcttatccacttcaagtaagcctcattgccattctgaataggaagagatataacttcacaaaccgtgtaaggatgttttgattttacgaattcagttaaattatttacttttgatgtcctagtcttaatcatcattagtacttcagaatcttcatttattttaccttcccattcgtaaattgatgtaattttcggtataatattaacacatgcagctaacttattcttgaggattccatgggccaactgtttagcaacatcttcactgggggccgttacataagcaacagaatgttcgccactcgtataatgagcagtttgattcaacaacgatatttcaccagacatatctttgcttgctattacacaggatctcctaaaaaatccaagaaacaatgtagaaattaataatcctttttggaatatcattccagaaatcagtaacgttgagaccgctaaaaggttgtatatacttaccaataaatgtttgctttaattttaatcaattatctagattct

SEQ ID NO: 11459 - DNA, 625 bp, Diabrotica virgifera
  SmartBlast Evalue=1E-70; Info=NADH dehydrogenase (Ubiquinone) Fe-S protein 4 n=1 Tax=Tribolium castaneum RepID=D6WRS0_TRICA
gttaaataatcaaaagaattaaaaatgtcctctacattattgaggcttaaaaatatagcgcgatgtgcgactataaacggaaattggggagcagcatccctaagcacttctgcagtaagacaatcagagccccagttaaaaaatgatgtagctcttttaaacccagaggaagttgaacataagagaaagttacaaggcactattacggtagaaggaactacagatatttcacctattactggtgttcctgaagaacatgttaaaggacgtacagtaagaatttacgaacctccaaaaaattgtatgcaaagtggtacgagcaatattggtttttggcaaattgattttgatacaagggaaagatgggagaatcccttgatgggctggtgttcaactggtgatccattatccaatatgaaagttgacttttcaaccaaggaagaagcaattgaacactgcgaaaagaacggttggaaatggtttatccaagaaagtagtctggacaaaaaattcaaaccaaaaagctacggaatcaactttgcatggaatagacgcactagagtatcaactaagtaaaatgtaatatattaaaattgtgaataaagtttactaaattagaaaattt

SEQ ID NO: 11460 - DNA, 624 bp, Diabrotica virgifera
tttgcacatacatgaaattattcacgaattacttttcatactaggtatcttttttactcaaagaaactagtatcgcaaaataaagccgcttttccatagacaccgcaataaattaaacaaggataaacagtacggcatgtctttgatacatagggcttttcatggattgtcacttgtttcgagcctctgtcatatcctgtataatctgtgtataaaataaacatacacggattatacgacatatgacagaagctcgaaacaaatgactgtgaatgaaaagccctattgccacagcataatgctaaagaatcagtaggatccgcgaaaatcctttgttctctatgttccattttagtgacggcgcatcaaaaattgtagtccttcgcgcagatgaatgacagctaacggcatcctacgtttgaagtgattggtctttatcgtcgcgcagtcaaaattttgtctcatgagtagattgcaaaattctaaccgtcaaaattcgagaatgaattaaccaattctttagcattaaactgtgaccttgttcactataaattttgacgtttatcattttcagtgactgtaacattagcgcatttgttgaatttattggtttatttggttctt

SEQ ID NO: 11461 - DNA, 624 bp, Diabrotica virgifera
  SmartBlast Evalue=2E-26; Info=Tripartite motif-containing protein 37 n=1 Tax=Harpegnathos saltator RepID=E2BKN5_9HYME
aggttcacttaaatcactttcactgctactgctagataacattaaagaggatacagcggtatttaaaaggttaggagaacttagagaaacgctaagtccaagacgatgaggagaatttggcttttttgttgaattatctactttcccttttgaagaacaaggacattcatcggattttgtttgtgtatttgattctacagatactagacttttagcaaaatttgctaactcatttgaaaaagatttgccagcagggccatgagatgttgaagccactggactacaatctgtatctctatctggactgggtaacgtgtatatattctttactaacgaaatgttggatacatcagattgcttttttggcctaaggcttgatgctacagcattcctagatatctcagcagctaaacgttcctttgattcgttaatctgtgttatgtattgatgctgcacagtttgtaactgattaatataccattgttgatccctacacctttgataaaacgttggagctcttacttgaaatctcaagacaagagtatccttggcttcatttaaatatccctcacttgccaagagatcaagacggaaaatctattataacccaacattctcctactt

SEQ ID NO: 11462 - DNA, 625 bp, Diabrotica virgifera
ctttttagtcgaagttttaaaaagtcctgtgttatataccgccaaaaaatgaaatatttaattgtgtttgctagtttcctgctatttgctgctgctttgccagtcgatgttattgaagatgaagaaggtcaagaatatgctttggtgccgcttcatagagaaagaaggcaactcaaatggggtcttaaccaatcaggctacggtctcagccatagtggcaacttatttaacaataacaacaacagactagatggaacagtgagtgcatctaaagcatggggatcacacggattgaagcccgatactttcggaggtcgtttggactttgccaacaagccaagcagttcatctgcatttgttggagctgatagaactcgtggatacggtactgacgtcaatgctggacttaaatacaatttcctgcaaaagaaaaactggaatggagatattagcggacaatacggcagacattttggagggcctggcggtactggcaagccacaagctggtgtatttttgaatttgaacggaaagttttaaattagccactaatcttaaattcccgtgataacaatgtgttcatttttatactctgtaattttataaataaataagtattaccttt

SEQ ID NO: 11463 - DNA, 621 bp, Diabrotica virgifera
cctctgataaataagtgtcgctgccgctgtcagtcatcttaatttcaattactattataattaattgtttgactgtattttactggtattcctatttctatctgaatgttgtttgtttttatttataaaataaatatatgttttgcaatcaatttgctatttacagtaaaggtttaattcaaattgtttatgcacgaggaatttgacaccgatttcaactaggtcaaatttataaaaccattactaattaaaaaatcacttaccgctcgcaaaatgttaaatcaaaatccttctgtgtcctttgtacacaaacaacattcacaacactaaataatcctaaatcaatcctaaatcacttttaaatcaatttacatcacatatctaaatggttttcgtggtaaagcccgaatccgagttgtttaccgccgagtcacataaaatacgtgcgacctcctcgcttgcttcaactcaacaacccaactcttttttccattttattaaaatcagcggacacgccgactttcacacgcaatcacaacagtactataatttcgatttggcagaaattttgacattagccgtctacgagaacgcattaaatgacagtacacttcatttgcg

SEQ ID NO: 11464 - DNA, 619 bp, Diabrotica virgifera
  misc_feature (564)..(565): n is a, c, g, or t
  SmartBlast Evalue=2E-10; Info=Dynactin subunit 3 n=1 Tax= Camponotus floridanus RepID=E2A705_9HYME
aatatttataattaagggttatagtttacagtaacttctacaaaaactattttgctaataaaaatggaggaaattaacctggatttgttggagaaacgtatagaagctttggaattaaaggtgtttccttcaggagatcccagtaccattgccgacaaaaatcaaacaataacaaatatccttacacaagttcagacattcgttaccacagctctcacttgtagagaaacaataacgtccatgttgcagttttatggaactttaaacgactatctcgacccagctggtggagcagatgaactcgaggttgaggcaaaaagacattatatattgcagttacaccctgagatcaaagacaccctacagacacatactcgaattttgcagactttacttccctttgtggaatcagaaaacatttctaaagtggttgaaatgacagctcaattggaagaggcatctgttagtcatctcagtttgtatggagagtggagagatacaatgtacaaaatggtggtagctctacaagatttcactgatataatgagttcgattaaggtattnnctctcaattagataataccttgacgaatctggaatactcacttcaacctaaatt

SEQ ID NO: 11465 - DNA, 625 bp, Diabrotica virgifera
  SmartBlast Evalue=3E-18; Info=SSXT protein n=2 Tax=Formicidae RepID=E2AUD3_9HYME
gtaaaagattgatactaaattcatcttcaaaataatcaaaatatgttggagtagacgctatctggttaatacaaaaaaagagagatcttggcagtgaacaaaatgtctgctacatttgcgccacagcgtggccctaagcctcctcctgatagtaaaagccttcaaaagctcctggacgaaaacggacatttgatccaagttatacaagaacaccaatcaaagggcaaatcgcaggaagctatacaaatgcagtcgcaattacacagaaatctggtgtacttggcaacgatagcagattctgctcaaaatgttacagctttactaccaatgattcagtcaacaggacctgcacctccccagcaacccaaccacaacccaccaccaaatgatcaacaacataatatgaacaattttaatcatcaacagcaaccagctgcccttaattacaggcaacaaccaggcccacctcaacgtccaggtggtcctccagctccacacccttaccaacaaagaggctatcctcaaggacaataccaaaatcagtatccaccacagggtcccaattatcctccacaaccaccatatggagctcctccaaatcaaccaccaggatatcctccaaatg

SEQ ID NO: 11466 - DNA, 623 bp, Diabrotica virgifera
cggacttatatttatataacaaactgtcattattttttcatgtggaattgcccctcagagtttgtcatacttatttgctaacaccctgtataggtactgttagtagagcagacagatatatttgaaaattttaaatagtttcaattaaatgtcagattgatactagatgttttagttcctgtatgcagtgctgttatgtattattatatattgtaaatagtttttaggttgtaaactaaaaacaaactcgcatgaagagttactttattcatcttattgatagcgttcaaaaattattaggtataacaaattaacttaaaaaagaatttgttaataatataataatgagcagtggtccaagtgattcaagcatctgactaattcggtaaaagtcccgtggattaaaggctttgacattgaccttttctgtttcaattgtagaattccttttaatgccatacgtaaaattattccccatttcagttacctaccaaataaaaatgcttgcgtttgctttctgacagtttcccaatacgaactgattctacgtattaaataaaccaattacttgtctaaaatatcaaggaagcaaaaaataagatatcaaagtgtcgtaaaaacca

SEQ ID NO: 11467 - DNA, 620 bp, Diabrotica virgifera
  misc_feature (234)..(234): n is a, c, g, or t
  SmartBlast Evalue=4E-17; Info=Endonuclease-reverse transcriptase n=1 Tax=Bombyx mori RepID=D5LB38_BOMMO
ccacacataacactttcgtgttctcaatcttattgtgactgatagcttggggttacagagcattttaagcatgttcatgaagccagatctgctatttcaatgcgtcttctaatttttttgagtggtctagctgactgtttagctctgtgcccaggtatatgaagctttgggagctctgaagggtgataccattgatttgtatgttggaatgtcaacacgggaagtttttttccncggaaaattttacattttcatctcgtttctaattcttgttcttcatgtgccttgtccgttgtggaagttggctatcatcatagcaattttaattttgtttacagcgtgtctataactcgatcgatgttagtccaaaccattggcgtaagttttgaagccatgagtgtcttcttcttccgggtccacgtttactctctattttaccctatattatcagctgcagtatacgatatttatcatgtctcataatatatgaccgagctgttcacgttttcgttttttaattgtgaaagatatttctttttgtttccccattcggcgcaatacctattcgttggtggtttgagtcgtccagaatattttgaggatacgtcggtacacccaca

SEQ ID NO: 11468 - DNA, 624 bp, Diabrotica virgifera
  SmartBlast Evalue=2E-25; Info=Glucosyl/glucuronosyl transferases n=1 Tax=Aedes aegypti RepID=Q0IG98_AEDAE
ttttgagtcgctgaaggaaagtagtcactttgccgaattctgctaaagaatatggaatataggataacgccacattgtttccaaaattttccgaaacaatctgaggtagtagaaaagctgttacttccactgcaggaggatagtggaatctttgaattaagggcaaagtacatggaccgcaggtgttgtcaaatataatcaaatcaaatctataatcctttggatagtttagaattgtcttcagagcatctgagtgcaatatatagttacaactaataaggctgtagtcgacaaatcccatgaaatgcttaaaaactgtcatttcaaaaaatgctaggtaatccatttcgtgatctagctcctcaacgaaacctttgatatcgatgggatgataatttttgtataatttattctccactggggacccagctaacatagttatattgtgcctttttttaaaaggccttccgcaagttcgtaattccatatttgatgacttggactcgcaatattactgacgtagagaatatttgatccaaaaactgaatttaaactaaaatatagtaaaaaacgcactgtgtgaactgcatactttaaatcacaggaaggagctgataaatacgc

SEQ ID NO: 11469 - DNA, 615 bp, Diabrotica virgifera
gttatgaatccctcggtgtttttatatttgtttttaagtgttctgttacttgaagtgcaatcacataccatttataaaatggccaacatagcaatattaacttacgttcaagacgtggtgtattaacattttttgaaaagatcataaatagtgcccacacagtagtggaaaaggaatacatgttgcagtcaacacagtaaaaacagttcaaaataaagtaaaaaccgatatacaaaattttagatgcgggttgcacaaagttggtgataaggtttttcaccacaaccatgttattgatccatgtagtgttgctaagaaaccaaaggaaatattaattatgggtataactttatctgaaagtaatgatcatataaaaccagaaagcgaggatataaatactactacaataatcaacaatatagatgaaagtgtaactgaatttcacccaaaaataaaactaattctaataatgataacggtgacaaggacattcaaatatattttggtgatgacgatccatcgaatatcaagaaagtgaagaaacctgttgaagttaaagagaggatcaaaatgctgaagtggttaatcaattgattttttctgataaaaggatcc

SEQ ID NO: 11470 - DNA, 623 bp, Diabrotica virgifera
  SmartBlast Evalue=2E-51; Info=Phosphatidylethanolamine-binding protein n=1 Tax=Culex quinquefasciatus RepID=B0WND8_CULQU
caaactcaacagaatatggcaaaaagcgtaatttttcttgtgttatgtgtactactagttgcggcagataagacaaaagatgtgacaagagaactagaggcatttaagagcaataaagtatcccccgatgtcgtatcagccattccagacaaactattacaagtcacttacaaggcagataagaaagttgagctgggaaatgaacttacaccgactcaagtacttgaacagccccaattatcgtacgaaggagataataaatctttttatacattaattcttactgatccagacgcacccagcagaagcaatccaaaatctagagaatggaatcattggctagtagtcaacatccctggatccaaaatatctcaaggcgaaaccataagcgactatgttggatcagcgccacccaaaggctcgggactccacagatacgtgtttctactatacaaacaacccgaaaaactgaaatttgatgagcccaaacacagccctaccgacggaaatcgcggaaaattcaacaccgaaaactttgcgaatgaaatataaattgggtaaccccatcgctggaaacttcttccaagctcagtgggatgattctgtaccagctagtcacaaaa

SEQ ID NO: 11471 - DNA, 623 bp, Diabrotica virgifera
gatttaattagcttaattttgtgtaaacctcttattgacaaattaattcccaactttttagtggaatttttaattgttaagtttctaattaatatatatatctaggtaatcaaaaatagtactttttcaaaaaatttttttaagatgaaataattacctttaaaattaggggcgttaatcgcacgtaggaatgctgagttatacgtggaaaagtccattcgaatgcctattttgaaatagtttttcacgaaatttgctaatgtagatataaaaatatcggaaaagaaatgaaagtcataatttacacaacagtcatcagagtaataattacataagcggcagaaacaagacgtgccacagagaggacaaaaattctgctagaaacagcatagatgaaaaccattcgaaaaatcaatggtaagataatatgggatatacgagtatattctgtgctagaagcacatatatacgacggatatgcaaggtagtgaacattaaaaactgtgtaagaaacaaaagagtagaatggtacgaccacatccgaataacaaaaaatagagtagtaaagttggaactacaacttataggtactggaggcacattgaaaaaatagacatgtcttc

SEQ ID NO: 11472 - DNA, 622 bp, Diabrotica virgifera
  SmartBlast Evalue=6E-26; Info="Enhancer of split mgamma protein, putative n=1 Tax=Pediculus humanus corporis RepID=E0VQB9_PEDHC"
agatgctgacagattcagagcgtggtacacacactgtgccaatgaagtctccaggtgccttgcttcaactcctggtgttgatatccaacttggaaccaaactgatgacccaccttggacatcgcctcaatgaaatggataaagtatctcctctagttattcaagtaagttcaccatatacacctcctggttcaccaaacctagaaactgaagtgcctcaccattacacaatgcctttgacaccagcctcatccagttcttcgaggtgtagcccctcaccaaatcaacccatggattgttccactgcaggtttgctgaaagttgcaaagcaagaagcgatgtggaggccttggtgaaacatagactttatttttttgtaaatattcaaaaatctcacttgtgtctttcgatgtttaataattgctcaattgctttaatcttagatttaagatagagtcagatctcttccatttttgaaaagctttaaatttaatgttaggtaaagtagagatagaatctattaatttatttgtgatattatatgaagttggtacctgtgattttgaaagcaatgttaaagtaagcaatcataatcaaaaaatgtttattgatatgtttgatga

SEQ ID NO: 11473 - DNA, 623 bp, Diabrotica virgifera
  SmartBlast Evalue=4E-24; Info=Ankyrin repeat domain-containing protein 17 n=1 Tax=Harpegnathos saltator RepID=E2B848_9HYME
ctgaggcggtactgccgttactggtgttactggatctgttcggtggattatcggagcgcatgcgcgtcagcgcagctgcggcttcgtctaatgcacaacttacactggatgtgagacggcgaagcacttcggggtcgcctaaatgcttaccatctttggcggctagctggccaataccggctgcttgtaagagctgctctagtctcgcctgggtttcgggatctacggctcggtcttcgtcagggttcaagagaaatttggccgcctctacttggggatcgtcttcgaactcctgatcaatcataaatgattccacctctgatacactatcttcctcgctttctgatgtttctgacatatatctgcgatgttcggaatacgtttctgtttctgatttagctggacttgaattggatgtcgtcgattggggagtagacgatgagttccctagttcgtgtagaacagtcactttatctattttcggattatctgtagaggattcttgcgaaacattctgcatgttggcatttcaattcaactatgaacgtttaaattgtctcgattttactattaaatacactgtacgcgcactaaatgcaagcacattcgttcacataaaattc

SEQ ID NO: 11474 - DNA, 620 bp, Diabrotica virgifera
tggcaatatcattttgaagtcttctaatttaaaatgtatatgtctgagttgccgatatgagtgggtcagattaaataaattattcgaagaattttttactaagtaacagcatttttgtttgatttagtagtgttttgcattttgacggcgacacccgatttgggcgacgaaacgttaatgaaattatttttttcaatttaattgtggcttgtttcccatctaatctaaatagttaattacgaaaatgatttatcatgatatttagttactatgtgattaccatgatgttctcttttcttttataaaattgcttaaaacaaaatgtacatcaatgcttattaatcgtgtgcatatcatactagaaattaaaccaacaacgaccaaataattattagactgatattaaagttagttcgaaaaattcggccaacgtattaaaggtggcatttcataaaattaatacaacacatatttgaaacgactggtttgagttggtcgcttgaacgtacctaacaacaaaggatagactcgaaattgttactttgctttggtcgcatagcttacaacgaatgactgtttatagtatagttaggagaaccactcacttgatcaagtcaatt

SEQ ID NO: 11475 - DNA, 623 bp, Diabrotica virgifera
ccattgtgttgggggaattatgcatcttttcgagttgtgtcacttttctcccggatgagtgagatattttttttgtcatctaacgataaatacttgaactataaacgtaacactttttgagataagattttgtagtcttcttaaactgttggtgcaataaagccttttttgagatgtgacactatttgagcggaggtgcgatatgtcctaatataaacataaaatatcgctcgacgcttaaacataaaatattcgagatactaataggatatatcgcacctataaaaatatttatagttccgtgtatgcaggctcacgttcactcattactataaatagtgagcgatatttctgatatatatgagatattatagtatagctctccttgcgtaacaagctttacgccttatatctgtataataccagaggttgagaatctttatattaattggaaatcagattttggctacaattaaaagactcatttctgtatttccataaatccataaatatatttttacaagtgtctgattgcatttattatgaatttgggacaattatgataaactacacattttatattacaaactgtgcaactgtttatatatttaatcaatttcata

SEQ ID NO: 11476 - DNA, 621 bp, Diabrotica virgifera
  SmartBlast Evalue=1E-57; Info="39S ribosomal protein L47, mitochondrial n=1 Tax=Camponotus floridanus RepID=E2AMP1_9HYME"
agaaaattaaaaatatataattagaattctactaataattttacctttttaatgaaataaaacttagaaaatggataatttaaataaaatagctagattgtttggtctatttaataaagttaagttaaatcatacatcaaactttgtaaatacgccatgtacaaggaatttcaccgtaactgcagtcaaaagagacctaatggaattttttgatgacaagaaaaattggggagttgatgaggtaaaatgtggtagatcttggacaaaagatgagttgaggctgaaatcgaacgaagatttacacaaactctggtatgtactcctgaaggaaagaaacatgttaatgacaatggaacaagaatgtaatgataaagccaagctatttcctactccagaaagaattgataaggtagctgattccatggaaaaccttgagagtgtagttagagaaagaaacaaagcatatcatcagctagagactggtgagacaggtgaaaggccaggtaaagttcaaactggtgtgtttggacttaaatattattacaaaatgactgagcatgtcatgcccaaatacatgaatacaaagtggagggaatcccataaattctataaatataaata

SEQ ID NO: 11477 - DNA, 623 bp, Diabrotica virgifera
  SmartBlast Evalue=1E-20; Info=Inter-alpha-trypsin inhibitor heavy chain H4 n=1 Tax=Sus scrofa RepID=ITIH4_PIG
tgccagttccatcgatgagctacctgcttgaagatacggcgtgttcaagaaagctagaggttgattttccctgattatcaccatgacctttagttttttaaccatttgtccaggttgaatattgctaatgatttggtactgtccattttctctttgcaatagttcttcatattctaatttaaagatgaccttgcttaggggttctacgttgacggttacggtgaatctgttggaatttttcgtactcacagcgacatgtccagcactttgtcctgttgctacagactcgtcataaattttttagctatctccttttctttcacgaatgccttgtattgtattccatcaatttccatagaaaatcctgaaataaaagctctatctggtagaaccaccgaaaaagctgtttgctttgcatttctatctgcgttttccacgttacttacaacactagttactgcaaaatggttagatacatttgtggtgaccagaaattctttaattcttggaggatcagattcggtattccttttaacaattgagggtcttgaagctgtaccatccctaaacactacatactcatatgcaaaactttgtcctataaataatattaaacaaaccac

SEQ ID NO: 11478 - DNA, 623 bp, Diabrotica virgifera
  SmartBlast Evalue=8E-63; Info=Putative glycogen [starch] synthase n=3 Tax=Aculeata RepID=E2BGV0_9HYME
actagtgcgattgtttatctcagttgtgaatttaaatagtacctttttgcatccttcttcaaaacgtgttagatttttaagttcaaggcccgtagtttaaatatttcttgttttattttcgaaaaaaaaaagttgagtgtaaacgtcagtgacaatgtcaagggaaagggcgaacagaagattctacagggtagaatccacctcaaatttattatcatgcttggacagagggttggccgctgaacaggaaaaccgttggactttcgaaatagcatgggaggcagccaacaaagttggtggcatttacactgtcatcagatcgaaggcatatgtttcgacagaagaattgggcgaccaatactgcctcatgggcccctacaaggaacattgcgcccgcacagaagtagaggaaggtccattggggtgtgaagctcttaataaggccatagaggctgttaggaacaaaggatttagggtaatcaccggaagatggttggtcgatggtaatccacagattattttatttgatattggatctgccgcatggaaattggatgaatataaacaagagctgtgggaaaaaactaacgtaggagttcctcatttagatatagaagctaacg

SEQ ID NO: 11479 - DNA, 621 bp, Diabrotica virgifera
tccgtttaatacacctttatgtttctcaaatcgatacataaatgccatcctaaattttttaaatatctgtaatgggtagcaatctgcatttaagctataaaagaaatatacaaacaaaatacgaagatatataagcattttccataataatactgttccaaactcctaaagttcaagatgtgacgagagacaggtcacattttgaaatttggcatgtctgataattaaagatattaaatatagtaaataaagtatgatacaattggttcaaaaaggcctaccccagacatccaaagtaaaagttttgttccaacaccaaattgttctattcgctccgtgcgtgaccatggtggggattatttcacttcttacggtgcacttgcaaagatgtggttgcacagttcaccaagcatcgggtaacgctgacttattaatagttttaacagctacagtggaaccccgataagtcggcccctgataacccggaagtccggctaatccggaccgattttcatcagacaaacatttcaacaataaaaatgtatgtaaaataatatttgagagataatgggtatttgtgtaatttgaactatacgatagtaaaaatgcctcatggcacac

SEQ ID NO: 11480 - DNA, 623 bp, Diabrotica virgifera
  SmartBlast Evalue=2E-69; Info="Serine-threonine phosphatase 2A, catalytic subunit, putative (Fragment) n=1 Tax=Ixodes scapularis RepID=B7QHP3_IXOSC"
tccataagttctttcataaaattaagtgtcactttaccatcctctaattcaggccctgtatattcattttctatcgtcattgcatcaatattaatactgtccgctatatttttcttattgtcttcaactgctatggctttttcaaatgccaattttttgactactttgttgcattccatatacttcattttagcgtctttatcatttggtctcactttagttacatattcataatcctttagggcttccttaaattttcctaatgacatgtgagcagcagctcgtcgatagtaacctttcacataagttttatctaattctactgatttcgaggcatctgttaaagcatagccaaaacattcagtttttagatatgcaaagctacggtttgcataataaatagctacagtgggattcttttcaattgctttggtataaagttctattgcattatcgaaatcttgttttttaaagtattcattagcttcggacttatatttttcggctattttcgcgtcttccgctgtaacagattgttgagtttgttcttcggtggtcatttttaattatttcgtactaattacaattaattatatcctttttgggatttgtttaaccattac

SEQ ID NO: 11481 - DNA, 622 bp, Diabrotica virgifera
tccattgtgttgggattaaaggacgttatccatttgttatactcgagagaggtacctctaggaataattaaaacgttcgaaaacatttaccagaacacaataaaagtaaaagtgtacgatgaattaactgacccaattgaagtcggcaatgggataagacaggggattccttgagtcctttattgttcaacctgatcatggacgaaataataaaaaaagtaagaactaaaaaaggataccaaatgggagaaaaacaacttaaaataatctgctatgtggacgatgtaatactaatctctcaaagtgaagatgattacaacgtatgctgcactaattcaacataatcgccagaaaatttaacatgttaatttccccacaaaagacaaaatgcatggttataacaacagatccaataagatggaaattggagctggaaggttagataatagaacaagtgatggagtttaaatacctaggcatcacactatctactacggaaggctcgaaacagaagtggaagatcaagtgctcaagactcaatatggagaaataaaaatatcggaaaagaaatgaaaggcagaatttacaaaacagtcatcagaccaataatgacatacgcggc

SEQ ID NO: 11482 - DNA, 621 bp, Diabrotica virgifera
gtcccgtttttatttagcttattgtgtataagactcgtcttgctatattttcatctgctgattattgactaaagtaaagttaaatatttctaattatcgaatttttaactttatattaaagttcaataacaattttcttaaaaaacttaatttttttgggcttatatgctgttatttggaattatatcttctgactgcgccacttattctcaaaagcaatacagacacaagcatttcttgattgaaccagcttcctgaaactgattcaaaaatttgaaattgtatcgaatctaccgaacataatgtttaaccgaaacagtagttcgtaagctatcgatcacataaagttatgtttatacagagctatgttgcctaactacttacatttgaagttggcgaacaaaaattaaaactgctatgaaataaaaaatatatcaatatattatattatgtacaagattacaggaaaacttcaaatgcaaaaattcctgtttatactttttttatactgtgtgtcccacaatattttgggattgctataatcgtttaaaaaaaattcccttaaaacgttattccataaattgtatttgtcagtgaaataatcgtttgtattatctgagc

SEQ ID NO: 11483 - DNA, 622 bp, Diabrotica virgifera
  SmartBlast Evalue=7E-37; Info=Lysozyme n=3 Tax=Tribolium castaneum RepID=C8C411_TRICA
aaatggtcgtctacaaagcagcattcatattattagttcttcctttggcatattgcagaatctacgataaatgtactttagcgagagaattactgaacgtatacaaattccctcgttggcaaattccgacgtggatttgtattgttgagcatgaatcacattttaatactgctgctataaactcgcaaacccatgacaacggcctcttccaaatttctcaaatatattggtgcgatccaccaaaccatcctcaaggatgtcaggtacaatgtagcaaattaagagatgatgatattcacgacgatgttacatgtgtcaaaaaagtatacgatgaattccaaagaaccaaaggtaatggttttaaagcgtggacgacttatgacgcatattgcaatggaaacaatgacggatatattaaggattgtcacatataaaaacttacgtacctacctatcgcatgtggacaagaaaaagaataactagtatattattcaaccagcgtgtaacgatttacatacgagtagaatactatactttttctacgaccttttttattagtaaaaaattattaaactttaaaatgttcgtttatttataaatataactaaactaattttttaaa

SEQ ID NO: 11484 - DNA, 617 bp, Diabrotica virgifera
  SmartBlast Evalue=5E-24; Info=10G08 n=1 Tax=Ips pini RepID= Q5FYF7_IPSPI
gttgtacacatacaatttgtagcaatggaacgagttaaaaactttgaagaactaatcagggattacatcggccctaacaaaactatagtggaagccaaaaccggtgacttaacagcgcctggagaaaactatttaagtgatatgatcaaaatcgatctagttttaaaagacacagttactaataagactgaagatttaaatgtggtagcaaaattggtaaccgacaaccatgtgatggggcccacgtctgatctgaccaaagccgaagtatatttctacaaagttgttgttcctgccatcaagtccttccataaaaagtatagtttaccgtatccttcattttatccagattatataggaggcagaattaatttgacaggggaagttgataaggctgataaagatgctgttcttgttttggaaaatttagtaacaaaaggttacaagaatctggataggcatgttggatttgatttggacacctccaaaatgattttgaaagatttggcaacgttccatggcgtaccgttagcaatgaggcttttagaacctgaagaatttgggaatttaactaaagacttgaaacttccatttccggacgaaccaccgaaagacaa

SEQ ID NO: 11485 - DNA, 621 bp, Diabrotica virgifera
  SmartBlast Evalue=3E-19; Info=Putative defense protein 1 n=1 Tax=Antheraea mylitta RepID=DFP1_ANTMY
ggtaccatcatggctagaatcattcttctttccatcgtgctctccataatctacagcagcgatgccttttccggtggagcacctccaacagtatgcgacgatatgacccctgttcacttagtaggtcctaaaacctctaaacttccatacaacgtgaccgttgatagaagcgaagtaaaaggaggtgaaattgttgaaatttcaatccaaggatcgtataagggtgtactagtagaagttaggaatggtaagaaagcagcaggcacctttattgtttccagtgatgatcgtttcgtgaagacaattgactgccatggatcaaaaaagaatgccctaactcacaaaaactctttcactaaaaaggataaaacattcaaatggaaagcccctaggacaccaggaaaatatactgtcatggttaccgttgtcaaagaggcgctcactttctgggccagaaaaccaaccgcagttataaatgttgtgtaaataattattgtaaaaataaaataaatgaacaatcaaaacgagagttatttaatcaactagaagattttatacctatttctttttgtcaatataaaaatttataaacatttatttttgtcaatacacattataaat

SEQ ID NO: 11486 - DNA, 622 bp, Diabrotica virgifera
tacttactattaaaatccacaaaacaaaagaccatttgtctttccaaggtttgctaagattatatgattttcatatctacccatcctgaagtttcgtgttttgatgatatccattaattttctatattgtatacttacttcacatttcacattgctcagttcctgtagaacctggatctgatcaaccatgtgcttccattggtctcgaatgtcacggcatcactctttcagtcccgaacaccaggctgtaccagatcttctcaatgtcgtccagctatctccttcgtttctttccagatggtctttgcgaggtggtgaatttcaagaactcctcgccagcatcttcttcttcaagtgccatctccgctacagaggtcggcaatcatcatagctattcggactttagagacggctgctctgataagttcatttgatgtacatcctcaggtacattttcttacgtttctttttccttggatctttctctgcataatgagttggaacaagttatatctctctccacgtaatatatccgagatattttaattttctggtttttattgtattgaaacttccgtttcaattcatctttctcaggagcctctttgtttgtgacgtgttc

SEQ ID NO: 11487 - DNA, 621 bp, Diabrotica virgifera
  SmartBlast Evalue=6E-22; Info="Titin, putative n=1 Tax= Pediculus humanus corporis RepID=E0W001_PEDHC"
cctgcttctgaatgcgttctgctacttggtcacactcagcttgagcaaatctcaaccgttctccaatggtttgtctacaagattcatgttcttgtaacaccctatctatagacgaaacatctttcggatacccagttttttctaactcggcgttgtaaatttcaaccttcttgtcaatctcttccaagttcctgaagtacccaattaaaacttgggacaacacttggtaatctgatgaggtatcttgaagcttctggccaatctcatgaagtttgttcctgacagctagattggcttcgtctttgttttgggtttgttggattagttgttctattgatttgatcttctcgttgacttcggcttgagcttttcggatctcgggtagaagagcgatgagtttttgttctatgtggtctgcgatttctttgggtttagttgagtccgtcgttattacggggtaaagcttgttttcgagtttggttgccaaactaattatcttggagcactcctccatggttaattcgaggcgcaccaggagttcgcgtttctccaccacctcggtgtggaaggtctgccagtttctcgtaacgactaactgtcttcctgatagtctctcaagaa

SEQ ID NO: 11488 - DNA, 622 bp, Diabrotica virgifera
  SmartBlast Evalue=6E-34; Info=Retinol dehydrogenase 11 n=1 Tax= Camponotus floridanus RepID=E2AS80_9HYME
tcaccataagctctcataaaagaatactttctgtccgtaaagtttacatccttcaaatcaaacgcaccccagagcattgcgtgtgaagccgacgaaacatttactatcctcgctggtgtactcttcattagaagcggcattaaaagtaaagtaaacaaaaagtgacccaggtgattggtttggaaggttagctcgtatccatcttctgtcttcgtatatgggacaccgatgacacatgcgttattaattaaaatatccagttgtttttcggtttttagtattgcttcagcacattccctcaccgattttaaacttgaaagatctaagtggatggcttttaattcgcccacatttggggattgttggcaatgtatcttaatatcttctatagcttcatttgctttgaccatatttcgacatgccaataaaactcttgctcctcgttcataaaggtttttcgcggtagattttccaattcccgtattagctccagtaacaagaacagtttttccgtttaatttcacatcagaattacattttccatgtgactgacccattatgaattaatacatacaaaaatccagaacgtatcgtagagaaaaatcgtagcgaacaacttcgc

SEQ ID NO: 11489 - DNA, 621 bp, Diabrotica virgifera
  misc_feature (601)..(601): n is a, c, g, or t
cccctttttcgtttgtggttcctttaatataacatctttgctatatgatatattcttcatcacatctaaatcagtttcacaacgagttaaaatccgtttcacgtcgactcattttgaatcacagtgtgcttcaatcgtaaaagtatcagatggtattttttatacatcgtaaagcccaaaaccaacagttatgtatgcttcatatactctgcagtacttagaggaaaaattatatctcctccttttaatgttgttggcaaatattcacatcgtctccacaagtctctgtgttaaactaaaatcgctgaactagaatctagactgcaatcaaaacattatcgtatacatccaacacatatatcaaaagctgcctttcactctgttaaatacataatacactaaaacctaatgagcatctgataaatccaggaaacagctacgttccccttaaaatatccacctaagttaacgataacaacaaccattaaacaaaagagaggacatgcttgatagcaacgataaaaactcacaactagcgatgctatcgctatttggcgatctttaagtaactaatgcctggttgcaccaacaaatcacaagntccagcttagcccagctcag

SEQ ID NO: 11490 - DNA, 620 bp, Diabrotica virgifera
  SmartBlast Evalue=7E-12; Info=Putative uncharacterized transposon-derived protein F52C9.6 (Fragment) n=1 Tax= Camponotus floridanus RepID=E2AL50_9HYME
ataacactgtactgtttaatcaatggagattctctcagatacatgaaatgttgtttttgcatgtgtcttcaacattcgagtgtagaaatattaagtagttacaaattattgtttagaagcaaatatctactataagaaggattttatattggcctgataaaatgttactttttaaataatataaacaagaacttaaaaaatattgttgttgtgttatgttgaaaaacaaaaagataccaataaatctaaagaaatgggtattctgaatagttgtattctaccgattgtgacctatgaaattgagactattacacttacagagggccatcaaacaggctatgttaggagtttctctgagacaacatttacgaaatgagtacttgtgaagcaggacgaaggtagaagacgtaattggaagaattgctcaattgaaatctaactgggtatgacaggtggcaagacaaaacaacgaaagatggatgagaaccattgtacattggagatcacagtcgtagtagaggaagactcaacaaaaacagtggctagtcgacatcaaagcaaaagtgaagaagaaactggcactaaatagcacaaaacagaaaagagtagagaactcttca

SEQ ID NO: 11491 - DNA, 619 bp, Diabrotica virgifera
gggaaataatcaactcaaaatgaattcaaaaatctgtttagttaaaaatccttacaactgtaagtatattgtgatctaaaataccatttctactacggatttttgctgggttttctcttatatgcactgtttctttctttcttccttcgttcacacttttatttgaattaaccacttctttattaggtcgttgttttcacatttcgccttgtttccctcttttcattctccctcacttttatttgacttaaccacttattatatcattctatacacattttcccttgttcttctctcccccttttctccacacttttgtttgacttgaccacttcttgttatgcagttctttacacatttttggcttgtttccttctaccacaccttcatttgacttaacaactccttgttatgtcgttctttataccctttccctttgtttctctctctctcttctttttacaacacttttatttgacttaaccaattcttgttatgtcgttttttatatatttttcccttctagaaattgatgcaaaggtgtctaggaaacgcaaccaaaataccgcaaatataagtcagtttacttgtttttaaatttttttgaatagaccatcct

SEQ ID NO: 11492 - DNA, 622 bp, Diabrotica virgifera
agttaacagtgaataacatttatttattgtagttttattattgtagtttttttatttttaactggaaacactggaatatcaactgctaattattttactataattttggactttctcaatattaataacagacttccaccactgatatgaatatcatcttgggtattcgctattgtgatttaaatggtaggtagcagttctatggactctagccgatacgatggatgctgataatgttaatggatctaacttacagaagaagatcgtttcgtcaaagatgcatcagactcgaaagttactaacacaaaaagtgatgggggaatataataaaggcccagttgcaaatctgggtaccgactatgaatggaaactccattgcctatttgcagtagccgcatttaaacattttgaaaactggagcttggcaaatgaatatatagacgctggaaaattcgacgatttggtatttaaaatgaatgatgagtgcttattactacaggcaaaatttaaggaaaacaaagaagtctccaatcagaattctggtcaactaagccaaaatctgataattttagtatttacaaatatattctgtcatataatgacataaaatggaagtttaaag

SEQ ID NO: 11493 - DNA, 614 bp, Diabrotica virgifera
gactacaattttaaatgcacccgtttttatttaaattttcaaatattcaaaacaaaagtttttctacgcgcacttttcacaaagttcgcgcgtgtcttggatcacagagcacattggccgaatttttaaaataaaccagtctagttcacatgataggttttaacttataatgcagcgtcactatacagagatttaaaaaattacagcgaattttattcaaaatacatacatacacttctccaagaaattaacgcaccgcaccgccttaaaaacgggtcgtttttaatgcgtcgattttcctaaacctgttatccgatttaagcgattttctaaatatgttatagccctattcttcaacaatatcgctgtaataatattgtttctagacaggtaaactagcattgtacaccggctgtaccaatcaaatagcatttataaaatactgaaattaaaaccccatgtatagcctcatgtttttttaacattctgttttttaatttacacgcttatgttggataataaaaaagtggggcactttcagaactagccttgtatttcgcccaaacagggtgtttttaaaaaagtatggcaaactttaggggtaattctgcatg

SEQ ID NO: 11494 - DNA, 617 bp, Diabrotica virgifera
ggtcctcctaaatataattgtttcaaaagtactaataaggttattggctttttctgtcatgatccatgtttctgcgccatatgtggctatggtcatatgatggttttatatattttgaatatacaaagtcatcgtaattgtcttttaaaccacccataaaacattacaaaacctgacatttttagaaagaagacatcgaggagaatccaaaaagtgtaaaaatatacaggatgtcccattaaaaaaaacgaagctataagcaacttccggtataaccggaaatagcaactagatgaaaatattttcattaaacagctcactcttcaaaaccccttcattccaattttcatggttcagttgtctttagttctcgagatatttctaattggccgtctatctgcctcaccctgtataattgggatatagcaatgacgtatgacgtagatatattatacgccatacgtcaaggatacgaaaaaaaaaaaagaaaagcgatgaatagccctattaacagctgtgttagctcagttccattactagttactagttagcctggtagcgaaccaaacagcaacaatcatttagtaataattaacaaccctattttccaagtgata

SEQ ID NO: 11495 - DNA, 622 bp, Diabrotica virgifera
tctgataacactttgaatatacataatagttagcgcaagaaaaattttcagtagttctaaactaaaactatccaagtaacgatgaagtggttcacctgtatactccttgttggtgtctgcgccagccaggtactattagctcctaccgaggaaaaaaaagatttagctactgttttgttggaaagagcagctgcacgtgccgaagctatcgccaagagaatcgaacagagcggagtcattgacaaagcaatagctggtgctgaagcaattggcaaaaaaattgaagaaactggagttatcgacaaagctctagctgaagcagatgctcttgccaaaagagttgaacaaactggagtcatcgacaaggccaagcaaacagccggacaactttacaaacaagttgaaaacagtggaatcattgaaaaagctcaagctgaagccggcaggttatataaatcaattgacgataccggagtcctaaacaaggctaaagagcaagctaacgcagtaatcaatagcccaattgctgagtcagtcagacaaaaaacccaccaagttttggagaacgtgggagaatcaaaattaggtcaagcaattgctgccaaggcagaaccttacgtgc

SEQ ID NO: 11496 - DNA, 615 bp, Diabrotica virgifera
actataatttttctttgagatgatcctgtcgtaagaatgccacacgtccatttagaataaaaagtctaatagttttcgatatattggagaaaattgatattcattttgtggcttcggggggctgtagcttttttatgtgcatatttgtactgaggtgggttgggttcattcgaactgtttttggtcccagaatatgtaccttggtttgtgacctgtatttttgttacatcctgtatattgaccatcttgtcttttattcatttaatccaacgtcccgagatctgttatgagttacctgttcagcatttttccatttaaaagcgactgatattagagggaacggaatatttttttaattcttctttaccatcatttcggtatttttgttatttatctctattccaaactcattgcatgctttaaactgctttgtcagcggtaaatatttggatgccattaagatttattcccgcagtgactttttctgctgaatagtattttttgagtacatgtatcatccctttgcttatgttaatattgtttgagacttagtcatgaattctatctaatcctattgttttgttgccagttctcatttgttattattcataaaac

SEQ ID NO: 11497 - DNA, 618 bp, Diabrotica virgifera
  SmartBlast Evalue=4E-39; Info=Sugar transporter n=2 Tax=Aedes aegypti RepID=Q16ZD3_AEDAE
tatagaatgtactatcttgcctatataattggatattgaagataaaacctcgtaaggataaaagccaaaaccaattaacggtacctgctgtagaactagtaacactcttaatctcagtaggaaatatctcagatgatatcacccacggaattggtcccaatccaagagaataagctattataaacaggcataaggctcctactggtataaatcctaatttttcaataatattgtcgcttatatcggttctgtctttcagagtgaagaaaatagcaagaagaaataggtttacggtaacaaacaacgccgatataaacaacaatattcttctaccaagtttatctataactaaagaagccgcgaaagtagctagaacttgaaataatcctaccataacagaagcacttttcggatccaagtgcactcctgacgtcttaaagatatctgtggtgtacagaataaccgcgttaacaccgctaaactgctggaaaaacatcaaagaagcagatataataaaagccttaatgacagatccttgtttgaaagtttcagttagggaaatggttgtttggctactttcctttaaatatccttcgatttcgttgagttcttcatcga

SEQ ID NO: 11498 - DNA, 620 bp, Diabrotica virgifera
ttgtacttactgtttctgaataagacatttaagatatccctagctaatatatttacttctgatccagtgtccatcttgaactcaatgtctttgttgtttatgttgaccacttcgacccattgattacgatttctactgttgattgctccaactcctttcactgtatgcacacatatgtcatcatctgttgaatagccatcaatgttctcatcatgtcttctaatttctttaaccttttaacattttgtcttttatctctttgctgattggacatttcagcaaaacaggcattactaaagtgatttgctccaccacatttaaagcaattttttccaaacgctgggcactgggcagctacatgtttacgtttgcactttttacacaaaaactttaactcactttgtgtatttccactgtcttgtctattttttactgcatttacttccaaactttcattgtttcttacagattctaactgcctttttgtatttcagagtttctgcatatctctattgctgtttcaagcgttaacttttgagcatttaataatttttcttgaactgatggactatttgttcctaaaactaacctatctgtcttcctgagtatcatattcacag

SEQ ID NO: 11499 - DNA, 620 bp, Diabrotica virgifera
actcttgatggtagtttagtcactactgaagaccttggtgaaagtattgaaagagttagtgcagagaatcaagttctggaagaatctgtagtaagcgaggagggaataacagatatgtccttacaaatatcagataatagtgtgaatgcagaaactgtagaagaatctatgcattgtgttgtaccagaagctactgagatagatcttcctataggggtgatctgattgagttgcagaattatgaagctgagaacaatcaacaagtacaagatcactatatctttacggaagaatctagttctgcaccatctgtttcttcagaaggaattccagcaagccagacagatgatgggacaactacaaattcagataaacctacaaaacaaaggcggtttcgtaaacctgtacatgacttacctatgcatttgataggacatgatataagtaaaccagttgaggttgtcccaaatggaaggcctttaccaaaacctaggctcggtgttaagaatgtattagggaaaagccgaaggaagaaccactacaggatgagcagtcagataatgaagatgatcctctatgtccaaaacatgaaccaagtcaaatatctgctactagatgat

SEQ ID NO: 11500 - DNA, 618 bp, Diabrotica virgifera
  SmartBlast Evalue=5E-55; Info=Sugar transporter 10 n=1 Tax= Nilaparvata lugens RepID=D4AHX5_NILLU
aactaagaaccatgggattgatccaggtccaatggcgaacatcactacgaaaatcaagacgaaaagaacacagaagatgccagcagtggaactaatgttcacaaattgcatgccgattgtgagacacaaggtgtcgatggccataccagcaaaccaactagcagcaacgtttttcttccagctctttctaccaagaagagtgagatgatggtcataaatacgttaacacctcccatagctaatgtggcgtaagttggattgtcccctttaagaccagccatttggaagatggtacttgagaagaacattaccgcattgataccagaaagttgttgggcgatcataacggtcaaagagatgatcagaggaatccttagtgtagtgtttgtaaccagctctctaacagtaacttttggaatcattttgacagcttcgtattcggctttcattacgtccatctcttcgtgaactgagaaagtacctctcagccaagttagagctcttgtggcagcatgctcgtttcctttacccagaagaaggaacttgggtgactcaggacagaatggaagagtgattaactgtaaaatagctggaacaacggtcatcagacaacaaagt

SEQ ID NO: 11501 - DNA, 620 bp, Diabrotica virgifera
  SmartBlast Evalue=3E-94; Info="CG9297, isoform B n=1 Tax= Drosophila melanogaster RepID=Q8I0D4_DROME"
tgactaacaacgaatataagaaacctcattaaggacaggagctgaaccatccccagcttatttcaacattttaatgtatggtgaagaaccagaggtaattgatggcagtgagttagctgctgacttcacattttctggattacaaaagtttggacaaggattagaggaacgccttaggggtgttaagctaccttctaaactgctagaaaaagttaacattgtggaaatacctggtattcttgaagttcggaagcaagtttcaagggtatttccatttaatgatgcctgtcagtggtttatcgatagaggtgacattatattcctagtgtacgatccctcaaaactagacgtaggaccagaaactgaagcaatcctagatcaactcaagggacgagaacaccagacccgtattattctcaacaaagccgaccgagtcaaaccagaagagctcttgagagtgcaaggagccttgatatggaacatttctcctttgatgtcatctccgcaacctccaattatgtacacaacctcattatggtcacgaccttacgaaccttgggcccctgtgagactactgcaagctcaggagagagcttttctgacagacttaagaggggctg

SEQ ID NO: 11502 - DNA, 621 bp, Diabrotica virgifera
  SmartBlast Evalue=9E-27; Info="General transcription factor IIE (TFIIE) subunit, putative n=1 Tax=Ixodes scapularis RepID= B7Q313_IXOSC"
ttcaaaatggtgaatgttatgaaaggtgtgttggtgaaatgtgatcctgctatgaaacagttcttacttcatttggacgaaacattgaaattaggaagaaaatttatcattcaagacttggacgaacatcacttatttatctctgccgacattttagacacacttcaagttaaaatagacgatttgatggatcaaatcagctttcctcttgcagaaaaaggtggtcaataaactgtatacataaccatgactatttccaagtctacattacgcggttccaaccgcataagagaaaatgataaaagacgcattgttgatgagacctcgcgtaagcgtcgtcacaggaaagttatggaactcctcgaatctgataactaccatgaagacccccatgcggatcttgttatgagcaagaaagttcccaagtttgaagataacttagaacacagaagtactagaacaaagaaaagggagcgaaccactgaatactaccagttcaagtatcgtaaaaactttcaacagcttgtggatgaagaccgggtagacgctgatataagtaagagggtctcgtatatggatatacagtgtgaggatagcccaattcctcctagacatttctgt

SEQ ID NO: 11503 - DNA, 619 bp, Diabrotica virgifera
  SmartBlast Evalue=1E-30; Info="General transcription factor 3C polypeptide, putative n=1 Tax=Pediculus humanus corporis RepID= E0W2H4_PEDHC"
taggattcccaattgttgatctgttttaatagcttcatctgttccaatagaacagctacatctaatttattagcgctaaaatcttgcgacatcactttcagagcctcttctctttggttttgttttagcaacaacatggctagaggatataatacttcaacgtgacctggagctagttctttcactgtgtagtaggaatcgatggcttgctctatcatatcacaagaagctaaacactctgcgtattttaaccaaacagctgccagggaatagtttttactcttgaccaaaggcactaataacttgagggcacccataaagtatcccacagtcatcaaagcctctacaacatccaggtagaggtctccacaagtttcaacatccatttcaatgagcattttatctaagagtggagaaaacagattttcacaccttaactttaccaaacatacgataaattttatcttaagatctatcggaagattctctggcacctcatacgaattcatcactatggaattatcatcagttaggtataaatcgaaagtaaacccgcaaaactgtgtgaacatgtctaagcaatcagaatatcgttcgttaatgagtagcaattccaaca

SEQ ID NO: 11504 - DNA, 620 bp, Diabrotica virgifera
  SmartBlast Evalue=2E-40; Info="Protein MLP1, putative n=1 Tax= Pediculus humanus corporis RepID=E0VFP7_PEDHC"
tgcaggtttcggaacgtttatcgcatgcgtttcgctttcaccttcttcagcgatcagttccaaattatccaaggtttccgtgcactgttcggagtaaaagtcttgttcatttgtaaggaagtcggtttctttaggagggggaacgggaagcggtcgaacgggtttgttcatgtcgtttgttggcgaaaacgtttcggcagtcggagttttttcgtctgatagaatacttgccacactaataggtgtactagcaaaatctgatccagacaaactattcgtcattaactgaagatgttgcgccacttcgtgcatactgtttttcataacgttgtcgcttaatgaaaaatcgtcttcttcaacatcttctaacgcagctatgtcatcgctattattgttcacagacattaaggaagccattgattgcatatcttcgtccgtggctttgccttctctaagaaatacgcaagacaaggtgcagtccagtttggctcctgtaatttttttggtagttggcttaaagttgatttgaagttcggtttgcgttgattctacgctggcgtattttcgcatatttacatgggcaatagctagttgtcttcgttttcccgctggaggtacat

SEQ ID NO: 11505 - DNA, 620 bp, Diabrotica virgifera
aaacatttagtttaattctaactactaatagaacacagtggatttgttcgtctctgtctaacacagtttaactactcgttgcttgttatggcgaggtatgatgcatccaatgcaagtaaaacaatcaaagtatgtcaaatttatatacctaatgaaataaatttttaatatagtccaaaaaagaaataaaatatagtctatcatagcaataatgtccaatattaccaatattaaaaaggttacactctgaccagaatgggaatagacgtgagcatactttctttgcctcctttatagtcaaattcttcaacaaatctcttacacattttatgtatagtgggcacttaatataactgaaaacaaaagcccactatacataaaatacttaagaaatttgttgaagaactcgactataaagaaggcagtagtagtaaagtgggaccatttaatgtagatctacagtgttcccaatgcttgaaaaaggtctccattacagcatggtctatttcattggatgctctaggatagaaatctatcaagcacttgcttcataggttagaccctattaaagtttatctccactatcattatatcatgatggctaaacttatagcatgccg

SEQ ID NO: 11506 - DNA, 619 bp, Diabrotica virgifera
catggcagaaatttaagccggatgaacagatcattttctctccggaggtctatgtttattcgtaatgttcgtttttgttttgtaggctaagtacttatcttaatctaattgctaagttgtaattcctcattgtctttcaaggaaacattgcaagtatttgtcagaaaggcatatgactatgatctaatatttttggtgtgcaaatcttctacgtatttgtttaataatcttaaggaagactgtgtgataacatatagtcaagttttcttagatatattaatcaaagtatcgagtctttgattcgaacagtacacaattcgctattcacctactaaatgatttgattagtatactcgtatgtagaaagtaactcgattgtatagtgtatagggatttactatcgtgtaaagctaatttggaacttgcctaaactgccataatgataggtctatttcatgcataaattaagaatcacaaatgccgacaaaacttgtccaatattcgaaaccagagatcagaacatacttttcagaatgttttttgtgtgatgaatacatctctgagctccaaattggctctggtttctgagatatcctaacctaaaagtgcaaaatagcgg

SEQ ID NO: 11507 - DNA, 621 bp, Diabrotica virgifera
  SmartBlast Evalue=4E-32; Info=AarF domain containing kinase 5 n= 1 Tax=Culex quinquefasciatus RepID=B0VZI4_CULQU
gggctatatcaagaagtgtcggcgaaggatcgaatagcactcagccatttttggaaagccattgtgttacgcgatcaccggaacatgatgaagtattccaatgaattgggagttaaagattacgaagtttttgccgaaattttgacacaatcccccctgaaagctcaaggtttccaattaaaggtgcatctttccgaagaggacttacaacatctgactgaaattgcaaaaaatagattcgacactgttatggcgtgcctaaaacagatgcctagatcacttttattagttttaagaaatttgaatacaatccgtgccattgcttatcagcatggtaatcccatagatagatataccacattagcaagaacagctacaaaatctttttacggagtacaatcaagtatacttaaaactatagttaacgttcctgctagtatgtatttcgaaattgttctacagataagaaaatttggaagatggtttacaaagaaaacgtacaaatttctttattatcttggactggcgccagatgttgaaatgcttacatcaaaaatgagggctgtgaatatttaagtttaaatatgttctctattatttgctaaataaatgtttattttt

SEQ ID NO: 11508 - DNA, 621 bp, Diabrotica virgifera
  SmartBlast Evalue=8E-55; Info=Ethanolaminephosphotransferase 1 n=2 Tax=Formicidae RepID=E2AHR2_9HYME
tatatctttcgccacgaccgaaaatggagtacatggctgcaggaattagaccagctgtgtaggagtctaaaccatggtcgaataattcgcctagaggaccactggtacccgttctcctcgcttgctttccatctataccatctaaagtgtaagctacaaatagtagtatggcagctgcccagaacgtccagttcccaagtggttctatatcaggacgatccgagtccgaagcataaaagttataatcgagtagcgcaaaaattaggtaactgatcaccgtaaacagaaatccagtaaatgtgagtaaatttggagctatgaaacgtggacagtattttactacccagttccagaaggggtgcataacatatatactcaatatgccagagtctatgcagttatacttgtaattatcaaacccaattaaatggtccttagttaagtactgaatttccattttggaatgatttctgaattattagaaaaaccgctgatagtattgtaaaggttaaaggtatttcctattgtgactttattctaaactactcataatttgttcctgtattcacgattacaccatttttacgggagttctaaataaacatgtttaaagattcgtac

SEQ ID NO: 11509 - DNA, 620 bp, Diabrotica virgifera
  SmartBlast Evalue=7E-21; Info=CCR4-NOT transcription complex subunit 6-like-B n=1 Tax=Harpegnathos saltator RepID=E2BIT2_ 9HYME
atgtgtattttgtagaaaataaagatataaagatgggagattatattaattcaaaccaacaggactattattggtcccaacagaatcccccaaacaaccaagggtattatgaacaggactacacccagttccaaaatcaaactttagaattcaacacaaatattgaatacaatgatcaggcattttccaatacacctcaaatgcttattcctgagcaatatgacaatataggaaaaggtgaagatgaatttgatgagccacccttactagaagagttagaaatctatccagatcgtatattagaaaaaatattggcggttttgaaccctctacgaggccacagcctagccgatgatgctgaataccttacaaaagactctgatgtagttggacccatattattttgtcttctattagctgccaatttattcttagctggaaagagtggttacatatatggtatctcaatgatatcgtgcatactaatgtatgctctgttgtcgttgatgtcaccagacaacggaacatttagcctttctatcgtaggaagcattttaggatactgtctcattccaatagttgcattatcgagcttaggaattatttttaggctcaatggt

SEQ ID NO: 11510 - DNA, 609 bp, Diabrotica virgifera
  SmartBlast Evalue=4E-13; Info=Endonuclease-reverse transcriptase n=1 Tax=Bombyx mori RepID=D7F158_BOMMO
tgagcgtaaaacacattaaaattagtacatgtttaatattttatatttttactagtatgcttagtaggaatgctttagaagagattaagtcagaactgcctatgtgtctcaaaagaaaatcttgaatcagttcgtgttgccagtacttacatatggtgcagaaactttaacagtaaccaagaaaataagaaataaaattttgttgttatacaaaaagccatggaacgctcgatgttaggcatttctcgtaaggatcggattatgaacaaggaaataagacggagaacaggagtgacagatgtcatagaaataattatgaccctaaagtggaactgggctggactagtggcggttggtcaaaggaggcaagggaggcttagcctccccataaattttttacacatgttttgtttactttgctattttggcttcgcgttagagatatcggaaaaagttatttgaacaagttgttccaaataacgttccaaccccacataccaaatttcatcacaaatttcgcactttcagtttcctcaccatttgtagtcaggatcctaaaaactggagccggaaaatctcacttgctaatgctccacgcagcccagcagt

SEQ ID NO: 11511 - DNA, 621 bp, Diabrotica virgifera
  SmartBlast Evalue=7E-29; Info=Inhibitor of growth protein 3 n=2 Tax=Formicidae RepID=E2AMB9_9HYME
agaaaaacgccaagctgtcacgccggtggcgcctcctcctttaatagaaacaagacacgctaccacttccgttcaaccaattgccccttcctctgctaccactacaaccatgtcctataatctcgggcataatttgggagctggacctgcaatcgcagctgctgcttcccaagcaatcgctgcaacccaacagatgcaacaaggtagaagaactgctagcctaaaggcatcttacgaagccattaataccggcgtgcatggtcatgaatttggtattgggagagaattggcaggtgctgcgcagactgccatccaagctatccaacaggatcatgcgaataacaagaaaaaacaaaaaaaatggaatagtagtagttcgtccagcacatctactgctaccgttgttcaaccagtagtatctactccagttgtaataccaccgcatgaatctccaacagttgacaccaattcccagaatgctgaagtaacagatggtgaatggacttacgatccaaacgaacctagatattgcctttgtaatcaagtgtcatatggtgatatggttgcctgcgataatgaggactgtccaagtgaatggttccattatccttgtgttggcat

SEQ ID NO: 11512 - DNA, 620 bp, Diabrotica virgifera
gatcaaggatcagctgaagaaggagatggagagacaaaaagaaatgagggaaggaacaattggtttttacatcaagagctctttttgaaaaaaactaacagaaatactaatatttctttaattttctaaaatggaaggtctagttaatccgaagatattgagtgatgatttactgtcatcattggatgaagtgatgatgaattatagagatgaagaagatgacatatctgagaaatcctctgcatataatgtcgatgaactatatgacatagatcagtataccagtgacgaatcacaactaattgagcaaaaagtatcttcaagtcctgtatcttccaaagaggaacattcagatagtcaagatgacctcttaagagagattgatgagtatatgaactatctgagagagggtgtatcgtcaaagcgactgatcataaagaaagttgtttcaccgactgttcagaatgaacctcaagagtttaaagtccttatctctccaaacttctcttgttatcctgatataagagaagatgttaagttcgaggatcttaagagagatggagaagaagatagattatatgaaggaaaatacaagtatttatctatatttggtcgtaaaa

SEQ ID NO: 11513 - DNA, 617 bp, Diabrotica virgifera
tagaaatacaatacgactgcagtttcgggttgcaacgaaattgaaaatgtttattcatttttaaaatttggaaatgtttttacactaaaatttctactacttcggcgattttattttcttttgacttttagaattgtaccatatctaaaactacatactatccttttcttcaatttcatcgctaagtagccatttagatgtgacttatttacaatttgtatgttgctggtgttttctgaatggttgtatataaatggatatggatatcagtagcggatctacgaggtgagggaatggggaaattacccaccaccaataagttccaaaattaaagaaaaaaaacaataagtattatattatgcaacgagcgtttaatgatggtcattatgatgcgagtatgagggatagacatgagccgcgtagctgcgaatgacgtttacaatacgagcattataatggcaattaaatgcaagtagtatgcatgatttttttctacgaccattcacaaaaatatatattcacatttatttacattataacacaaacaaatatttattttgtacaaaaatatatttaaatttatttattttgtaacacaaacgtatatttatttcagg

SEQ ID NO: 11514 - DNA, 620 bp, Diabrotica virgifera
aaccttatcttgtaaaaggtatatttaaaatccctaaaaagggctgtatcacaacaaaacgctttcggaatcaatattccatcatcagtgttatcacctaaaataagtataactctataagtaaaacaaacgtgaggttaaattttgacaaaggtaaaaaagtgaataggtagttatacttacaggtttacatgctttaagccaccaaaatgtacgggtaaaaccccttaaattgattttaaacagttggggttacattatattatccgattttaaaggatgttaaaaatatttccagattaacacctggcatcacatgacatcaaccatattggttgggaaattgtaggtagaaccttacatggcagagtttaggtgacaacttccagagggtcagtatatatagctatagcacttctttttggatggggaaaagcattgaactcgtaatttatataggtactataagaagttttcacttctgtcggcactcccatgagtgctttaattttttttttatacattttatgattgtgaatatatttgtttataatttttttttcagaaaatgcgtatttagttaaaatttttgccaacaattattgttcagaaatcatttc

SEQ ID NO: 11515 - DNA, 619 bp, Diabrotica virgifera
  SmartBlast Evalue=3E-48; Info=CG2931 n=10 Tax=Drosophila RepID= Q9VND7_DROME
tcaaggtaaagctagcagtgcactacaatcttttggtcctgaggattataaaagaaaaagtaccaaaaatagaaagctgatgagaacagctggaggtcaaacttgggaagattcttcattggctgattggcaagatgatgattttaggattttctgtggagatcttggaaatgatgttactgatgagctattgactagaactttcaataaaatttccttcatttcaaagagcaaaggttatcagagataaaagaactaataaaagtaaaggctatggttttgtaagctttaaagatcctgccgattttactaaggccatgaaggaaatgaatggacgttatgtgggtagcagacctataaagctaagaaaaagtacatggcgcaataggtgtatagatattgtgaagaagaaggagaaaagaaaaaagtagcccttctaaatttattgacttctggaagtagatgaatcttttttatgttttacatgttataaatggatgaattgtacgagtgtttaagaattgattgtacataatatactgtatttctaagctaattatgtaaagtaaagtaggtattgcatatatttttttatttcagaatatcaattatgtaaacc

SEQ ID NO: 11516 - DNA, 613 bp, Diabrotica virgifera
  SmartBlast Evalue=6E-18; Info=Histone-lysine N- methyltransferase SETMAR (Fragment) n=1 Tax=Camponotus floridanus RepID=E2A4J6_9HYME
acgaaatcaaaaagcgcttgaattttgtaaacggtgactcttgtccttcgacggataccgtcaaagttagtttaaatagaatttcaacgcggtgacacgtcggtttttaataagtcaggtgcccgaaaacggttaccactaaggataacgtgaaataaatccacgatctagtattggtagaccgctcactgaagatgcgtgagatagctgagacagtacacatctcaagagatctcgttggtcacatcctgcataaatttgggcataaaaaagatgtcggagcgatggctgctgcaatttccagctccgaacaataaacgcaaccatgagacaaattcagagcagtgtatgatgctgttcaagcgtaatccaaatgagtttctacgttgtttcataaccgtcgactaaacatggttccactggtatacaccagaccagagaccaaggaatattagatacagtggacgtcaccccgcgaacgtgctccgaggagggcgaagactgtccaatcagctggaaagatgatggccacgatattctagggttcacaaggtgtaatctatatccacttcctgaaaaaggacaaaacagcaacagggctttactatgtcgc

SEQ ID NO: 11517 - DNA, 620 bp, Diabrotica virgifera
ttcatgaaagaaagacggcagtataaggccttgggtaagaggatcgctgagtgcatgtgctagttgaactgacgctgtttagcgagaaagattggaactttgtgaatgttttgattgctacggcgataaaaaaagagattcgaaaggtagtggaagaacgcattgagaatgttgtatgttaaaatggagcacaatgttgcagaagagcacttacgatagagagcagatgagggagtgatgggggcatggtgaaatagtatctagataccacataggtttttcatcgtgttctccttaaccgatggagacatttgatggatagaaatacttttatgacgtaaacccaaaatcatacgcaacaaactgttactgcaactctaatccaattaaaatccaatgaaatgttaactgttatgacagatgtagtttactaataaacctagctaataaacttagtgtttaattataattctgtttatactttttttaaacaattttaatgaaatattcaaataggaattaatacgctagcttaaactatgcaagtcaacttaaatggtaaaattgatcatataggtatcgctttgacaaaacccttttataaaattaatctacaaaag

SEQ ID NO: 11518 - DNA, 616 bp, Diabrotica virgifera
ccagcgacatctcttaaacaaactgaaaattctcagatgcagtattcaccttataataaaataacgtaaatatagaaacgtaaaagatggttttgcttgctttcgattcagagggatgcacaatcgctggacagctttttctgccattgcagggtccctcaacatgtgcacgttaacgcgttagaaatatgccgttttgaacatatttctctcagttcctaccgtttaaaatatatacctaagttaaattctttcctatactgtatatgataatacatagataatagctgaaacagtgaaaaggtgaagttaaatctagttaataatactttttaaagtggaattaagacaatgacgttttcacagtgcaatgccatgacatttaaattgtaggtattaataattattttgggtttagtgtaaaattatgaatgctagccttaaaatagaattagaagactttgaatttatatcaacagtatcctaagtgttaagacaataaaatatacattgcgacaataataatattacgcattgtagtattgtggtaaacaatagaaaacacaataattcatctgtgtataagtcattaaatatcatgttaaaataagtgttc

SEQ ID NO: 11519 - DNA, 614 bp, Diabrotica virgifera
acaggttatttgtattttaatttaaaatcaaactaactttcttatctaccactttcaaaaaatttttattaaaacaaccaaaaataaaaaaaaatatgaatcgcccaggattcgaacccgcgtcattccaatctcggagctaacgctaccaactactccagcgaggtccttgtaattgacatgtaagtttcggatataattacacaacacggcgacaaatagtgtaaaaatgttatgcctacataatattttattattttactacagagaaacacaaatccaaaaacacaagaattataataaataatacatttactaaaaacactaatatattcttttaatgacttatttgcacggttacagatacatacatacctatcttgaaagattagcaagaactacatactgtctgtgtgcgcaggcgggcagatttatgtacaattttaccctcaatcgaatcgcgcctaaagaagaatatcttcaaaaaacattttagaagaccttccaggattgtagcttaggaacggaatctggctttcaaggaaacgttggacaaaacagcttaaactagagaaaaatttgaagagaattatagaaaacgtctataacgctat

SEQ ID NO: 11520 - DNA, 620 bp, Diabrotica virgifera
caacaatacagcagtatccatcatgaagtgttttgtactgttcgcttgctgtgttgcatatatttcagcttcggcccttaattttcagcctttccaatcagtatacgtagacccatgtgcgtgcagaaaatgtttagaggaaatatggaacagaacactacagcttaatcaaaatttgaattcagtcaaccgcactctaaacaatttaacagtgatactcgaaaaaaatgtaacaactgaggtgacgtatcaacttgacgaactctgcaaagtggaagaaaacctcgacaacttagtagccacagaaaaaaatatcacagttgttcttcaagcacaaatttgtaacctgacagatgtggtaggtgacttggaaaaatgttgcagagatatggagtgtttggaacagaaggtcgacgaacagacatgcatcttagctaacgttaagaatgttgctctgacggctcttaatgactgtgttaacagcagctgctccacggcatctgtcggtgtgccagcgtaaagaagcatgaaacctcaaagcgaacacaataatgaagatgtattacaaaatctgatactctgtcttttgttataaatagaactgcaataaacatatttcc

SEQ ID NO: 11521 - DNA, 617 bp, Diabrotica virgifera
caatttaatgttcagtatgtataataaaagtgagtttaatacacttattcctagggcaacaataggtaaataatacagatttaagttatttaaaagagaataatttctcaatgtccgaatttggtcttatttaacctgtgctactattgttctacataacaaaagaaatatacattatacaatttttcattttgcgacaaagtattacacacacaaagtatttcattagaatgtatataacagtacatttaacacaagtatataaattatttaactatttagttacatgataaagatttacattgagagtagtttctatgaccgaatattaggcgtgctaaaatatgggttatacactttggtgttgccaaatcgccaaaacggtagaaaaatcgctaatattttgacatagatatatttgacttatgtaattatcgtttaccaatataatcaatgagtataaaaattccatttaattgtttccacagaacaaatttttttgtacttttttctcacaattatagatgaatatttcttgtattttttttttaatttagaatattgtagtgattgcctgattaaaataatataataccgattatatatagtttatacac

SEQ ID NO: 11522 - DNA, 616 bp, Diabrotica virgifera
ggccctattgtgaaacagcgataaaagaagaagttagcaaactgataatatgctattgagcgatttatagtttgtagaaataatcagcaaatatatacccttgctcaatttaaaagcatctttggtcaggttagcctcggaagtaattgcagtcactcaactgacactctgtaatgtcagttacttttttcaagtcacactaatcatttcctatcagttgtctttgattgtgatattaattaagtaacgtgacttcaaaatggcgtttgttgttaacaatctctccaaatataatcagcgtgcgggtcattcagtgtgctgtccagaaaagctctcacatggtgtcattcttctgcacggcaatgatctacctcatgttgtcaaagtagtgaaagaaaatttacaacgaaggagatggaggatattaagagtatccactctatagtcccgatttatgactatgtgattttcacatctttggggcactgaaaaaggagctaaaaggtaatcgttttcagtcagacaaaatgctgtaaaagaattcttcgagtttcagccacaagaattctgtaagtagggtttacatcggttggtgaaacaatgggattctactttc

SEQ ID NO: 11523 - DNA, 619 bp, Diabrotica virgifera
cttataaaaaatatactcatttgctaatgaactttctagtatacctttttgcatcaattttggaaaataatatcgcaactcatgtacactaggtacatactagaaatcagattccaattttattttaactcttttgtttattttagttttgttattccagaaaacaagcagcacattgtttacagcataacaaaattgccaaattcaaaagaaataaattctgcataaatagagaatgtgtagcatatattatgtagatatgtcaaaccagcttgtagtgtcaacaatataggtaaatcgattaatataacaatgataaaacaataaaataaaaatataaatacatgggagaaaatagaataattggtactgactattaggctggccactaactatcaggcaagatactataaataacatactttatttatagtatcatgctatcaggtacacctgaacagttagacctgacagatgtaccacccacatcaggtcacctgagaggttagttattcccaccacacaggtctatcaggtctaatcattcaagtgtacctcttagtgagtggccggccttaaagactaaaagagaaaacaaagcattaaatgcatatcaatt

SEQ ID NO: 11524 - DNA, 615 bp, Diabrotica virgifera
gtgtctacacaaaaaagaagaagatttaattgtgaagatcacatagttctttttgtcctggtctatatctcgaaaatctacaattctacatcaactcaaccacctcaatgcagactcagttttggttactgaaatgtatcaaaaatcattttatagttagaaaattgatacaatagaataatagaacttgaacattggcgaataaagaccaacattgacagaaaagtaactatttcatacacttgctttgtcgtaacaatcatatcagttattttctaaatttttcgtgatgtataccgaaattattaatagaaaatttgattagatatgattgtttggtagcaaaacagatgatcatactcattcaatgtattcatcaattcatcatcttaaaaaagtcttcttagaaacgcaccttagaacacagtaatatcaaaattttaaagtactatactttaaaatgtggaatacagtgctctatttcttaaaattattttttagagacaatagacatatgagtgaaagatccacaaggtacctaatagcgcaaattttttttgcgattttttaacaaagattttcgatcttcaagcccaaatgttaaacaattatatg

SEQ ID NO: 11525 - DNA, 619 bp, Diabrotica virgifera
  SmartBlast Evalue=1E-25; Info=Putative cuticle protein n=1 Tax= Bombyx mori RepID=C0H6M5_BOMMO
ggtaggtactgataatataaaattaagctagagagtattttacaaaagtttttctgtcttcgtagcattaatgcagatttagttaaattatacaagataaaaaatatccttattcttggggtgcagctgctccaggaggtgaccctgctccagctccagcatcctcagcctgtggatgtgctgcattaaagtccaaagacttttgaattgcttcaggaattggtggaggagtgggcaagtggtctccttgaggttggaagccgttttcgttggctatgtatgataaatgaatgggggtaccgtcatcggctgtatactcgacctggcctgagacttctgcaatactttcgccttcactagcacctggtttgaaggatcccttttcttcttgtttaatgccgttggccgcttcaaaactccactgatatgatccatcagcgttgacgccttcattctcgtatttgattaaagcaacgggtggttgagcgttagctggtggaccacttgcagcaggtgcagcacttgcagcaggtgcgtcagcaggacgtccgtaacagactgacaagatggccaagcagacgatgaacagtttcattttaatttttttttcacaagagtt

SEQ ID NO: 11526 - DNA, 619 bp, Diabrotica virgifera
tgataattgaattgagttgaagctagtttctataataagaacattcttgctgaataggtacacagtatgatgagtgcactaagaacaggcaaaataacgcaaaagacggaagaaataatgcgttgggaggtaaaagagatgaaactagtagaggtgggaaattatcaatagacatctataaatttgcattatattcatagtttctcaccttaatacgtatcggatgagtttggcgacgtataggagtcaaactgtggcaggaaaattttataaattctcctgtcatagtttgactccgatacgtggccaaactatcaatatagggtaaatttctgggtttttatatataatttcccgcctctactggtttcatatctatttgtttcacaacgtaatatgttttccgttattttgccagttattaatgtactcatcaccgtatatttttaccaccaaactctgaacaatgttatctcgttcaaatattttaatctgtttgtcctttgtccagtgtatgttatttgtatcgttaattttaagtaaatgtcttcattctgggaaggtatacttagatcgaaagtatgcttgggcaagataatattaataaataactatgctc

SEQ ID NO: 11527 - DNA, 619 bp, Diabrotica virgifera
tattatatgaaaaatatcagtatttttatggatttacaaaaggaaagaaatatacagtgtgttctatttgaaataagaaagttcattagatttcaagaaaaacggaagatttggcaacaatgtaaatgccactgcaatatcggccgcgttagaagacccttacccaccacaatctaaaaaatggtgcaagccgtttccgagataattggggcgttccatacataaaactcactctatactctgtatatataaataaaattaaataaagtgagtcgaatcgaatggaatcaaattgaagcaaaccgaatataatcgaatctataagaagtattcacttctggcactccgcaagtgccactctctctttttttgtgatttaaagttctgttagaattcattttaaaaaatgctgtaatataatccagcaatgtaaaattttagattaaaatgtgcatagatgcattaaaaggccattatataaaaatataaatatgtcaagactacagattaactcccgttattaggtatattaaacagaaatataatatttgtacaatattttttgcatgacaccgtagtattagcggaaacagaagattaactaaaaatattgatgaac

SEQ ID NO: 11528 - DNA, 618 bp, Diabrotica virgifera
  SmartBlast Evalue=3E-21; Info="Collagen alpha-1, IV, chain, putative n=1 Tax=Pediculus humanus corporis RepID=E0VEK8_PEDHC"
ggtgacgcttcggcctggcttgtgccgggcgacagccctactagttcttttgctcgtgacgatagtgaacgcgaatagaaagtgtggaggttgttcgaatccctacaaagattggaaatgcgattgttcggggataaaaggaactcctgggctcgaaggtattcacggagctcctgctagatctggagattatggtgatccaggttatccgggaccaccaggaccaaaaggagaaaaaggatctgatggagaatacggaatttttggagataaaggacctaggggagacgaaggacctccaggactacaaggaatatcaggccgaccaggagaacaaggagaagttggtgttagaggttcaccgggtctagacggtttcgatggagcagatggagcacctggtgtatcaggtagatcaggacgaccaggtcaacgcggttctccaggtcccgatggtgcccaaggattatccggagaagcaggagacggaggaggaaattccattggggtgaaaggagaaatgggtatagctggagtagatggctttcaaggtattaacggttttcaaggtcccagaggatctatgggttaccgcggttcaccaggttttccaggact

SEQ ID NO: 11529 - DNA, 619 bp, Diabrotica virgifera
  SmartBlast Evalue=5E-22; Info=15.9 kDa midgut protein n=1 Tax= Phlebotomus papatasi RepID=A8CAC7_PHLPP
catcattaatattactacgtttagaataatattcccaataaaaatgaatcttaagtcttacgttattttgtttagcatattagtgttttgtgtcaacaaatcgacagcttttctcaaatgttatgcgtgttctacgactgaggatgacgcagatacacactgtttagataatcctggatcaaaagacaccgatatactagaatgcgacaaaaaatactgctatgtggtgagacaggattacaaggatcctaggggcaagctccaatcgataacaagaacttgcctcgacaaaccaacatattcaaataaaatcattgaagatgctacacataggatatactttagggcctgtaagtcagatttgtgcaacggaggtaacggtcacactgacgaaagctctggagaagaaggagcgtttggagataaaggaactatttacgttcctggaactggttcaaataatgccggcaaagttaaagtatttttaagtgtcaatgtagtgttgtttgtcgtgctgtgttttgtaagataatttagagggatttaatgttaataaagtaggcttattatttatgcaaacattttgtttgattacattgattacatacatctggaggac

SEQ ID NO: 11530 - DNA, 612 bp, Diabrotica virgifera
gtaacttccataaacaatacaggactcaacacgtcaagccctcccgtaccttctaccagtcgaaactcgaaaagggaaaggtataacgtccaaaaagacaacaacttcaaacaacaacctatctcaagattaagttttctgaagcagacaccctttaatggcgaatcagataatgatagtggttctttctcagtattttcattaaatctcccatctcctggtctcgaacaagaacttaactctgcgttaattccgttacctttaccttcttccagaaaaattaaggaaggagatacctgtctacctatatctcaattttctggcaacaccatagtgattgataaaacaaccttagatttaaattctctattagttaggaaacataacgataatcgtccgtatctccctatcgaagtattaggtcaatcttggttagcacttctggacagtggttcaaacatatctttactaggtctttatctcttcgtttaatagacaacgataaagtcaaagttaacccgatttcttctcttcaagtatcgactgctgatggcactgtacaacccatcacgggaaaattcgtaacagaagtctctgtagcgaatatccgca

SEQ ID NO: 11531 - DNA, 613 bp, Diabrotica virgifera
  SmartBlast Evalue=5E-38; Info=Glycoside hydrolases n=2 Tax= Aedes aegypti RepID=Q16ET7_AEDAE
aacaggaaaatattttaattttatatatttataaataaaataggtaataaccatataataaacaaaagttgcaattaatcagaacattgagaattgtcctccataatgcatctagtggcgtatacgtttttgagatacttagcagattttcttggtgttctggtcctgttgggactgttaaagtcgacggcaatgactccaaactttactgaataaccactcaaccattcaaagttgtccataaaactccagtaagtgtaaccaattagattaaccccttcatccaacgcatctctcaacttactaagatggcgcttaatataactaatccgcttgttatcgtctaatgttgatccgtcatccggatatccattttcagtaataattattggtatgttgttgtaagttttcgagacccattttacaagtttgtaaataccatgtgggtaaactttaaacatattgactactgtatcctcccaatcgggtggctggtattgaatgacttgagagtcagctgcccaacctgactcgttgtggtgtaaatcgtcataatgggaaatcagcacagacgtgtaatagttaatgccaaagtagtccactgtatctttaa

SEQ ID NO: 11532 - DNA, 616 bp, Diabrotica virgifera
  SmartBlast Evalue=2E-14; Info=Protein cereblon n=1 Tax= Harpegnathos saltator RepID=E2C926_9HYME
acagtctcttctgtttcaaatttagcatctgcgtatcacaaagaggagttgatatattaggttcgggtaatatttgtacagttacttttttcagtctaccggttaatgctttttgctccattccgggcacaagcatgcatctctgtcttccgcgtgctttgatgctgagagcgtaatgtttatcttgcgtttcaaatacttccattgtaacgccatattcataaacaccagtgtgatttgcatttgcacacaacaagacaaaaacattctccttttcgagaaatttttttataattgagttttccatatagatatttataaccaaaggtagagtaaagccaggaaagaccatagttgtggtatatattgctaatgtgttgatcacaactccatcttcaaatagagtgtatcctctaacattgtctagttttcccaagtacctgtgtgttgtaggtaaatccaaatcaaaatcgccttcttgagatataggaatatcatcatctgatgtatctgaatcaacatgtccattggctatttggtccaaaaccatgtaatcagacaattcctcttcatcttcagtttccacattttcttgatattgtgacattttcgatta

SEQ ID NO: 11533 - DNA, 618 bp, Diabrotica virgifera
ttgggcgcatttttttgattgatttagaacattcacagatgatatgccgctacttatttaacatattttcaagtagaaaatgtactgtgagacatcgattatgcaacatccatataacttcaaaattagtccagtgtacctcggtgaaaatacggcataaccaacggtataacgtctggtttccattgttacgttttttattattttaatttaaactttaaacacttaatttgtaagtgacacatattattacatattgtgtagatcaaaggtaagtctatcctttagaggtgccagctagttatgagtaagtgttgtctaacatgaacaatttaatatccattacctttccgtggtcaagtcaacatagactaatagactaaaagccggtataggtgaaatttgctaatcattttaggcacgatgagatgagagcctataacttaaatagtaaaacctaaaagaaaacgtatgtacactgtgccgtcactttttagtggcatatgcgtcgacagtggcgcctcaaactttccacttatggacgggataaatcaattagaaggtaccctccctcactaccaaaattcaatttttttaatttttttttggtaaattttt

SEQ ID NO: 11534 - DNA, 613 bp, Diabrotica virgifera
aaataagtagctaggcactatggcaattttcaaagtgtttggactcattgcagtatttagcatttttgatctggtattgggtgggtcgcctttatcgggttatgttgaaataatatctagaaaaactggtaagaaagtaggtgtcgagaatattgatgacgaaacggtcttcttatatgccaaagacaacttaacacttacaacctggaaggttgtaccgacctgtttttccggcgaatccactagggctggttattggataagattaaaggatcatgaaaaatggcgttggaatcacaggtggggatgtcgttttacaaatacttccataatagcttacaaggatggaaaagacaccaacgaaaataattacttttattacgatatcacgacgggagaaattgaagtttgtaagaagaattttctatatgtggatccatctgactgttccatgaaatctttggatgtcgaggataagaaagatgacagaaagttttcagtaagagtagtcaagttaataccagctgcagagattccggattgttggaaataatcacatgaatttatttcttgttacataattttaaaatcaataaagcttaaccgtttcacc

SEQ ID NO: 11535 - DNA, 619 bp, Diabrotica virgifera
  SmartBlast Evalue=4E-58; Info=RNA-binding protein pno1 n=3 Tax= Drosophila RepID=PNO1_DROPS
ttctattgtgaatttagttcttcctccttttccagcaagtcttcctatagctctagactggtggtctccctttaatgttttgacatccttaatttcaaaggtttccacaaacagatcatctagacgaattaaggcaagggcatcttcaacttcaaaaccataaataaaagctttaacgaaatctgcagctttttgtaaattagaaatatctggggtttccttacatgccctaatttctacgtttctggtttttaaattaaatcggatttggagttgcaagtgctcaactacaggtgtgaatatttttaaccaattttcttttaatggtgagtatctatgtgaaggtacagctatttttctcatgtcatctttggtttcggaaaatgatttggatcttgcctttttcgttcttggtgctctaactttgttattggttccttctataccattcacaatttccacttccatgtcttcgctggtggacactccacgtttttgagccttttttggttcaaaattgtctatgtcaatatttatttcagccattttaataagtaatgagctaattggggtgataacttaaaaatactgtatatttacatgtgttcacaatttaacc

SEQ ID NO: 11536 - DNA, 618 bp, Diabrotica virgifera
tatgtttacaattcattttgctacgtcaaattccttccagcattccataacattcagatcaggatcacattccgcgttattcagtatcattgtgaaggttcgtctaatgtaatagagtttaaaggcctggattattctttggtccatagtttgaatcaaagcctacgccaatctaggtgtagttgtaataaggtcaatcttatttttttattgtccacttgctgacgtgttgacaaagtatactgaatgcttttattttggtatatgtatgtaccgatatatcgattcgatccgcgaataaagaaatcttagatcacgaatacaggaattggatcgcatttttttagtccgcgaatagtgaaaacgcaaataaagaaatcgcgaataaggagctttgactattatatccaatatatctcaatatatatccgatattttgatatttatataaaaaatttcggaccctaattataaaactgagacagtgaggaactgagattctattggacatcaaactgtaaatagatggtgaaacatacttgagaatgtcgagactctactttagtagcaccattgatgatgacaataacttcaattaccacaaacatttaccaaggc

SEQ ID NO: 11537 - DNA, 617 bp, Diabrotica virgifera
aaggattccaacggagcgtgttacggcgcgcttcgcctgtttaccaatttagacgtcgacaaagagagatagaaaatatatgatagtgaaaagagatgagaacaaggttggcatcttatgttactgtgcaattaataaatatttactttttgatcaaatcggtcggattcagagtattgacggtacaccaccagtgtttacggtagaaatttattaagttggttaattcatacaatgataaaaatcttaacacaacgcggttagaccactacatagtaaaattaccacggcactgatcgtagttcccccggaagggtggacgttttagtatatgtgtgttaaatttcctttggactgtgtctttttaccgacaattcaccgaaaaaagcgcgacgctccacagggcaataaaaataggatacagaggacataaattagggttggtattagcttaaggatcataaataacaaattttgagggaaatttcgctatttcacgctgcgttgaatctataccacattgcgttgaatctcgtcttcagtttttgtgtgttttctgttacatttttgtattttacaaagcttgccgcgccaccttccggcggatttcttttgaa

SEQ ID NO: 11538 - DNA, 620 bp, Diabrotica virgifera
  SmartBlast Evalue=4E-10; Info=Lectin n=1 Tax=Glossina morsitans morsitans RepID=D3TR78_GLOMM
tacaagttttatgtggtgccagtcaaataagatgactactaaagtatcagtaattttgtttttgtgcttaataatatggaaggaaaacgccgttgaagcaaataagaatttaccaggtaatctgataacctatggggacagtcagtactatattgatgataaatttaatcattgttggtgggaggcatggagacattgcaaatctcttaacatggatctagttagtattgaaacacaggcagaaaataactttctttaccaaaagttgaaggaacgatatggtaacggacccgaatattcgttttggactgctggagccaaagaagggaacggatgggtatggaaaaatacaaatggttttgttaactacttcaactgggcacccggtcaaccagacaacgctggtctaacccgtatagaaatgagatataattgggcagctggacttcgctggtacgtgaggcatgagcattttataggcttgcatgcagtctgtgaaataggtttgtgatgtggattggtaaactggtttcatacaccgttggtgctgcttgcaatgttacgacttcagtccctacattgtaatattgataataaatgagatatcttaattttaaaaa

SEQ ID NO: 11539 - DNA, 619 bp, Diabrotica virgifera
  SmartBlast Evalue=1E-37; Info=Mitochondrial import inner membrane translocase subunit Tim22 n=1 Tax=Culex quinquefasciatus RepID=B0X2Y3_CULQU
acagaaattggggtttgagtactattcaaattttgaatcgtatttaaattattgtacagagaaatcaatgtgaataaaaacaattttaatttgtgatgactaaaattattataagacgttaaaaaataaataaatgtaaattattgagaccatagatatattgagacaggtttggagtttgcagataacagaaaagtagtaaaattagtaaacccaaaacatgtcggattcacaggaaaaaagatcttttacgacagaagaatggaactatcttacaaagtattttgttggaaatacatttcgatatagagataacattataatacctaaaggtgttggacccattcaaataaaaacaaatgaagaaaagatggtagaatctttttttgagagctgtgcttttaagtctctgatgagttgtgtagtaggatatggattaggagcagctataggtttgttttcatcaagtatgggtcctgcttcagttacagatactgcagaacctcaaactgcaaggcaggtatttagagaaatgaaaactacaactttgggttatgcaaagaattttgcagtgataggagctctgttttctggagtcgaatgtattatagaatcatca

SEQ ID NO: 11540 - DNA, 617 bp, Diabrotica virgifera
  SmartBlast Evalue=5E-77; Info="Mediator complex subunit, putative n=1 Tax=Pediculus humanus corporis RepID=E0VQW4_PEDHC"
ttgatgtatggtatctattggtgaataaacttcttgcattctattttgcaaatagtttgggggattggcaggtgctgataaacccaaaaatccttgtaaaaattctttgatcaaatcccaacataaagcaggtactacacaaggtctgtattctacttccactaaaattcctttgaaattactgcttactgttacacttcccaatttgacacaaaaatctcctatttcataccttggtccctttgactctgctttcgtttgttttttggaagtataaaaatgggacattttcatcattagcaaatcaaacaatccatcagtggctaatggaattgttttggtaccagtttcaagcaacgaaaatacagtagcaggttgttctgaattatgtagaacatgaactgtcctagggtgtcccaactgttgtacagaagtgtatgtttcacagtctactaaaaattgaccttgctgagtagcccctaaagctaaaattcgtttagataaaagctcaatagtttgaggtcctgttttgttatcaattggaaattgacttaaaattgttactcccatgctacttgtgcttattctctattttgggcttttatttatttttattt

SEQ ID NO: 11541 - DNA, 615 bp, Diabrotica virgifera
gaattcctcggttgattagtgtttttgtttgatccacccaacggcttggagatccttccctctttctcgttccatcaactttgccctcgataatgagtttttccatcgtgcctggtcttctgacaatgtgttcaaaatactgtaagtatttctgttgtatttgtttaagcaacctatccattaattgagttgttctatcatgttcgatcttcaacctaagacattctcaacatgcggggtatacccaaatctcaaaagcatctattttgttctaatctgctttcgtcagggtctacgtttcaaatactatgagaaaaatggagtgctcttacaaatcttaattttatgtacactgttgcggttgagtttttccaaattgttataagcttcatcatatgtgtatctctcttgttacatcctcctcattcggaaggatatgctaaagacttttccgtgctcggtctagtgaggaataaaatatcctttctgatatgagctataaaagttcctacattcggggatattctctagacatagcaaaactctggttcgcatcttgtaacgggtagtgttttcaggacgatagactcagtaaaacacaggttaaaaaataaa

SEQ ID NO: 11542 - DNA, 617 bp, Diabrotica virgifera
  SmartBlast Evalue=9E-50; Info="KLHL18, isoform A n=13 Tax= Drosophila RepID=Q9VGE5_DROME"
gaacgcattaggatttagacattttgcagattcattaggctgttccacactggcagattctgcagaaaaatatatcgaatcatatttccatgaagtttcccaacatgaggagtatttaaatctttctgtgacagaaataaaagatatgttaactaaaaatgatctcagagttgaaagcgaagaacaagttttcgaagcttgtatgagatgggtgaaacatgatgtggaaataagaaaagatttcttgccagaattattgtccttagttagattgccattattatcacctctgtacattaccgatagagttagaaatgaagaacaaataaggtattccatacaatgccgggatctcgtagatgaagctttaacatttcacttaataccagaacgacgagcgctgatccagagtttccgaacggaaccgagagtgtgtgacatcaaaggtcacatatatgttgtcggtggcttaaacaaacacggggactcattgtcgacggtcgaatattatgatccgaagaaagacaaatggaatatggcacctcctatgtcgatgatgaggtctagattaggagtggctgtgataaaaagtaaattgttcgctttcggaggttaca

SEQ ID NO: 11543 - DNA, 614 bp, Diabrotica virgifera
  SmartBlast Evalue=3E-27; Info="RNA polymerase II ctd phosphatase, putative n=1 Tax=Pediculus humanus corporis RepID= E0VQI4_PEDHC"
aatttatcggcattatttccctgcggtgataacatggtatgtataatagatgatagagaagatgtctggtcacatgctacaaatttaatccatgttaaaccatatcattttttccaacacacaggagatatcaatgctccaccgggattagataaacacgaaaatgataaattagtaaaaggaattgatttaacgaaagttagtactaaaaagaataacacaaaagttaccagtgaagaaaatgataacagctcaagagacgttgaaactaatccagaagataaagaggataagacagtaaccgatgataagacagtatccgaggaaaagacagtaaccgaggataagacaataaccgaggataagacagtaaccgaggataagatagtatccgaggaaaagacagtaaccgataatggtaattccgaagaagataaaacatccaaactagaggaaaacgcaaataaggatgaagtagaaaataactctcaatgcaaaacagaaaataaagaaacagttgacgaggaaagcaaaaaacaagaagctgataaacatcttgtaaacaacaaagatgacgaaaaagacgtagaaaagaaaaataacgaaaacgcggc

SEQ ID NO: 11544 - DNA, 618 bp, Diabrotica virgifera
  SmartBlast Evalue=5E-27; Info=Pavarotti 1 n=1 Tax=Tribolium castaneum RepID=D6WJB3_TRICA
ctcttcttttgaggtttttacacctataagacgtcatttcaaagagagttgccactccagcaagaattaaaaaagttggattattctctgtagtaccagaaataccaattttcaaatttgatttcaatgaagttgaagaatgcggctctattatagataacatagtaacagtattaaaacattccaaatcaaagcacaaggacctggacatagaaataaagaaaacggataaagagttacgaaaaagacttgttgatttcgatgcgaaaaaaatgggcaataaagttgagatcaaaaatttaactcatctgcttcagaggcaacaaaataggaataataatctagaggggaaggttagtcgactggaaactgaagtttgtactttggtaactagaaataaggaattacaggatattgtcaaatctttgcacaacaaaattaatgaaaaggatttaaaactgaatcaaaacatattggaaagagaacgcacaaaacaaaaaatagcgctagctagcgaacaaatgagccaagaacttgatgctaagttgaagaaacaacgagaacatcttaatgccgctatgatagctaaagaattcagctgaagaaggtcagagaagc

SEQ ID NO: 11545 - DNA, 618 bp, Diabrotica virgifera
  SmartBlast Evalue=6E-33; Info="10 kDa heat shock protein, putative n=1 Tax=Pediculus humanus corporis RepID=E0VRD9_PEDHC"
ggtgctaagttcttccttccagaaatttctaacgtgttcgaaaccaccacgtttttgtaataattgtataataaatttctcacaatcactaaaatgtcaggagcagctaaaagattgatcccactttttgatagaatcctcattaaaaagtttgaagcagtgtcgaaaactaaaggtggtattgttcttccggaaaaagcacaagataaagttttacaaggtactgttgttgcagtgggacaaggagctagactacaagatggttcatttgccgctcctactattaaagtcggtgataaagtactcctccctgaatatggtggcaccaaagtaaatgtagaagataatgcagagtaccaaatattcagagaatctgatattatagccaaagtagaataattgactgttttcatttaaatttgttgcattttcttgtttagataagtctgaaccctgtgggtttatgtatgaatgatctgatccctacacggtttcagacagtttgtggaaacattcaacaattactgtactatatttttgttgaaaatgatttcctgatttttatattgtagtaaaacttgtactgttttttgttacaaatatatttgtattaaaatg

SEQ ID NO: 11546 - DNA, 616 bp, Diabrotica virgifera
ggaggatgaatgatgatgataaaaataatacgcataacaccttaaacttaattgatttgagttgtcaggttgaggttcttgtaataaggttttatgcgtttgggagttctgcatttagcttttttgttatttgattaaactatataattccatggtttgtaggtttttttaaaccaagaaactataaaatgcgatgtctcagcgaaaaaagaagatgtttgagtaaactcaaagtcatttaaaagagagagacttatgctttaatatggctataaccatagacatataatacctagatatataatataataaccatagaaatataataataactggaagaacagttatacgctctgagcttcgctggtgtcgctaactagtggactaatattaaaactttcgcgggaaattttttaatttgttatttaatttttatcgcgtaatttttacaacgcaaaaaagtaaataaattgtaatcgattttttaaaagattttgctaattattttgacgttctattgatgaaacattaatttcttacttcggatactttcacaactatcgtgtagatggcgctaagattaatagattaatttataattacatattacggaata

SEQ ID NO: 11547 - DNA, 613 bp, Diabrotica virgifera
  SmartBlast Evalue=3E-68; Info=Conserved oligomeric Golgi complex subunit 4 n=1 Tax=Harpegnathos saltator RepID=E2BV79_ 9HYME
gctatttgtgtcagccttgcaaatttatctctaacagaccacgaagttgctgccgtaatataacctgctagagatcttacctctttgtcaagcacgagaccgcctaacctgttaaaactacttttcatgacaactttttccaatctttgtgttacttcggtagtaaggatttgcgtaaaggtgtcataattggaactcgtcagaatatccttaaatgatgaaagtaatgtttctaaattcattattaacgtttgaacaaatgattcgcctgcttcatacgctgatagttcatcatctgtcaaatgatggctgatactcagaaactggtcaacccatggatttactctcggtttaatggcagatgatcgtagttgttgtataccataatcgattatatcttttaaattcgtagtcactgatgataatcctgacaaacagctttcgagcttacctctgtcatttatattcatctttggtaaggcttgttctatttcctttaaaacattttcacataaggcatccacatactcaatactactgtcagcattattcaaggcaaccagaaatgccagcctagattgttcagtatctccagactgcagtcttccttgtt

SEQ ID NO: 11548 - DNA, 616 bp, Diabrotica virgifera
  SmartBlast Evalue=2E-19; Info="CG2310, isoform A n=5 Tax= melanogaster subgroup RepID=Q7JZY1_DROME"
ttttttgaatgaaaagtggttcattgttgatattaaaattgaaataattttatttctttaataggttttcttggtggaaaatggatcagctttctgcagaaaaacggttatgttgtgcatatattctggctatagctgcaggagctacttcaagtatatcaactggaatagtatggagtcattggtatagaactttagatcaatgtgtggatagaaactgtagttgtataatatatggaacgcatactgctacccatttcttaggtggtagtcaaggagcatgtatctggacaacttttgcacctcttatttatgtattttttgcaattggtttcatctgttttcatggatatagagtattgtttactacaaaatcacctagtggcagagccactagaacaatgttggcaaaattagacactggagaatctgtacaaatagaagcaatatcgcaagaaactactggccaccttccaaccagctactggggaactgcagcagtattcacatgcatattcactgtgtactcattagttcactttgcaatctacatggatggcttcctccacacttgcaaccagtaccgatcaacacttgaggtgctgcttagcgttca

SEQ ID NO: 11549 - DNA, 615 bp, Diabrotica virgifera
tcccttgtccattcacaggttggtagtactctttctaagccaacagattacacaaaaatctcaaaatgaccaaaaattgacattcatcatttttccctctgacccttcatatgtttattgaaacacaatattttttgtttatgaaagcatcatttcaattgtatcaataaatatcaaacattagtcaaatgaaataaattaagagacatacaataaatttattatttactccggatgaccgaaaccggtaatattgtatacaatatgcacagcaacatcaggtcccagtaacagtaaactaaatgatgcctgtgactgttactaggacctgatgatgctgcgcatattgtatacaacgaaaccggtcgtccttggtgtacttacaatttcaatgtttataaagtcaatggacatacaatgttacttttagccaagtgatgcagcgtctaaaccttacattccttacctatttgcagatccaagctccattgtccattttacctaccgattaacctcatacaatcaacacttagtaaatcttaaacttacgttctatataaaaatacctttacaagaaaaaataattaacacagtcaaaaataataaagtaaaaca

SEQ ID NO: 11550 - DNA, 618 bp, Diabrotica virgifera
  SmartBlast Evalue=3E-64; Info=Putative deoxyribonuclease TATDN1 n=1 Tax=Harpegnathos saltator RepID=E2BYY4_9HYME
aaagttgtagctgtgggtgaatgtggtcttgattatgaccgactgcagttttgtccaaaagatattcaattaaaatacttcgaacttcaactttcgttaagcgaaaaatttaagttgcccttatttttgcactgcaggaatgctgctgatgatttatataatattctagtcagatacagaggcctaacgggagtagtgcatagctttgatgggtcaattgaggaagctaataaatttttggaattagggtattacattggattgaatggatgttctttgaaaaccgcacaaaatttagagactgttaaatcattacccagtagtaaaattctcctagaaactgattgtccatggtgtgaagttcgaccttctcatgcaggttatcaatttatttctaaggaaagcttagatgtaccttctgttaagaaggagaaatggagtcccgaccatatggttaaaagcagaaatgaaccatgtaatataagacaagtactagatattatagctaaggttaagaatgaacatagtgacgttttatgtgaacaaatttatcaaaatagtttacaggtatttttctcaaatagaaaaatttgataggtacttatgtaataaaatgtt

SEQ ID NO: 11551 - DNA, 617 bp, Diabrotica virgifera
ggaaataaattattggcgtagatgttgccaaatcactagaagagatagagtaaggattgctgaaaccagagagtgtataggtacagataatgacatcctgaatctataggatgcaaaagtctgacatggtatggccatgtcgaaaggatgaatgatcaaagatggccaaagagaatgttacagtggatccccaccaaacgcaggaaatagggaagaccaagaagatcctggagacaagcatctacaaacggatgtctacatgtatctaatctgcatgtaataacttgcatgcaggtagtttataaacataactaaacacgtttataatatatttaatgtattgctaatggcagatacagtcagtattcattgaagtagtaatattttagagattattcatgcacaaattgttaagtacaaaacttttatcctaaatctgaagactacctacataactaaatatattttccacaaagtcacttcataacctctcaaaacttattttctaagatcatgttaaaagtagacgaaacaaaagttatgcttttaagcgtaatatgactttttcagtgattaaatgacttgtaaatataaaatatatagccagatttggttaa

SEQ ID NO: 11552 - DNA, 616 bp, Diabrotica virgifera
  SmartBlast Evalue=7E-19; Info=luciferase-like n=1 Tax=Nasonia vitripennis RepID=UPI0001A46D60
gatttaattctgagctcgccttcttcatttggtccgcaaattgctcctgtatagacatcaacaacctttgcttttaatcctggtataaccattccaacagatgttggtttcgaatgcaagtacaacgtctctttaacatttgtagtgttgaaactcgtcaatactccactcacttccgtctgcccgtatgcattacacacaaaagttcctgggagcagatcacggagctctagaagtagtggcttcggaatatacccaccaccaacgataaagctccataaactgctggtatccaaaccgtcggggcgaccaacttttaatagagctgcagctagggatggagcaccaaatacagtagtaactttatacttgtcgataagtttccacgtctcgtgtggatccatcttttgcactgtaacttttgctccacccataatgatagctgccaattggtatataacggccgatatccagtatagcgttgagtaagttaaatatatatttccaatattgccacagaccggtagaattaatgcctgccccaaaagccctaagtgaattaagaataattccttttgggagtccagtagtcccactactaaacatgataacagca

SEQ ID NO: 11553 - DNA, 618 bp, Diabrotica virgifera
  SmartBlast Evalue=1E-11; Info=Slit-2 n=1 Tax=Gallus gallus RepID=UPI0000ECC739
gttcatccgtaaatgtggaaaattatgtttagttcactttgtgtagttatgtatttttaaatagcaatgagaatgagacggtggtggtgcctctttggaattattccagtagtggagatagttttagggatggtgagggtgtcagaacgatgcccagatatatgtatttgtgccaaccatgtcaccgattgtcagagaggagatttgacagatttacccaacggtatagaaccagatgtaatgggtctagatatgtccatcaacagcctagagaaaattccattgggactaagatattacactcacctaacatatgtaaatatgtcacacaaccggatagcaatcttggaccaccaagactttgatggattgtccaatctaacaacgttggacctgtccttcaacaattttctagactggagagatatgcaagcccaaacatttgtgaatttaaaaaattagtgtcgatgaacttttctggaaaccctctaagggttctctcgatatcgcattttaatttgcaacctttaaagagccttcgactaaataactgttccattgaagcaatacctaagggatttattaaaggtattcctcatttagaagaactgtatttat

SEQ ID NO: 11554 - DNA, 616 bp, Diabrotica virgifera
  SmartBlast Evalue=7E-42; Info=Polyprotein n=1 Tax=Phanerochaete chrysosporium RP-78 RepID=Q45W64_PHACH
tcaagagaactatgctttagacataataaaaagatttggattggagaattgtaactcagtttcaactccattagaatcaggtattaaacttcaaaaacctgaaaataatgaaatgaacccagattatcaaaagctcataggagcattaatgtatttggcagttgggactagacctgatatatgtttcgctgttagttatctcagccaatttaacaattcgaatagcaaggagcatttcagtgcagctaaacgggttgttaggtaccttaaaggtacagccagtttaggtatcacatattcaaagaaagacaaaaatttggttggttatgccgatgcagattatggtagttgtgttgtagataggcgatcatttactggttatgttttcatgctaggtggaggagccattagttggaaagctagaaagcaaacatctgtaacaatagcagatagtactacgtttgcagagtatgtggcaataagcgaatgtggaaaggaatgcatgtttcttaaacagctgatgaaagaactgaagtcacctacaggaactgtcactatttataatgacaatagtactgcaaatcaactttgcaacagtcatacgtcacatgccagg

SEQ ID NO: 11555 - DNA, 617 bp, Diabrotica virgifera
tatctctaactgttaacatctcaataaatttgtgcatttccttcagtagttacgttactcaattctccaacgaacacaccacattttataaagaataagactggcgcagttagtagaaatttccaattagaaaaagtaaagccttttttctaatcgattttaatcgttaattgggaaattggagaattagtgacttagtagttgagttccgagtgtaaggccacgaggaaggaaaactgaaggaacccgtaagcaacttgaagaattccaagtgtaaggccacttgttgtgtaaagccacaaagcaattcggaagttctggagaggcgcaactagtaacttcgtgaaatcttctcaaccaccagcttcagtgaaaagccactcgaccctggaaacggtgaagcatttccacagaagaagcaacaacatcccggctaccataccggctacatacagtttagaatttcgaccagttccagtgtaaggccacttgatctggaaggtacaaaacgtgctcacacccgttctctgcccgttccagtgtaagaccacttgatctgggaattgcaacgttctccacccgttctctacccgttccagtgtaaagcgactagatct

SEQ ID NO: 11556 - DNA, 617 bp, Diabrotica virgifera
tccattgtgttggggaaatcattttaaaataaataacatgttgaaaattgctttttattattaatttttaatgacacacttttagtgatatcatgaatgggtttttgaaacacaacactagtttgttaggtagtaggtagactacgtaattttgtcaatagacctgtaaaaaactccaaatgattttctatattttccaacacatattatattattaataaaaaagataatacaaaattaccactaataatatacctaatattacagaataacagaaaaattaaggtaagaagcaaattattgacaaacgtcacaagtacattagtcaaaatataacccgactgtcaacgataagtaatacctacagtttagggagatcgaaaacggtatcctaaggtaaggtaatgattaagcggtttaggaaattcttatcgtatggtgaaatccgttttagagttaggaagtacctaaacccacttaggtaatacttaaatatttaggtatcattggtgaaatcgggcattaatgtagcttgttaataaaagacaaaagacagttaatggcgctatatggagagtgcaggtgtaatctgaattatttgtaaattatagtcattt

SEQ ID NO: 11557 - DNA, 614 bp, Diabrotica virgifera
  SmartBlast Evalue=8E-67; Info="Peptidyl-prolyl cis-trans isomerase, mitochondrial n=1 Tax=Camponotus floridanus RepID= E2ALF8_9HYME"
cttctgtaatcttttcaagcaaaaacaaaagtcatcaaaaaaataatcatattttggattgtatcaggtgtattacgttgttttcgaaaatttttgtgggactgaaagttgtttagttccatgccattagaattgacgcaatattcgaatgtttgattagaagatcgctagtaaaaaatgaaaacaagtagcgttacagttttccacatttagatatcaaaatattttttgtaggcttacccgcagtgtctccgtacgtactaattttttcgactaattctaatccttcgacgacgtgtccgaaaatgcccgtgaaccccctcatctcctggaggatgattcggaattgagatccaaccatgcccatgttgtcgtgtcgtttttgagtgcgccgcatgccgacggtgcccctaacagccatcagtttcgtatcgtccggtagaaagtaggactcgtcgaagatcgatctcccacctctgccgttgttgagctcgaagtcgcccgttattacgctctccccttcccagcactggaatatctggcatcccttgtagcccattccggcttcgccagtcgtcaacaagccgaaattcttcgccatctttggagccacg

SEQ ID NO: 11558 - DNA, 611 bp, Diabrotica virgifera
tttttgaataggaatccacagggaagccgaatcagagatttttccaggcgggagcggtctcaccacatggactaataccaattctataatgcttttacacttttattatgaatcgaaatattagatgtaataagtaacagtgtatcctcttctaaaggcgcctatcttctagagatagtggcgactacattgacccagcttattctattcactagctcgaaatagatcactgatttcgtgtacaatgcattttaaatggatgtttactctttccaccaacaccttcaactgaagtcgcctctcgttgatttgctacctcagcgaccttcactttttgagatatttctgtacacttgtactagagaacctttgaaaataaaggctcattaacacatgccagtcaactaggtcgagtttgcgttgtatcttaaatttcgtattagttagtaaaaaataatcgtcatagtccttcgtgactatatccccagaattcgctacctaacttcttaacgttcaatgacggctgagccataggggcgtgttctgaatgtcttgttttcattgtatttccatatcatttctgtttttgttatatctatacagagtggggc

SEQ ID NO: 11559 - DNA, 614 bp, Diabrotica virgifera
gcatatgcatatatatgctgcatatttctcatgttttcataaatgcatatgccttgcatatttggagatttaagagcatataaatgcatattttgatgggaatttactctaccccaatttaaaaataaggtatatattagtaacatcaacatccattaaaataaaatgtgaaagtaaatattttgctgttaagctcctttgttgttgtacccataaacataatgggcgttatttatagctgcaggtatcattatccggatatttaagatttatagacttctcagaatttacaaattacctaagtaaataccgattatattttgaataacattacaaatattacctgtactttctgctggtgtcggccaactatgaattattctgggaaaaccaaccaaaacgaaattttaagcattttaagggtaggatagattatttatttatgaatggttagtcttaaatcaatcgccgattattcaacttttgtgattgcaagttattgactatactgtgtaaaaaaatcattttattattattgtgaaatgcctaaagtagcaagggaaaaatcaagtcttctcagaagttggattggaagtaacaatcatctaaaagtt

SEQ ID NO: 11560 - DNA, 613 bp, Diabrotica virgifera
  misc_feature (536)..(538): n is a, c, g, or t
  misc_feature (583)..(586): n is a, c, g, or t
gggttttatgtatgtatttatgtatttgtaattttaatgattaacgtacaatgaataaatacatttttgtatattggaactagaaactagaacctataatttagtttaaattcgaaatggagttaagtgaagattctataaaaagaaaacaagatgttttaataggtgacaaagatggagattctctagatctaaagcaagatggtaatgtacaagttaaatcagaacttaaagaatgtaatgattacacacaggattctttatcagcctcgtattggtcggacgatattaaaatagaaatagaagaacatgtgttacaatgtgaaataagtgacccattcctcctcattcccaagcaagaagtcaaaaaagaactgaatgaacataatttaggagtaaatcatgggtgtgaaactcgatatacacaagaattagactacgaaaaagatgtaaaattccagacggaagcttcaactgagatacatcatgaagaccattgtagaagcggtagaagtatgaaaacgtcaaaattactnnncaacattggcaaacaaaaagaaagtaagttttattccaaaattgnnnncttttatatttctagcataaaataaat

SEQ ID NO: 11561 - DNA, 616 bp, Diabrotica virgifera
  SmartBlast Evalue=5E-17; Info=41 kDa zymogen n=1 Tax=Tenebrio molitor RepID=B1B5K0_TENMO
ggaaaaaaaataaatgaaatatattggcaaaacagagaaatcgctgaaataatattacccccgaattatccaacgatgaaaaaccaaagtctgttattactaaaggtcaaaaccaagttcgatttaaacggtgttttacgtccagcttgcctttacaccaaagatgatgctcctcggggtaaactcgtgtcagcaggttggaatattactgaaaatattgaggaaggcggtgcaagtttaaacagagtatatttacaacccttaccggaagataaatgcaacgataacaacattgctaattttaatcttcaaggtgttaacaaaaacgattcgatctgtactaaggcaggtagtaatgttggtgatggaaatatttgcaatgtggatattggcggatcccttcttcagtttcatccaatctacaaagaccttaaatgcatgcacgatataataggagtcaaactggatgatacagattgtgaaaatggcaaaaaaggtataaacgtatatgccaaagtgtatgattatatcaagtggattgaggatactgtgtggcataatgttactatataaatcctaaataagtgttaaagaatttgccgaagatattttccaa

SEQ ID NO: 11562 - DNA, 602 bp, Diabrotica virgifera
  SmartBlast Evalue=7E-23; Info=Zinc-binding FYVE finger protein n=1 Tax=Trichinella spiralis RepID=Q8MQT4_TRISP
gaaacagatatcaacccatcaagaaaaattagccaattccgatagtgttaatcaagagaaaattaaagaacagattaataaaatagaagaacttagcgaagcaatcaaaacattggaaaaacaaaatagtgaattaaaatccagagtattttctttgcaacaagaattagacaacaccgaagctggtcaacaagattttgttagattatctcaaagcttacaggtccagttagaaaaaattcgagaatccgacacggaagtgcgatggcagcatgacgaagcgtagacgaatgtcccaactgcccagggtttctcctcatcgaggcgcaaacagcactcgacactgcgcaaatcttctgccagagctgtctggcgcgaacggtgctctccggtccgaacagccgtccctctaaggtgtgcgacgtctgtcacaccttgctggacaagtcgtcggcgccgtattttagcgaggcagcgccgatgacctgaggacggtcgtcgtcgtttcggaattgtagatgtgatgttaatgtctttaaagtctaagcgtgtatagatttattaattgtatctatttaaaattgaagcattaaagttttaaa

SEQ ID NO: 11563 - DNA, 617 bp, Diabrotica virgifera
  SmartBlast Evalue=4E-35; Info="Succinate dehydrogenase assembly factor 2-A, mitochondrial n=1 Tax=Drosophila mojavensis RepID= SDF2A_DROMO"
attgtgttgggccattgtgttgggggttaatttgcaatatttttatttgtacgtgaatttatataaacattaaaataagaaatggcttataatttgataaaacaaattgcagatgtaaagtatataaaactgttttcaatttctggtgctagattgatgagctctactacaatgatagacccaccagacgatttattcactgttcccagaccggcttcaagggaaaacgagccaattgaacagagaagagcaaggctcttataccaatcccgcaaacgtggtatgctggagaatgatcttcttctgagtacctttgttgctaagcatctaaaggcgtttgacaaagaacagttggaaaaatatgatagactaattaatggaccttcaaatgattgggaattgtactattgggctacaaatatgaaggaaactccagaagaatataaccatgatgttatggatctattgaaggtgcattgtcagaatctgcacaaggaatccagaattagacaaccagacctttaaaagagcattaattagtattaaaaatctgttaatgtattaaattgttgtaaatagatcatgtagttaaaatcccaacacaatggcccaacaca

SEQ ID NO: 11564 - DNA, 615 bp, Diabrotica virgifera
ggaggagagtgtgttgaatgttaattctagacatttaaaacgtccgtgattggtttctatcaataacattgttgtgacaatgataaacattttcttttgttaattaaaaaaagtgtcgtttgtgatatttattacggaaaatcaacggttatgttctaaattaataatttagctggaatttcttgactgtcttggtgtttatagtgttgggatttgtgtcagaagttcaaagtcatgaaaggtgaactagagaaatcaccatcaagttcacccactaccaagaagggtacgttgaacgatggtctgttgatagtacctaacaacgtgagaagcatggccaaaatggtgacagagcatagaagaacaggttcgacaggtacaacaggggacgaatcctacaccacggatgacgaagacgatgtagacgaaccagacataacaatcaaagaccacgtcacccgtaacctcttcaacgaccatgcccccggtaccttcggttgtttttcggacatttccaccatcactgataaagtcagacatttgggtgtgatgcacagaaacagctcagacagttccgtgtatagtgaaaaatactctgaagagttaggtttagac

SEQ ID NO: 11565 - DNA, 616 bp, Diabrotica virgifera
aaaatccaacactgatgctgcctcagcaggccacattggttcgaagaggttaacatttgccacgtttgactccctatgttgtcttgtttcgattttgtagaatttgtcgaagaaaaatgtaggtttaattgagtcgcctccatggctgcatctagcaggggtaggggtagcgcctgcacctcaacccgccagaaacgacatctcaattgtcacattcctacatctagatgtacacccgctgaacgcaatcgcatcatcgtcatcagcgccatctctttgacgtatatgtctaaaggctaatgagtaactccattacagtagttgtagttgttttcatggcacctgttatatttagacaagccatctgctgaatgcaaatttaacagtgtatgcatatatatgttagacttaatatacttgtaagtgtaagtgagcacttggttatatattatttcaacttaagatgagatcttaaaataccatattttagtattttatttaaaattaccctgttcagtgatctgttaatactaatatctctgactcgtgtagttttgagcacaactgcccaggaaacaatttttcataatttattttatttaccttactcactcta

SEQ ID NO: 11566 - DNA, 617 bp, Diabrotica virgifera
cgactgagcgaacaacatcgctttgaattttaaggtggcatctgagtttaaataaagaacacgtggaagcaaataaattaatatgtccacaggaatataacatcaatatcagttacagcaacattggaagtcttgagtaaataccaaaaaggaaatagcaacaaatttaaatataagtttcaaccagtaatgccggtcattataaaactcagatagccaccttaattatgggaccatctcctactttggagtacccaattttgcattgtttttgaaagacaaaaccattacttgattccacagctaccaatatagcaactgttttggctactatatcacatcaatccatcagctttgtatgtggcagttcattaccttctgatcgaggatcatcttaagaggacttcattggacaacagtgtgtttttgaaaagataaggctatatttttttattgttacttaaattcctaataactttgatttttgtgtactttttgtaaactgctctatatcgatataaaccaggtacatttcatagttctttgtaaaatagggggggtttgtttttctcttgaagagagttgtatttcaagtaaaaggtaaataagtaatggtc

SEQ ID NO: 11567 - DNA, 609 bp, Diabrotica virgifera
aaatggttgtgggggacaattatgagagatttttaaggggtcgtggtaaattaaatttgcgtatatacatagaactgtattttatactctcatataatcgaagacgataagacatatgaattattttcagggccttctgttgataagtagtataattttggtttactgttctctacatttgactactaattttttaaaatgttgcaaaaatttaaatttaaggggtttgagcttcaatttgaaggaatttcagtttcttagtgggggatttataaaatcacatctggcaactctggtggaatgttgtagaaaattttccctgctctgtctctctctaggacctctcacttgtatgttagccgcaatccggcttcactgtttgaatggaacggggtcattccatccgtgttgacagttcattggtgtagtctcaattttgcctctctggaaatattttttgctcttagtagtttgtgtagggctccgacaatcttccttcctctcgaaattatcttctcaatttcttggctttcttcctctttacttgttaagagttacacctagacgctcatactcagtcaccttattaaagcaatactctttaccctc

SEQ ID NO: 11568 - DNA, 615 bp, Diabrotica virgifera
actagtagaaatccaacttttttctagtcttgtcgttactattcgggtaaacattttgcagaacaaaacgttgtcctcattttatttttaattatttatgggattggtggaactttaatggaaatgaatgctaaataataaacataaaacacaagagtgtttttttttttctttacagagtggggtcaactttcgttgacaagtttcgctgaatcaccagcgtcctataaagaatgataaagtgaaatttaagtgtaattttgtgttaaaattgtcaattttctttgtcatatgtgcttactttggagtagcgttaatgtttctattctattttggactgctaatttagtaatcgtcaataatatcgaactatattgtttattttctcgatgtttcttctatagttgccgtttttttggtaattgtgcaagtagattatcatcaatcaatgtacaaaaaaaaaacagatttctcataagctttcaacaactttaaatgaaaatcttttaggataaatcctcccaaatgaattttttgatggagcgccatataatttaaatcaatttaaaacatacaggcttattttgaaacgctggcgctgtataaaaactcttt

SEQ ID NO: 11569 - DNA, 613 bp, Diabrotica virgifera
  SmartBlast Evalue=5E-43; Info=Supervillin n=1 Tax=Harpegnathos saltator RepID=E2BPJ0_9HYME
tgtccgatggcaagccgaaaggaaagcagcgatgcagacagcgatagactattggaaacagactaacggtgataaaccgatggttggacacttagtgtgggcgggattggagccattgcaatttaaaaatatgtttccggcttgggaggataggcctgatgtcatggaactcaacaaaaaggaaggtaaaaatgaaggcgacatcttatccatcgaaaaagaattagctctgctatcccgaacgacatatcctttaacggagcttcttcagaggcctttacccgaaggggtcgatcccaccaatatcgaaaaatacttatccgccgaagatttccaagaattactcgccatgaccaaagaggaattcgaaaagcttccgtcttggaagaagaccgctctgaagaaagaaaaaggactttttttgaccgttgtttactttttttgtcgaatgtcttatgagtggatgctttgattattcaaagcccaatgattttatttaatgttgtgattttgttctgttatattatgtactacaagaagcgttggaaagccaaagtgtgacgtgtgaagtgtataatttgaaatgtgaatgcggtaatatcactagtattgt

SEQ ID NO: 11570 - DNA, 615 bp, Diabrotica virgifera
  SmartBlast Evalue=1E-10; Info=Endonuclease-reverse transcriptase n=1 Tax=Bombyx mori RepID=D5LB38_BOMMO
gtaatatccaacactttttttgacttgcctaagcgacgactttacacctggaaatctcctatggacacttgtggaagaatagtaagaaatcaaattgattatatctgtatatcaaatgatatagaaatgctatctcatcctccaaaacatatccaggagcggatgtaccctccaaccacaacttactagcagctaaagtattacttaatttaaaaagattaaaaaacccaaaatatttcctaggatcagcaaagataaactttcaaatgcggaagtgaaagaagtagtaaccgataaattagaagatcagtttcagaaatttggaaataaaaattcagaacaacaattatgggagtcatgcaaagaaatattggaaaaagtccaagaagacaatctaatggaaaatcagcgtagcaataagcaacagtggatgacaaaagagatattgaatttaatggatgcaagaagaaaatataagaatgctaatctgacagaatacaaaaagctcaacagtatgattctaagaaaaataagatcagctaaatcagagtggtataaataacaatgtaaaaaaattgagaactacgagcgtatctatgacgcattcaatatgca

SEQ ID NO: 11571 - DNA, 616 bp, Diabrotica virgifera
  SmartBlast Evalue=1E-60; Info=CG9836 n=11 Tax=Drosophila RepID= Q9VHK6_DROME
attgttgagagtatttatttcatttaaaactatttacataataatataactagtaccaacttatcacattgtttccagttctgtccccttaagcttccttcttctgatttttaatcttgtagtctgataaagcagccttaatggcatcttctgccaacatagaacaatgtaacttcactggaggcaaggacagctcctttgcgatgtcagtatttctcaatttaagcgcctggtctacagttttgcctttcacccattctgttgtatacgaactgctagctatagcagaaccacaaccaaatgttttgaatttcgcttcaacgattttgccattgtcgtcaactttaatctgcagtttcattacgtcaccacaagcgggtgctccaactaagccggttccaacgtttttatcgttcttgtccaaagatccaacatttctggggttctcataatgttctataacgtttttgtggtaacaggcaacagaaagccttgcaggtacgctcatgctgcgtagaagagttgacgtaactttgagagccatgtttcgtgtaaataaagtcttaaatccaatgatcttcaaaaaaatttatatgcacataatcaccatacaaac

SEQ ID NO: 11572 - DNA, 615 bp, Diabrotica virgifera
ttcgagcatctgtcatgtgtcacacagggacgtatttaggggttggcgaaagaggcgcccgccaagggcgcaagagtgaggggccgcaaaattagcggaagaaacacttttaggaaatccaagattttaattttataaactaagcatttttcctactttcgatgaaaaatatgatgccgtattctagcaaaattaaaaaagataagagaatacataaataccggtacggtgtcagtaacattataaaaataattgtaatatataaaggattttaagctttgttaactggatggtttgcagcgttgcaagctaatattaatacggcagcgtaatacaggtggcacaagaagcgtcgagcggcagaagatagaactgatcgtgcgcgagcagcgaagcggagctgcacacaacgtcaagttcagttcaggttatgaagaaacaagacgtagacttgcgattgatagttagttctcttgctcgaaatatttgtgagatatttagaagaagtcgctattgtatttgtactctatttgtgctatctttgactgtaggtactccggacgtttcgcattccgaacacacgagtcaagtcatgagatacattgatttctctag

SEQ ID NO: 11573 - DNA, 615 bp, Diabrotica virgifera
tatttattacagctttcactatatattcatatctacatcaattcaaaagaactgacaacataattctatagttaaaaatttaacttaaagcttaccatgagcaacattgtacattacaaaatacataaaaagattacaaagaaatatatttaaaatatttgagattcgacagatacatataaacaacacataaagtcatttttattgtgtattagagtcatttaattttttaatattaaaatatgtattaaactatacagtacaaacatttataaaaatatgtataaaactatggaaagcaaatttatgacaggatatattggaacatttagttaatacatacattattagacaaagccataagagggagaaataggttaggtagaaaagccatcacaatgttaaacagcattttatgggaccaatccatcagcaaagaaaataaaaagaggatatatgagacactagtgaaaagtatcactctatttaaaaagctgtgcatcatggccactaaaataacgaaccctggcaacgttgagagcaacggaaatggatttttggagaagagcagcaggaagatctagaagaaaaatgatcaccaacaaacgcattaga

SEQ ID NO: 11574 - DNA, 610 bp, Diabrotica virgifera
  SmartBlast Evalue=5E-13; Info=Retrovirus-related Pol polyprotein from type-1 retrotransposable element R2 (Fragment) n=1 Tax=Nasonia vitripennis RepID=PO21_NASVI
catttacattcataagatgcacatgattacacctctatgtagcggtgcttttttaatgtttgaccattggctccgatgatgacgtttatgttgggagcgctcagctagagaaatgaattatttgcacactttgacatgctacattttcatttcccttattaaatcacagaaaaggccatcgagtacaataaaccagcatatctatgttttatagacctgacaaaggctttcgatcgcatccaagtcaaagatgtcttacacttactctatagaagaaacataccaatcaatatacaaaccatcgaaaacatctacttccatattcgaatacaggcaaagataaatggaaaactaacacagtttataccagtacaaagcggaattagataaggtgactcgttaagcacacttctctttaatataataatggacgaaataatagaagcagtacataaaagtcatggttacagaatggggaacaaagaaatccgaatattatgttatgcagacgacgccgcattaatcgccgagacagaagacgatcttcaaagattaacacacatattcaatacaacagctaagaaatacatatataatatcagcagaaaaa

SEQ ID NO: 11575 - DNA, 611 bp, Diabrotica virgifera
ttctgttacggaggcaaaagtctgggtctcttcttgaatgcaacagaaaatttttgaatatgtattttatttctttatgccctttctcctgggacagatactgctccttcaagtgaaatctccgtttttaaatctactatgttcttttatttagaataagcaatcttacaaataataataatagataaatattatcacatgaatttcctgaacaaatatatgaatttaatgtacatattacattctgaattagtacaataattgcaaacatcttctggttcaagtttgatcttctttgaaacttgcatattatctttatcattgaatcttttattgagaattgcactgtatctatcaaccataatacctacatcaaggttcttttcaagtataatttttattttaaaccagacaccatcttctactagagccaatctatcaccagtattcagagataatgtttcatctttgtgtaacatttgtacagtaactcctacaggtgatttgaaataggtgggatttacattagcaggttgaaggattactccatttctgtgaataacaatgattgcatgttttctggatattcttttatcattacacttaattgg

SEQ ID NO: 11576 - DNA, 615 bp, Diabrotica virgifera
  SmartBlast Evalue=1E-85; Info=Lin-7-like protein B n=12 Tax= Neoptera RepID=E2AW16_9HYME
gtctccttctggctctttgtttatcaaatcgaagttccatttcttctaatactttgggagtataccgaactacaagtttcacagacccatgggcttgttttaatagttctacagccttctcgtggttttcaccatctacagacactccattgacacttaaaagttggtcacctctcttcaatcctccatgtctatctgctacacctccaggaataattctcgatatataaattggcgaattttgctctttgcctcccataacgttaaaacctaacccttcgtcagtttttggcagttccacgactctgggatgagcgtgcccttcactggctgcgaaagctgcaacagtggctttcgctgtggccgaagccctcacatcttgagacccttgtatgtctacagtttcgtatacgtgttcgtaaacttcacgcacggcgttcagaaagtcgctctgaagaactttttgaagagctgctagctttgtagcaggaacttcgccacttttttggagtttttcaagaagttcaatggatctctttatgtctcttgatagagttaaaggttctccaatttgagccatatttctaaaaatattttattattaggaatttactc

SEQ ID NO: 11577 - DNA, 606 bp, Diabrotica virgifera
cattgtcataatctgatgacagacttttctttcctgatatcaaattaattgattttcttatattgaaagtctttttacttcagattaaatattttctttattttgttacctaataggtataggggttatataggcaatttttaatttcttgataggttaaaaataaaaatgactatgtagtaatagccgaataggtttgtttttccttacaatatgttatggactataagtttggttgcttttataaaaattgcgtggatttactacacaaatttgaatttttattttccaaagtgctatttagtagttcaaaataccatggcatttaaataccccctacatgcatattgatcagatgtgttagtgacttttgttataatttctaatagaaaatggaatataaactgaatatttttatgccttgtgctaatttgaaagataatctttcaaagggtttttgtatgatataaatgttcataaaagaaatgctggcttagcgttatttatatacataaaaaaatacatgcatatatttgaaaaatgcatatctatatggactaatcaaaaataatcaaaacattttccgttcaattatttcaggttcag

SEQ ID NO: 11578 - DNA, 612 bp, Diabrotica virgifera
cggatccaccactatattttaccttatctcttccgttacagctgaatcaaattaattgtgtgttgaatctgaaccgatgatgcatcgctactatcccctccgttattgttgaatctggcactgcaactacagtaacataaaaccttcagttaatgtagaatttcggtaatgtctaatttattgtcaaatcagacctgtgaatatgttgcatctgcccctgttgttattgttgaatctactgaatcgattttccacggaatagcgcctcagttgctgatgaatggggcccgcgattaggaccgaatatgacatctagtaagtgataaattcggttctcgaatatattggatctaaaaatccacaaggaaaagaaaaggttttcctgtagttggctgtataccatcaatcacaaaattggaaagaaatcctttgtaaaaggtataaccttttataaccttagttataacctttataccttttacaaaggatctctttccaatattggatctgttccttcagttacagtataattatacagtgtgtccccgaaaatagtgcgttccttaaaggtacaggtagaaggcacaatgtagagcaaaacagtcctataac

SEQ ID NO: 11579 - DNA, 615 bp, Diabrotica virgifera
  SmartBlast Evalue=3E-60; Info=Mediator of RNA polymerase II transcription subunit 10 n=4 Tax=Apocrita RepID=E2AC59_9HYME
agttatctctatagttttaaaaatactcattattatagaatataatattataattacatactgaatatggcctcttcatcgtcattagaaaatttggaaacacagctagagatgtttatagaaaatgttcgtcaaatccacattattgtaagtgatttccagcctcagagtcaaaatgtattaaatcaaaaactgcaagcattagtccatggactacaagaagttgacaagctcaaagcacaagtacaggatgtccacgtcccattagaagtattcgactacatagaccaagggcgcaatcctcaattatacacgaaagactgcattgaaaaagcccttgccaaaaacgaacaggtcaaaggaaagatagatgcctataggaaattcaaagctaacatgttggtagagctcagtagaacgtttcctaatgaattgagcaaatatagagctctaaggggagatgaataatgtagatttttagttatataaatggtgtgtaggtttagtttgttaatgtttatagtttttaacaactagaatagataatttgtaattttgatatcatggttatagtataatgtaatgatataattttaaaatacataattatttatt

SEQ ID NO: 11580 - DNA, 612 bp, Diabrotica virgifera
cgaatgtttctaaaatcctttagcttctctgaatgtggatcatctcatgttcattttataaaaatatttgaaaccatgttgtttaatgatgtataaagttaaaaaaaagttgggtaaattcagtaaaaatcccacaaaaaacctctgaaaacctagtgttcgaataaactatggttgtatttgcctctttgatgccgaaactatcattttttatattttttggattggtgatgcactaattcagtttgcattgatctaaaaaatatgattaatctagcaaaaaaactttaaagtcctgaaaacagggttttcaagacaatttttgaatgccccataggaatcagttacttaaaattatataggtacaacctctaagaaaatttgatttgatctattttgcagtctgtaaaatggggaaaatcttcaaaacccctaaatatcagtttttaggtctttgaaggtggcacaccttacggaaaaatctgcaacaagatcagaaatatatatatttttgatataatacatgaaaaaaaattagatcaaaattaaaatctccaaaaggaaaagttgtacgcttttttttgtaaaaaaagaatgtgtgtgtgtactttg

SEQ ID NO: 11581 - DNA, 610 bp, Diabrotica virgifera
  SmartBlast Evalue=2E-27; Info=Collagen alpha-1(IV) chain n=1 Tax=Harpegnathos saltator RepID=E2BTW9_9HYME
atgggagagaaaggagatgttggttctccaggattgaatggactgacgggcccagcgggtcaaaaaggagaacctggacctattggacctccaggtattgatggacgtgaaggaagccctggatatccaggcgccaagggagaattaggtcctaggggacaaccaggacggccaggtttacaaggtttcccaggtttaaaaggagaagcaggattccctggtgccactggtcaaaaaggatttaagggaactataggaatgcccggcactcctggacagccaggtatggatggtctacccggaagaataggagaaaagggagaacgtggattccaaggggccccaggacctcaaggattaattggaatgcctggcgaaaaaaggtttctcgggcgaaaaaggtgatcttggtccatttggtcccccaggtttaccaggatcccctggacctataggcgataaaggtcaatctggttacccaggtaacccaggaagaaaaggagaaccaggaactgcatccgaaaagggacaaaaaaggagaacacggcatgccaggtttaagaggagctgatggtttaccgggattacaaggattgcctggagataaagg

SEQ ID NO: 11582 - DNA, 617 bp, Diabrotica virgifera
  SmartBlast Evalue=9E-32; Info="Glutaredoxin, putative n=1 Tax= Aedes aegypti RepID=Q1HQU6_AEDAE"
ttagttacatacaattatttattataagtgggaaatttctttatacaaaacataaaaatctaaacgagcaaagcaaagtgacttaatcatcatcttcgttgaggagcatgttgaccaagttggctttgtcgcactgttcaccttccaatctttggggtccctgccatcttaccagagttggcaaaactcgcaatttggttttggggtcgtgtctgaaagggcagttgggatctttccatattggcatatcaccaacttcgaccctgacaaaatgggaatttggatcagttgcctccaattctttgtctataactggccaagctctgacacagtaggtacaccaacttgtgttgtctggctttctagggctggaatacaagacatgcactttttggccctggctatcgaagttcttgaaaaactcttggaatttttcgtatccttgaatgacgtgtgtctgcaccatctttttagttgaatatttacgaaaaatacctagcaacattcacggctgcagctacaatggttataaaagataaacgtttttttttaactggggaaaccagacaaacaagataaaaaaaccacaccacaccacacaactaccacatgacgtt

SEQ ID NO: 11583 - DNA, 613 bp, Diabrotica virgifera
  SmartBlast Evalue=4E-66; Info="DNA-directed RNA polymerase I 135 kDa polypeptide, putative n=1 Tax=Pediculus humanus corporis RepID=E0V8Y6_PEDHC"
aatcttgagagcagcaaaaaaatagtggagggattgaaagtgccatgggtaatttcttagccactggcaatttaagtagcatatcaggattgggacttatgcaagataaaggtttggtcattatggctgaaaacatcaacaggatgcgttacatgtctcacttcagagccgtccacagaggagccttctttcaagagatgagaaccaccgaagccagacagttgttacccgatgcttggggattcatttgtcctgtacatacaccagatggcgcaccttgtggtcttttgaaccatcttaccttgaattgtgttattactgatgtgccagatcaggataaagtaaataacattccattggttctaacggaattaggtatgaagcctcttaaacacgccgacatgatcgatttgaaaagcagctatgtagttcaactcgacggcagaatcattggatttgtccacgtaaacgatgcagccagaatcgttcagaaactaagactgttcaagataaagggcaaagtcattcctcaaacactggagatagccttagtgccgttgaaaagaacagtggctcaatatccaggaatatttatgttcacaggaccggctag

SEQ ID NO: 11584 - DNA, 615 bp, Diabrotica virgifera
ggctccggagtctcgtggctttgctttggctccttaggtgcggctctggcacaaatatccacggaaagcgcaataatattttcattaaaaaaacttggtagggaaaacattacctaagtacatcttattctgataaattagcttttatcaaacttacaaactttagcatttgtcaaaattcgtcttaatgctacgataaccgagttgaaattttcttcttttaacatttgcattaatagctttgaaatatgtatttaagaacaaggatgtatggtgctctaaattctaacgccttcgtgttgaattggacatattggagaaggaaaaaatgttcacaacacaagtggtctgctttgaatgacctggagaagcaagatatgatcattttcaatgcttggaatagtattcctgatactcatgatcagatgaaaaagctcacgtttgctgttctttccctttttggttctacatatcaacattaaaaaaaatggattttgcgccaaaatttttgtaacaaatacagtgttgtaggaaataaaaccttacaaaatgaaagaaaatagaagtttctacgatgattagaaacgaaaatatcgccaaaaaacgaaaaaaaca

SEQ ID NO: 11585 - DNA, 605 bp, Diabrotica virgifera
  SmartBlast Evalue=8E-46; Info=Loss of heterozygosity 12 chromosomal region 1 protein-like protein n=1 Tax=Camponotus floridanus RepID=E2AAE7_9HYME
atcgcgcagaacatcccagcccaaaccatcaaaatccaaaacatccacccacaatatcgtggtagttcgtggagcgaatcctgcaacagcagttacagaaaaagatcccgaaatactgaggttacaaagcattccgatgtttttgccaataatgagagctacactgagtttacctgcagcaagagatcctgaagtattagagagattggaccctacacctattagaaatttatgtttgaggtatcagcatcatttgacggctgcagcaaatttagtagctaccgaacaaaaccaaattacacataaaatcagagagattgatgcagaaataacaagagtagtaatcgtagccacagacaggcaacgtaagtatgccaaatctagcgaaaagctatccaaagtgaccgaactgtctcatcaattaaaccgctgccatatgttgctgaatcaaactctagaatcgatggaaacattgaacaattacttggacgttgaagacaggttggaacctttcatttggacgactgggtgagatttgcttcaagatccttatgaggttgaaaatgagggaaacatgagaggatagatataatattaaaattatt

SEQ ID NO: 11586 - DNA, 610 bp, Diabrotica virgifera
  misc_feature (552)..(553): n is a, c, g, or t
  SmartBlast Evalue=3E-27; Info=Scavenger receptor class B member 1 n=1 Tax=Harpegnathos saltator RepID=E2BT86_9HYME
tttgttcaactggaccaatcctgaggatattaagaatcattcggtgaagccggagtttgaggagcttggaccttataggttctacgagattaaggggaagagtaatatttctttcgttgatgaacatgtaaattataagacatatacgtcgtcgtttttcgacgagaagaaggagggtagaaatttaagtgatgtgataaattccattaatactgttgctgtgagtataggataccaagccaggttccaaagttactggactaagaaaatgatttcgtttggaatcggttctagaagtgctcatctctacgttaccaaaacagttcgtgagttgcttttcgacggttacgatgatcctatattaggaatcatctccaaaataccgttcgtaggagcacccgaaaaaggaggattattttttgggagaaacggcaccgtaggtttggacggtacatactcattacactacaaaaagcgacgaacatttcggggaagtattgctctgggatggaaaaaatgaaaccaatttttttagtggagaatgtaatgctnnaaaaggatcaggtggcgagttctttccacttaaccgaaaaagggaccaaatagttat

SEQ ID NO: 11587 - DNA, 615 bp, Diabrotica virgifera
tctttaatgcgtacgctttgccaactggatcttcaactgcaaaagcaatggtcaccctgttccttccttttattgttttgtttagagttttattcagctatgcttaaagaaatacaattaaggcaaatgggttgcttgtatacaaataaatatgattggtgtctctataaagttgagagtatgtgtgtcacaggtgcggaggcattcgtcacactttgaaaccctttttttaatcgattgttcacgttgtgattatcaacatatcttggaaaatcaaatttttatcaaatacatccaacaatcttagctatctttacccctattttatcgtctgtccttaactaaaaatatagcctggcgcgaagcttctattaataatctatcattatacaagttttcacgaatatttacgaattctttaatacacgacatggatattagtatgaattatttacaatccacgaaaaaccaataattggtattgcccactgattaccattggttagtgccctgtaaattgttgttcaatccctttaaattatcatcaaatattatattatttcttattcgtaaatatttccttttctccatctttatcacattctctctcacccc

SEQ ID NO: 11588 - DNA, 605 bp, Diabrotica virgifera
gaagctggcaccaaaacaagccattaaaaaaattattgagctcgatacagacaagatggtttatcttcgagtggtgatattagttgttttgttggtgattggtggttcgttacaagataataggaagtatcaaccaccagagacaatcgcagaattggcagccaggccttttttacacaaagattgttcgaagcacgttcatacagggtttgcttgcatggcctttataagacgctacaaatggaaccagaaagaacaacaatgtacccttgcgatatacggagggtgccatcctaccaaaaataatttccaaacgtttgaagattgccaaaaggtcgcggaacctatatgcgcaaatcggttgtaggctacaccagagctgcatcatacaaaatagtattttttaaataaaggctctcgataaattttagattaatattaggtattacatgtatagttgccatcaaattattgcaacaaacctttttttttgcttgaaaaaatggctttggcagagccaattagccagacttgtttgtgattgattgcagattcatagtcataaatttcttatttcataacgtaagtactacaatattattttt

SEQ ID NO: 11589 - DNA, 613 bp, Diabrotica virgifera
  SmartBlast Evalue=8E-52; Info=Protein FRG1 n=1 Tax=Harpegnathos saltator RepID=E2B5Y2_9HYME
taaagttcgaatcggaaaactggtattaaaaggagaaaaacaaaaatcgaagaaacgcaaacacaaacctaaacaacaagaggaagaaacgccaaaagtggatgttgatagtgcaaaacatggaaactggtggtccataaagaaaaaagatgagatggttggtcctatagctatcgaattcggtgcccatacatacgtaagagctctagacaacgggctttttactctaggagccccccacagggacggacaaggaccctctccggaagaaatcttaacagccataccaataaacgaaagaaaaatagctttcaagtcggggtacaataagtatttacgagtagagaaaaatggaagtgttactgggagatccgatgccataggagccatggagcaatgggagcctgtattccaagatggcaaaacagcgttaataggttataatgactgctttctcagcgtaagccctgaggatgacacaatcattgctgatgcaaagaaagctggaccagaacaatacattactctcagatctcagacagttaaggaagaaactagtgtgtctgaagttgccaacgaggatcaaggaacgtaaagcaaattgagataaact

SEQ ID NO: 11590 - DNA, 609 bp, Diabrotica virgifera
  SmartBlast Evalue=4E-26; Info="LINE-1 retrotransposon-like element, putative (Fragment) n=1 Tax=Aspergillus flavus NRRL3357 RepID=B8NZ53_ASPFN"
aattgatcaccctttttgtgtagcgggcaaacgattccaatacaccactcttccgggatttgttcctcattccaggctctcagtattattttatatacatatttgattagtcagggtagcacctccatatttaataagttccgaggatataccatcacttcatggagatttattattttttaggtgttttattacatcccgtacttcttgaattgatggaggctctaatggtgtattgttggttgttcttgggttcggttgatttggatcttctacttcgatggtaagtagttctttaaagtgttccacccacctttccaatatttcttcttttgtattgagtatgtgcccctccttatccttacatagtcttagccttggtttgaattcttttcttgcattattcagagttttatagaattttcttgtttgattttcctgttttaatgcctcaagctcttccagtattctattttcataaattctcttttttcttctatgaatgcacttctcttctcttctaaggtctttatattttgttgtttttctcgggttcttctttgctgcatctgtttatatgcatcgttctttcttcttgtaatgtcctca

SEQ ID NO: 11591 - DNA, 615 bp, Diabrotica virgifera
  SmartBlast Evalue=4E-39; Info=Brahma n=2 Tax=Tribolium castaneum RepID=D6X4G8_TRICA
ccgctgcaaatgaatcaacttagaaatcaaattatggcatacaggtgcctagcgaggagccaaccaattcctccttcaataatgttggggctgcaaggaaagaggcctgacggttcaccacagtttcctacacctccgtcaagtccgtttcaaccacaaggacctggtgcaccccctggtccggaacaaccaccagctaatgcagaaaacgtagcagagccagcagcaccagtaggaccgcaaggtgcacaaggacctcctaaccaacagagagctcaaactagccagttagtccccaataagcaaactcgtttcactaccatgcccaaaccatctggactagatccactagttcttcttcaagagagggaaactagggtggcagctagaatcgctgctagaatagaacaatgtagtaacttacctaccaatctttcagacaaagtccgcatgcaagcacagatagaattgagagctttgcggtgccttaatttccaaaggcaactaagaagcgaaattttgaactgtattaggagagatataacgcttgaatctgctgtaaattttaaagcatataaaagaacgaagcgacagggtctaaaagaatcgagagct

SEQ ID NO: 11592 - DNA, 615 bp, Diabrotica virgifera
cctgcgacacacgccactctagttctttctttcaaaaccttatacttcggacacaccggcaaagtctttaaatatactttcttgcttttcggacacaccgatacatttaaactgaatatacgcagtagttaagtatgatctggggccacataacctattagattttatatatttaatttaagaaagaactagagatttgacttttcataaaaactgctttttatttattcaacaactactttcatttttatcaacaacaacctacttaaaaacattttaaatagcaacctaaagggtggtttatatgaacattacaacaacatattccaataggtgttctattcgaaatacgaaagttcattatattttcaaaaaaacgcaagatctgacaacaatgtgtaattaccactataatatcggccgcattagaagacctttacccaccaaattctataaaaatcgttcaagtcgtttccgagatatttgaggcgttccatacataaaactcactctgtataaatgttatttaattaaactgcgtgtattactttgtattaattcttattaaaaaaagtcaatcttaaaattttcaactaatagcaaacaaaaattatc

SEQ ID NO: 11593 - DNA, 615 bp, Diabrotica virgifera
tgtgttgggcaaggaaatactacactggagaccatacgaatacaaaagaagtagaggaaggtcacagatgagatgggttgatgacttgaagaggcgagccaatcatagatggatgaacttaactcagaacagacctacgtcctaaaatggataacatggtctacatagatagatagatagatagatcgatagtgcaagtatgggaaaataaaataatgcccaaatgcgttgcccgcatatgcccgctccaaaaaaggagacaaactgaaatgtgacaactatagtggtatagccttttgatacagctagtggaatatatctttgataaactatactattttcgttgtataatgtcaaaaatgtaacgcccaatcaaccaatattgatgacctttattaacattttagcctgccccactaactcaaaatttacattagtcgacgaatccacaatttatttactgagtactaacatggtttcatgtaaactaaatttaaaaagtgtgcttgaaattcgtattttctttaatttctatctttcttatgtaaatacagggtgtttttgtgttggtttatttgctgatgctttatttatggatgctctgtataagttttc

SEQ ID NO: 11594 - DNA, 613 bp, Diabrotica virgifera
ggggggagggggccatgagtgcacatccgacgtcgtttgatgttcacgaatataaaaatataccctattgtaggtaggattcaaaataattagtaggtatattacttttattgcatacttttcatttcgtttttatcactcacagccttaataatattgctagaagttttgtacagaataacaaacaataaaacattgttctatatatttaaataaacgcttctatacagaacaacgtctggaagcaataaatattaaactgttcatttatttactgaatactctgtgtgaaacaataattattattctacaataatgaatagaaatgaaatattctattttatttagttagtacattgtatttatacttaataaaagaaatggtattgaaatgaaaacaaaataagtatcaagatttatatgatgcagttaagaaagcataggaactccaataaagctaattagttgtacagtgaattgagagaaaaaagtatgcggatattaatgagctacacagtaatactgatttggatacattcgtaaataaactttaagagctaattttaaaatataaagaaataacatggaatttaaaaaaatcactaaaaagggg

SEQ ID NO: 11595 - DNA, 610 bp, Diabrotica virgifera
cgtttctttttatctcataacttaattatgttttccatcttttgcgttgttttgcccgttactagcgcgctcatcactgtatatcaggatggcacgcgcattggcaatatttcgcttccaactactcccaagaaaacactgcctttatcttagttacaacaattaaataattgctttttagcactgactggtttggtaaaagattttttaagcctgcgagtaggatgaaattatttttaaactggcgatacttgtgagtttatccttattcttccaatgtatattaaaaaaagcaattatcgtttttttttgttttatggaaatttagtagtgactgattcagatcaaatagtatggcgaatgacacataaatagtcatattatttaaacgtttaatattttgttaactatttcaattttgtgtgattgtttataaatatatctaatgtatagtttcttaaatagtatagtagcaaatattacaagtgcaaaccgtaaattttgaatagaattcatttaaaatgtcatttctatataatttttgtacttctaaccttttagcgtataagtagtacaaaattataagaaatctttttagaaatatgaaatt

SEQ ID NO: 11596 - DNA, 612 bp, Diabrotica virgifera
cttctctgactgcacctttttctaggccgtcctacagactttctcccatctggcctctctccgaacagctatgtctggtttgattttttgataaatttttagcgtggcatattctaaggccaggttaaataacaatgggtacaacggatctccctgtctcagtccagaatttacgcagaaatcatttgatatttccccacctcttctaatacgtgtgcaaagaagttacttacacacatttgcgttaccgcagttagttttttgggtacgcccagctcgaccattgtatagggcttttcatctattgtcatttgtttcgagcctccgtcatatgttgtatactctgtgtataatattattatacacagattacacgacacaagacagaagctcgaaacaaatgactgtgaatgaaaagctctattccatagtgtaggatgattaatttaatcataagcctgtttgaaatctataaagatctgatgcacgtgttgattaggtataccccaatcctttcaagcatttgtctaatagtaaatatttgatcaacaatcgatcttccgggacctaaatcacactggtagtcagcaactatttcttcggcgtatggta

SEQ ID NO: 11597 - DNA, 612 bp, Diabrotica virgifera
ccgagaggaagagcttataactcctttaacgaggagtgtttgaaaaggcgaggaactgttgttaattaaaaacaaggataatctttgtttacctcgtgctcttgtggttgcaaaagctcacgtagataaggaccaagaatggaagaaggtacgtcaagatattggaaaaatacaaggacaaagagcccatcaactgattgaagccgctaatgtaacaattcctgtcggaggggcaggaatacccgaactacaacagtttcagggacacctcacagattacaaaattgtggtgtatagttatggtagcaagggtcgtgacgttatgttctgtggtaacactaatggtccagcgttaaatcttttgtatcatgaaggacactttaacgtgatcacttctttgacagctgctttttgttgtatttattattgtgaggagtgccaccagccgtttaacaacaaaaacgaccacagatgtggtggtacatgttttgcttgtcgtcgttcaccagcttgttccaaagattgcgtgaaaataccctgcgatcaatgtggtcgaaacttctacggtaaggcatgtttcaatgctcacctaggatcggtatgcgataaaat

SEQ ID NO: 11598 - DNA, 614 bp, Diabrotica virgifera
  SmartBlast Evalue=3E-65; Info=Histone deacetylase complex subunit SAP30-like protein n=3 Tax=Aculeata RepID=E1ZVC8_9HYME
acttaaatatgattatgacttaaaattacttcatattttaattgcacgagcattaagtagtgtcattattgataccattcttctgatccagcttgttggcgtttgtctttacagtgtatatgaagaaagttaccacttctttttccttcacaggaatcgtcttaaagtgcttcattaacgtatctgcaagctgggctttgttcagtccttgcctcattggcaccttataatgttttttgtaccttctcagggtgtttacttgtaattggtatagatctacttctggaagatctgtgtctgtttcatttgagtcatcttccgattcttttcttcttctttttgtccttgcacattgaatgatcatcttgtgatggtcacagatataattgtgccttgcgttgctatctatgccaaaattcaacctcctttggatggcagttttttcaatttttttactgtaggatgcgtttccagctggttttatacaccgttcactattatcaatcaaacaacagatttgatctgtagggcctcgtgaatcctcttcacccgtactaaaaccgttcatttgtatttttaactacaagaatcagctgattgatgcaacatcttcc

SEQ ID NO: 11599 - DNA, 607 bp, Diabrotica virgifera
  SmartBlast Evalue=1E-48; Info=DNA replication licensing factor MCM3 n=1 Tax=Salmo salar RepID=B5X2W3_SALSA
tttttcttatttgttttttgtcgtgattttgagctaaaaaatcacgacgaaaaacaaatacgaagggtcaaggattgcattgagtttgggttaagaacggttttgtgtgccaaccaaagatcacgtgatttaactttgacaggtcgatggattccctaattcttctgtttgaaaagctgtcactgtcaagttcaagacgtcagggcacagctaactctggatttccgatcttcgcttctgggacaaaatgtgcatctgcctgtggtagcaaccggtcttgttggtacttctactggattaggattagcagcagccaatactgaacatctagcattcaagctggcatgtattcctgctttggcaattgtgactctaccttgttccataacttcgtgaatggcagttctatcaacatcactcattttatcgaattcatcaatacaaacaactcctctatctgcaagaaccatagcacccgcttctagacgtctttcaccagtttcctgatctgttgtaactgctgctgtcaaacccactccagaagatcctctacctgtagttggtatagctctaggagcggtgtgtaaaacataacgtaacaactgag

SEQ ID NO: 11600 - DNA, 613 bp, Diabrotica virgifera
  SmartBlast Evalue=8E-75; Info=COP9 signalosome complex subunit 4 n=1 Tax=Harpegnathos saltator RepID=E2BYA4_9HYME
gttagattgaagaaatataatttaaaaaactatagtgtgataatatttaaaaatagcaatgtccaataaggcacaaaatttacgtgtacaacttcagaacattatagcttcgggaggatctcacaaagatcaagctgaaaaatataggtctacccttgaaggtatactacaagagagtggtactgatttaattgaatgcttacaaacttttattgaagcaattcttaatgaaaatgtaagtttagtaatttctcgacaaattctaaccgaaattagtgcacatctaatgaaacttaaggatgatgtttcaaaagctgtgtcacactatatgttagataaagttcagccaagggtgatatcttttgaagaacaagtagctagcataagacaacatttagctcttatttatgaaaggaatcaaatgtggagggaagcagcagttgtgttagtcggaattccactagaaacgggccaaaaacagtacactgttgattacaaactagagacatatttaaagattgccagattatatttagaaaatgatgatcctgttcaagctgaggctttcatcaacagagcatccttactacaagctgaatcccgaaatgaacaa

SEQ ID NO: 11601 - DNA, 614 bp, Diabrotica virgifera
gcttttacattttctctaaaatttttgacagtagtatttaacaaaatatgactagtattacaatggtgttgacagctttttaaactagagttaatttatacaaaagtatcaactttgtataaaaaataactgtgcgcgtagcttgcttagatacctacttggaaagtgtggtcttgatgttaaatcaaggctttgcttttacagcatacgccttcagttgtacgacatatacgtacttaatttataattgatatgtttagctcatatattatatatataatagctcattcaactacatgaccaaaatctacgcaataagtattacagtatttcaatagagctacgcaagttcattattaaatttaagagcatttctggaagacgaaatatttgacattaaaaaatagtgatctaaatcgcgcagtgtctcctgcattgttattgtgctgatcaaagtaaaagtattttacaagaactgtagataagtttagttagaatgtagtatgaagaagtttaaaggtcgaaattaaatcctgtgttggtttaagggatgctgtgaatagtataattacattttaattagttatatatttatattgatattttagacaaaa

SEQ ID NO: 11602 - DNA, 614 bp, Diabrotica virgifera
gatctttttaatgtaataatggttgtcattttttgttaagctttgtttaatttaatgtataataaatatctttcatactaataaagttgtacgctaaaatatactgtgtataagaagaatatttggaatcctctgatttaacatggtagaagagtgtaggttgtaaagtgataaacctaatttttgtcattcagttcctacaagcacacagatattttttattaacttgtttttgttaatcaatatgacaactccaagtaattcaaataattccacaacaatggtaacttcagtttcttcaaacgtaccaaacattgataaacttgaaggacaggtaaactatggtagctggaaatttgccatgagaatgagtttaatcttggaagatatttatgggtatgctgatggttcattaccaattgtatcagatattgacaaagcaagagatcaaagagcattagcaaaaatatgtctttgcatccaaccaagttgttatgttcatgttcacaatgctaaatgtagcaaagaagcatgggataatcttaaaaaagcctttgaaggtaatagtatggcgacgaaatatgaactcacacgaaaattcttcaatatgcgcc

SEQ ID NO: 11603 - DNA, 612 bp, Diabrotica virgifera
catatgaatattgaaaaatattgtaccagaatcccatacgtttttttttaatattggtgttaggtagttttatcgaaataaaacggaaagacctacttatattatgacgaattattattagcaacttccaaaagatgtttgtcagttgttaacacagttgtcagtagtaaaaatgcaggtattggttgtaaagatacggttgtcatttgtgttaatagatgtcaggtcttagtacaccacagttgtcaattgtcaaaacatagtttctaactacttgctaatagttaaaagaaatttctcatttactaaaatatttgtaatctgtatgaaaatgtttgtaaacgtatttataaactttaaaagcacaatttatcacttataactgtcaaaatatgtagcaactgtcaaaaaataattgctaacttcacacgggaggtccaaacccaatatattggaaaaaattgttatagtacagttattaatattcaatatacctacattaacatactttttaaaacccataaaaatacaaccgcaaactgataaaacagcagataactcccaaaatattttgaaaactatcaaaatattgataactttttaaatacattg

SEQ ID NO: 11604 - DNA, 614 bp, Diabrotica virgifera
  SmartBlast Evalue=1E-46; Info=Dynein molecular motor protein light chain 1 n=1 Tax=Bombyx mori RepID=A3QVU8_BOMMO
ttgggctctgtaagtcagttgcacttggaaaattattgattttatttattaatatatccagtatcttaaattaagagtgagcattaaccgagtccaacagaaaagccgctttatcatattcactaaacaacatatcaatggagaagtcaccgcaagaactggtagatcaagatctacaagaggaaggtcaatttgttgtagacgatgttagtaaaataattaaagatgccattgaaactgtaataggcggaaacgggtaccaacaaaacaaggtaaacaattggacgactgaagtcgttgaatcctgcacagctgaactaacaaaacttatgaagccctataagtacattgtaacctgtaccataatgcagaagaatggagctggtttgcacaccgcaagttcttgctattgggacaacaatactgatggaagttgtactgttcgttgggagaataaaacaatgttctgcatagtatcagtctatgggctcgcaatataatataatctgtgactagaccattagaaatgtttgccttattaatacagtatcattattatttataaattaatttttattactctagttattaatataattcaataagtctgtgtt

SEQ ID NO: 11605 - DNA, 615 bp, Diabrotica virgifera
  SmartBlast Evalue=4E-65; Info=Cleavage and polyadenylation specificity factor subunit 1 n=3 Tax=Aculeata RepID=E1ZVR7_9HYME
gtcttcttaagttatgaattttgatgtaaaatatttaaaaatacattaaatttataaacatgttttcaatttgtcgacaaaaccatcctgctacagctgtagaacacgcaatatcatgttattttttaacaaggtagaaaaatgtttggttacagcaggcgctaatgttctcaaaatatacagattagttcctgatgtagattctcgccttagatcggaaagatattctgaattttatcctccaaaatcgaagctagaatgtgtagctcaatacacactctttggaaatattatgtcaatccaaagtgtttctttgacaagttgtcaaagagatgcattacttttgggtttttcagatgcaaaactttctgtagtagagtatgatcctgaaaatcatgacctaaggaccttaagtttgcattattttgaagaagaagatatgaaggatggttggacacatcatcatcatgttcccctaattcgtgtggatcccgaaaatagatgtgccgtaatgacagtgtttggtagaaaattggtagttttaccttttggaagggatacttcaatagatgacaatgatggtgatattaaacctatggcttcaaacaccagcac

SEQ ID NO: 11606 - DNA, 609 bp, Diabrotica virgifera
  SmartBlast Evalue=2E-21; Info="Histone H3 methyltransferase, putative n=1 Tax=Pediculus humanus corporis RepID=E0VWC8_PEDHC"
ggggtgcggggagggcctaactcgtcagtaccttgatctaaaataggcggcgaatcaaggtacgtcttacttgtaggcattttgaaaagagttggtttagtgttggggttaagttttaaatgttgcttcgtggggggaactatggtacttgggggaatgtctccatgtccatggccgataccagaatcaggtgacgtattgcaactatcagttccttcggtagatctacggcgtttatccaattccgtagaggcgaatgcaactagtcggtcgaaacctgaagaaattcggtcctgccattttgattcttcgctctcttcttcgactacgtcgacatctcctccttgcacgatgggtgattctctcttaaagacgccctcgttatttgggttcgccattatgctcggctggctaaacccgtgccttcgctcgtacatctcaacctcttcttttatcgatgcaccaagcgctcttgattgaagagtcgctgccaaaccttccgcgataaaggcgtttcgagattcagctcgaaccggcgacttgttgtcattgaagtatgattcgtggtacggcttgatgtcagcacgtggaagaggcatgtacatgtca

SEQ ID NO: 11607 - DNA, 614 bp, Diabrotica virgifera
  SmartBlast Evalue=9E-24; Info=Odorant binding protein 22 n=1 Tax=Tribolium castaneum RepID=D6WYL0_TRICA
cattgtgttggggttgaatcatggaatattttgttgtttttttagtgttatgtgttgcaggatctttagaggctcttaaatgtgaatttggaaataacaacggagagaatgttcggcaagcactaagccaatgtttaaacagtaatgaaactgagcatttctggaagatggcaatgatggatgaatcagatgagggttcgtctgaggaaggtgaacattccatgaccaacagcatgaacggttccaactccagtacagtggctaaaacaaaaagagctgtcgatgataaaatgaccaaaccaggaactgatacagatagtaacacaactgaggaaccagataatggagattcaaacgaagcttgcctcattcaatgtgttttcactaatatggatctgatggacaccaacggtatgccagaccattctaaacttctggaaggacttttgaaaacagcaacgtctcgtgaactacgaaatttttttcaagatacagtagatcaatgctatcaagaactaaacgaaggtaataaaatggacagctgttctttttcaacgaaattggtcaaatgtttggtagaaaaaggaaaagcaaattgtgctgattggcctgct

SEQ ID NO: 11608 - DNA, 614 bp, Diabrotica virgifera
gggctcaaggtaataattcttctgaaactagtggtgtccaattagatgttaaagatgagatgtcgagattgcattcaccagattctttttattccgttgaaaatgctgaacgttctactccaacttgtgtaaaaaatatagaagacgagaataatgtaaacacaaataacaagaatcctgcgaaatctgataaagatactgaagaagataaaggtagctatggcaatggtgtaaatagcgttgaggaagatgagattgctgtagttaaagacaaatcagtgaaccaaaacaaggataatcattctgaaattaataatgatagtgatgatacaattgctgtagatgaacttatgactagtgacgaggaaccagttgaaagtgagaagaccaacactaaaaaatcactaaaacatacagataagattaatgatttgttaaaaaaatattcatccccaaaaagtggggaaaatttagatgcaggtagggaaaataatgatgatgaagaagatgcaataattattatggatgaatttgaaaattttgttcaaagtaggatgaccagggctaaaaaaccattaaaacctacagaatcagataatattcatgatacagat

SEQ ID NO: 11609 - DNA, 599 bp, Diabrotica virgifera
  SmartBlast Evalue=2E-17; Info="CG5484, isoform A n=7 Tax= melanogaster subgroup RepID=Q9VBC5_DROME"
cggggctgtataggaccttcgtatttcacagaccaatccttatgattgaaaggaaaaacagcaataatattttagacattacatatttggtatcaacagcaaaataatattttaatttagatataggtacaattttctcaacttcttgttttaacattgtagttcctgctcccgccaactgttggccatattgtaaagccatgtcttgtacaacaggctgacccaggacactcaaattctgtggaactcctgccaatggattcatgtttaaatttgtataaggttgattaaaattctgactctgttgtggcatctgtggtgtacttgtatattgtggattttccattggaggaaaactttgttggaagctgttcattccaggatctagtgttggatacatattttgagcaggggcaggtgggctaggtgggggttggtcgtatggtgaatatcccatagaattaacatcagctacccttttaagttttcttccaagggattgtctacccccagtatttgcattgtagttcattctatcaaagtttacgaaaataccattaaattaataaataaattatgtacagtttacctacaatatt

SEQ ID NO: 11610 - DNA, 613 bp, Diabrotica virgifera
ctcaaaaatgagaaaaaatgtttatttcacaaataaacatttcttttcgcttaaattaaatcacaaacagcctcccacctacctctgacactttgaacatttaatttaaacggaaagcaatgttttgttttttttttattttatgacggtaataaaatgtgttataagttaaataaaatacaaacaatattctttttgtgtcaattaatttaattcaaaaattattttgtggccaccctgtataaataattacattaatgtttatactactgaacagagaattgaacactttttcaaatgagataacatacgactcctattgccattaaaaaaatcatggattatgtcatcacgcccaaatttatgacgtcactgacgatgacacgtcatgaggacgtatgaaatgtatataaaaaaattgtaatttaaaaataaaaatcgacctatttcggcatttccttaaaatccaataggtaactattgccaaatatcgaggtggattcttttctttggcccacccggtatcaatttgtataaattgtgaaatctggtgaaaatacattaatttttatttcattagatattttatttgaatttcaattaccctgcccgc

SEQ ID NO: 11611 - DNA, 611 bp, Diabrotica virgifera
  SmartBlast Evalue=3E-65; Info=Microtubule associated protein xmap215 n=1 Tax=Aedes aegypti RepID=Q0IFD6_AEDAE
tgcatctgcgatcattcaccgtcgaaaaattccttgtaaccacattgctcagtaaaagtatttatggtctccagtgacgcagccctcaaagcagccttactatctcccaagccctgtagcactcctggaaagaatactctaacgtactgtttaaacggtggtcccatggccttggcaagggcttcgcaaagcgccaacgacgacatagcaattttcacgttgctatctgttaacctgacacctaaagcttggggcaaatcacctaaattcgattttatgaatttagcatcgctaataatcgttgccactttggccaccgcttcatttcggactttccagttcttatcacttagttctgttagaatagtgtcagttatttgaccgctgatatccactctaggaataagatcttggatatttacttgctctggttcgtcgtcttctaccacatctagactgtctgtgcttgctgacttcaccacacctcttgttgggggcggaggcttctcgccttcatacttatcacattcagcgttgatttgatctcgcagtgccggtttctcattttcgaaaaatacgtttagagttgcacccatgtataggtacataat

SEQ ID NO: 11612 - DNA, 616 bp, Diabrotica virgifera
  SmartBlast Evalue=2E-12; Info=MPA2 allergen n=1 Tax=Periplaneta americana RepID=Q1M0Y0_PERAM
acccccacagaaggaagtttgtatttttacatctgaatctctaaaaaatgcgagacttttttggtacaagttttgtagttatacttctaggctttgtcaattctaccattgtggacaaatgtagagatggcggcataatacccccaagtgtaaatttaaagtcagattttgaacagaatgttgaagattgcaaacaggctccttgtgtagtgtatactggcgggaattgttatgtcgaattaaattttacttcacctggatatgtaccatctatatcccctaagtataaagcaacagcaatgggagtgactttagactatccttgcgagaaagatgcttgctcattaatcaccaatacagtttgccctctagtggaaaacgaactcgtgtcttatacatgggtaatggctctaccaagtttttatccagaatgtcttgccgatctcgaagtttcttttaccaatgacgacgataactcccttattttctgctttagatcacagatcgacgtaagaaaaccatctagattagctaaatagacacacaaaaaatttagtttttagtcagaattaggtattatgaaatattgtataaatatatttgaaataaataagag

SEQ ID NO: 11613 - DNA, 613 bp, Diabrotica virgifera
gaggtccaggaagaagaagaacaacatggaacctcagaatctgatacaacacaacatttctgcagcttttccgcgctactgtagataagaaaaagattgccatgatgatcgccaacattcgtcacggataagtacatcaagaagaagaatggtgcattaaaaaattgattaacatcaaactgttattcaacatgtacattagactcatacaaaatctgaaattgtttgttataattatagtatattaaagcaagtcaaataagttcaacattgagtattccaaaccagaaaaagcacaccaattcaaaagacattacaagacaagatattacaattgtattactgtcatctgtgacctttaacatatctagatagtaacatttacacgacgctgtgactacgtaatatttccttgtggaaatatgacaagaaaccaactatgtaatactattcgtatagataatgcaccaattggacaaaagactgcattgaacagcatatgaatctatccggtggaacaactcgaacatatcttcctgttatatctttgtcgagaataaagcgaaaagtctatttagaaatattactagttataataactatattacgggtc

SEQ ID NO: 11614 - DNA, 612 bp, Diabrotica virgifera
ttgaacagcagatctgataggtcatcattaatctactgattactaaacttctttatcgctgagtataatattttgatcctacataaaaatctgaaaggatattagaaaagttttgagtttgtctatagttcgacatattttttgaaattagtaggtacaatgtctaaaacgattgttactttaattttcgtgtgctgcattgtagcacatgtccaatgcaaaacctttgtagattgtgtagatactgaaaatccaggagccctgagttttgacgaacaaatatcatcaggttctcataagtctattcgtgaacagattcctgcaaatcctagaaattggtttaagtcagcaatttcgtgtataatgatatacttcgaaaataataataacacacctgtaatatatgaaggaggggttggatctgagtatgtagtaatagaccttgatttttcttctgtgctacaatcaacctatagagttcaaatttatactttagagccagaagtttaatccgcttaattacaacctgaaatagtttaagaaattgtcacatttctttcacttttttaagattcatcaatttaaaattaataaagtgaaaaatattgtcaa

SEQ ID NO: 11615 - DNA, 613 bp, Diabrotica virgifera
gcacccgtttctaaaaacgctgcatcaagaatcgcttggttgacacctacatctggaagagtgtgccatgttggtttattatacctggtgtcagcagcatctgctatgtcgtcgtccagtaaaagggaggcatcatgcattttatgacaccatcctagcacgtaagcgtttttcaggttgctttgattgagaactgatggcttttctaaaagtcggtaagcatggaccataaatattgctctagccaaatatttaggatctagttttaggtgatggtcgagtaattttgaaaatctgagtttcagatctggataattttggtggtatatcaactgttcgtttataagttcttcgtggatctctggataggtcgagaggatagcattcgtttcgaaggccaaatctaaatttctttggcgattttcgtagttcggtctaacattttccttttgttgctgattctctttctggttcaaggtcctaaaagaactaaatcttgccaaattaaattccgactttggcacattaataaaaccttttaaaatatttctcaacataattcaccttaatttggaatacgaatatttcttcactaatcacaaaataactacat

SEQ ID NO: 11616 - DNA, 611 bp, Diabrotica virgifera
actggggacgacgaacgacgacaaccatcccttttttccaatttttttaggttaaattggggtaaataaacataaataaaaatacaaaaaaatggaagtaaaaagacaagttcctgagaaaagctgtaaggtagaaacagataataatgaggtgaatctattagatacctttaaagttgaggataaagaagaaccaaaacagaaattatatacatgtatgatacatttgattatttagacaaggaaatcctcataaaggctgaaatagaaaaagatgaccttagcttttctccatttgaggaaaacaaagtcaaaaagaacttcaagaatacattgctgtaccaggaacgtcccaacaatacattggtgatcgtaaatggagcagttacgagacaaaggtattgattaacctgtatgtcaattataaagaacaggtgggaagctttgagataagaaacatgaagatgttatggcatacaatagccagtgacttaaataaaatgggtataagtgtaactaaagataattgtttaaacaagtggagggtactggagagaggatataaaaaatttaaagataaccaaaatcaaactggaaagagaaggaaattt

SEQ ID NO: 11617 - DNA, 608 bp, Diabrotica virgifera
  SmartBlast Evalue=3E-61; Info=Ubiquitin/ribosomal protein S27Ae fusion protein n=20 Tax=Neoptera RepID=Q4LAY7_9COLE
attgtcaagtagttctttttacagcgtgttatggtggagtagtcgttgactccccaaaatgcagatcttcgttaaaaccttaacgggtaagaccatcactcttgaggtcgagccctcagatactatcgaaaatgtgaaagctaaaatccaggataaagaaggaattcccccagaccagcaacgtctcatcttcgctggaaaacaactcgaagatggtcgtaccttgtctgactataatattcaaaaagaatcaacccttcacttggtgttgagattgagaggaggtgctaagaaacgtaagaagaagaattactccacccccaagaaaatcaagcacaagaagaagaaggttaagttagctgtattgaaattttataaggttgacgaaaatggtaaaatccaccgattgagacgtgaatgccccgctgaacaatgtggagctggtgtcttcatggcagccatggaagacaggcattactgtggcaagtgcggttacactcttgtcttctccaaaccaggagatgagaaatagatatatgtccttgtatattgtttaagaaaaaaatagaaaaacctttgtttatttgaataaaatattcgaggaagac

SEQ ID NO: 11618 - DNA, 611 bp, Diabrotica virgifera
accccaatcactatctatgcagcagatgtagaaatgttgaaagcgtatactgaacttactagttttcccaaacaaccgactcaaaatataaataaataaatgattttttcatatattactaaaacaatacaaggtttttccaacccgatacaaaaccgttcttggatcgttacgcgcatgcgaagtaacgaataattatgcgcagtaacacatttttcgttactgcgcatactcgtaaccgttcaagaacgtctttgtatcgagttggaacaaacctcttgtatcttatagttttcgacttatcactgaatcgagtatcgccggaacaagatgagacatgcaagaattaaaatgtagtagactctcgacctcggtcaacctagcctgctttagatgtacaaaaaacagcctacaatcaacgtaatacgtaaatattggttttcaacatttcgtacaatatggtctgacaatatagttcttagggctcgtattcttcaaaaaactttaaagggtgtacgcaaattacgggatagaacaaaataaagtcctcgtttgtatatatccggttgagattcgcgacactgctttaggtaggtataggacgatgtggc

SEQ ID NO: 11619 - DNA, 612 bp, Diabrotica virgifera
  SmartBlast Evalue=6E-57; Info="Beta-1,4-galactosyltransferase 7 n=1 Tax=Harpegnathos saltator RepID=E2BNK8_9HYME"
aatattcactggtctagttatatttaaatgagcatcttttagacgaacataaaattcatcatcttctaagccccaaccccaatatctatttgataagcctttgactagttcaaaatggagtctattaattaacaaaatgcctccaataaatttttcatagtgatatctaggatgtagtgtcggagcagctatgtgaataggttgctttggataggtatatactagttgggtattaagaggtagcagatctacatcatgcattgcgatataatcataatttgactttgtttccaaaaatcctgcatttataagtgatgctctattaaacctaaactggtctacttgatttaggactataatatcatgcactattttctgtttatttaaaaaattgtgcatatagggtacgaattccatcaattcttcaaatctctctctatatggtaccaatactgcgagcttatgtttggagctgatcaatttctttgatataactgcagtaaaagtagtttttcattggaacaattacatccattaagttctgttaagatgtagaagattaaaatagctgaaaagataaacattacaacaaggcatatcgttaaataataa

SEQ ID NO: 11620 - DNA, 613 bp, Diabrotica virgifera
  SmartBlast Evalue=2E-37; Info=Microsomal glutathione s- transferase n=1 Tax=Aedes aegypti RepID=Q16TR4_AEDAE
aagcattaaaccaatttctttattatgttttagattttcattcttttacaaaactataaaaatcgtattttaaagaaatattttatcacaaaattactaacaattatggcctatttaaaagtaattaaactgacaacggccatatatccagttattccgtatccaaccatccaacacagtcctcttgctggttgaggaatcggaacaacagcatacacaacagtgtgaccgattcttgccagtgtatatgccaaaaagaaagtttttgcgagatacactgcaggattggttaaggtataaatcaaaccagtcacaaagaatagtggaatgttttcaatgtcgttcaagtgagctcttcgaactctttccacatgttcacttacttttggcttgacatgtcgtcgtatagcatcttctggattagcaaatgccttatgcttatatctctttgaaccagttaaaatggacataaacatcatcttaagaacaagaacagagcagtagaaaagaagtgatctaaggacttcattgtccaaagataatgccgaagaagaatgaactgcttgagtcattgtattgtcttatgatataaaatagcgtaactaccttcttg

SEQ ID NO: 11621 - DNA, 611 bp, Diabrotica virgifera
  SmartBlast Evalue=2E-64; Info=LIM domain-binding protein 3 n=1 Tax=Harpegnathos saltator RepID=E2B4Z5_9HYME
cgaacaatacttagctcctccatgctctaaatgtggtggcaaaatcaaagcggactgcttgaaggcaataggaaagaacttccatcctgaatgctttaactgcacatactgtggaaaattattcggcaactctccattcttcttggaagacggaagcccatattgcgatgccgactggaacgagcttttcacaacaaaatgctatgcttgtgcattcccaatcgaagctggagatcgttgggtagaggctcttaacaataattatcatagccagtgcttcaactgcacgatgtgtaaaaagaatcttgaaggacagagcttctttgccaagggaggtcgcccattctgcaagaaccacgcccgctaaggaatgcaggccacctgttaatcaaatgttaccacatgttgcttctaatttctttaatctattaattaccgcaagcttggtgtttcaaaaaatctatttttattactgtttaatttatctctaacataacactagcttttagctcttgtgaatatacagttggtctcaattcttaaacatttgggactttctgtatttaactttttctctttcttatcgataggtgtacagaacagatacaacc

SEQ ID NO: 11622 - DNA, 612 bp, Diabrotica virgifera
ttcgtagatacatgtcttatgtctttattaaatttacgcgtatatgtttttccacggcttttaccggacacttcaatattaagatcaggcataggacggccacgttcttttataatcaactgttgttgatagtgaagttttttgaaatttatttacacctaatttaaattgaaactccattgttttaaacacgctcgaacaaaacaaattaaacaaaattgtaacctaagaatttctaaacacggcacagatgcaacggtcacgaataactgtcgtgaattgcagctcgcaaacacatttccgaggccgttaatcagccgattgccgaagcacatcggctaagatcgccgtttgcctaataaatgcattttaccgctgccagtgtttcggttcttatcgacgcggcttcactggagcagcaaatacgtaaaaagattgcttcactggagcaccaaatacgtaaaaaaattatacggtttcactagaggagtaaatacgtaaaaaaataatattaatcatcgttgttggtgaattattattaacagttgatgtttaatatgataatatggcagatttgaaataaaactatattaattattctttaataattaa

SEQ ID NO: 11623 - DNA, 613 bp, Diabrotica virgifera
ctcgctggataacgtattcgtaatgttattaaatgctgaattttttgtatggtgcatatctcttattatctctctttttatatcgttaagatcgggtgaactgtacatagttttcgtgttttgaacactagccttatctactactatttttttacaaactggaacctcagcagacacattcgtttggtctgtttcgaatccagaataacttatatctctacttgcaaccgaagtagatatctcatttgaagagttattaagaaaaggagaactaaaaacatgtcttgtttcctcgaaatcttctttttcgatttctaagctaatattggaatacttatgaacttgtggtgtctccaataaggcatcctcgcttaaatatatcggtcttctattcatggtatttattattttgtcattagaatctaatgaggagtctaaatttgattcatggtggtgagaaatgtagccactatcatagtccatactaaagtgtaaatttccagattttgaagtatcttcactacttttaaatgcactggatgaaatatgttccatacttagttgcaaaatgtacacaaaaactccaggaattgttacattcctgtaaataaac

SEQ ID NO: 11624 - DNA, 605 bp, Diabrotica virgifera
ggaaaaaagtcgagaagaaaggattgacattggaaagagcacaaaacctaatacaagatcggaaagtatggagtatggagactaagatgccaaacttaactccaccagtcttacacctaaacgtagaaaggcttaggattaagtaagtacgtaattaatattcggaattgagtgatatagcaccaaaactattatcgtaagtatagcaaagttcccatgtgaattttctaattcctactaactaatatcaaatatccaacgaattcaaaaaggttgacacctacctatatgtccacctgattttatataatattatagcgtatacaagaatctcgtaagattttattgtttgaaatttctaaatagcatctcttccactaaaaatcttaaaactctgtgcctcgaggaaagtaacaccttcgaatcagaatcatagttacaagacagtaaagaattggagaccgcacactattctgaacatgtttaaacatgttttatacactaaatgctgattaaagttgtgtatagaactcctactgttaagttattacatggattgtatattattttgtgaattagtgtaaaataaatttagtgtaaatgcc

SEQ ID NO: 11625 - DNA, 612 bp, Diabrotica virgifera
  misc_feature (545)..(546): n is a, c, g, or t
ttgccacatcttaaggatttagataggggttgcgagtctgaaacagacactgaagaatttgaaaaggttggccagagtccattggagctgaactttgataagaatattccatcacctcgtccacgcacccaagacgcgtctacctccaccgaggataatcttcaagtgtccagaagcgaacatgaaaaattaaaaacggtgttaagaaaattataccagttagccagagacgcgattctacaactcagatctgaacaagcagttctcagaacgcaaattgtagccaataaagatagtgctagtcagtattgcgataaaatagatagttcctgggcaaacctcatacttttccaacagcaacaagaaaaagaaaaccttgaagtgatatcaaaaagttatgagaatgtcattagtgaattaaggaagcaggtagatgtgcaaaatcaacaaatagaagatttatttaatgagaaatctgcattagaaggagaaataatagtatcatgtcaagatctaaatacaaacatggaaaagctcagggaagnnaatgcaaaaacgattgaagatctgcagagacttttagaagagaaagaagcagaaaaagaaaaaata

SEQ ID NO: 11626 - DNA, 613 bp, Diabrotica virgifera
tccattgtgttgggcaaatgtgtatgtagttatgtagtaaatagcctgagcccgagtttgtgtaatatacgtaacaataaaaaaaacttcattccaaattcttcttcttcttctttaatacagggattagagtttgcctcttctgttttcaacgagaattatgaccatattttgcgaagtcttcctaaacgtccctagattgtaagtgagtattttttggatagtctttcgtttttcatcctatcgatatgtatcctcaatctttgtgatcacaaaaagatagagcgaaatgtgatgcacgcaagaaacgtctaaccttgtaattcagaagaagaaacagagaggaaaaatatggggcgttggaagtgatgtcccaagttccacaatggcattgcatgcgatatagaaaattcgaattggtaagaagatgtagaagctacaaaaacagtatcaggaggtcatgactgaagaggtttcaataaaggcgtattgatctcaattatttatctatttatactctaatttaagcgtagatatattaataagttaagattatttaatatttatggaaattgtacgtacctatttggaaatatatttgtcttaacatgtg

SEQ ID NO: 11627 - DNA, 613 bp, Diabrotica virgifera
  SmartBlast Evalue=4E-20; Info=DnaJ-like protein subfamily C member 14 n=1 Tax=Harpegnathos saltator RepID=E2C3T9_9HYME
tatcttttgatatcgtcgtcagtgcaagttggagctacccctagtatactatatggatctttcccttacatgctaacaatctcttcattgcttcatcccccgttgtgggcatatttatattattttgaagaccgttttgcgtaaagcgtggcggttcatcgttcgtttctgctttctttctacctttaaatttatctcgtaaccatttgaagaatcgtatcctttgaagaaagttattggttgactctaaaagcatcgaccaatggaggcagatccatgtccacgttatagaagccatatcacgactaatatgtagacttaactgacatatatccgagatcaaatgaaacaaccataataaaaataccgtaaagattttccaccaacctttggtatattgtttcaatttctgtccaaccactccaaagggtacatgagcttccttcttacgagatctctgtattctttttcccggaggtcgatcactactaccaaacgaatcattggcctttggtcgagctattggtttactaatctttttcagaccatttttggtcaaattaaaattttcagctttagaattagttgattctatattaacatcattcatggt

SEQ ID NO: 11628 - DNA, 608 bp, Diabrotica virgifera
gattgtaaatacttacactatcctagtattgggtctgatttgtcctttagtcgctcccccaattaccctagaggtagaggaaccttgtaacgaaattgaattatgtaatgaattttatactttaacaactacagacggtacctccatttatggaggtgtggtcgaacaatatactattgacgataacatttatctgattataaaagaccatgatatgccttactattttgtcagcctgaagaaaacaaagaaaaatgatgtctatgatacaaatctggaaggtgtaattgcaaagaaagttgagaaaattattaattccacaaataacttagcagcaatggatccagagcatttaaaatcgctaagtttagaagaacgcgaagctatatttcatgaatttgttgtaacttacgggaactatagtaattcatgtgagaaaaactatagcatattacaagacgtttttaaagttcacctggttgagcttttaaattttttaaacaatacaaaggaatcagccgatccaataacacaatatttaccgtccaaaaataattatttcatttacgaagttttgctaataatcattttatttttaatttgctaca

SEQ ID NO: 11629 - DNA, 611 bp, Diabrotica virgifera
gaactgtaaaacatgtctggtgaaagcgtttacttgtacgcatatgatctggaacccaatatttggcacctaagtgttgtggtcttcaaaaaaggaatattcatttggtgctggtggtttcagcgaaaccagaccaggtatttcaggatttccagacaaacgcatatttatgggtacaactgaaaaatacgtatgggacttgtccgattttctgcgtagcaatcgttggaactggatgcagatggactacaacgttttaaccaaaaatagtgagcattttgctcaggcgcttctagattatcttgaaatttacaaaagaattccttcttttctaagatcttctcgcagtatgggatacgtatctaaagattctggattttccagatctactgaaaatagcgatgaaatcgattggacaaaagttatagttggatcgatagcagctgttgctacagtagcccgtgcggcaatagaaatttcccaagaaatttcccaacgcaaaaaagagattaaaaaccagtcagtggagatacccacaacttataaatatccatataaaaaagaaaagccaacaattgaagaaatctatgaccctcctaataattccgcgc

SEQ ID NO: 11630 - DNA, 604 bp, Diabrotica virgifera
ctacaattatcatattattaacttgtaaatcatataaatcgatgttaccaattttaaaagtgtgctagtttcatctactaagcagaacgtaagtatttgccacattttttctttaactagtcacaattttaccttttgcattcattctaacgttgaaatacttcgttctaggcactgaagataatctgatctagatcgaaaacgttttgcaatccatttggatggcttttaatagtgactttttataccattgtacaaacgaagttttttacttctgtatgatttttttaaagtcccttttgccaatatttcaggatgatatcactcacttagatttgttacatattataaacttaatatacatacttaataaacatatatataacatatataacatacttaataaacttaaaatttttttgaatatgattgattgccagatgaacgtcccataaagtattgtattattttttcttgcaatattcttatatgtaggtttttattactattttgagaaacaacatttagtactagtaatatatattatatatagtaatatttagtttttaataaatataatcttttaacatcgacttgggagtcg

SEQ ID NO: 11631 - DNA, 609 bp, Diabrotica virgifera
ttcatgctggtattcgcgaactatagcatgttgctacaacagatgtatgagaataaccagactcagataaggtaccaataatgtaagaataagtaagaaagaaaaagaataaatgatgaactcataagttttatgacactatgataagtgataggaaaaaaaatatgtgataggtgataggaaaaaaaaattgacgagaacgagcacaattttaaataaaactgcaaattcatgcgctctcacatacgtggaattattcaggaaatattccagaatctgaataacaaaactaatgcctaaggaaagaagtgggaatatactcaaatgaacaactcatctgtctaaacactccaaatactgacttaacgaacctactatgtatagggatggcctaagcattgatttataaacaagtgcgcaagatatttatccatgtttactcatcaactcaaagtacaaacatactatgaagcaaaaggcctaatatgaactaaatacttccctattaaattgtaaaaaaactgaaataagtaaactgattacagaaaaatgtttaggaaatgtaatgatgaaaagacatctgcctactctgccatgaggacatagatt

SEQ ID NO: 11632 - DNA, 608 bp, Diabrotica virgifera
attaaacccaaacctactacttacatctgctaccattgagacaagcgtctgcagaccttccagactatctgcaaaaatgacagtgtcagcgtatcttatgttgtttagtaattcttaatttataactaactattcctattccttcgtctgtatgggtcattccacgaacatacgcctgttttggattgcttcgacaacgaatattttactgtgcacataagaagtacgaaagtaaatggcgctaataattattccaataaccaacaatgtaattttcaatttactttcgttcttcttattttgcacagtgaaagtattcgttgtcgaagtgatccagggcaggcttatattcgtggaatagggtatatcagttagagctaggttcttaattgctcttaatttgtaataaataataacggggacagtatacatccctgtcgcaaacattctttttaactttatgtggtctgttaaatgattcccaaatctaacagctgcagtttgttcctaatttattgacataagctggttttattatacacaatattatattttttgagaaattctatttttttttgtttctattattaaaaacttccaaattttta

SEQ ID NO: 11633 - DNA, 612 bp, Diabrotica virgifera
acgaagcatacgatacaaggcaaatggttatttatacccctgttgaatccgaattggatctcgtattactcagcagtgatgccttagtcaaatgtatggcaagtggaatttcacctatgccagaagttgacttttctcttctaagcgaaaatgggaccaaaatcgaccttaccgaaactgtcgagatggacgacgacagtgagggatattataacataactgcaactcacaattttgcatcgtacaaccatactttaacaggtcccactaaattcatttgtaatgttagcattccgggcacttcgtacttcttgactaaggaaataactcaccagggaagtactgcttcactaatccaggtttcagcatcactttccattctacttatatcattgttactgatgcttgactaggttttaggtattttttttttaaattttgtgataaaattaccaaaaaaattgtaaaaatgtaagaaattgtatataattttaaatgtataccaaaattattttaaagcttttgtaaatatgtaaatcagtgaatattgatactatcgatatttgtaattatgtttttcattctagtccatgaataaatatttattttact

SEQ ID NO: 11634 - DNA, 612 bp, Diabrotica virgifera
  SmartBlast Evalue=4E-40; Info=Putative adenylate cyclase n=1 Tax=Artemia franciscana RepID=A1DU24_ARTSF
tttaattaaaatgtctttaagaaatgttgaaattaaggcaaaagtgcacgatttggatgatattgttaacagagcaaaatccttaaatcccataaaaagtgaaattattcaacagcatgatacattttacaatgtttcacatgggagattgaaattaagacaatttaaggatagtacaggagaattaatttactatgatcgtccagattctgaaggcccaaaaatatctaactatagaaaatcagctataaccaaggaaagcttaaatgatctcccacatgttttggaggaagctctaggtgtgaagcaagtagttaaaaaagttaggcagctatttgtggttggccaaactagaattcatatcgataatgtggaagcattgggcaattttatggagttagaggtttgtttagaagacaatcaaagcctagaagaaggaaagcaaatcgcagatgacttaatggccaaattaaatgtcaaaaaagaagatctattatcaggagcatatgctgatatgttaaaataatatctttacgccattccttttgtatatttgtctacattttatatagttgtttattataaccaaataaaataatattttgctgaatt

SEQ ID NO: 11635 - DNA, 606 bp, Diabrotica virgifera
  SmartBlast Evalue=3E-37; Info=Endonuclease-reverse transcriptase n=1 Tax=Bombyx mori RepID=D5LB38_BOMMO
atttaggaacgtggctaaccgaagatggagatcaaacaaaagaaatcagatctagaatagaaatggcaagaaacacgttcataaaattgaagaacttactttgcaaccgtaaccttaatctagagatccgcacaagaatgctacgttgttacgttttttctactttactatacggcatgaagcgtggacaataaaacagtctgaaatcaaaaaattaaactcctttgagatgtggtgctacaggagaatccacagaatatcgtggactgaaaaagtaactaatatagaggtgttacaaagaatgaagaaagaatgtgaagtcataaaaactgttaaaattagaaagattcaatatctgagtcatataatgaggggcgagaagtacgtattgcttaggttaattatgcaagagaagatacaagggaagagaaacccaggacgacgcaaaatattctggctaagaaatttgagagagtggttcggttgcagctcattagaattattcagaagtgcggccaataaaattaaaatagcgatgatgatttccaacctccgataggggaaggaacctgaagaagaagatatagtgtgaaagccatgtatggc

SEQ ID NO: 11636 - DNA, 611 bp, Diabrotica virgifera
gtccacaatttcagcgacgtcgatatttcattattttttgttttggattgaatggattgaattatgcgaatattattggaaatatttacgaacatgcgacaattgtgaaccttctgtgcattactgagaaggtaaaaattggagataccttgtcgctaaaactatttataacagtcatggagtacgcattaaacgattagagtaagactcaaagggtattagcatcgatggaaagatattaaatgatctccgatatgcttatgacattgttctcataatagacgatttaggagaagctgagttatgttacaactacccacaataacccgtaaggtatagcaggaaaccataataatctgcacagacagcagacaggcgctagtaaccatgaatagaccacgtgtcatatcagggctagtaatgaaatgtcatgagtcactagcccaagcttcggatggtaacaacatgatcctgaggtgggttaaaggacacaacggaaataaaggcaaccgcattgctgaccagctagctaagaaggcagcaagcctaagaatcttaggacttggtggtcttttggctggtcaactgcaacagtcgcggaacaatcgaca

SEQ ID NO: 11637 - DNA, 612 bp, Diabrotica virgifera
  SmartBlast Evalue=1E-49; Info="Elongation of very long chain fatty acids protein, putative n=1 Tax=Pediculus humanus corporis RepID=E0W1G4_PEDHC"
gttcctcaagttagttgcttcttcagaagtataaccattgcccatttttttgactccattgagtccattaactttacttagtccgttaactccattggatttgttaactccattggctttgctaactccattgactccattaactccgttgctattgctatgctcataaagagcagtttggctggtgaagcaaataccaatgttgtgtttgccattcttctcgacaccattttgatgtactccattttgtttccttgccaaagcctcttctcttttcctcttttgcttgttgtaagtttctttgtaaaagttggagaataggaaataaacataaacgcgtgcattccgatccaccagacgaaagctttggggtagttgcagtcaatgaacagcaattggaatgcatgaaccataactaagacgaattgtaccatttggatggctgttaagtacttcttccaccagagatacttctggtacctcggtccaagagcggcaagtagataatagctgtacataatgatgtggacaaaggtgttcaggaatccgaagaaactggaatggccaccgggagtgaatttaacaccaaaccacacagacatcggcataact

SEQ ID NO: 11638 - DNA, 608 bp, Diabrotica virgifera
tgagacaggcgggttggacgtttgaggcgggtgggaattgataatctcccgtaatatttgtagtaatccattcaatcagtacaatatatatgcggatgacaccgttatcttagctgaaaatattgaagagcttcagagactgctgaagagaacagcggtatatggccaagaatttatgagaatatctaaaactcggaagaaataacgagaatctttttataaacggcaccaatgtcgaatgattagaccaatatgcatatcctaaaacaatgattaactccacaaaccgttgactcagaacgtccacaaacgagtacacgcttttcagaaaatccgtgatagctaattttaagcaaaaccgctattagcaatagttttttgacaaattctattatttatcaacaccatgcgacacattcaatataaattgttcacatttataaggaacgaaactcaagtgaattgccgctgtatacaccagtcgtaagtaaatatagaaacctatatttcaacaaattaaatattttgttcaaaagccgttagatggcagcacaagtattcattggacggaatagaatgtccgtaagaccataatcggggacaatgtg

SEQ ID NO: 11639 - DNA, 613 bp, Diabrotica virgifera
gtcacagttcaaataatcagagacatggcacgtcttcgtatggttttaactcgggtgtaagtggcaagcatgaagctggaggaagttatggaacaggccactcatcaggtggatatggtcatggaggttacggatcgggtcatccttcgtcaggtgaatatgttcacagaataactgatggtatcaacgttaacggacatcatagtggtcatggatcaggtcattcgtctgtcgtagaatctggtcatacaggaggaataggattgggtctcgctggcagccacagaagtactggaagtcatgaatcagggggtggatatagtcacgggataggtcttggaattggtattggcagtaatcacagaggcagtaacggtgaaactggatcacatggacatggtgtagatggacatcttgtagttggcggatatggaacgggttcctcagatcgagaaacaggggctgggcttggtcttggaattggtgttaaaggtgggcacaataccaatagcggatatggtcacagctcatattctggttgaaataaaattttgatggtagataagacttaaaaaccatttttttttcgctaatattaattgggttcgtttta

SEQ ID NO: 11640 - DNA, 610 bp, Diabrotica virgifera
attgttactactactagttgtataattcgttattgattgagttgtttttgttgaaggtactgacgtcgatgaagcctcgatttgtttatctttgacttgttgctctttctggacgtgagcatccttgtgatgttgtgcaacttgagcataacttttccgaggggggttacctgaatagtcgataataggaggaggagaaatcgaaacatgtctcgaagtttcggatttggaatcctgcctatgtaccggtatatgattcttagtactattagtagtagttacagccacccctgaccgcgacggggcttctgttggcacaactgtggtcatggtggcagcgtttgtggtagtgggacatggcacatccaaatcaccattaagaagaacatcgtcagtttttgttgatttgtctgccatggtacatttgattggtagagcaggaactaatttttcgggcgaacttggaggtgtaagcgtaactgtactaagctgaatgtctccactttcggatgagacatctttacagtcaagtggacccgtagaagtcgatactgaattttgtctcgtagtttgattgcacgaaggaaaatgttgcggagacacagctcta

SEQ ID NO: 11641 - DNA, 611 bp, Diabrotica virgifera
  SmartBlast Evalue=4E-36; Info=U3 small nucleolar RNA-associated protein 18-like protein n=1 Tax=Camponotus floridanus RepID= E2A6U6_9HYME
acagtatgggacatgaaaatgaatagagtcaagcacaaattctcagacgagggatgtatacaaggtaccacactatccgttgcaccttccaaccagtttctagcaacaggatcagcacaaggagtagtaaatatatacaataccagtgatatatttaaatcaaatacaccaaaaccaagaaaaaccattttgaatcttaccacagctatcaaagacttgaaattcaatccatcgtctgagatactaggcttctgttcagctgaaatacagaattcagtcaagttattccacattggttctgaaaacgtcttcagtaattttccaaatttcagtaccaaaatgggccatactaacgccttgaatttttcacctggaagtggatattgtgcttttggaaacaggaaatctatagtttctttgtacaggttaaaacattataaaattattagagtttataatatatttatattttaatggaagtgtttagacagtggaagacaagtgttctctgagtattatttgatcaaccaaagacagatcatatttattatgtacagttcttatagaacttttttcaatgcttttattttttccctattactgtctgtact

SEQ ID NO: 11642 - DNA, 611 bp, Diabrotica virgifera
  SmartBlast Evalue=6E-54; Info="Alpha-2-macroglobulin, putative n=1 Tax=Pediculus humanus corporis RepID=E0VQA1_PEDHC"
taactattctctcatattcatcgttgagctgtaaatcacgttctatgtcgaattcaacagtttcgctaccgtcaattgggaaaacttttcgaatagggttctggaatatgggctggattactccggagtatatggtcgggtaaactgatactgtagcttctccttttaccttattcccttggttgtattttgtatcaatctttgctctaatgacattacccttgaaggtaacgtgtctttgggagtcaatattgaccataaactttggcaaaatatactcaacaacttcgatggacttgtgataggtctgtccgtgtatttccactgatatattccacttgcctaaaacggggtgttgtcctaagttcacctcgccagtgaagactcccctcacagcctcaattctcctccagtccttcactacattgccagaaccatcggagaccaatatatgcaatggttcattcctgacctctgcagctggttttagttgagagtttaatacaatagctctgaagagaatggtactaccaggtctgtacacttgcctatcggtttggacaagtactgtatacgtattttttgaggaactgcagcgggtaaccggtaac

SEQ ID NO: 11643 - DNA, 611 bp, Diabrotica virgifera
  SmartBlast Evalue=2E-36; Info=Cyclin-K n=2 Tax=Formicidae RepID= E2A522_9HYME
ggaggagcatttgcagggaaaaaatggtggaggagctgcagtaggaactacaggtggaggagcaaatggtggaggatggtttacaaatgatggaaacacgtttggtggaggagcgctaatgtgaggaggtggtccaggtggaggacctgttagatgaggtggatgtgtggttggaggtgcggagaatgttggaactggagtaggatatacagccgtaggtgggggccacaagtaaaagtttggtaaggaaattggggcacttctgaatgaggcggtattttgaccatcggagggggctgttcaggcgaagaaggtttttcgtgaccatttgaagctcttggtattggtgatggtgtttgtggacctttttgtgccattggcggactgtctggaggatttgtatctgattgcgaatataaatccaaaacctgatgacatatgtcctctaatagatccatggtaacatcttctacaaacatgtcccaccatctgcaatgtttagaatgcctgcctatccagtctataacttcaaatttactaagttttccagccaagtacattaatgctacagcaattatttcaggttcccactggaggcataatgtggtaca

SEQ ID NO: 11644 - DNA, 610 bp, Diabrotica virgifera
  SmartBlast Evalue=1E-43; Info=Glyoxylate/hydroxypyruvate reductase n=1 Tax=Aedes aegypti RepID=Q16V69_AEDAE
ggattaaaggctttaagaattctagcaatttgttgtcctattcttccaaatccaacaataccaactgtggaatcttttaagcctggcccacacatccaaaatggcgaccatgcatgccaacctccagttttagcttctttgttagcttccaatagtcttctactagtggctagcaatagtgctacagctagttcagcagtagcatccgtcagagtatcaggagtatatcccatttttatgtttcgcttcttgatttcttttgtatctaaatgatcgtaacctacagacattgtggctacgacttttaagttctttccagctttgtctaatacaggcgcgtctatcttatcagtcaacatgcagaacagggcatctttattttctatattcttaaggagttcttctctgggtactggaccttcacctgtccatgatgttacttgacaatgttctttcaataaatccaccgcttctttattaacctgtcgggtaatataaactgagggtttcgacatatctgttacaaaataccggtatggaatgtttctcaatactgtacttgtgttctggttggaccgcgcaaacaccttgcaaagatttcctatattat

SEQ ID NO: 11645 - DNA, 612 bp, Diabrotica virgifera
  SmartBlast Evalue=3E-22; Info="CG9134, isoform A n=2 Tax= Sophophora RepID=Q9W0I2_DROME"
ggctatgaaccgtaattatgtcgtacttctgttgaccctcgttggcagcgtttttctaagcgccacctgtttgacgtgtttgaaagatgtatcgcaatgggaaaacatttttagaaattccaaagaatcagttattccactcaggcattggggaaataagagctattggataggcgacgcctttcaggttccttggtacgaagctgtaaccttttgcagccaaattcatatgcaattgcttaccattacctgcgaagaagaaaatgaacagattttgaactacttaaaagatgctggcaaaggtttcgaatactggacatcaggtaacagagtaattgaccaaaataaatggctatggcttccttatggtaaaccagtggagtacacgaaatggtccgttggtcaacctagtgatccagtcggagaaaaatgtttacaactttggaaaattggagaaaaattagaatggaacgatagaccttgctgggttccgttttattttatttgcgaacggtataattatcaaaatctagcatcagataaatgttaataatcaggcgaggttgagtcaatattgtaatgctttagaaaatattaaacacatttattatc

SEQ ID NO: 11646 - DNA, 606 bp, Diabrotica virgifera
ggcaaagacactaactatattagtcattaactatgtccgaaagaatgggggaagttgttacagtcttaatagtgcttcctatcatttagtctactgaaagtagtctattatttgtgggcattataaagatttactctatttaactagtaacttatatgtttttacgcgctttatattgttacaacactggccaaatcctataggcgcatctaagtcagtctgaatgttcaccaaaaagatatttttaaacgtagctgaataccccatagtgatttatttttatagtaagtactaaatgttgtgatattttaattggaatatgtaatagtagcgaactagtcttaagtctaaaccttataacagacgagctagattttattgaatatcatgcaatgttttcagtattacaatataattttaaacggctttttttgtatgaacgtgactaaatatagagctattttttacatcttcaatgtgcttccatgtataaagatttgtttagacataaatatgacaacattgtcatataccttatgtaactagaactatggcgcatcttaaacgcacataaaaaatgctaaaaagtgctaaaatcagtaccat

SEQ ID NO: 11647 - DNA, 612 bp, Diabrotica virgifera
  SmartBlast Evalue=1E-55; Info=U2 small nuclear ribonucleoprotein B'' n=3 Tax=Apocrita RepID=E2C3U3_9HYME
atctcactagtctcatctggtagatttgtaaggaaaagaatttggttaggaggttgctcagcgttagctccacctggtatcctgttgggatccttgttcttctttttcttccttggcgtctcttcatctttaggtactggaggcttaattttcttaggtctttcttggaatgttcctttcaatttacatataacatctgaatcctgcttggcatattggatacgcattggtttatcataaaatggaaatccttgcatcgatctaagagcattagtggagctctgaatttctttaaaaatgacaaatgcttggcctctcattttcaaagtttttaaggcaactatatccaaaatttgaccaaattgggagaaaattgcatacaaagattttttcagctcatccttttttactttttcgttgagattgttaatgtagatcgtgttgttcggtcgaatatccatcctgatatttctttacttgttgtgcatgtatatcttcagctaatgttaattaagattcgagaaccttttttatttttttctacagtgggtaaattttcatacaccggttttaataaaatagacgctactcaacgtgtggacatgacagaca

SEQ ID NO: 11648 - DNA, 600 bp, Diabrotica virgifera
taaagggaaaacaggtgataggagccctgaattcggtactgtggcaaaaaaatataagaacagaaaataaaaaatgaatttacaacacaatattaaaccagtgttaacctatggagctgaagtctcgcaattaatcaacaagcacaaagataaattactagccactgagatggatttttggagaaggtcagcaagaagatctagactagaacacataagaaacaacgatgttagacaacaaatgggaatagaaagaataatcatagatgacatcgaaagacaacagcaatatggtatggacacgtaagacgaatggaagaaaaaagaattcaaaaaaagtgttagaatggacttccacagaaaaacgagaacgaggaagaccaacaaccacatgaataaagggcatctccaaggcgatgtcagaaagaaattaagacaagaagactaccacaatagaaaggggtggcgattaggaatggaaaggcccggaaaactataaaaatggtttaacataatgtatgaaaaagtatgaaacttcgcgatagtctactgtaccactttttttttttctatcttgacttgcaaatgtgtaaatgtgaa

SEQ ID NO: 11649 - DNA, 611 bp, Diabrotica virgifera
aagggcaaaagttggatatgtgagacaaagtctcacccgcgacttctgacgtaaaagccaacatagcgaccagtgccgggttaaacacagcaaagcatttgttaaacgactctccacaatgcgttggaatgctcactatgatgcaattaaagtattggcagaacattttgatagatatgatgcaattaaggaattatgtcaacgacaacaaaatttagacaccaggggtgctgcacatgtccgctgtgtgtaatttcacatttctttgttatttctttttggaatgatgtaggtactaagaaacataaatttttgtcagattgaactgcaaaggaaaggcataactgttgatatatcagagaccaaaatactaggcttcgtctttatactgaagaaaaatgtggtcatattatagacaaagcaatatattttgccacgaaaaaatctgaggactacggtattcccaacgaaagacgaactcgacgtcaaaaacgaatggatggtgagttatatagctactgatacaggactcacatttcgaaccgaacttcaaaaggatatatgttgaaatgttttgaccgattcaatgttgaattctaaagcagatcaac

SEQ ID NO: 11650 - DNA, 611 bp, Diabrotica virgifera
  SmartBlast Evalue=3E-41; Info=Mitochondrial ribosomal protein L21 n=5 Tax=melanogaster subgroup RepID=Q9VVX4_DROME
aaattatttcaatctttttattcacaaatttttgaaaatggctctatttttgaaacgagcctgttctcaagttattagattttcacagttaacaaacaggaatatagtttttaaaaacatacccgccgtatcactagtttcctccgtacattattcgaacaaaccaactccttatgaagtagtaaacaaagatgaggaaaaaagtgttacaaaagaaatcataagtaaagttaataatttagtaacaaacaaatctcacggaaggctctttgcagtagttcacgtagctggcaagcagttcaagataacgaatggagatgttatagtgatagaaggttactggccaccagacgttggagacaaaataactctagacaaggtattgttagctggatctgccgattttaccctaataggaagaccgattgtagaaaaagggttagtaaaagtagaagccattgttatagaaaaaactttatcacacactaaaacacatttccgaaagaagaggaggaaacagtatatgagaattcacttctatagaattcctcagacctatttaagaattaatcagattagtattgaagatgaagttaataacccaaaagaag

SEQ ID NO: 11651 - DNA, 611 bp, Diabrotica virgifera
  SmartBlast Evalue=3E-60; Info="Replication factor a 1, rfa1 n=1 Tax=Aedes aegypti RepID=Q16KY9_AEDAE"
ggtattgccaaaagtgtcagtgaattacaaacattccaagcaagatcaacaggaagagaattgaaaaagaaagaagttgtcttggttgatcagtcacaaacagctatatcgttaacactttggggccaagaagccgaaaattttgatggtaccaataatcctgtcgtagttataaaaagtgccaaaattggcgagtttggaggtggcaagaatttaactactcttgttagcagcactgtaaaaataaatcccgaattaaaagaatgttacaggatcagaggatggtacgacagtgagggtgaaaatctgaatgcaaagaatattagtgccagagttggatcctcgaatatgtctgccacttggatgacctttaaggaagttaaagatcaaaaattaggatcatctgaaaaaggtgattattataaagctattgctactgttcttcttgtcaaagccgataatattgtgtatagagcttgtcccaccgctgaatgtaataagaaagttgttgatatggaaaatagtatgtacagatgtgaaaaatgtaatagagaatttccaaatttcaaatacagactgttagccagcatgaatgttggagaccacacagg

SEQ ID NO: 11652 - DNA, 610 bp, Diabrotica virgifera
atcaaattctcagtgactacttaaaaagaattaaatggatcttgaggtagattggtgggattttaaaatatatcaacatccaccatgtatgttttctctatggtacctattcactattgtagatttactctggaatccagttaaagaaaaagttaacgaactaattgagttggtcggtcctaaagaacaagcagaaggtgaaggtgagggtggaggtgatggtgagagtggaggtgaaggtgaaggcagtggtaaaggaaagagacattggtggaaaaagaaacctagtgtagaggaagaggaacacgaagcaacggaaacagaaggtgaaaccgaggaagaaggagaagcaactgaaactgaagaagaaaaggctgcagaaacagaagaaggatcaggaggagaaggaacggaaggagaagaagaaaaagtagaagagtaaatatatgtacctatctagtataattaacagcactttgaaatgaaatgatttgtgattcataataatatgctaagtcttgatataaaactgcttataattgaaatataaaaattttttataaaaatcattcctttaaccatacattgctttatttgttgatatgtctgc

SEQ ID NO: 11653 - DNA, 606 bp, Diabrotica virgifera
tcgagatttaaaatgtaaatatgtaaaaacaaaaatatttctcttatcttaaggtacacagacaataagtttttatgaaggaaatcgaatttgatttttaaaccattttaaactcataagcacaatgactacatccgtagcgctgtatcaatgcagattatgtttaaataaaactccaaccagagttaacatatttggtggagattttccccgaatgctagacctattaacatccataaaggtacacgaagaggatggctttccaaaatatagttgtacaaaatgtgcaaaagaagttcagatggctgtgatggtcaagaaacgtattataaaagcacaccattttctatccttacaagctctaaaaaagaggagggcaatatctgaaagaatagagacatcccttaagtcagaattagttgagggctcaaatgaagctacaacaaatgaaggaagtgtaaaacgtactgttaaataaaggcgaatcttcagtaccaaaaaggacaacactcactaagcaaaaagtagtttctaaaccaataataaacaaaataaacccaatcaaagtcaggattagtgaagaactcaaataaagtaacgactaat

SEQ ID NO: 11654 - DNA, 609 bp, Diabrotica virgifera
  SmartBlast Evalue=8E-17; Info=Domeless n=1 Tax=Tribolium castaneum RepID=D7EJN5_TRICA
ataactcgcgatggtttcaaaatggaagaggggaatataaaaaatataactaatgcccaaaattataccatagaaaactgtcgcgaagcaggactccacacgttcttttttgccgtaagagctgtcaatatcatcgacggagaacatgtcatggcaccatggagtgatacttccaagatatactgctatcgatcttcctggtatatattcatttacgtattccttggcatttgtggaatggtacttataggatatggacttaaaaggctctacatgtgttggaatatcgctagacacgttgaaattaaactacctcctggtctggcaccagctgtagaacatcacaacgagaagaagatggatataatagaaagaaatttcactaacgatccagatgaagaacttcttctggaacggatgaatgaaaagtgccaagctgttgattccagcggatgcagttcgggccaagaaagtattagctcgtcagttgaatctactacacatttgtctgtggattctggaactgatcaacctagaaatgtatctgatgataataaggagaattcattaaggctgagaaatgtgtcatcaaaaggatacgtgatgtat

SEQ ID NO: 11655 - DNA, 610 bp, Diabrotica virgifera
  SmartBlast Evalue=2E-26; Info="Phafin 2-zinc finger protein FYVE domain containing protein, putative n=1 Tax=Pediculus humanus corporis RepID=E0VAF1_PEDHC"
aacatgctgcagtttgggtaccagatggagaagcgccagtatgcatgcattgtaggaaacccaatttactttaataaacagaaggcatcattgtcgtaaatgtggatctgtggtatgtggaccttgctcaagtaagcgattcctgcttcccaatcaaagttcaaagcctctcagagtatgtctacactgttatgaaatacttacaactgctacaacgaagaatcacacgttagactcgtctattaaaggtacaaatgcggaatcttctggagaagatgactcagatgatgatgagggtgaaatgaataaacctgaagctcacgacctgcccaagttctatggcgataatgaaaaaaccgaataatattaatctacaccgacatactttacttccacttggattcatatctgacgttaaagtaattttagtttgtaaaatgattctatttttaatataaactcattgttatatacacatacacgaaaataatattaatacatacaatgaattgccgtgtaaattatttaaaaaaattacatataaggatatagagattttaattaataaaacatagtacattatttatattccacaaacccgaatataaat

SEQ ID NO: 11656 - DNA, 603 bp, Diabrotica virgifera
ggtgactagtgtggtagactgagtattgaggtattttaattacgcttctttctgtgaaatgcgtttcggatacaaagaggatgtctattatgttgtcctctaggaattggattacttctgctttatggtttgctaaaccatttgcgttccattcggctattcgaacagatctaatgaattttattaattaatgttgttagcgtggtaaggatcatgctgttttgattcattagttgggtgaacattgctttaaattcgtttaagaataagttcatctgagaccctatgtcagctacttgatttcctgctcttactgcttgggcataggattgggttccattctgttgttggtactgtgattgttgactctgatactgtgaagttggtgctgggttaacattttgatgtgggttctgattattatgggttgactgatttccgcgttgtctattatttcttacattttgcaagtccttgtaattacgcaacctttatagtttgcagtctgttctccgttaaacagggcacattttgctggtgtatttctgggttttgtacattctggcgttggatgacttcctccactatttcacgcatgcgtaa

SEQ ID NO: 11657 - DNA, 608 bp, Diabrotica virgifera
taatattctaaccaactatattattgtatgctgccatgtgcggcctacaaattaatttagttattgcaaatgagtgctgatgctaaatttaaaaacatttctttgttctattatatctataatagatgtaagcgtgtataatatatgacctagaaaccaattttataaaaccacgttacagaataaaggacagagtcaaaattattagaaagccgagagagtaacaattatataatcgaacctttagcagttgacttccaggtcaagtgaacaataaaacttatctttggggattggtgttttcatttacgtacagaagtccatccaactcctgcaatattcaagactcagatcgatgattcttttcatggtccctcgagccggattgatacctcctttttattagttatatagctgggaatatactaacaagttgtttatttgacaatttgtcgccaaattggaagtttatagtctagggatcaggtctgtttagtggcctctacatattagtttctctacatattttagaacatgtaaagaaacaggcaggataaccacaaacgttgtgtaaagtttataaaaagacagagatcctgatccaagcc

SEQ ID NO: 11658 - DNA, 611 bp, Diabrotica virgifera
  SmartBlast Evalue=1E-49; Info=Zinc binding dehydrogenase n=1 Tax=Aedes aegypti RepID=Q17E09_AEDAE
ctcactaatatttggtctaactctaattacattcactgaattaataccccacagtttgcaaagttgtaagattaattgtccacaagaagaatttgctgcattctgaatcactgtatcacctttttttagcttaacaaaatcttttaacattctgtatgctgtaggaggatttgttaaaagtatagcagcctcagcaataggtagactatttggtacctttttaattatacttttaggtaacaccatatgtgtagtccaggtacctaagttatatgctaaaggtatcacatggtcaccttctttaaagtcttccacattttttccaaccttaataacttttcctacagcttccgatcctggaaccgctggaaaagtttttttcactggatacttgccttgtataatattaatatccacaggattgacaggcgatgacaacacttctactagtacttcatcttttgatggttctggcactgtcactgttacttttttcactacatcaactggattaccgtactcattaaaaattaacttagatgcaaaatttctcgtatataaataagagtcattgttaataaaattatttagtacaaatcttactgtgatag

SEQ ID NO: 11659 - DNA, 601 bp, Diabrotica virgifera
tctcagtctcaggacgtaaaagagtgccctgccacttaccaactcatccgcccgaagccgttggtcagtaagtgggggattgcttataccggcaatcattcggtgaagagcatgtaggttgtagaaagaaatatggtgacccgtctgccctcggaaacctaatagtcattcggtgtcggaagaagaagaggtagccaagagaggccgataggaaagattaaagacatttcactcaagactattttcataagcgtatgagtattaatgcactttgtgttcccgctcatacttcgggtgttgactacaggctgtatgctcgtccagcaaaattaattacatagtgaccatttttctctcctcaaattcagactccacactctcatcccttccatccttctttctccgccaatcacaaaaattcatctctacccactatatccatattttcatttcttaagaacccatttattttgtatacaacttttccattttgttaaattctaggagatatcaaattacttttcgttgtttcaatatgctaaacaaaaaagccttatcattctaaactcaataaatttgtttaccgcttaaccttcttcga

SEQ ID NO: 11660 - DNA, 609 bp, Diabrotica virgifera
  SmartBlast Evalue=2E-58; Info=Lactase-phlorizin hydrolase n=1 Tax=Culex quinquefasciatus RepID=B0WNN4_CULQU
tcaaatacattttgttaacatctttactgattggcattactaccgctgatattgtacttaacaaaaaacgatttccaaaggattttatgttcggagtgagtactgcagcatatcaaattgaaggtgggtggaatgaagatggtaaaggagaaagtaactgggattatttttctcatcaagttccatctcccgttttaaatggagacacaggggatgtagcgtgtgattcttaccataaagtgaaagaagatgtggcgttattaaaatatttaggagttaagcattatagattttccattgcatggtcaagagttcttccaacaggatacatcaacaaaataaaccaagcagctatcaactattacaaaagtctgatcaatgaactaaaagccaacaacattatacctatagtaacattactccacttcgacaccccacaaccgatagaagaaataggaggttggatgaatgaatgggtagtcgacagattcgtggaatatgttgaagtttgttttaagaattttggagacgatgtgcaacattggataactttcaacgagcccgtattaatgtgtatcatgggatacggtattggtgttattgcccctg

SEQ ID NO: 11661 - DNA, 609 bp, Diabrotica virgifera
  SmartBlast Evalue=3E-28; Info="Mysoin heavy chain, putative (Fragment) n=1 Tax=Ixodes scapularis RepID=B7Q4A8_IXOSC"
ctatccttcttgcgaatagttggaagatttttagtaaatgcaattgcaccattcacgtcaacgttgttttcagttattgcgccactggtcatatcgaatccggcttctttcaacttttttatcaacaccttctctctcttctttattttgcgcatattttcggtaagagagtcaattttgtcgcgcagttctagattttctgtggctaagcgtgtaatttccagttgcatgaatgctgtttcttgtgtttgaccagaacctaaaagatttgccgataaaatacgttgcagcttttcgttttcttcttgaagcctctcgttatctagtttaagctctttttcgtaagccatgtatttagccttttcatcttgtagctcgagctccagttgtttgttgattgttttttgagtttcgtaagcttgagcaagttctccgtcttcgtttatgtattgacctgtatgagtttttgagttcaatatagatttcatgttattggtctgatttgccaagacactcttcagttgaataatttcttcacctcgtcgttcgagttcgttctgtgctgtagctagttgctcgtgaagttgcgttacaccttgaccttcatta

SEQ ID NO: 11662 - DNA, 609 bp, Diabrotica virgifera
ggcgtctctagctgtgctattagaaaagaccattttgtcaggtcaaatcgaccaagtgcctgcttgtgacctttggagacacgctatatatacatacatacaactttcagctgcttgatacagttatcgtaaccttatttgtacaaaaaatataattaattttcgcaaataactagtaacgcagttataataatatataataattataaatatatcaaaatatattacctaaccaacaacagtgcaaagcaatagtcctgcaatttagtgcttacaaaatattttctcatacttcacacataagaaaagcagtctaaaatagttttggaaaagatcagaatggttggccctaaatcaaatcaattttacgaaagcttctttaaacataacaagcaataaatatgcttctaaactcaaccacaataatattagcaccgcctgtctgtgattctatccatttgctatgtgatttaaatatttagcacaataacatctcaattgcatcactgcccacgactcttatttatgcaataaatttgacacgaaacgaaacaaagtggtggatactgatttaaatgtaatctttcatggctacagtaagaagagtaa

SEQ ID NO: 11663 - DNA, 610 bp, Diabrotica virgifera
ttcttgtttgatacatttgataattttattgggaatattagcgagtttattttgtagttttttatcacattctacattttaaatgataccaaaatactgtgatatatttgcttagttatcgtgaattattatcgtctgttttttattcaaattttacaacaaaaatctattattacttatctttatctactaaattaacagtaacattgattccagacattattcttaagaaatatattttaccaattttttggtattaacttcgtaaatacgtcgtaatagtagttaggacgctttataaagatgtatttttttcgaaaataatactattcgaaaaactagtattatttttataaaaatatgtcaatcagtaggccttaaattaaagtattgcaatacaaacttgggaatgagctcaaactttatggggtaatatgcaaagtatactttataaatttgacaagagaaagggtgcaccctgtcaagataccaaggcttccacggaccacagggacacccagtccttaaaccgacttccagatgtcatcgtttccattgaattcatcatccagagggcccattccattcgttcctgccatgatgctgctgt

SEQ ID NO: 11664 - DNA, 610 bp, Diabrotica virgifera
gatcgtttcagaaagttactagacacccaacgatattgaatgtataatacctttcttagaatttataataatattcgtatatttactgttcatttttattaaggaaatgttgaaatttctggtactgatttcactcctgcctgcgataagtttatgtggtagctgcaagtcaagttattcttctataaactgccaagaaataagccaagatgccttcctgatagagctgtttcgcaacaaagattcattttctactttaagagaaattttaattgaagattccgatttttccagaacacaaccgtttgtagatttttcaaacgatttgtatccagtgcaggtcgccattacttctttaactattagaagatctaaagtagataatgtcaataacgacacatttggagcttttaaaaatgtgaacaaactaaatttaagtcaaaacaatataacagatttggtttggttgactcgtttaccatactacccttatttcaaactagatataagttacaacaaaatttctgaacttgattttaattacttaatgccatggtcatcaatttggttaaacaataacgatatttctatattaaaaccagcttcggac

SEQ ID NO: 11665 - DNA, 606 bp, Diabrotica virgifera
ggtttttgcacctattgaggtggctagttgcaattgcttgtgcactggacgtttacactgatgatggtcagtttgaccgaggagcgttttgtacttccactcccttgtggataaattttgggaattttaatggattcatgttcctacatgcaacaggaggtgtttactttattccacgttgttatattgaaggtatacagccaactacggggtttacccctttttaaagtaacaaatatgtaacacatagttctatctactacatagattgatccacattttggcaaaatctgcacactggacattttctcctaatacctaagcagtgtgtaagattgtatgtgatttttgtaggtattgtagacatattcataaaggtgtagataatgttctgttacataggccataccgattactgttttatttggacatcttgaacaaatggtatcattgttgtcaactgtaatataagcttcttattaaaattataaatttaatttttaaataaaactttctgtaacacataaaaaaaaaaaaaaaaaaaaaaaaaaaaaaaaaaaaaaaaaaaaaaaaaaaaaaaaaaaaaaaaaaaaaaaaaaaaaaaaa

SEQ ID NO: 11666 - DNA, 609 bp, Diabrotica virgifera
ttaaataaaataataatattatcaatataatctgtacaatttataagactatacaaatgaaagaaaataccattttataaatgcaatagacacaattgattttattttattccaaattgaaaataaaatttgacaactgtcagatttaactaaaatgtcacgttagaataaatgtcataaatgtgtattatcacggacttacgtttttttctataatttgtgacgcactgaaaaatgttcatgaaaaggagaataccccaactattttactaatgcatttgactctgtcgtacttgagaatgcactgcagacaaataaatgttttcagtgatgtcagatttcacagtttcgggtcactaaatgagtgagtcgagattcatgaaattttataagaccaatacctcatttgacgtcagacgttagtagtcgacttcagcgatataggaattaagccacagtactaattaactacttataaaatgtatgcccaataccggcattaaagttatgtgattgtatggacgtgttgtatatttatataattttacatatacttagcagtcaaatacatataatataattatttttgtttttatgaatacattaata

SEQ ID NO: 11667 - DNA, 606 bp, Diabrotica virgifera
  SmartBlast Evalue=3E-16; Info=RNA-directed DNA polymerase (Reverse transcriptase) n=1 Tax=Medicago truncatula RepID= A2Q4S9_MEDTR
gtgacgaagaagggatggatagagagcgtacaggtaccactgtataaagataaagatgacattcagaactgtaagaactatagagtgataaagtttatgtcgcacacaatgaaaacttgcgagaaacatagataggacaagaacaatttatgattatgccaagaaagaggacaacaagaggttgatagagaaatacgacgaaaagagctatggagatgtatgggagagaaatgggttctctctgacaagtacgtaaagctcgtgaaggatacttatgagagagcgtacatcaaagtaagaacttgcgtcggattgacagaacgttttctagtgacggttgatttgcatcaaggctcttcactaagttcctctgttatcgatgtactgactgcaggctctgtggtcaatgcttttgcggatgaaccgtgttagtcgaggagagcaaaaaatgtaggtttggaaaagggctattgaagaaacggaacaggaatagttggaaacaccggattgctgggagaaaactaggacgagtaatgataatataaactaggactagaaaatgtgacaccagatcaagaaattgtccacatgataaaggctttggtt

SEQ ID NO: 11668 - DNA, 609 bp, Diabrotica virgifera
gcaccaatcgtatcacagcaagtaacgattattgtatctacaaccagtacacttaattactttctaccaatcgtatcccagcgagtaacggacgggaccggcattttatgagtgttaatgaatatcgttatcggtatacattttaagggtgtgattacaaaatatttacctactgagaaatacgtttctcaatatgattaccggtactcaaatacaaaagtaatcatagtaatcaaagtaacgaatactttaaatgattactttatacaaaagtaacgatttgtaacaaatactcgaaagtaactataatcaacatcactaccctactgagcgcgtcaaatagcaatctgcgttttcgatttacactgattacgatgtgagttacggaatcccaatccaaacacgaaaccgacgcgatagtctccaccattccgatttcgggtaattacgattcgacttaatcatttctgttcgcttggttaaaatttacagaatagggctgattgagtgctgcgtagtcattattagttctttttactttattattttttttgttctaatatatttgttataatatattatattctatacatgttttacatcgaataa

SEQ ID NO: 11669 - DNA, 609 bp, Diabrotica virgifera
  SmartBlast Evalue=5E-37; Info=Adenine phosphoribosyltransferase n=1 Tax=Schizosaccharomyces pombe RepID=APT_SCHPO
tgtgttgggctataaaattgaggatataaattaatttagtttctttataaattaaacagtgtaataccatggataaaaaggcgaaaattgaattgttacgtgcgaatttggcagagtatccagattttccaaagaaagggattcttttttgggatatattttctattctgaaagagccagaactatttcacgttttaaaagatgtgcttatggagacagtgaaagaaattcaaccacttccagaatgtattgtcgctcttgatgctagaggattcctatttgggcctatattgtctctagagttaaatataccgtttgtacctgtacgaaaaccgggaaaactgcctggagaacttatcactggcacttacaccaaagaatatggagaggattccttagcactgcagttaaatagtataacaaatggtcaaagggttttaataattgatgacctcttagcaactggaggaactttagcatgtgctgttgagatggtacaaaaggcaggagggaacgttatagcctgcttagcacttatagaattagaagcattgaatggtagaaaattaataaacaaggatattatatctttaattaaaatatagtttt

SEQ ID NO: 11670 - DNA, 609 bp, Diabrotica virgifera
  SmartBlast Evalue=1E-24; Info=E3 ubiquitin-protein ligase HUWE1 n=1 Tax=Camponotus floridanus RepID=E2AL17_9HYME
catgcaactcaatctttgatacattcacataacttggagcaggcaacagattacttgctctctaatccccttcacttatctagagctggtgctactggtcaaatggatgtagagactgacgatgaacaaatgttacaagctattgccatgtctttgggatgtagcagttctgcatcgccggatactaaaaaagataccaaaactgatttaaaagatctcaaaaaggaagaaagtcctgctgcacgtcagtcttcctttgaatccatgctaaatgattttactcaagatgcatttgatatatgcttaaatctgcttgactcgcttccagaaactgttcacaaagtatgtgagcttttagttactttgatgaaaagaaatgggcgtagttatagagatatggtcctaatggcacttgttgtgaagattcaaacttgtgtcacatatatttactcctgcgcatttgaaaataaatcaacgataatgacttactatgttttaactgactctgagctagcagcaaaattaacaaactatgttcatctgttcatattactattcgaagtaccatcatattatgacatgaaactaccatgttttaatgccattaat

SEQ ID NO: 11671 - DNA, 609 bp, Diabrotica virgifera
  SmartBlast Evalue=6E-75; Info=Tsunagi n=1 Tax=Tribolium castaneum RepID=D2CG02_TRICA
gaaacagattgtttttaaacgtgtattattagtgtctcttgctacgtttacttctggacttctttgctcctttaacaaaacaccagtcgactccaatcgtttgacctagtagagaagacccatttaaagcttctctagctgtagaagcttcttcatatgttccgtattcaatcagagcgtatcctttcaaaaatcccgttcgtcgatctaaattaatactaatgttttttattactccatagtctgaaaacttcttacttaaatcttcttcggtagcctcttcatgaaccgaagtagcgaacaatatccaaccttctactgatttttggggccctggttcgtcgccgtggtctccagcatcaattgactcgtaacctctcactttttcgtgctctcttccttcgccgggaccgaaaccacgaccttttcgttttataactttgtcttttagtctcaaaacgctttgctcaccttcatcttcgacatctatatcaacggcatcgttaatatctaaaacgtcagccattgtggtcaacctctttttaaaatctctgtttttattttaattcaaatcaatttaccattacgattctaccgacccgactcgac

SEQ ID NO: 11672 - DNA, 607 bp, Diabrotica virgifera
  SmartBlast Evalue=2E-13; Info=Epididymal secretory protein E1 n= 1 Tax=Camponotus floridanus RepID=E2AIZ6_9HYME
aacttaaaacatatatttcaaactatttacaccaataaattaatatatcacaattcttgaatctagttttttcgcacttgaagatcgacgttaaaacataaaataatgtatttatcctcattattagtaaatgaaacctgcaaatttagcgaaatttctggataccaacttgctatatccatttcgtaactgtaagatacaaattcatctttaactaagggacatatcgtattggtgagcgaggtacaagcatcctttccaactggataatttattggtaagcctagtgcctggactaagtaggtaggttttatggatggtatatactcaggtgaagtaaaattgacagttatataagcaggtgatccagcatgtacatcacaaggaggctctatacacagttgctctttcgatactacttgcactataggcaataatgctccatttggacatttatccacattggtagaattggtttcagatgcataaacggtaccaataaatattaataaaatgtttaaaacaacttctagcttcatttttggcttttgtttaatatagcgtaacgaattacgaacaggtactactaggattaaatagaagtgtg

SEQ ID NO: 11673 - DNA, 609 bp, Diabrotica virgifera
  SmartBlast Evalue=2E-90; Info="Titin, putative n=1 Tax= Pediculus humanus corporis RepID=E0VID6_PEDHC"
ggaaccgtaccaaaacttgaagaaggtaaccaatataagttccgtgtaagagctgtcaataaagcaggtccttctgaaccatctgaacaaaccaactggcataccgctaaggccaggttccttaaacctcttattgaccgaaccaaccttaaaccaacgactattaaagctggtctatctatcagtttagacatcaacattcaaggtgaacctccaccgaaggtcacctggttattcaatggccaagaaattcaatcaactgaagaaattcgaattgataatgtggattacaatactaaattctttgtccttaaatctaaacgtcttcattctggcaaatatacaattattgctaagaacgaagtgggtgaagatcaagctgaaattgatatttcggttcttggtaaacctaaggcaccaaagggtccacttgaggttagtgatgtgaccaaacatggatgtaaactcaaatggaaaaagccagaagatgacggtggttctcccattgatcattacgaaatcgaaaaactggatccacttactggacaatggataccttgtggtagaagcaacgaacctgaagctaatattactggtctccaagaaggt

SEQ ID NO: 11674 - DNA, 599 bp, Diabrotica virgifera
aatgaacagtttcaaattctgcatattcaaaataaaggccttaagctatctttattagaatctatggaaattaataaattgaaaaatacagatataattctgagtgaccaactcgagacaaacagctccccactcctcaacctcttcagttaaagactttaaaaggcaaacccatagtaatctaaatcacttcagaagggcactctgccgaaacagctgtagtcacatagttgtaataaatgttgtgggcgtatagaaaacaaacgttttcagtgttttattgttagataaaatgaacttccatcatgtaacggtcgaatccatcaattacctagtagactttgttgctttgagtgtgacataacttgtataacggatacatcagtaatattagactgattaaatagtatcagttaactttaacgacccaaaaatctgtacctacgcttgaaatccaagtctggaatgccagaaaaccagtgaaaataccctatattacataaagtctattttatcaatttgttcttaaaatattataaattgtctgactgtggcaactgttctacatttattttataggattaagatcacgtaattat

SEQ ID NO: 11675 - DNA, 606 bp, Diabrotica virgifera
  SmartBlast Evalue=2E-27; Info="Calpain A, putative n=1 Tax= Pediculus humanus corporis RepID=E0VKU5_PEDHC"
acggtgatgggtgattactagagagcggaatatatgcaacacaacattaccaaaatatgcgcatatatatgcattacttttactacaaatatgcagatacaacagcgatgaatccccaattccatgtgcaaattcctagaacgtcttcaaacaaatgccacgtggtcgtttcaatcactcaatattatgaaactaaagaatttgatgtgaaaaagaaaaaaagctctttttgcaataggttttgcagtttatgaagtaccaaattcaatgcagagattaacttcacatttcgtcagcgatcagaaaccgttagatgtaacaaatcattcgatagcgagagaagtggttactttcttcactttaccatcaggggattatatcgttgtacctcaaaccaacatcccaaatttagaaggaaaatttttattaagatattcaccgatgaacagagcgttatatgggaagtaaatgaagataatatgcttattagaaacattgcatctgagtttgtggatcattcgggttcatccgtcgcgggagatggtaaagcgccgataaataaaatgctgctgaaatattcatctgaaatcgatgctagtcaattac

SEQ ID NO: 11676 - DNA, 607 bp, Diabrotica virgifera
  SmartBlast Evalue=6E-62; Info=Probable E3 ubiquitin-protein ligase TRIP12 n=1 Tax=Harpegnathos saltator RepID=E2BD42_9HYME
atgatattctaaaacaggccgaacaagtaatgcaagatttggcgtcgtctaaagccttacttgaagtgcaatacgaaaatgaagtcggtaccggactaggaccgaccttagaattttacgctttggtttcaaaagagttacagtaagttaatttggagttatggaatgcttttagtacgagtgaaagtgaatatgttaatagtccgactggattattcccgatgcctttatctagaagtgcaaaagttagtcaaattacaaaaattaagagcaagttcagatttttaggaaaattcatggctaaagctgttatggattccagaatgttggatcttccattttctgtcgcattttatcgatggcttctgggtcaagaaagctgcttgacactctcagatctccggcacgtcaatccggaactgcacagaacactacgtaaaatgcactttatcgttaaggagagagatgagattttagctaatatggattatacacaagatgagagaatgagtgagatcgagaaactggaattcgatggttgctccatagatgatctcggcatagactttgtggtacctggttataatatagaattaatgaaaggggg

SEQ ID NO: 11677 - DNA, 607 bp, Diabrotica virgifera
  SmartBlast Evalue=1E-27; Info=Coiled-coil domain-containing protein 49 n=1 Tax=Camponotus floridanus RepID=E2AW00_9HYME
aaattggttttatttcattactttagattttgcttttaaaaaatgaataataatggcgatacggacaaattggactggatgtacaagggcgcaagtagccacattgaccaggaagaatatttactgggaaaatcagtggacaaatcttttgaacaaattaacaaagaagaaaaagaaaagaagcttggtgtagtgcctcctaaaaatcatgttgaacatgagtgcatccctccctctataagggattacaacaaaattgtccatgaagatcaggttgatttatctgccaagcttcaagaagatcctctcatggcaattaaaaaacaggaagaagaagctagacgtcagttcctccagaaccctatccaattgaagaagctgcaagatgccctaaaagtgcaagaagacaagaaaaagaagaagaaaaagaaaaagaggaaagattctgattcagaagatgatttagaccaacaaatagctgaaaagttgaaacatcttaaaggtaacttcaaagatctgccaaaaaagaagaaaaaatccaagactgaacaccttgataccatcttgatgcacaaatttaatcaactaaaggataaattgtcccaag

SEQ ID NO: 11678 - DNA, 609 bp, Diabrotica virgifera
  SmartBlast Evalue=4E-41; Info=Alcohol dehydrogenase [NADP+] n=1 Tax=Camponotus floridanus RepID=E2A7P0_9HYME
taactacaaaacttaatagtgttgacatgtactcaaatcaagtagaaaatgccataaagacatcgttacaaaaacttcagctcgattacctggacttatacttaatacacaatcctattgcaatgaaacatataaacggaaagcctgttcctcagccaactgatttaatatctgtttggaagaaaatggaggaacaagtcgatgctggtagagctaaaacaattggagtttccaattttaacatcacccaaattgaaaggattcagaaaattgccagaattcagccagtgaatttacaagtagaaattcacgcatattttcagcaacctgaattacgtgaatttgctcgaaaaaacaatatcacagtggttgcctactcaccttttggaagtcctggtgcaaagaaatttttcgagtcagagaatctaaatgtgaatctgtctctaccagacattttacacgatgatgttgttacacaaattgctaaaaaacacaataaatctaatgcgcaagtattacttcggtacctccttcaactaaatatagtagttattcccaaaagctcgaatccaaatcgactgaaacaaaattttgacattttttgatttt

SEQ ID NO: 11679 - DNA, 609 bp, Diabrotica virgifera
ggcgtacgtgtcactttgtgttttgacttgtttgtttgcaaatgatcgtgacgcacggaaaaagttgtagcggacgaacaatatcattgttactgttatagtagtatttttacatcctaaaaaacaatgacttaccagaacaaatatttgagtaaatattgttttacttagtaataacaattaatgtttcatagtgtacagctgttagaaaccagtcgttaaaaaaattgatatggaaacaaacaaaaaaaaaaacaactcaaatcgatttgctacctgaaagtgatttggtataactttcttatttataatttaaagttgtaaccattatataattttaacactgccatgaatataatacagtgtgtaacaaaaatacaggtcataaattgaatcacatattctgggaccaaaagatagattgattgaacctggcttacattagtacaaatgtgcacatagaaagggttacagccctttgaagttgcaaaatgaaaatcgaatttttccaatatatcgaaaactatgagattttttattgaaatggacatgtaaccttcttatggtagaaacactttacaaaggattatggtgaaatttgtgcacccc

SEQ ID NO: 11680 - DNA, 609 bp, Diabrotica virgifera
aaaaatttatataacccccacaaaagataaaatgcatacttacaacaataaatctactaagatgtgcgctgcattatatttcaaattccgtggatgattttaagaactcaacaagtcctacaccttttggatgatctcgtgaacggttgacgccattatcttcagtcgaattttgcacgtggactaagtgagatccgattattgaaaaccgcaagaattcttttagtttttctgctccaaaaattaagacgctaacttcgtaggtttttgctttgagcttactattgatttaaatcatgttgttttccgtacattttggtgcatctgttggtttatatggtttagtagttttggtttgtaacgacgtttactatttaaagcgtaaagggtaatgaagtggtaaataataaagttaccattttcctctccagaggccacaaaactacactagaaaatctatgattcttacttcttagaaaatctatgatactaacgaagatttacaaaatagaaaggcaaagttttacaacatactctgtatacaatcagaaatgacggcaaaaaaataagggagacgataagagctttcgacattcaagatcgacttca

SEQ ID NO: 11681 - DNA, 608 bp, Diabrotica virgifera
  SmartBlast Evalue=0.000000001; Info=Endonuclease-reverse transcriptase n=1 Tax=Bombyx mori RepID=D7F157_BOMMO
gtggctgcacagtagaagaattatttcgcgcagcagccgatagagagagatttcaggaaattgtaaacttgatgacggccaacgtctgaatacagacacggcacctaaagaagaaaaagaaactcttttttactttagccagtaattctaatatccccttggggatttttgtcttcttcttagtaaccaggtcgtctttttctaaactgcattcatatcctcatactaaagttttttgctgatatatatggtcttaaaatcagcttttccaaaacacaatatatgagcaatactggccaaaaatattacaactaatggaagacaaattgaacaattgtatacctatatgtatctgggtcacgagaataaattaggaagagacaatcaaacaacagcgttaaacaggagaataacatgggtagcttacggataattgaggcaagtctttagatcagatattcccatgtgcttgaaaaggaaggtttttgatcaagtgtaagtgttcttctatttctaacgtatggagcagaaacattgatccttaccagaaaagtaatcaaaagatacaagtgacacagagagcaatggagaggttaatattgaatata

SEQ ID NO: 11682 - DNA, 610 bp, Diabrotica virgifera
aaacggattagttataggtttttggagttgctataaacccatacacaccgatactcacatgcacattcacaacatggaatcaaatacctgttaatacgtccacgtggttgatgccgggtaatgctaaacccaggttttatatctgatgggtcaacaacatctatattcatcaaaacaataacgaataaagatattgacacaaacttgcagatgttattttgataccaacccctttaacctgtcctttgtacgtcctttataccgttttcaaagtcaaaaatattaataaaataaccatattgtgctattcaattgttttaattatttataaaaaatataaactcaatttatatctgacaatgtatgtccttcatttattttaatatcgatttactacattctattttgatagtggtattcatcgtggccactagatactccagagtcttttgtttaagtcatattcgtgttcagcaaccccaaaaacacaagagtaatccgcttgcataaatttagtaccgaaaactctcgaaaatcccagaagatgacgtgccttaggcaccaggtaccccggtgtctgtcctgatggcgtatttgtgtttagcagccc

SEQ ID NO: 11683 - DNA, 609 bp, Diabrotica virgifera
  SmartBlast Evalue=2E-37; Info=Transmembrane protein 188 n=2 Tax= Formicidae RepID=E2ATX0_9HYME
gagtaaggaaaaatgaaaaattgtggattcgtggattgtgattgtgaataatggtgaaaggtggttgttattaaatttatggctgaatttcaagtttaatatattctaaatgtaatagctatagttttaaagtaactgttgggagtttttccaatcataacttaataatgtctttggaacaaacagcgtgtgaagatttaaaagcatttgagaggcgtttgactgaagttatagcatgtttacatccctctacaactagatggagaattgtactcttaggagtatctctctgtgttgcaacaggagcaagtcagtggattcttgacccagaaactagaatagtgtccttgtcacaatccttaaccaaccatccatttttcattctgtctacagtggttttaattgtgatattactacttggtgtacataaaagagttattgcatcttccataataacttcgagaactagggaagttttaggagattttaacatgtcatgtgacgatagcggtaaattaattctacgaccaaggccaacaaatattacctgacagttacattgctattgtagtgttttgtaaatatttgttctaataaataattattttg

SEQ ID NO: 11684 - DNA, 606 bp, Diabrotica virgifera
atgcaagtgcctcattcttataatctcctgaaattatgtatgtgtaagtaattatgtattttaatcaagacaagcaagaatatgtttataaaagtaatttttgtatgtacatatactaattaatctatttactttatcagctactataattaacattttgctcaaatacggagtctattgaggaaatagctaatgataaaaattttttacttagttattccttaatttaataattaaacatatacattggggttctgtggtgaaaaaaatagaaaaatataattatcatttacatatttttcaatcaaatcatctgtattttgatatgtactgttgtaaattcagtctcgttttattttatttatacaaaacctattttgaatccttttcggtttgtttgattttttttgccaatcttttcagataataaactgctcattgctactagtattctaatataataaagttttttttagaataaaataaatcacgattgattgtaatagcaatttattacgtttttttatgtgccaaaaaaatgcgtgatcattcataatttttatttcagatttttttgtaaaatgatttctgtatcatataaatcat

SEQ ID NO: 11685 - DNA, 607 bp, Diabrotica virgifera
  SmartBlast Evalue=2E-78; Info="Coracle protein, putative n=1 Tax=Aedes aegypti RepID=Q170K4_AEDAE"
cgggaagcacggcgactccaccaacaggtttcgatttcttttccttttcttttttctccttgggagatttcacagttgccggtgtttgattatcaatatccggtatgtgctcgggcggatgagacatggtatgtcgtttattcgcttcgttaaaatcttcgtcgggtcgtaatccactaagtggatccatgctgcgagaagccaagcgttttccagttaatgatcgttcaaattgtggagctggacgttcaattggtgttttcttggtctcataatgagtcctacctgaataacggaattttgatcccaattttggaagaaatgacgatttttgactaatttcgggtgacatcaatctgaagaatgtatgatgttccacacatgtcttccatagtttcttagctgccctgtgattggccaatttgaacccgattgtcgattcgaattgttcaaaatcgcctggacgaatcttaatatagaaattgtgccttttataactaattttaataatttttggccaagcaaacctatttatccgaagtctatctctatacaccaacagaccagaagcacaaacacctaacataatatcaactccttccgaatc

SEQ ID NO: 11686 - DNA, 605 bp, Diabrotica virgifera
atagatgtttacttgcaacttcgtagatagtggtagtgtcacttttcatttggcggtaaaatgaacaatgatacttttcagttatgctctgacgttcgaagtgaacgtatcgttatttatcacgaaagctgttgtatttcgagaattgtcctaggtattgttggcgtttcgacaaaaaagtgacataacccaaaatgtttatctttgttcttgttaaaccatttatcatatttctttggttttggttcttacacaattattagaaacattcacttatccagattctttgtatttaatttataaattttggcatttgccatttaaaactgacagttaaataagatataaaaaatacatttttgttttccctgaaaaaagttgttttttgagttgtaacactcttcttttcaaatagttttttgtgagttgtgacatttttcttttcaaatagtttttttttgagttgtgacacttttcttccggatgagcgaatgacagcagcgttagcattcttccactttgcaatatttttgttatttgaaactggagagtaaaaatcgcggtccggaaaatacacgaggcataacgatatctaccacattcta

SEQ ID NO: 11687 - DNA, 598 bp, Diabrotica virgifera
attcagtatttacacttcaaactttcctgctaattttgtctcctgtaatcagcccaattttgctaagaaatctgttcattctgatgaattcaaacaagtaagctgcaattaattatggttcagaaagagtttctaaattgtttttggcttcttcttaataacaactttgtaggtatagttgcggtaatatgtattgtaggaggctttaaatgtggcaacgtttgatacctagacaatagaccggacgatgttttagtaagataagcgttttagtaaagcaatttgttagtagaaacgtccgtaggacaatatggttcaaaatattgtgtacgataacaatgaaagtatgtttcaatgtgtacaaaaatctacataagaaattcggcttcgatgaaaacttgttggtacaagcaacttctgatttaactagaaattatactttcatccatgtagaaaacagttaaaaaagtacctatcattgcaagaagcaatttgactaacaaattttcaagacctatagatgcttcacttataaaactattgaaaatctcaatatacgattgctacagaagcaatgaaatacctacaatagaaatat

SEQ ID NO: 11688 - DNA, 606 bp, Diabrotica virgifera
tatttatatttttatttattttaaaataataaaatattttttagtaaaagtaaagaaaaattttatttaatgatagttaattagtattgtgagagaatattttatttttataaaagaaaaatttattttttgtaccttgtgtatcagggattattaattaataattatatatttattattttcgaatttaaaagagctaaaaaattaaaatttttatgtaaaataaatattttaaataatttttttgtaatgaaatgttattcgtttttaaatatatctaattttttaagaaataaattaaatttatttattaacaatatatttataattaaatatttttatattattaatattaaatatttttagggatgagcttaaaaataaaattttattaaaatttaatttttaaataaaaattaggattaaaaattttcatattttaaaatatgttattatttatttttatatattattatttttattttttataaattttttattaaaatataaatttaaattatttaaatttagtaatgatgataatattagtattaaaaaattgtatatttagtaaaaatatataggtttaataaaggaattcggcaa

SEQ ID NO: 11689 - DNA, 604 bp, Diabrotica virgifera
ccctgctacagaatacttttttcagtttgttaaaagcatttcttgtacgtcctattcttgctttaatctcttctgtgtattcattagtttcattaattattgtacccagatattcatatttttccacttttttaatttgttctccatatattgttatgctttcttgacgctgttgggctttcgttattaccataaattatgttatttattaccataaattatgttattttgaagttatgaagttattcttctttaggcgcgattgggagtgaattttattattctgcgcgcatgcgcacacagacagtatggagttcgttgctaaatgtttaaagttatgtatgtattagtccaaaaaaggtgggaaagaatatattagtgttttagtaaatatatttattataattttgtatctttggatttgtctacctcgggaataagataataagtaatatttaaagtatttttatacttcacttggtctatttggcactatatcgagaaatcttgtagtccgcacccgcacaaacaaaaggagtatagctcagtggtagagcgttcgactggagatcaagaggtccccggttcgaatccgagtgttttc

SEQ ID NO: 11690 - DNA, 608 bp, Diabrotica virgifera
  SmartBlast Evalue=4E-44; Info=Heterochromatin protein 1beta- like protein n=1 Tax=Bombyx mori RepID=C8KIP4_BOMMO
agctgagtttacacagtttacatacaaattgtagttcacaatttacaagggttcacaagggttttcttattactgaaaactttaaacataatttaaatcggaagaaatggttaaaactagaggtaaagaagataatccagaggtagtggtacctgtgccgactgacactcctgctgggaccacagaagaattttcagttgaaaaaattttagataaaagaacaagaaatggcaaaattgaatatttgttgaaatggaagggatataatgaggaagacaacacttgggagccagaagaaaaccttgactgtccagacttaatagcagcctacgaagctcagtttgaactggcaagcacggtagatgatccagaaaaatcaaaacgaaagaatatcactgaagacaacagagcaagaggttttgatagaggacttgaaccacataggattgtgggagcgacagatgcaagtggtgaacttatgttcttaatgatgtggaaaaattgcaaggaagctgatctagttccagccaatcaagtgaatgccagatgtccagaaatcgtcattagttattatgaaaataagaagcaatggtacagcaagagtgctg

SEQ ID NO: 11691 - DNA, 606 bp, Diabrotica virgifera
  SmartBlast Evalue=1E-22; Info=Putative defense protein 1 n=1 Tax=Lonomia obliqua RepID=DFP1_LONON
aaagtatatcacatctgaatagtttttaataaaaattaaatatttttaacacaattttgtttagaaaacattaatgacttcggtaggttttcgtgcccagaatctttctccagtttctgcaacggtggcatataaaacatattttcctactttgctgggtgctttccatactaacttaacattagacttgtcactagcatttttgtgggtaatagcgctgtgcttattgccgtggcagtcaatagtttggaagtctggatcgttggctgcaacaacccactcaccaacagctttgtctccttccctaacttccaacaacaatcctttaaatgtaccagtgatggcgatttctacttgttctcctccttttacttcatttttgctcaaaccgaacttgtatgggatttctgaggcctgtgggttatagggatgctttggtgtcatgtcatcacatacttctacgggcgctccagtggagtacgcatgggtgtagtagactacagagaggaggactagtagtttgaacattttttaaataaatacacaacaaagcttttagacactattttcgaggattttgcatggaaactttttgcataacaatgc

SEQ ID NO: 11692 - DNA, 608 bp, Diabrotica virgifera
ccgtcgttatggggttatttccattcttttttcttattcagttttcattcgtttcatacaatattggcagttaccgtgttaataataaataagccaaataaaatgacaaatacatcttgagcgtgcaattctataaccgtcttcatttgggtactgctttttttgacgaattttgtatatataaacaataaaacagcaagtatatacacaaatagatgaaataataattattccagaacatttcttagcaacataattgccagcactgtataaaaataatttactactaagtttattaaaataatacgttgctgcttattagcgtacttgctttatcgatttaaagacggaattatcagccttaaagtgaaatagatatacctactatacgaaatatacgtcttttatatgataatatgtatatgtgttgaaatactaaatatatctaatatatgaaatttatgtcttttttctcctaattccgacccaagttattataacgacaaagccatgcggtgaagggactataccggaacatatagggtgagcggaatagcggaaagtccctttacactaaataataatattgtttcaacaccgcgccaatg

SEQ ID NO: 11693 - DNA, 607 bp, Diabrotica virgifera
acacagtgtgtggatgtgaataatgccctggtgtaaaattatcattggaatacctaaaatcaagttttaataaaatggaagtgaaacaagaatttaatgaggaaacgtgtaaaatagaaatagagtataatcatgtggataatgctcttctaggtgcctttaaatgtgaaatcaaagaggaatccaatagccaaagtacacatggtatatatgattcttttgacttaaaaaaatgtcccataaaaactgaaatagaacaacatggaaatgaacttaatccatttgaagaaaaccaagaaactgaaaaaggttagcatgtcctatttttaaggtggtgcattaattttgatgcttagtgtatatttggatatgattaaaaattaaaaacaaatgaataactactaatgtacaagtatatacagtatgtccctgtaagttggaaccatatggaaaacttcttacgaaaaaaagtcattcttcataaaaagttctgcgtggtctaaaatctaagatgcaatcatctgatatcaagttttatcaataggatacaaggaatgtcaaaaaatataaatttatctcaagagtaaagtacctttatatatttcac

SEQ ID NO: 11694 - DNA, 601 bp, Diabrotica virgifera
ggcctgtagtgctggattagatattattagggtaataaatatttattactttgttacgaataccaattcgatctttagcatggccgacaaatgcatgggtcataaaataattttcatttgtctacacaaaggcactgttgcctgttataaaattgttagaagcagtttatttagaattcactcagagagtacctacttgtttgcaagatgtgaattatggctttgttaaagtcgaaaagaagagaaaagaacaagaatgtaacaatccatttcttgacgccaataaaacttctattcaaccaatggattaaggatgaccacacggattaacaacgaaaagctataattaccaataatttctcaagaaaaaaaaagtaattttgttatatatgcattttaataagaaatatttacatatctacatattgcatacattttatattaattacctactgctactgtattcattcacatatataatataatgtaatttggtatttaacacatacatagataagtagtagttacactactgtattattgacgtaaaaagacctaaaaccatttacatatactgattatgtaggtgtacatatatgat

SEQ ID NO: 11695 - DNA, 608 bp, Diabrotica virgifera
  SmartBlast Evalue=1E-13; Info="Juvenile hormone-inducible protein, putative n=1 Tax=Aedes aegypti RepID=Q17IF8_AEDAE"
gtagaattccatgcttttccccaaaattgaactgtaattttctgtaagtttggcaaactcgtccagtttctgagctttcagtgcaaaggaaatagagtgtaactttgccaagcctgttaagaccatctttatgtgacttatattcattggtagtcgtctattgaacatctggtacccttttcgttttatatcttctagaacaataacttcttcagtgtcactaagaaatgttttgtagcattttggcatggaaagaaaatcctcctctcttatattcttctcttttagaaatcgttgataggatgacaccacatttctgtaaaagtaaatttcccgtttacaacagttgagtactactggtgctttactttgaacattcaggcgtcctattttaataaaaagatacaatatttcgtccttttctagtataacttcagctaacaacgtatcagccatgaatccttccagattgtcttctcttctttcaaagttgactttgaacttggacgattcgatggattcctgtatccaaagtaacgcctgtttatgttggtcttcacttaacattttttttaaacgatgtatttgtcacgaatgtagaagagttt

SEQ ID NO: 11696 - DNA, 607 bp, Diabrotica virgifera
attttctttttaccttcaattggtattctgaaaaattgaaacacgacgtggtttaactaaagttaactcaaacactcagttaattacaaataacacaattactaagaaatatcacttatacatagaattgccaatactaatctcaaagcccacccctgctggctcatataatgagaatgaactgctctcgaaaaaagctaacgacggtcgaatcttggagagaactaccttgaagaacttggcgtgacgatatcgataaagcaatggcagccaagaacctagaagaggcaacaatgtatgacaggaaagcatgtaaaccacaacggaaaaatagaaaattttaaattaatgccccacgttgtgctccttatataatatctataatttcctgatatcttgcgaaaaagaagagatatagatcatgttgaaagaacagtagaattacgctgtaaacaggcgaccaaaagatgttcaggcgagtttgactattggctgagaaaaaaatgtatcgaagaagtacctgatttagggatatagtgatagttttccattatttactctaggtagttctcactataaaagtgccatcaacaataataagtgcttt

SEQ ID NO: 11697 - DNA, 593 bp, Diabrotica virgifera
cttgtctacgcctctcctcctctccttcctcttcttgtctacgcttctcctttttctctttctcttctacgtttcttttctacgtttctcttcattttctttctattcttgccttgccattttccttctcttcttgcctacgtttctctttcaactcttccatttttaaaaaccatgctgggggcccggttgtgtccatttctttctcgaatttagtagatcttgtattgaccatatacaaattacttaatgtcttcttatcccaccgctgtcaccaatgttacaacttctttaaaatactttatttaaactccaatacaatattacaatacgttaacaacttgaacaaactgacaacttttaaatactcaaaatctcaaaatacaactgaactataaaatgtcaaccacatatgtttatatagattcttgacgttctagacgtcaccagacatttctgggttgttccatgacatccagaacattctcgtacgtgactacttcttcttttacgtcaagggactctttctaagtaggaacaatctacggaactgtcataacaagtaattttgtttttgaaaatgtgcgttcgcc

SEQ ID NO: 11698 - DNA, 604 bp, Diabrotica virgifera
  SmartBlast Evalue=6E-19; Info=Molybdopterin cofactor sulfurase (Mosc) n=1 Tax=Aedes aegypti RepID=Q16GT3_AEDAE
gaacagaactatctagaatatcgatctgccaaacattttcctaagctggttttacttgaagttaaatcccatgatgctaacagcattgctctgaatgctccaggaatggaacctcttattatacctataccaacaggaaaagaagtgcatattaaacaacttagagaaacgatacctttaattgactgtggagataaagcgagtacctggatatccacatatttgcaaggcgacaaacccggcttgcgcattggatataataatggaactaacaaaagaagtgccgaggtgcatcaaaagcaaattgactattgcaatcgtggtatgacgtcagattctatgggtttaagttcaaacatgtgtgctgttatgcttaacaatgctgcgtccataagagattttcaaaagaaatctggtatttctgaaataaatgagaataattttagaccaaatattcttgtggacgatgataatttagaaccgtttctagaagatcagtgggagtatttaaaaatcggagatgttatatttaaaaatgttttggaatgtgtaagatgcctattgaccactgtggatatggataaaggagttctaagaagtgata

SEQ ID NO: 11699 - DNA, 603 bp, Diabrotica virgifera
  misc_feature (587)..(589): n is a, c, g, or t
  SmartBlast Evalue=3E-62; Info=E3 ubiquitin-protein ligase UBR4 n=1 Tax=Harpegnathos saltator RepID=E2C5Z8_9HYME
atcgaggtacgtcaaaaatggcttaacggaacagcaaatgattattttggctgcgatcattagagacttggacagggagacagcgagaactgaaataggaacaatttcagtgtatttcggccaagcactaggtcagctttattgcgaattctccggagcactaactagattcgcacacaacttagtaacaaacggaaatttgagtaatttacaagcttgccttttaaatcatctaggagtatctccctggaataccgatgtccctcacgcgtggcccttacaagtatatccaaggacattggctgtcttagctcaggttttgcttttgagaccacagaacgagaaagaggcatctgtaattagtatatggcataggttggtgaatacactcatagaaaatgttcttaacaatcctcattctgtcgttgagtcagaaaatgaagatttaaatgtggaacatgcccaagtgctcctctatttatttcattcattgaacttgatgcagaagaaatcagtcgtgttacttatggctggtggtggttttaagatgttccgagatagcaagaggtccacttaaagattcacannngctacacttatcta

SEQ ID NO: 11700 - DNA, 607 bp, Diabrotica virgifera
  SmartBlast Evalue=3E-39; Info="Transcriptional regulator, MerR family protein n=2 Tax=Alcanivorax RepID=B4X1J1_9GAMM"
gaccaacatcttcctctaccagttgcagcgccactccgaccaccacgcctggccgacgcgcagctaccagtcgttgcggcatttcgacgagtcgccgcaactgcccggcggctatgcgtcgatgattctgctggcgtgggtgccgccgctgtggttccgggtgatgaatccgcgggtcaaggcgcactacggcggcgacctgcgccgggccaacatcaagccggaacggcgcgagagcgtgctggccggtcgctgaccggcgccgtgtgcgcaagcgctattggcgcgggcgctcctggtggcgggggcgcccttccaggtgggccagcacgttctccaggcgatcgacgagaatcttgttgatgctggtttccagtacccggccgagttcgtcgttcaccaccgcttcggcgagcggacggatgcgggtgatgaactccgccagcctgggtacgtcctcgccttccggcagggcgttctcaccgtatttttcgtcaatgatgtgctgggcgatcatgccgatgaagcgttcggcgagcttgtccacctcttcgcggaccagccgtacatgggtcagtaccgcgtccagcggcacgccgttctcgac

SEQ ID NO: 11701 - DNA, 608 bp, Diabrotica virgifera
taaaatactttattattattcttttgaatacattttgatctgatttaattaacataatcataaaacatatttcttattgaacattttaaatttatttcttgccgaagcagctaacagcattaaagaaacatttgcttccacgttttccttggtatcggtttttactgttgcttctgagatttctttggaaaccatcaccgggaaatagaatatcagccaaacgaattgcttgaggatcagattcttgtgcatattctggatatcttagttgattgttgtttaattccgccattgctaatttttgtgcgagaagttccagttgcaaaggtttgagtcctgtaaccagttggttggtttcgagatcgcctccaaattgattattatcatccagattctcgtctccaagatgtctagcgtgagatgctattaaagatgcagccaaaataatgaataaggatctaacaaggaattggcacatatcttgcattctgtttaatttactgattacttcttggtcgaaataaagttttttgcgaatgcaatacctgaagaactttggtaactgatgataaaacaagatcttatcgttttcagcctactcctgcagg

SEQ ID NO: 11702 - DNA, 604 bp, Diabrotica virgifera
  SmartBlast Evalue=0.000000008; Info=Endonuclease-reverse transcriptase HmRTE-e01 n=1 Tax=Heliconius melpomene RepID= C6Y4D5_9NEOP
ctacccatcatcatcattctctttgccttatccctattcggggtcgcttccctaattgcatttctccacacaattctatcttggatcatatcaatgtttaccaacatatcctgccttatcgtttcctcccaggtcttctttggtcttgctctcttattctttccaggaatctgcacttcagcaattcttcgtagtgggtaattaacatgactaaaccatcttaacctatgctctctcattttggcatcaattggtgccacatctagacttcccctaattgatgagctacccatctcagctgttatattttcatgtatttgacgatatctgattccagggccctgattctaattcattttgacagtcgcaatttcatttcgacaccgccatgacagccgcagaatatagcgattcttattcatttcgatattagttacaactggggatattaaccgtatcatgttgagaccgctcagaatttgggttgccgctcccgtttattggaacttgttgatagtctgggaaaattatcgaaaaaatgccatttttgggaaaaattatttaccagctattttattgctaaaatcgaatcttaagattgcat

SEQ ID NO: 11703 - DNA, 603 bp, Diabrotica virgifera
attttcaattgtaaaattatttaaataatctttcaatctaatgtaaggcaaaaacttgttatagaagaacatttgacggctgtaatcaatgataaatgaagtaagtcgaacccgcttattagaataccagttatataaatatcccggtttagaaatttgagaatctgaaacgtttcctcttactctcattacattataataagtttatatgtgcaatcctaatgcaggctccacactctcggcgaagttacttcgccaaagttgaccgaagtccgaagtacctctctacacactcgttctacttcgcgaggaagtgcgatacggacagagtggtgcgataccgacaaagatctcttcgactcggacgcgccagaccgacagggaatggaagtagaacgaagtgaggcaaagttgcacaaggtggccgtctacactctcgtatttgttgaacctcgatcgacttcagcgatagctcacataaacatttaaacgaaatggcatttggcaaactaagctacagctccaaataacaatggaaagacaatgttgcacataagactaatggataagagtggataagaccgaaaacaaaagttagggatg

SEQ ID NO: 11704 - DNA, 601 bp, Diabrotica virgifera
  SmartBlast Evalue=2E-10; Info=Endonuclease-reverse transcriptase n=1 Tax=Bombyx mori RepID=D7F158_BOMMO
catgataatacttttcttcgccatcattttctaccggtcgcgatcttccctggcttcgcttgtctgtccgtggtctcaagcatttctttttcatctgccgtcttttttttcttgcaatatatctctcccatccccatttttgacttgtaatacattccataatgtcttccactctggttcgtcttcgaagtttttcgtttcttagtctatttgtcaagcttattccaagcattgatccctccagtttactttgtatcttttcaatttttccgctgacgtttttgtgagagttgggttctgctccgtatgtgaggactggtagagcacactggttgaaaactttccttcttaaaatggattgggacatttgttttaaacacttcttcatcttcctactttataaataggctcaatgcctgttttactttggtttttagcctcaattgacgttgtctcaccattttttcctcggtcgtcccaatgatcttcttccatttgtctcttgctattcgtactattctatttcttgtcattctttctatgtgttgattccattctatttttcttctttttgtccacacgtttatttcttctataccac

SEQ ID NO: 11705 - DNA, 607 bp, Diabrotica virgifera
gaagatggttaccttcaactgctggcaatactttgttgcatggagctttttactctgtattgcttcgaccgggctttaggcttatatctctaaataccaattattgtcattcactaaactggtggcttgtagtaaacagtactgatccggctcaagagttacagtggctaatttacgaactgcaaaattctgaagcaaataatgaaaaagtacatataattgggcacatcccacctggtagttcagattgcttaaaagcgtggtcaacaaacttctactctattgtagatcgttttaaagatatcattagagctcaattctatggtcatagccacgctgatgagttcgaattgttttatgaaacagaaaattacagtaaaccaattaacgtagcctacttaggtccatcgataacaacatacgaaaatcataacccaggttataggatttactatattgaaggagattttagtcattctaacagggatgttgtggatcatgaaacgtggacctgcgatttagaacaagcgaataaaggtcataacgaaccagtttggtacaaatcctactcagcgagagacacttatagcatgcagtcacttgctcc

SEQ ID NO: 11706 - DNA, 604 bp, Diabrotica virgifera
ttggctctggtagttcttgtttttgttctggagaatatttaggttcttcaggttcgaatttagcttcgtctttaacaggagaacgaggagtttcaagtttttctttaatttcttccttttgttcaggttcccttttcggtgaagatttgcctgcggtttcttttttaattgcattgaatttctgaataatggaatcgataatttttgttccagtttttacagtacttatttctttagtagtttcctccaacttaacgttggatacgggctgttgagatactgtcgattcgagtaatggactatcagtttcttgtagtattggagatgtggtttgttgtttttctacaacaggaggtttttcttcaacaacttcaggaatgaccgtcgaaacaacctctttctttggctcttcctctttaacaacttcttcaggttcacccttcgggacggggttcgcatacactaattcctaaaatacttgacattgtagtcaggggttcagtgtccttctttttttatctggaaactaactgtagatggcggaagagttacagcatcattactgtcatcatcagtggaagagctttgagcgataactctctgg

SEQ ID NO: 11707 - DNA, 602 bp, Diabrotica virgifera
  SmartBlast Evalue=5E-16; Info=Endonuclease-reverse transcriptase n=1 Tax=Bombyx mori RepID=D5LB38_BOMMO
tcttcatgtgccgtactcgattattgagcgttggttatcaaattgtctatagtaattttgttgtaggcagctcagaaaagggatgtagaggatttgttaaaccattctctcaggtttctaagccatgacgttcttcttcgaccgggcccacttcttccgtctaccttgccttgtattattaaatggagtatattatatcggtcggagaagttacttccgtaatttttcccatccgatgcaaaacaacttcgttacgaattctatccaccctacttattcgtaggattctccgatacacccagatttcaaaggcttccagttttttgagaggtgtatccgttaaagtccaaagtatatatatttagttaatcttactatttttatggaaattcaaaatattctactacatttttcaccgcttctgtagctcctttaatcgataatcattttagaccgggagatattatacagaagttcagccacgactttcccagtcctgccctttgcaacactggaagggtagacgaagtacctacaatccgtggaaacatccacaaatctcctgtgacacttttcctgtaaaaactagattttcccaaaaa

SEQ ID NO: 11708 - DNA, 594 bp, Diabrotica virgifera
tattctattgtagatttagtcttaggaaattatcaattaattttacagcatcagtttagttttacttcggtctttaatttttgtgtctctgatacagctacagaattatcctttctgaatatttcataggtgtaaccatttgttgcattaaaataatttgtggattcgtcttcatatctgtaaaatatacaaaacaaatcaatagcctttgataatatagattctaaatattcacgattttttaattttaaaaaatgtggtatttcaataaatgtgtttctatgccaccacatcactcagaagcggcaggtcttgacccaaatatataattttacaatgctgcctaaaccagttcgataagattgggaacagggtgatatataatcattctcaatatgttgttacctaccatattttcttataatataataataatataataaatgccttatttaatgaacgtgcgtttccatttttattatttcgtctaaagactgtcttatagtgtttgatcatttagccacattaattattctttactggtgctttggaatttaccattttgaggtacatcctacatttcatcacgaaagt

SEQ ID NO: 11709 - DNA, 604 bp, Diabrotica virgifera
  SmartBlast Evalue=9E-67; Info=Hem n=1 Tax=Tribolium castaneum RepID=D7EI65_TRICA
tgagaatgtcatactgtgatgtttagaattttacatttataaagtaaataagtgaaaacaataatgttttagtaaatggtaatctatcacaatatcaagcgactgatatttatattcaactacaggaaataaaatgtctcgccaaatgaatcagaatgagcggaagcttgccgaaaagctaatcattctcaatgatcgggggattggaatgctaactaggatttacaacatcaaaaaaagcatgtggtgatgctaagtccaaacccggattcttatctgacaagaatttagagtcatccatcaagagtattgttagaaaatttccaaatatcgatgtcaaaagtcttacgccaatccaaagccttaaaaatgacataattaagtccttgtccttatattactacacatttgtggatttattagactttaaagatcatgtctgtgatctgttaacgagtatggatacattccaggtagatctagatataacagttaattttgaacttacaaaacactatttggatcttgtaactacttatgtatctttaatggttcttttgtcgaaagtggaagaccgtaaagcagttttgggcttatttaacgc

SEQ ID NO: 11710 - DNA, 603 bp, Diabrotica virgifera
gggtggtacaaaagaaaacgggaccattctccctctgtgagagaacaatctgcatctgtacatccggtatttctatcaatgtctagggaagtaactaatagcagaggggataataatattcataaaaggaaatctagtgacaatgtagatggggcgcctccagataaaataaggaatacaaataaacataaacaaaaacaacagaggaggaaagcagttagagaacaagaacaacgaaggtttatgaggaacgaggaaagtgaagaaaatcaattggatggccaaaatcgcactgactcatcaacccgatcacatgaattcaataagcaacatcaacaaaaacgtcaaaggtttaaaaacaaacaaaaacaaaagaaaaaattccaacaaaaccaaacacgtccagaaaacagtcacgataatgaaaatagcgaagtagataatcaaaatagcgaagtagataatcaaaatagcgaagtagagtttaaacctttcgattatagttcagtcgattttcgacaatttcaaggtggcgctggtagtgtttccaaacctcaagaggtcaagagtactattcgatttaaaaaacaaaaacaaggggcc

SEQ ID NO: 11711 - DNA, 605 bp, Diabrotica virgifera
cccccaaaaatgttggtcgccccgccgctgacccaaccaatcgctaagtcgttccccctaaaataatcaattggcacttcgaaatagcactttaaagttttctcaaaaatagaggtgttacaaaatcgattttattcttaatacacatgttaccggattcagtaacatctcttttgcataattctaacactcttctagataagtgtgtagctagatacattcagtttgtgatacgatcatactagtaaaaattacagcttggtttttgcggtttagttcgcaatatgaatgaatctaaatacacatatacccacttctatctattataaagtctgaacatttttttacccacattgaatactgaatagcggactgctaaaaataccattatattttctctttttttgacaggcacagtatacaattagttgaaaaataaccattggtacttttaaacattgatatacaaaggccttgtgcagcaacagcagaaattagccacatatactttagtgtaaaatcacagatatacaaatacttaaaaggaataaagtacactttttacagtagttacagtgcggtaagaatttcatcttgtaatattt

SEQ ID NO: 11712 - DNA, 606 bp, Diabrotica virgifera
  SmartBlast Evalue=1E-43; Info=Beta-glucosidase (Fragment) n=1 Tax=Tenebrio molitor RepID=Q9GSE6_TENMO
gactgtgaacctttccaagatgcatcttgatataatctaatcccttcatctcttatagttgacgtgcccttgaaatgctcatcttccacatgctctaccaaatgcgatgtgtagagatttaaaccaacaaaatcaacgctaccttttagaagatctatatctgttgtggaaaactttggtaatcgtgattgtcggtagccctcagccatggatatagctgcgattctttctttaactatttcagggaaatctccttttggactaaggagagggtgcaaccaaatgccaatctcaaattcgagtgctctatttgtagcttcaacatctttatctgaatcacttcctggttggtaccagcgtccatctactacaatacccacttgtcctttatattgtttaaactcattgtggtagagcctgaaggctttagcatgcgccagaagagtaacgtaaatacacatatagttacttatgcctggttgattaatgtaaggaggaaattctgagtcagcataacccaacaaagccgtattaatggtgatccaatatttaactttgtttccaaaacgctcgaacactattctggcgtagtcttcaaaatattcc

SEQ ID NO: 11713 - DNA, 606 bp, Diabrotica virgifera
  SmartBlast Evalue=5E-93; Info=Courtless n=7 Tax=Arthropoda RepID=D6WGX5_TRICA
gtttaatcttcaatttaatattaatattgtaataaactcataaatatttcaattatggcaggatctgcactgcgaagacttatggcagaatataaacagttaacactgaatccacctgaaggtataatagccggtccaattaatgaagaaaacttttttgaatgggaagcactaatcacaggtccggaaggtacttgttttgaaggaggagtgtttccggcaaaacttatttttcctcctgactatcccttaagtccaccaaagatgcaatttacctgtgaaatgtttcatccaaatatatactcggatggtagagtttgtatatcaattttacatgcacctggtgatgatccaatgggatatgaatctagtgctgaaaggtggtcaccagttcaaagtgtagaaaagatattactttcagttgttagtatgttagcagaaccgaacgatgaaagtggtgcaaatgtagacgccgctaagatgtggagagaaaatagagaagaatttaataaaatagcagaaaaaattgttcgacggacgttaggcattcccacgtaaatctattagtacattgcatatttgtttttattatgacattgtcaattt

SEQ ID NO: 11714 - DNA, 600 bp, Diabrotica virgifera
attgtgttgggcatacttcttcgaagaagaatcggtctctttacttactgaagaagtatcggtcgaccgtgcaaaggtggtgtgacaaccttccatagaggtatctctctgccaatgaactagcagtattgcttagaggaagaagattataattacatgtccgcccaaagaccctgtatttagtcgtctggattttgcagctttacatctacatttggaagtccgaggcctttgacgctatggatagttttgattatggctatttcaattcgtcttctgatttcttttgcgtttcacttcttccctatttatttatacgcgtcttaaaacatattgtcaaaaataaggcagtgtgtggctaaaaatcatgaaatgtatggagatgactccaacaagtacgatatagtttggaactgcttctaagttacatagcggaagtgatagagtgtataaaaatttctttcctaggacaattgtatgaaaggtactcttttcggaatagacgttgtaggataaatacttattttttgacggtgataatattttatagtttcttttcctctttttaaaaataaaataaacaaaaccatataaatatgt

SEQ ID NO: 11715 - DNA, 604 bp, Diabrotica virgifera
gtgttgggaaacagtgcatttatttagatagtagtatggtagtttcttatatacatatatttagagttagaaatacagaaaaaattcctctgattgaaaaaaaattgtttgtttttaaaataaaatctctgttgttatttctctatgggccacagtaaaggacatgtactgtggtttagggcaaccaaacataaccaatttgtagttgacatttgaggtaatctaaaaacactgacagtgttgccatgttgtaaaatatttcttactgtaacatctaaaattcaaaattgaataactttgtcaatttcttgttcaatttattgttgatgtaaagtggacattatatataaatcagaaaatatattaaaagcattaaaattatataaaaatcaatagtggcaatagttaatagaaacactaaacaatgtgaagatttctaaactgtaactaataaaatatctaaaatactaaatagtaataaaaagaaactaacttaaaccgtagactgtaaactctaactaataaaatatctaaaatactaaatagtaataaaaagaaactaacttaaatgaattaactaacctatgaaataaacatctaaatt

SEQ ID NO: 11716 - DNA, 593 bp, Diabrotica virgifera
ggtaagatgatgaaaggtgcccacaactcgattcgaattccatataggtcaacgtttagcatatatagtgaaactaactttctgaaatttttagcccctaggtggtcatgtgacccacctagagcctaattaggctttttatgtttttattttttatctcagccgcatcgagaactagcgaaaaactttaaataaaaaagttgtaagctttaaaaagttctgtccgatttttttttaatttttggcgggaaatttaaattttagaacgattttaaaattttaaataagtataaaaaaataactaagacattcgtttttacgaaaaaaatatataacgtgtattttctaatgtttcaccctgaattttttcaaatttttaaaattggtgaaacgcacctttaaaaataaaaaaccacatttttcggttttttttcgttttttgatacaattttatacatatttttcaaaaaaggtaataccgtcactagaataggataaaaaactgaaaaataattggggtttgcttaataaaaaatttttgtaatgccatccattttcaatatacagggcgttgaagaaaacaaaattttaca

SEQ ID NO: 11717 - DNA, 602 bp, Diabrotica virgifera
  SmartBlast Evalue=2E-31; Info="Anaphase-promoting complex subunit, putative n=1 Tax=Pediculus humanus corporis RepID= E0VSJ0_PEDHC"
aacatacagaaaaataaacctttgtctaaaatgtctacatttcatgcaattaaacagttagaagacaaaaatgttccggttgaaattagtaatatggtttggagtgaccgcatggaccttgtggccctttccaacatgaaaggagaggtagcattgcatcgattatcatggacgaaagcttggaatttgagccctccaaaggaaaatgtcgaagtaaatgctatggcctggaggccagatggaaaagtgctggctattggctataactctggtgaagttgtcttagttggtattgagaataagaaaactcttaacatcaaagatttaggtgctgaaataacatgtttatcttgggtacaagagaagacagaagccaaatcgaaagaatcatttacattgaaagaagaacgaccaaaaaactatatggagtacatagatctttcaaaattgtacttaaaggatcctgttccaatatctaatgcagacacttcaaacgccgaagaggttaaaagaaaccaactttatgcaagatcaaacagatctgaatttacttttaatcggaacaaagaaggccatcttcatataagaatatttggatgttt

SEQ ID NO: 11718 - DNA, 602 bp, Diabrotica virgifera
  SmartBlast Evalue=9E-21; Info="Protein takeout, putative n=1 Tax=Pediculus humanus corporis RepID=E0VZJ6_PEDHC"
gtttaagttttaagagtccaatatgaagtatctacttgtgttgtgtatggtatgggagctttcccaaggagctattaacccgaactttgtacgcaagctgacctgcaaaaagtcggatcctgattttgaacaatgctttacgaaaacactaaccagattcctgcctcttgtcatgaacggtgttcctgatttgggaattccacctctagatcctctgcaacttccagaattagctgtagaacagaatattgctggtttcggtgaaatttcggccaagtttactgatttggaagttgaaggattcaaaggcgtggtattcgatcagatgaaggtggacccgataaatctatatggaataattaaactatctattccatcgattcatattgaaaccgattataacattaatggtaaaataatggacttggtaattaacaacaaaggacatttttcaggaaatttcagtgaattaagaatgtccatgaaaataagtcttgctacgtttaagaaggaagacggtcaagactattttaaaataaataagctgactcaaaatatcaaaataggcaacggtcacatcaaattggaatcaaaggataaaa

SEQ ID NO: 11719 - DNA, 607 bp, Diabrotica virgifera
  SmartBlast Evalue=2E-42; Info=Protein suppressor of sable n=1 Tax=Camponotus floridanus RepID=E2AP88_9HYME
cttgtcagactgggcggcaatgttctcattgtctatatctccattacttgtaatcctcatgtcctgatcttgtccataactgaatgcttttagaggaaagtcattaggaatcgaagaattttcaggttcctgccatctggaatgcctatttctggatttgtccattttcttaggatcatcacatccttgcaacaactcatggggtatgggtacgttaatatcaaacaaagacggtattccacctttaccttccggtttgttttcagctccaggtcctttctcttggtcgtaaagtttgacttgtctttcgttgatcatgttcaatgcttcctcgcgattcatacgtgggaaaccgcctagtatctctcgaggagctgtttctatgtgtttgaacagaatctgtttcagactttcagataatggccttccgtgcgcgaacttgcagtcgtcctcttgggcacacttcaaacctgtatggtaaaatttacaaggaaattcagaatgcatataagaacatttgtcacctttagcgcaacaatccatcagatagaacttgcagagttccagtttcattgggggaacagcctcgtgtgaatagggacaatcg

SEQ ID NO: 11720 - DNA, 606 bp, Diabrotica virgifera
  SmartBlast Evalue=1E-56; Info=Mitochondrial L-2- hydroxyglutarate dehydrogenase n=1 Tax=Glossina morsitans morsitans RepID=D3TP33_GLOMM
ttaatgcattgtgttgtatgtggttttatatatcttagtatacctgtataaatgaaataattacaatataaaaattcttaattatttagcaacttgacttagtttgaactctgtttcacacttatcagcaatcatcttagcaatagccagagaactagtcgccccaggactaggagcatttcgacaatgtaaaattctgctggatactggactacctgttgggtttagatcgaatacaaagtcgtcaactaaattacctttaacatccaatgcttgggctctaactcctgctggtctcttcataggctgcacgtcatttatagagatcgatggtatgaatttttgaacatctcttagctgcatattaataattcgtgatttgatcatctccactgatcctggaattaaatatttaagggccaatctcatgaatcctggatagaaaagtgtttccgagaggtcaccgagcgatatatctttccatgtgtatccctctcttttgaacgccaacacagcgtttggtcccaaccaaacagccccatctattctgggcgtcacgtgtacacccaaaaagggaaaattgggatcgggtacaggataaacatt

SEQ ID NO: 11721 - DNA, 600 bp, Diabrotica virgifera
gaaataaaccaaaatgaaaactattttgagtttgtttttgtgtgctattttggttggtgtaaacgcgtgggtgtctattatacgagctgatccagcgaccgctcaccttggagactgttatacaatgaggcataatcttggagcttttacagcaggcgaggagaaacgaattgaaggaaagtgtgctgtggcagtatgtattgccaacgggaatattaaactaaaaagatgtggagctaaaagagcagtctaccctttacgagtactacctggagatttatccaaaccgtatccaagatgttgtcgcaggatagtcggacctaacaatgacaccgacagtgacaaccaacgatctcagaataccggaaatgtagtcctagcgggtgcttttttgaatcctatgctgtcaagataacatttcataaattggtataaaaagcaactggttatagagatactgtaagcgtttgataaaagcttcttttaacaaattaagtcttaatttgatggctgtgcattatcactagtcgttatgagtgatttaactctaggtactatttatttttaaaaattgtacttgaaaatgacaaaataagtatt

SEQ ID NO: 11722 - DNA, 606 bp, Diabrotica virgifera
  SmartBlast Evalue=1E-14; Info=Endonuclease-reverse transcriptase n=1 Tax=Bombyx mori RepID=D5LB38_BOMMO
catgacgttcttcttcgacctgacccgcttcttccgcctaccttgccttgtattattaaatggagtatagtatgggtgtcgcataacatggccaaaatatccaagttttcgatttttaactgtcctgacgacttccgtgacttttaccatccggtacataacaacccccttacgaactctatccacccaacttattcgtagggttctccggtatacccaaatttcaaaggcttccaatttcttgagaagagtatctgttaaagtccaaccttcgacaccgtacaaaagagtagagaacacataacataaaaaactattaaaggtaaaaaacttaaaatgtggtacaaatataagcaaatacaatgtttgtcttcaagcagtgtcataaacgtcaaagttttggaatgccctattggtttctatacattttctgacgttgtagatgttactagatataaaagtgcaacaagtgacgggtcaaggactgcattagcttaatgtacccgtgtgtttagtagcgtggcggttactgtttatgacaatacaacatagcaaataaaacagaaaagataaaactacagacacgggatacacaaggacactcac

SEQ ID NO: 11723 - DNA, 606 bp, Diabrotica virgifera
  SmartBlast Evalue=2E-15; Info="Protein takeout, putative n=1 Tax=Pediculus humanus corporis RepID=E0VZK3_PEDHC"
gggcccagaacttggaattccttcgctaaatccattgaaagctccaggagttactctagtatcggaccgaaacatgaagctcgtattgaaaaatgtaaatatatataacatcgaccaattcgagttgaaagattttaagcattatcgtcataatctgactgactattttgagtactatcttcccaaaattgaattgagatcggattacatcttaaaaggacaatttttattgttcaatttggacaccagcggtaaaagctttataacccttgatggtgtacatgccaaacatttcgtaaaaatacaaagagtaatgaaacatggagagctataccttaaaattaataagactgaaaccacaatagaagtaggtgatatacatatacaattcgatgatctattcaaaaacaatccagagttatccgatagtgccaataaattggtgtcagaaaatgcaaaaagtttattaccagacatggaaatggtaccgagattatttgctgaaattgtaggttctctcttagagaaagtctacaataaattttctttaaatgaacttttgcctaccagaccccagtaaggtgtaataaacatgtatattatgta

SEQ ID NO: 11724 - DNA, 603 bp, Diabrotica virgifera
  SmartBlast Evalue=1E-42; Info=DEP domain-containing protein 5 n= 1 Tax=Harpegnathos saltator RepID=E2BB04_9HYME
gtggtgattggaagacacgcaggtattgttaatgacttccagtctacccctgtggtcaaagctggcgtccattcctgttctccagttgctccccaaagaagagcagagctttttggagcatgtttgtgaggtccagagttactttggcctgtactatgaccatttggacgttttttacaatattcttgcaaagctgctaaggcactgtatgaagaagccgcttgagatttttccttttcctgattactttccgctggtacggcttggtagtgatgctgttgaatcagaacgccagtcggaccctttgggaatatatgcgtccatcttcgacgattggaagtaagctttatagtcacatgggaagggtcaaatggattaattaacgctctggattcaagaggtggcgaaccttctgaaccaacgaccattctgactggaggagacaagtctttttcttctggattggctgacaatgtaggactgcaacatgctccaggaggaattgcgataggttccgatcttgcattacagttggatctttgcattatatcagggtcagataactttcgcctttgtcctttaccaaattcttgggaatcgagt

SEQ ID NO: 11725 - DNA, 591 bp, Diabrotica virgifera
cggtcttaggacatacagagatttttgtgaagaatacctttttttcgtaaaagtaataataaaagagttatcgtatgtgtaatgaataaaaacgaagttagtatcaagtaaatttgagaaaaatttggaaaatatttttttccaattagaacatgtaattgcatatttgagcttggtttttatttccaaacaacttttcataataagaattttcgatattgagagaaataaaggtactttcccttggccgaaattcatatttttgacatacctcgtataatattgagtatctgataattgaatcttaggttttggggcatgcagagctttttgtagagaataactttttttcgtaaaattaataataagggggtttcccatgtgtttccaactcaagtagacacgctgtacatatattatatgtataagtcgtaagtaggtacaaagtttaacaaaatcgtataaaaatatcagaaataattagaaattaggtattccgtcacatacatagataggtttctaaaaataaattacatttaatcacttttatttataccatttataatatttaacttttttcattaataaatt

SEQ ID NO: 11726 - DNA, 604 bp, Diabrotica virgifera
actatctatatgcttatctggagttcataatggagtagtgggagactgtatgtgtaagggaagagagattgaggaagagatagagacagcatgtgaaaacttatggaaaacatagacttgattttctttatattgttatctagttttcttgtgatattttcatacaaatggatctgatcaatcactggatgattgtggaccactgaacaattcaccgtgcatcacatttcagaagattatgaaccctaagagaaacgtcgtgaaagcttttctccctgagaaacttcaatcaggtccatgcttcaacatcatcctcactttcaatacaaatactgatttcctgtgaatggcctgtcttattggcaagtatgttttcccttcgttatctcagcttttccatggcttcctgtcttgtatattttattgctgtcagtttgccaatccatggaataatatggagcctagagaattctgataagagatattgataacagtcagttagtgtgtgtctctgaataagattcctgttattttggaaccattatgtaacatttatataccttgattttttaagacagtagctcggtacacagttgtttatctt

SEQ ID NO: 11727 - DNA, 604 bp, Diabrotica virgifera
aatatacgccacgattatagtaatatacgtagtaatataagtacatcttttaattaacttgttttgatgggaaataagccacagttttaccaaaaaaatgattttattaacgtttcgatgcccaaatcgggtgtcgttatcaaaatacaaaaaatattaaattttttaaattctaagtaaaaaatatttcccatcaaaacaagttaattgcaaaaatgccacaagaaaatagcttcagaacaacatcttttaattgtttttaagtcattatggcacaaaatatatttttctttataaacaatactttttctcatgtaaaaaatcacatttcaaaaaaatttttattagtaattttatttatcatggaattagattccagttataaatcctaattggcttactgagaaggaactccaagtattcgctgatgccgaataaggtttgtaacgaacaacaaagtgcatttttttcaaaaaaaaaaaagaaatctgctgttttttagtgtattttcttgtggcgtataaagtacgccacgtgtgtagttaatagttatgttataacttgatgcgcgggtagttaaaggttaattaagacatatctttcg

SEQ ID NO: 11728 - DNA, 605 bp, Diabrotica virgifera
ctcgtgcaccatttttttcttgtatcaacagtaaaattatttgcagatagaagatgaaaacaacaatatttagaaagcaaaaactttagtcaacagaacgtaatgtatttgaaaaaaaaaaagttccaactttaactcgcgtcattctagacttgtttttactaaattttatcgtgtttttgtcgaacgctatttttataagaagttttttttttcgttttatggcatagacttggatgtcaattagccagtcacaacttctttgttttctattcatacataaagaaggcagtgaggtctttgatagcaaactcttccgcagctctctactcagttcaaaagctggagttggcggctatggactgtccaagttgctcaccacatttttccattatcttcttcttcttcttcttctttttcatatgtacataatatatcaaattatcaggattaataaatttagaggttaattttagtttcagagataaatttcattaaacaatcatatatatattgtattatatatgtatatatatatatatatgtatatatatgtatatatatatatgtatatatatttttgctgttcagagacaatagatagg

SEQ ID NO: 11729 - DNA, 597 bp, Diabrotica virgifera
gctgcgagaaccatgtaaccggggccatttaaccttttatttttaaaaaactaagaggtttaaaagactaattttgacgtttttaatagctcttggaatcaacttttaattagtttttaggtgaacctgatatcttaaaaattaacggagttatttacaaataaacaataacattttttggaaaattttttaaaagatacattttgaaacatttttggtgcataaattttaatgctatcaacttgttcgagggctcatttgatagatatttttatgaactttgacaaatgttaattaagtttatgctataaaatgcatattttgccagtatttaagcttgaatgcttcgatttgggtactcgacgaaagaaatatacattcaattacctataacttacttttagttaacatagaaaggtttttctagtaaggagtttatttgattttttattagcctcggttttgataataatgacttttttgtgaaaacttatagtttttgagttatttatgaaaaatcggttaaaagcatgcattttctcacgagagatcaaggtctttgatctttaataactggaagagttttgatttattttg

SEQ ID NO: 11730 - DNA, 603 bp, Diabrotica virgifera
ctaaaatggataatattcttgaagaacttttgtttggggacgaaattagcaaatgccgttatacatttagcagatgtacctacctcaaattattccagaaggatgagatgaaattaaatatatataaaccataattcaatatccaatttagagaacattttcgtatgtccagaactactttccaggaactatttaattgtattggtcatatccaccaatttgaaaacagaataattctattggaaaaaattaatggttatgatgtggatgctaagtaaaccagagaatttgttgctggggatacgtttggtttgccaaagagctctggacataagattttcacccaaataatatagaattacaaaaaattggaaataactaatcttgaatatcaatgtgtatattgagtttaattttattgtaaatattctataatataattttattgtaaatattgtattaacacatttgtggacacatcttcatatgcagacagtaatttccctttgtaagtacatgcatattagtcgtatctgcgaatgggttaattgtaaatcgtaatcaataaaaattttttgtgaatcaataaaaaactggtttgtt

SEQ ID NO: 11731 - DNA, 601 bp, Diabrotica virgifera
cagtgcaatgctaaagaatcagtaaggtcactccgcgaaaatcctttgtttttttgttccataaattttggtccttcgcacagatgaatgacagctaacggcagcttacggttgccgtgattggtcgttatcggtcgcattcaaaattttgtctcaggagtggattgcaaaagtggaaccgtcaaaactcgagagtgaattaaccgattctgtagcattaaactgtgtctaatcaaataaaacaggaagaacttgtaatatggcaaaccacaggacacttattgggacaacaaacatagaggtataactgattaacaatgtgctgttcaaatgccagaaattgtcttaaattggtccaaacgttcggataaatgcttaaatttattgtaactgtatgaaatagtggtgtacggtacatttttttaattctacaacatgtttacaatgttctttttcaaatcacaacctttccatctttcaggtcacctaaggatacagatttattagtcgatttttatctaaatttacatcaatatctaaatatccatatttgagcggaaccataatctttgttgccattttggcagtgcttattcatttt

SEQ ID NO: 11732 - DNA, 604 bp, Diabrotica virgifera
  SmartBlast Evalue=4E-54; Info=Nuclear transport factor-2 n=1 Tax=Tribolium castaneum RepID=D6X1D2_TRICA
gtcggagtagggcgccaaagtaattttttgattattatagttaattggtttattttaaattaggtattaagaaaaaatcaaaatatggctattaatctacaatatgacgccataggcaaaagttttgtccaacaatattatatgcttttcgatgatccaaaccaaaggcctaatttggtaaacatgtataatgtagaacattcatttatgacctttgaaggcaagcaattacaaggatctgcaaagataatggagaaattaaattccttaggattccaaaatataaatagacaacttactgaagtagactctcaacctatgtttgatggtggtgtactgataaatgtattaggtagattgcaagttgataatgatccaccacacgcttatacacaagtttttgttttaaaaccattaaatggatcattttttgttcaacatgacatttttaggctgaacatacacaatagtgcctgattttattacatctcctctccttctttatgttgtatgttcgaatcaactgaaaatatgcaatttttaaaatctcctgtatctgtttctgcttaatatgaattcacaataataaacttattttctaaaa

SEQ ID NO: 11733 - DNA, 605 bp, Diabrotica virgifera
gggaatccttaaccttttggtatcagaatgttgagtatttctctcgatcagcttgctatgttactgtcagttctctattcgacacgtacgccatggctcccctataaaatccgaggccctagactccgttatagtgcgcaaataaataaaataaatgaaattctcaagattggtttatatcaggcgactggagagtttagtgttcccgtttaatgacttcttgtttgacctaaatgcatgcggaagaaatctcgtgccgatattttaatgtaatatttgtagtgaaatgaacgtagttttgttgggtgttcttttcggtgttatttatccagtgcaaacagcgactacatttcactgtttttattgccaccaaacatccaaagattgcaacaacggagtgaaattaaatcttcacgctatcaattgcactaccaataaatgttttgttttacaatatgagactgaaatgccgggcgtcacggtgttggcaacgatccgaggttgttaccagcggccagatcacgagatgatgggtacagtggtcaccgagagacactctgtcattaaaaagcactttcatctttgtaatcacactttgtgtaatg

SEQ ID NO: 11734 - DNA, 601 bp, Diabrotica virgifera
tccatcacagggcagaatgttgagaaaagttaaacctctttcacaatatgtatacaatgcagcttttgtttctaataacgtccaccacagggtgttgtaaaatacgatgaaaaaacacaaatttatttttacaccctgtataaatatgggaggtaaaacgttgatatttctcagaaattattggtacaataattccttagaaatatacctatacccgtacttaatatcaaataaaaaatcatcaaagttcaatcaatgtttcaggagaaaaatagctccaaacttatggtacctcatttaaggtggtgtgttaattttgaagcgtagtgaatatacactcaccggcacaaaattccgccacccaaaatgtttgattaagtttgactatttgtaactttattgtttgtgctccgatttttaagattcttgcaccagtttgtaggtacatgtattgaaatcgtttccggtaaaacaaggattttgcttgcatggcattatacgggggtgaatggaagcgttgtgttttctcctaactttaaaaattctgtggaaaaatggaagagctgattttgtttcatgtcatagtatcccggagacatcg

SEQ ID NO: 11735 - DNA, 598 bp, Diabrotica virgifera
ggaattttgtgtggtattaaactctgcttttatttttctttttagaagctagtgataggctcaaggattaaaaaatagaaccaatgatgaaagcaatcttagtaggaattcttttgctttgctggtttgactcaacgttatccagattagaaaaaaaggatttcggcccggctctcctaaagcacgtcgatagatggcatactatttgcagaagggtaacaggtgcgtcagaagatcaaatagatagggtctacaatggaactttccccgaaggcgatgatgctttacagagatacacctattgcatatggaatatgggtggtcagatggaccttaatatgaaaatggatcaaaatcaactatgggtttatatacctgacatgcacaaagctgactttgtccactatatgaaatgtaacgctgatgctataaaattgcctaacaaaaatcatgtccagaaagtgtgggagatgcaaaagtgcgttcaaaagtcagtggataacgaacactacatattcttctaaagacgcctggattaccggagttgatatgttaaaaatgatgtgaaaaacaatttgattacctggtaataattctg

SEQ ID NO: 11736 - DNA, 608 bp, Diabrotica virgifera
  SmartBlast Evalue=1E-32; Info=H+ transporting ATP synthase subunit g n=1 Tax=Bombyx mori RepID=Q1HQ25_BOMMO
cattgtgttgggggtgagggtgcaagctagaaggagtcttttttattaaattaaataattagtggaaaaagatttaataacaacccgtcaaaatgtccaaattagtagcctcaattccagtattggccggaagacttgtacaagaaggacgaccaaagtttaataccttcatgaaatatgcacgagtagaattatcacctcccacaccagcagacattcctcaaatcagagctggcattggccgacttatcacatcagcaagaactggtgcctggaaaaatcaatctgtaaaagaggcttggttgaacacccttgtcggtatcgaagttttatgttggttctatgttggagaatgcattggaaaacgtcacattgttggatatgatgtttaaatcatatttaggtttatttaactttttgtagaatattctttgttcaatagataactaattaatgtctctatatttagtaaatttattttctctccttaaatttaaatggattgtttgtaaatgtatcattcttattttttcatatatgcctgtgtaataattcatgactgtatctgatgaatccaataactagagctaattatataattatcattc

SEQ ID NO: 11737 - DNA, 604 bp, Diabrotica virgifera
ctaaccggttgtcagattttgtaaactaaaaatgctgtataatgaaaatgacttgttcaaattgattcatcaaaataaattgaataagtgcaccgggtactttctgattatttaatttgtttcatcaacgtctactagtgaatcaaccaagaagcgtacgagttaacggttttgtttatgtccatttgtttgtataatttttcaaatagtcatatatttttaaatagtgttatcttatcactataaaattattgttagaatggaaaagaccgtaatgtaaataacctatgaattaagaagtcatgcattcatgtgaacaccaaagaaaatgaagatttcaaaggcagttcctttctttgttttcttgtttactacagctgtttatggagaacaaaagtgtaactattctgacctaacagaggacgatgggtgcggtccaaacgaatggtgtgtaaaaacgaacaaatgtgaatgcatacctcagtacaaaagaaaagataatacttgtatacttgagactagcgatgatcccaaatcatcaaactactccaatctagtagataatcaaggtagcggagctatagtggctggcattttaattcca

SEQ ID NO: 11738 - DNA, 605 bp, Diabrotica virgifera
attgtgttgggccattgtgttgggaagatatggcagatactaatattattgattgtttgaacacatatattaagctcactctcaatatataccaaggagtgacaatgggagaggagtttgaacatttgatgaacaaggctaattatttagctagcaagaggtacaattcagaaacattagatccttcagatcttcataaagttctcgaagaaactttaaagcaagaattatcgaatcctaagagtaaaaagttgagtgccaaagtggctgaagtattagttgataacaaagctttgtttcatgtgcagttgaaaaaggatgaagtagctggtgtaacagtaatccccaaaccattcagagacttatggacaaagttattaaacttacttttcgatcacggattcttagagcaagttttagataaacttttggaagtcagctccaattatgcaaaagaaatggctatgactttgtcttgtcgatggctgtgcaatattctagatgggctagttaaactaaaaaacattgcaaagttcgaacatactgggcagcaacagaatatgaccgatttggaacttcaactagcagtaatgaactttaaggcc

SEQ ID NO: 11739 - DNA, 605 bp, Diabrotica virgifera
gataacaaagtattgttttttaatagtagtgggtcaaagtaggttgattcaaatctcgagcaatcaccatggtaaatttaatttgctatgtaattgtgacaactgccctttcttaaaaatattaaattcaacagacaacctttacacagaaacccttatactctttgctataataatgccgttgccgacagaaaaatttaaaatgcatcttgctcgaaggaccagaatatttataggaaacattttggatttaattggactgcatatttgctagttaacaacttttcttgaagtgaaaatgtcaaatatttattccatagcttagagagatagatttagactgactaattttacggttaagcagcaacctcccgtttagcgacgcagtaccgagttacactgcgaatgcatctaaaaaaatctgaaatatgacttctactgattacaaaaagatatgtcgggatttataagaagacaaagacaagaaatgagtgcacacatgtgaatagattacttgaaaaaactatactcaaaagaccaaccgacaacagcaaaaccagtaacaatgggaattacaactgatacacaaccaataattagcacag

SEQ ID NO: 11740 - DNA, 604 bp, Diabrotica virgifera
  SmartBlast Evalue=2E-17; Info=Endonuclease-reverse transcriptase n=1 Tax=Bombyx mori RepID=D5LB38_BOMMO
tctaatattgtttgtaagttggtaatttaccgttataccatattgctatttatctaacgcctgtctaaatgtatttttaatgtataatatgttgaaccttgctggtgacagtatgcatccttgtcgaactcatttttcgactgtgaagatctcgcacacgtcattttggaatcgcactgttgctttttgttggggatatgttgaatattagtcttatatccttaccgcgattcctgatgggtgtaggatatcgattagttttccatgtggtacttcgttaaatgccttctcaaaatcgatggaacatacaaacacatcgaagttgatatccctagctctctatgttagaacttgctctgaacccaaagtgaacttcacgcaggtgcttttctaatttggtgtatatgcgcgagtgaatgttagtaaggagtacaataagtgcatggttcatcaaactaagacaacccttaggagtatttaaaatacattaaataggagatatttatcgaaaaccgtatatacgtctcatgataggaggaaagattaatggaaaatggggaatgcacaatctgtcataacgatggtcaacttcactagtgggagg

SEQ ID NO: 11741 - DNA, 605 bp, Diabrotica virgifera
  SmartBlast Evalue=8E-89; Info=Cytoplasmic FMR1-interacting protein n=4 Tax=Apocrita RepID=E2AEJ6_9HYME
cgccctctcatattcttctgcatctttaggacattccttattctgatgatggtccgttggatgtagcaacttccaagaatacaactctgtaactacactcgaccattccgataaaagctgtaatcctcggagtgccaaatctgctgtttccttattttcagtatcactgccgcattctttgtaagttgttgtgacttcattactgtatctagatagctcactaatgtatttaacgtgatcctctcggatctgtggaagatgaaccattagatcggcttgaggtgaaggtgttgtactgttagataagggccatttatttgcatcaaagtgtttactcctctttatataattgaaaggtgcaatttgcatatctccaaacaacggaactacttctaaatttttaaatatacgatcaattttatctaatcttaactttttcttggtatccagtttattgatgttacagagctcactgtccattaaaaacaatccaaagcccattactttaactaacatgtgcttttcactgggtgtaaatacatcttggtttcaaacatatgaacacaaatgttgacaacatctgcaagcagttcttcatatcccgt

SEQ ID NO: 11742 - DNA, 604 bp, Diabrotica virgifera
aaaaaatttatttatttacttattttaatgattactagtcactggaattatttagtaatggatcagtctttataaaggatgaggatgggggtaatcgtggggcttcttgtgataatcctgtccatgaggtggcttgtagtcatgtggtggatgcccgaaatcatgtttttgatgatcgtgatcgtacccgtgtccaaagtctttatggtcgtgtccatatccatgctcttcatgtttctgatgcccatattcatgcttttgtggttcgtaatgatgttctttatatccgtggccgtagtctttatggtcgtgtccatatccatgctcttcatgtttttggtgcccatattcgtgtttttgtggttcatagtgatgttctttgtggtcgtgaccataatctttgtgatcgtgtccatagccatgctctatcttaccatgaccatgatctggaggtccatatccatgatctttatattcgtgaccaggttgaggagctgcttgaattgaaagggtaacagcaagaagcaaaattgagatcattagttttgccatcttatcttccacaaaccacacttctcttactcttgaactcgattctaaaagt

SEQ ID NO: 11743 - DNA, 604 bp, Diabrotica virgifera
  SmartBlast Evalue=2E-40; Info=Carboxypeptidase A n=1 Tax= Tribolium castaneum RepID=D6WXY9_TRICA
ggcagaagcacatcgaggtgttcatggcttcgtcatggatgaaagtggaaacccgttaggaaaagcttctttgaagattaaagctagggacgttggtttccaaaccaccaaatatggagagttttggaggatattactgccaggagtatacaagatggaggtttacgctgacggctacattcccaaagaagtagaatttatggtagttgaacaacatccaactttgttaaacgtaactttacatggtgctaagccatggcaatattttgcccctcctgtgacatctcctccaaaaacaattatttctaacgacaacgctaacattccaaagcgacccagggacactatacagtttcctgcagattaattataagataggaaagaaggccactaccaaccctcccctccattacataggccagtgtttcaaccccaagcagaagaatctggcattctaacctcaatctcccacggattcacaaatttagtaaattacttcggatagtaataatcgtactgcaataaaatataacatagaaagattaatagaaataggtggtgtacaaaatcacctactttttagatatctttaaaagtaggttaa

SEQ ID NO: 11744 - DNA, 604 bp, Diabrotica virgifera
taaacatcaataattgtataatattttttttaaatgaaagttttcattgggtcatttcatcggttgataattagtttatcggtttataaattgataaacaaaacgaaagtcaaactaaaatagtaaccaaggtgttattttctattcaacaaaatgtttctggttcgcctggtgatttttgctttggtgtacattaattttacaagcgcaggtgaatactgtaggacacatgcggatcatcggaagatatacccaaaccctgccaactgttcacaattcataatgtgtcaaggcgcgaccgatgttttcatggagtgtccggcgggtttaattttcaattgcattacctcagagtgtgactggccagccaacggatccctcccaaatgattggtgcgacccccctaccgcggttttcgagaaagaacattactgcgattgctcaaaatacgtttattgtatgaatgggatacctagtatacaaaaatgtgcaaaaaaccctggaatagatgtatgtaatagaccacaatgtaaaaaagttgtggtgtaattaaatgtactttttcaacgaaaactttatttttgtttataaatttgcaaagtct

SEQ ID NO: 11745 - DNA, 603 bp, Diabrotica virgifera
  SmartBlast Evalue=2E-30; Info=Isoform 2 of Beclin 1-associated autophagy-related key regulator n=2 Tax=Homininae RepID=Q6ZNE5-2
gaatctccttcctccgaatcagagtcctcgctagttttgagatcatttaccaaatcttgttccaaagcaagagcctgctgaacgtcatattcgacaggcccaacccttcctaaatccgtatttggatcctcaattaattgtaaaatattgtgaatagttttggcagaattcaggctacttaaatctacatgctgaagcaaacataaatatagaatattggcattcaatctagctgttcttcttgcgaattgctcgtctttcatgtaactactacaaaaatcactatattgcatcctacatggaagcctggtattcagataataagataaaacgcttagcaactgtgcagtataagttagtgcagcactaatactaaaagctggattcggctcaacagaactgacgctattcgaaccaggtacaccatcttgattttgagcaacccaaatgttatatgcagaatagttgcctgatcctggtaatgtgggtcccacgatacaataccgcatttcacctaaataatctgaatattcccatctgtcactaataaaagtagtttgggatgcttccgcgagggcattcaccatgtcgtctgtagagagc

SEQ ID NO: 11746 - DNA, 600 bp, Diabrotica virgifera
  SmartBlast Evalue=5E-37; Info=Zgc:112404 n=2 Tax=Danio rerio RepID=Q566X4_DANRE
tatcgcttaaaagacttactcctgctatggtatcgccacaaaaccttactgcatctatatgtggcttgatatacccctttttctctaaatccaaaatatgtacatacttaagttgagctgtagctggtgggaaggcaatatttcgcactctatctattatttcattatttgctttattccaatgtaacctttctgtctctctatacccatgaatggcatcatcccaatggtcaaattcatatctcatcctttttaaatagggctcaatttcatctaaaactgatttttcttcttgttcgctaataaaatcattatgtacagtcatattttttactaagctggtggctagttcttcatttttatctaaaaactccttacacaaactgaaatagggtgggattcgatctggaatttgattgtgtatttctagagtggaatttaaacgtagactctggtaaaaacgtgcacattttaaagtatttttcaaaatgattaagtacattttatcattgttcacacaaatctaacttgcctaactttaaattatataaacataacacataacatgcaaaatatctaaaaagtaaatcacattcaccc

SEQ ID NO: 11747 - DNA, 604 bp, Diabrotica virgifera
tgttgggcaaggatccaaaggaaggagaggtttttggataaaaggaactgacattccctacataacctttgttctaaaattttttacattttgtttacgttcatattttgtatatattaaaatctaccagaatattcctgtaaaacaaagattattattttcagatttactgaagttaagttgaaattccgactagaagtaaggcatacaaggtatagttagttaacacatcgcttatgaacagtacctacttacagatttagggtttcttataattataaaaactacatttaatccttgtaaacgcactttgttaaagtatacaccttgtagcttccctcggtactcggtatatagatatatattcgaatttgttgcttcttgtgtgtaaagaaacagagctacatatttttcgaatttgaaatgatttgtttaattaagcaactgaatcatgtaacataataagttatatagttctcttcgattctcggtagtacatgaagaaggtaaacagtaaatctgataacaagaaataaatgtaaaaagtatataaataagatcatactaaataaagaatggaaaatagaaatgcatttctgcgacc

SEQ ID NO: 11748 - DNA, 603 bp, Diabrotica virgifera
  SmartBlast Evalue=3E-44; Info=Apolipophorins n=1 Tax= Harpegnathos saltator RepID=E2C0B0_9HYME
gcgctgttggaatgtcgttcctgcaatttttgtctagggaccaactatccccgaaaatctttaaagctgaattagtgactcgagttttgtttgaggttaagaagtcgtcggtgggctcgttgttgtaagttccccaaagaccggcggtttttccaaaataccaacccgacatttcaaacatgcaggtatggaacttcatattacactccaaaataaatcctaactgactttctgctttgaatattcctgagtctttgtaaagatatgtttctccaatttgcatcggtagacgctccattttagattctccaacaagaactttttgggtcgacatattgattctaaccacttcttttcctactagtaaaatcaactcattactttttcctacgttatcataagatacaagaactgtaaagttcttatcgacgaaatcggatgctagcaaataggtacattttccacggaactcgtagtactttttgtcaaacgttacatagtactttgatcctacaatcatcgcatgtcccttaaatggtggcagccaatcgttagggtcaatgtatggtttataatcgtagtacaaactccaaaatgaaagtt

SEQ ID NO: 11749 - DNA, 590 bp, Diabrotica virgifera
ggatgccaccccttctcgggggatgaaattattttattaaaaataacaccacaattcgatagagggactgactctagggaaaatttcttatatggagttgttaggatgaatcaagactttttgagttattaaagatcaaagattttaatttttcttgagaaaatgcatgtttttaaccgatttttcatcggtaactcggaaaactatgtttttgcaggaaagttgttgttgctagaattgaagctaataaaaaatggaataaatttcttaccagaaaaaccttttagtgttaactaaaactgagttatgggtaattgaatgtatattttattcggcgagtgaccaaatctaagtattcaacttaaataacgggaaaatgatgcatttgtttaacacaaacctgtctaacatttgtcaaagtacttagaaatatctatcaagtgagcccccgaacatgtcgatatcattaaaatttatacaccaaaaatttttcaaaattaatcttttaaaaatttttccaaaaactgttttttttaataactccaataatttttactatgtcagattcatctaaaaaccatttgaaagtt

SEQ ID NO: 11750 - DNA, 599 bp, Diabrotica virgifera
  SmartBlast Evalue=4E-13; Info=13 kDa hemolymph protein a (Fragment) n=1 Tax=Tenebrio molitor RepID=Q7YWD2_TENMO
attgtgttggggtgagtaagttttatcaaaatgtattattctgtaatattattgttctttggtgttcttttttcacacggagagtgcctttctgaagaaatgaaagccaaaataatggacatacaaaaggaatgcagtgctgctacaggaatagacgaccaagcagtagcccaagcattgtcaggaaatttccctacagacgacaaattcaaaaaattcgtgctatgcttcggaaaaatgatcggatttctggacgaagaaggtaatccaaacattgctgctatttccgaagcgatgaagaaaaattttggtgatcaaatgtccacagatgttatcatggggtgcacgaagaaagaaagcacaccagaggaaactgcgtataatgtatttaaatgttcctttaaagttattcatatgtagattgtaataataaaatagaggtataaaaagatgtagttatgtaacatgtttgtcaaattaataagataatatcttagcagagtttaattatttgaagcgaaaattgagtaatatttacattgttcatgtaatcgatgtagggtaattctttacaagttctaataaaattagacattttc

SEQ ID NO: 11751 - DNA, 600 bp, Diabrotica virgifera
ctaaatacataaaagttgactgttgaacgcatgtcgtcagttttaagcgccataataacgagtaaggcacatatttcagtgtatactcgccatatatctgcatttttatttgtcacaagaacttcatctgtcatttgtctacactagacaaatgacagcttgttgtcttgtgtatttaaccagttttgaaacttacatagttgacttagtaaaaatatagatataataattgtttatttaaacattataaaaaactatctaaagaacatcatgcaaaaattttcattcctcgcgcttttcattaatatatctagtaaccgtaagatgttagacaatatcaagttttgcatgaatcagttatgtttttcattgtaaacaatgggtcaaaatgggtgtttaaacagattgaataatagtataagaagaaacctatatggtatacgaatgcatccggttttggttaagtgtttgtatgacaattgacaggtgacagatgacgtatgttctagtgtgtacgataatgaatgaaaaattcgattgttcaaggtttttatttaatagtaaagtagcattattccatcaaatgagtcggtaaaatag

SEQ ID NO: 11752 - DNA, 604 bp, Diabrotica virgifera
  SmartBlast Evalue=1E-11; Info=CG5597 n=5 Tax=melanogaster subgroup RepID=Q9W1H6_DROME
caatttatttcaaatttttttggacccagtcgtttttccttaatttcgaaatattgaggttgagttagaactatcattgattttgatcgtacatcctctgatttaaaggttgacaccagacacgtataatttcctgaaagctcggaagtgggattaagaataaaaagagctctgtggtgtttatttggatccgcagagtcagccttgtagttgagatttaaacgtctcttcagaataccgatggccgttggagggtgtcctgagatccactgataaaccagattcccgtcgttaaagtaccatttcactaccaatgcaccatcatcagcatctaatgtataatcgcaatctagtactacaggtcgattggcgtctgttactgatggaactacgacattggtgatttttacggccgccccggtatcaaaaagaccactgattaaaacaattacaaacacaacaaaacccaagatattcgttatcattctgtattgtaatttttaaaactcacgcaccaaactccgcagaacttttaaactaattcccgtttctgaagtataatcggttcttgattggcgagaagagttagtcgatcagaacaccc

SEQ ID NO: 11753 - DNA, 604 bp, Diabrotica virgifera
tttgtaggttccttatcgtgaaagctaaaaaacttttaactcgcatgaaggagaaaactaagtacatactaattacgctcgtgaatacgtaatattctccaaaatgatgtcaaataaacgtcaaattgaaaggcagtttatttagaagttctcctaaaaattattaatttttaaggttttttcttaactttttgagtattacgagtagtataaagaagtactaaaccagtgatctgtaagaaagtgtgaaatttagcgcctagaagttaaatttcagaaaacaaataatatggaaggtataccacccgaacctccagataaaggtaaattttatgtagaaatggaaggagatgggatgatggaatatgaggaattaaataaaaataacaatagagtaaataataaggtaacaaacaaacaaaaccaaacaagtagtactattgaggtaagtaacaaatttagttgcaataacgatgaaactttgacaaatttaaatcaaacagataagtcaggtaagcaaaatttaaataaagtaataaatttaagattaaaacatagatatcaatttggagataatgcaccttatatagtacacatagaaaat

SEQ ID NO: 11754 - DNA, 603 bp, Diabrotica virgifera
  SmartBlast Evalue=2E-33; Info=Vacuolar fusion protein CCZ1 homolog n=1 Tax=Nematostella vectensis RepID=CCZ1_NEMVE
cagaatattgctggtctaaaaaatttctttgtatttaactctaccttgggaaataaggaaggagaggaattgaagaaaatcttatattattatccagtaatagacaatgtagatgtccaaataaaaaacgtagggttggtggaaggcattattcaatttacagaaacatttaaaccatccacacctgttaaatctttaaggacaactaaaacaagacatttatattttcaacccgaaaaagactactggatagttatgaccttacaaataaaccgtccctcaaaagagaaagatatttcacatgatgctgaagaattagaggatgatgtagatgacagtgtatatgaggctattcttaagcaatcatattatgtgtatagactattttggaatacatttgaatcttcaaaggatataacttcgttaaagacatctttggatgtcttttatagaacgtatcttcaatcaataaaactagccaatgcagatatattaaatgtatttctggaatccagtacctacctttagataaacagacttttcttaaagttcaatgtttcgtcaattctttggaaagcacttatggaatcattcagcactcgt

SEQ ID NO: 11755 - DNA, 595 bp, Diabrotica virgifera
tggggattattcgtccgggatttttgtggggattttttccggtgattatttttccgggaattttttgtctgggaattgtttgtccagggataatttgtgaggatttctttgtccaggattatttgtccggggattatttgtccggactccattaaggataaatatatgtaaataaaatttttaagcacacttaaattggaaacatttgaaatatattaaattcagcacatctgttttacaccaaaaattaaacaaaatatttagtggatagtacctgtaccatttctgagattcaataactacttggaaaataagttcagttacttataggtagcttagctgctgaagaattttgaggctttcgtttgtgtgcttctaatgccatctaaagttagtgccaaacatattgcaattcagaacaggagagctttgaatagtagtaaaccaggaatagtgtagctttagcgagtttgaaagctggtttgaaattgcgtctgagttggggagtgaatcaatggagcgtgtatctagcagcatggatgaaaaacatgtagataagtaataagccagtagcgcttgaagtctatgcttctta

SEQ ID NO: 11756 - DNA, 596 bp, Diabrotica virgifera
  SmartBlast Evalue=2E-23; Info=Neuroparsin-like protein n=1 Tax= Tribolium castaneum RepID=D6WME2_TRICA
gttgggttcaactacaaacacccttcctttgaagacaagtacttttttcaatcccggtgacgataacagattatggttcctaatttcatcctcctaattttatctgtctcagttatcttattcttgtgtccacagactacagcggcaggtttatgggtctgcaaaccttgcaaagacgaagcagagtgcaacgcggaccctgaggaagtctgcgtgtggggagaagcaagaaacgcatgctttagaagagtatgtgcaaagggacctggagaaagatgtggtggacccctcgacatcctcggccagtgtggtgagggtatgatgtgtagcaagaaggacgaaaggtgccacggctgctctcttcagaccatgcagtgctacaacagtgctggcagtagttaggaacaattattgtgatctcgaaaactccattatcagtattacttgtcgtttccagttaactgacaatgacaatgcaaccttgaatattattatagttttatatgatgactatacttctgtatttatatttataaattattaccgatctcttatgatgcaaactaataaaaaggagggtactttgtacatttcgg

SEQ ID NO: 11757 - DNA, 604 bp, Diabrotica virgifera
gggcaataactattttcagagaatacactctagtttaaaaaaaaatagaaaaatgaagtttccactgtttatatttattttcacttgtatgttaagctcgtcttttattctggcattaaatagggtagatttatcagaccaagcattcgatgtagaagatagaaaaaattatccaggtttcacagaagttcttaggtctatggcagaaattttgcagagcattatttctttactaacaggaggtggttccgtagataaagtagtcaaatctgtacaaggatttgctgtggaactaacgcgattagttagcattcaaggtatggtaggccaaattccaatgattggctcctttttgcagccgatagtctcattgattaaccttattctatcgaatgctcctttgttgggtggaatgatctcattaattttggtaggactagatgtgccagaaccttaataacccattaaatgtacgaaataaatttctggttaacggtatatttttttaccacaaaaaagattgaagaactgaatggttttggaattatttttttgttgattgtatctattgtaagtcaaatatacaaaataaagtaatttattt

SEQ ID NO: 11758 - DNA, 603 bp, Diabrotica virgifera
  SmartBlast Evalue=3E-65; Info=Copper-transporting ATPase 1 n=1 Tax=Camponotus floridanus RepID=E2A8G0_9HYME
agaggtgagtccgccagatatagctacttccattacaaacctgggcttcccctccacagttatacaacagtccgatttagacgaagctgaagtcgacatagaaatcactgggatgacgtgtgccagttgtgtgcataaaattgaaaccgatgtaatgaaacttccaggtttgaacagtgccaaagttgcgttgccaacaaagagaggaaagtttaagtataatccagaaataaccggaccacggaacatcatcgaagctattaaaacattaggattcgaagctcagctatttttgagggagaacgccaacggcgattatttacaacataaggaggaaatcaggaaatggaagaggagcttcctgttttccttagctttcggtgcaccttgcatggttgccatgatgtacttcatgattaaaatgtcctccggaactatggcgcatgacgaaatgtgctgtgttgtaccaggtctctctatggaaaacctcatcctctggaccctctccactcccgttctaatattcggaggcagacatttcttcatacaagcctacaaagctctgaaacacaagacggcgaatatggacgtacttattgcgat

SEQ ID NO: 11759 - DNA, 600 bp, Diabrotica virgifera
caactatacatagtggacggtccgataagtacttagcctctccgctcgatggcgccactgttgcaaaacaaatctaccatcgtgtaatacattcttgaagacggcctatgtcaaaatatcagtcaaatcggactcgtagttttgttttgacagcgtgtgttagacagtggcgacgcgtgactttgtagttgatcgattacgcaatacgcagcaacactcttccatgtttaaatgcacgcacactgtaatctgtaataggtactaaactaacgttaccaaaccaaaatatggttacaatgctgatatacacagcgtgccaaagcgctatctgtagagctgagcgacagcgagtattctcctgcgttagcgttactatacccaaatgtggtaacagcatataataacgtgcaacggattcacataatctcgccaatattttcgtgcgtctaaaaataaataataaataaatgtttattcagagaaagttacaatacatacaatggtaatacattaaaatcattataattccctataaataaacacaaaataccacttgaagcagaatgcttgtgcagtggttaatttggttcatggtaatgt

SEQ ID NO: 11760 - DNA, 599 bp, Diabrotica virgifera
  SmartBlast Evalue=1E-14; Info=Zinc finger MYM-type protein 1 (Fragment) n=1 Tax=Camponotus floridanus RepID=E2AYA8_9HYME
ccttaatgtgacaaatcttttccccaatgtgtgcattgcccttcgcatattccgttgcctaccagtatccgttgcttaggccgagagatcatttagtgttttgagccgaattaagaattgtctaagatctactatgggtcaacaacgattatctgatttgggactgttaagcatagagtcgaaacttgcaaaaactcttgatttcgaccacgtgatccaaaactttgcggatatgaaagcaagaaaagttatgttgtaactaacagttctattgtaaataattaaaaacaaagtttaattgttaaaactgttttaattttcttccttcctgtgtcaatagcatgagtgttcactattacatatcccagtttatgagatttttgggaattttcgttcaactggggtttgggggggggggccggccgggtctcatccccggggcccggccgggtctcatccccggggcccggctgggtctcatccccggggcccggcctggctctgggcggcccctgggtctgggcattgtatgggaaaaaagtgtgtagtgtgtgtgcttcgcacgtaagaagttatacttcgattatatgatttcaacg

SEQ ID NO: 11761 - DNA, 597 bp, Diabrotica virgifera
gaggtgttaccaggaaaatggtccaataaatttttaatgaaataccttttaaaatattttaaatatttttattaggatgaaaactttgatatttagcctaattttttcttcagtggatggtccaaattgtacaaaaacagggatacacccattttgcaatgaagatttgaaatttgatgttattgacgttgtcaaatttatcatttttcacaccctatatattgtacctttattcacttcaataccagttcaactgtataaagtacatactattttatgtagtcaggaacttcttaagttgtgttttcacgatgtttctctagaaattaatatagattcacagataattctttgccttagctctgtaatacttgctggtttagtattataaattctacttttcaaataacttacgaggaagtcattcaatactatttaccaattcatcgttaaggctccaaacttgcttttcagggcaggtataatttcaacatacttcctacttcagggcttcctacaacatggaggacggtactgaagaaaaagaataaaatagtcaggcaacgacattgacgcgtatcacccctctgtctctcc

SEQ ID NO: 11762 - DNA, 603 bp, Diabrotica virgifera
  SmartBlast Evalue=7E-61; Info=Ribosomal protein S15 n=4 Tax= Polyphaga RepID=D1M801_9CUCU
ctggaatttaatggcgatagtcgctaatttttaaaagttgaagaatccttcgggaaattgtccatcaaaaagtttttgccgattaattagttaaactaaacaatttttcaatatggccgataaagcagaagaactagtcaagaagaagaggactttcaaaaaattcacttttcgtggagtggatttagatcaacttttggacatgccaaatgagcaactcatggaactcatgcattgccgtgccagaaggcgttttacaaggggattgaaacgtaaaccaatggccctagtgaaaaaactacgtaaagcaaagaaagaagcccctccactagaaaaaccagaaatcgttaaaacccatttgagaaacatgatcattgttccagaaatggttggttctatcgttggcgtttacaatggtaaagctttcacacaagttgaaatcaaacctgaaatgattggacactatctaggtgaattctctttgacttacaaacctgttaaacacggtaggccaggtattggtgctacccacagttctagatttattcctctcaaataaattatttactatgtagatttatgataataaacaatttttgagag

SEQ ID NO: 11763 - DNA, 603 bp, Diabrotica virgifera
  SmartBlast Evalue=1E-12; Info="Galactose-specific C-type lectin, putative n=1 Tax=Aedes aegypti RepID=Q16PK9_AEDAE"
atctcatttattatcaatatattacaatgtagggactgaattagtagcattgcaagctgcaccaacgatttcagccaccgttctaccaatttctgcttcacaaagtgcatgcaacctgccattattttcattcctgtcgttccagcgaacaccatttgcccactcataattcacttgtatacgattttcattattttccgagttgtctggttgattgggataccagttggtgtagttgattggacgtcctttacccatccatacccatctgttctgcacttttgctgctgaactccaaaactccaatgcgggtgaattaccaaagtattccttcatcttttggtaaagaaagttattttcttcttgtgtttcaatactgacgaggtccatgttaaaagatttacaatgtagcgttgcctctaaccaactcccctcaaaagtatgtgcaatatagtacacactgttaccaaaagttatcagatttggaattgcaggatttgcgttctgtaccaaatgaatagttggtaaattctggacatttccttcaacggtattttctttccatattagtacgcacaaaaataaaatcattgaacttttatt

SEQ ID NO: 11764 - DNA, 602 bp, Diabrotica virgifera
  SmartBlast Evalue=7E-74; Info=Protein mago nashi n=19 Tax= Endopterygota RepID=MGN_DROME
gtaactgtcactgagaccaagctttctctgtttacagttaattttcattttaataattgactccacgtagaaactaaaaaaagaacaggatcgtttaaaaaatggcagatttttacattagatactacgtaggccacaaaggtaagttcggccacgaattcctcgagtttgagttccgaccggatggcaaactccggtacgctaacaactccaactacaaaaacgatacaatgatcagaaaagaagtgtacgtacaccaatgtgtaatggaagaactcaaaagaatcataatcgactcggaaataatgcaagaagacgactccttgtggcctcctccggaccgtattggaagacaagagttggagatcgtcatcaaagatgaacatatctcgttcactacctccaaaactggctctttaatcgacgtgagtcagtccaaagatcctgaagggctgagatgtttctattacttggtgcaagacttgaagtgtttggtgttttcgttgattggtctacattttaaaattaagcctatataaagtgtaaaatgtatttatcttttttaccttattgtaattcaataaaactctcagtttgtaagt

SEQ ID NO: 11765 - DNA, 603 bp, Diabrotica virgifera
tttcctttctccaggcccttcacaaaagtggtttgattagctctgttgtaggtgggcatgcttttaaaactctggtggaatattgtcagggccggctgctttgtgcgctttttgtttttctatgaccatttctatttcttgcttgttggttcattggtgttaattcttacatatatttagatatttgtccgaaattttagattgtttatttttaagtatatatgctgtgtcagcagagcatttcaatggctttcgatatttaaaagatggcaatgtaatattctctagtcttctattgatacctgtttttaattaattactgctttttctcaacgtgtaaagaataattatggtttttgttcataattatctggggtttgtattagaaaaatataaaactaagatatacaacagaaatggttgtagtgaaaagtagtgcccacattatatgtacttttcagtaaattaatagtgaatctgttggaataaagataatggaaagatatgatttatcttagactggttttctttttttttatatatagttttgtagattaaaatgccctgtatgttttggggaagtttacagttaacgttgactct

SEQ ID NO: 11766 - DNA, 601 bp, Diabrotica virgifera
  SmartBlast Evalue=6E-22; Info=Nuclear nucleic acid-binding protein C1D n=1 Tax=Harpegnathos saltator RepID=E2BT32_9HYME
aataactattattatttataattgaataatttgagtagtaaatatggactttggagacctaaagaatgatgtaattattcaagaaaagctgacaaatttccataacagcatagaaaaaatagagctcatgttggaaaaactgaagtctgcagatgtttatgaacaattatctctatcggaaaaagtggattacgatttatttctagcttacacactgaatacattgtactggttatacctgaggactcaaaacgaagatccgaataagaatgaggtgaagagccaattgaataggattaaggaatatatggtcaaagctaaacaggcccgtgagagacacaccataagacccaaagtagacaaagccgcagcagagagatttatcaagcatggaatcagctatagtagaattgaagacaatccagaatcaatgccaaacacaaggattcgatttgaggactgaattagtgtttatatcaattttatgtttgattataaagattttctataattgtacaaatttaaatgtgttatgggtacattccatgtcaaatcactcaggcaagaaatttggatctccgatttttctgagaattggtgt

SEQ ID NO: 11767 - DNA, 601 bp, Diabrotica virgifera
aaactcaaatgtctttttgtttatcggttaaattctcgttgttagtctgtactcgtattaatttttgtattcttatgagaaacattttcggaaataattacacaagtgcatcaaaattaacgatattttttatgaaagcttgtctaacactgttttttagttgaaatatcattttatttgaaatctgcgtacacaaatataacaactatactgattagatcataattttgtaatgttggaaaatactcggtggcgttgaagtttctaaatttactaatttaaaacaagtgtacaatttgggacacaacacgctaaaatacagcttttaagtagctcggtattcaatgatgattgcgctaataaccggcaaaataggaacacataatacgttgtaaaataaaaagagaagaaaccagtagatacgtgtagaactatcacaggagggagaattttataaaattctgtcacccagtggcagttgccaaactcctccgatacgtgtaaaggtggaaaactatcaatgtaatgtaaatttataggttactatcgataatttcccacctctactggtttcatctcagtttatttcacaacgtattat

SEQ ID NO: 11768 - DNA, 599 bp, Diabrotica virgifera
  SmartBlast Evalue=3E-72; Info="Ankyrin repeat domain-containing protein, putative n=1 Tax=Pediculus humanus corporis RepID= E0VBL5_PEDHC"
gggtggtgcgttttgctggtaaagctctaaactggcttggatagctctttgtaattgccgttcctcttctcctcctacataattaggtgtttccggtcgggatggtttctgggctttaagtgcttcccaaatatccacctcttctctctccgtaccagcttcgaccaaactttgttgtatggcgaattgaagcaaatcatcttcttcttccatactaaactgtcgacgaccatctaaaccaatgtgagcatatccagatggacatttgaataagctttcgtctagaacacaagtaagtcgaccttcttcttgaagttgagatacgtgtggtacctcagaatccatagcgaagatatttccgaatgttattcttgcatttaaaatatgaaatagtggtatttcaattttgacaggaaatccagaaggaagctgcatctgaataaaatctttcagtttagcaaaatgggagctcgatatcgccattaaatcgactataggaagtatctgctctggcaaagaaagcggaatagttttcacacagccacaagttagctttgaattttttgaactttacttgaatctcttttggtctaccgata

SEQ ID NO: 11769 - DNA, 602 bp, Diabrotica virgifera
  SmartBlast Evalue=3E-95; Info=Ance-3 n=1 Tax=Tribolium castaneum RepID=D7EIX0_TRICA
caaaaatccatcgatcgtgtagcggtggatataaactttttgtattcaatggctctcgacaagatagtcttcctgccattcgctttggtcatggataagtggcgatacgacgtcttcaagggtgttgttcaaaaagaagaatataactgccattggtggcttctgagtgagagataccaaggtataaaaccaccagtactgagatccgaaatcgactttgatccaggctccaagtatcatattcctgccaatattccatatttaaggtatttcgttagcacgattctccagtttcaaatctaccgttccctgtgcatcgccgcaggacagtactcgcccaatgatcctgctagacctctccacgaatgcgacatttataggagcaaagaagcaggaaggatccttacgcaaattatggaaaaaggttcttctcaatcctggagagacgttttgtttcaggctacaggagaaagcagactggatggaagggcattgagggaatacttcagacctttggaagactggctcagaaatgagaacttaagaacaggtgaatttgttggttggctatacgatggagactactgtaaacaaagcataga

SEQ ID NO: 11770 - DNA, 603 bp, Diabrotica virgifera
attgagccttatcctatccaatgctgagcagttggcagtaagtattcagttgtttgaaaagtgatggaaattatttagtcttgaaacggattgcgacccagtggttcgctcccggtttattaggaaaatacttgtttgaacattgcattttattctctggtaaagagctgctgagagaagcaaaataatcgtgctcattcatctgcagacattgactccaaaagttgaacttctttagcaaggcttcatcgattgatggttaatattaatatccacagagaacggcagttctcaccagtggcgcacaacacccctacaagcgacactatatatacacgaaattttcaattttctaaacctgactgaatggaaaattgggccacatcccatcttaaagtttacgaaaagactcgtccatccatatgttacttctccattttggtccaagggtgtggaatttacggcccttcccatttaaagcctgtttttcgttctcgtccccaaaactcccaaaaaatttcaaaatttaagccccacctttgcggcctctgatagcacagatcattacctttccaacgcatgtttaattttgaaaatcggtta

SEQ ID NO: 11771 - DNA, 602 bp, Diabrotica virgifera
  SmartBlast Evalue=1E-79; Info="Titin, putative n=1 Tax= Pediculus humanus corporis RepID=E0VID6_PEDHC"
tcttcgcggaccttaagattaaagtgggttcctcaattgagtacaatgtaccagttatcggagaacctcctccgtctaaagaatggaagcataaagaggacgttcttttcaacaacgatcgtgtcaaaatcgttagtgaaaactacaaaactagtcttaaaattacagatgctaaaagatctgatagtggaccatatacccttactgttaaaaacgctaacggcagagatgaagcaacagttaaagtcacagtacttgacgttcccactcctccggaaggtcctcttagacctgataatgttactaagagctcaatgacacttcactggaaaccacccaaagataacggtggtacagaaatcacacattacactgtagaaaaacttgataccgaaaatatgagatgggtaccatgtggagaagcaataggtacctccatgcgagttgatcatctgtcagagggacacgactatcaatttagggtcaaagcagtcaacaaagaaggagaatctgctccactaatgacaactgaacctattactgctaaggatccatttacaaaaccagacagacctggagttccacaagctacagattgggac

SEQ ID NO: 11772 - DNA, 599 bp, Diabrotica virgifera
  SmartBlast Evalue=2E-11; Info="Organic cation transporter, putative n=1 Tax=Pediculus humanus corporis RepID=E0VD76_PEDHC"
ctcgcactgcacaatgttttaatgtcttttattccggtaacgtctaaaactgtacaatattcttgttcactttgtccactacagttcatccactcactaaatgggacgtctttaaaattttctggccgcgcacaccaaacgtttcttttttctccaacgtgaaaagttggcgcgaatatgtgccacgtgcatggtatgttaaaaagggagaggagcagtgtgatgagcagttgccacctgccgaactctcctattgctttcgagactacatcgtcctcttcttgtgtttcttctggtttctttttagtgccatcgataattgctttggcaatttttttctccatcgtcgcgccacaattcacacttatatgaacgtccagtaaactcgggagctaattaccacacacagaaatattttcgcgaaactaacaattttttctcgttgtcggtgttttataatcatcttatgaactagttaatatcgatatgtatccatccacttcgcaaatgataaattaacgctcgcgtgttgattatccgacgcgttaatacaacaaactgatgtacttaatcgggtcctttttaaaacaagcgggtac

SEQ ID NO: 11773 - DNA, 598 bp, Diabrotica virgifera
cttgcgtcttattcttgtcttgccttcaattttaccctcgattataataataatattatggtatggcatttttgccggaaagatcctttcggacagttccggcgccattttgccctcgatttaccctcgattataagttggatgaactggtattttttatttcgcatgatgtgacctagctacaccgtttcctttttcctgatggtttcgaaaagttgacgatcttggttgattcttttaaggagatctacgtttgtgactttcaccgtccatggtatctttagatacctacagaaaataattacaagaaacgattttttctcgaaatgtaccacataaataaaactaagaattcaattaattacaaaacagataccaacagtttgaatgatattttacaattctaaatgtagcgaaatactgaacagctgggcctcgattttaacttttttttcatacgcgggatgccgacctatagcaacttgtaccaatcagagacattaaaattttctggaaacttattatcggccgcaaacaatgaatgttcgggggtttggtaaattttaatttgttgaacactcctaccgaacctaagggt

SEQ ID NO: 11774 - DNA, 601 bp, Diabrotica virgifera
attttttgtgtatttatgtatttatatgacaattttaataggtgttaaataaaatgttagacgctcaaaaatttttgaaaaatgcttccattatgatgagtttcgcttcggatatatacctctgatttctttgagttgatctattttttttgtgttcgtggcttgactcgattttaaatattttttatatataatatataagttggacattttcaacatggtttgtatatataacactataaattgattataaagttgtacataatgatgttgggttgattattgtgttagtttttattttattttctattcctccttgtcattgttttattttaaagcatcttttgactttcacggctacaggacggtcctaatatgcggcccaatccacttgcagatcatttcaattataatattaatattattttaaaatatttgtacaaaacgaagaggaatgtgttaaattcaagtgatcagcattggattgtacacctgtgcacacctttaaattattggcgtcaatgttaggatgactctttcacataacctgtcctacacattgacttacagtggtattaaattattaaagccacacagagaa

SEQ ID NO: 11775 - DNA, 602 bp, Diabrotica virgifera
  SmartBlast Evalue=1E-66; Info="Eukaryotic translation initiation factor 3 subunit, putative n=1 Tax=Pediculus humanus corporis RepID=E0VTU9_PEDHC"
ataaaatctgaataccggtttaatacagaaagatcttagtaatgaaatcttttgcaaattgtatgtttctatcgtagtttcaatgtcactagaaagcaattcgtagtcgaagtatgctttcagttctgtttttatttgattccacagagtcttaggagtaagagtggcccattcattgttatcttgacaagataatggattagcccttccccttcttttatttctcttcttgttgttcttgttctcatcttgaccttgtagtggattagtcataggaccagagtataaaaagcagttcaaaaagtgcgctatagctaccgatagattcatcatttcacaaccctgtaagtacgaagtaaaaatatgcttagctgatcttaatattaactcagaagcggcaatgctgtacaggtactcgagttgcctaacttttgctaacaaatgtgtaactttaccaaggtatctaatatttatacctttattgtgcagtgcttccgataatgttgtaccatccattggtgcagacgagtggtccaggcagtcacgaatgaaagtaggaatctgaacagtcaacaaaaattcagcggcatctttgatcagtt

SEQ ID NO: 11776 - DNA, 602 bp, Diabrotica virgifera
  SmartBlast Evalue=0.000000001; Info=Phosphatidylinositol N- acetylglucosaminyltransferase subunit Q n=1 Tax=Harpegnathos saltator RepID=E2BHH6_9HYME
ttgagtttgaggcctatgggggatcccataagatacagtaagaggcctttaaggctagaaataataccctcaaatgtattgtagacaaacaaaaatatctgatcctcatactgcatgacataactcataagaaaaactcctatgaaaatatctattggtttggcaataagaacgttccccatttttggagttactgttttttggtctgcagctgtcttcagaaaccatttcatagtcttcaagctctcttcgaaatgtgtaaaagttgaagacttttgtactatcaaattcagtctagagagaaagttaaggcatacattcagtactacgataactttggataaaatgtttattaaaaaatgtcttccattttctgatactgaacgagcatgtttcctcaattctatactcagattcttaaaatgctctccatagttttctgcactgtgatagagaatatcagagttcttaaaccttttaaaatcataaactatttgagtcactggatgtttctcttcgcacattaggaatatttctttatttgtactatttatcaataaactaacgtctttatttaagttatcacattcttgtaagagtcc

SEQ ID NO: 11777 - DNA, 600 bp, Diabrotica virgifera
gacaaaacttagtatacgattttcttacataattttatgttatagtctaaaacagacttaaattcaaactaggaacaagttatacaatctagatgcgacgacacaaaccaaccaatatcgttgcaaaagccgtccaaattgaactgcgaatatcctttgtgttcgtcgcaaaaaccgacaagccgtcgttcgcgacgagcgacgaacgaacagctcgcaagcggttcgttccgcagtacattatacgaatatagtgttcgcaaagagtgcggctcgcatatgtgtaccgacttttcgagcagcaatgaacagctgcaagatagtggagacggacacactacatcttgattatatcatagatgttcctaacaatccttttaagtaactaggaatctgcaaaaatagattccttggcgtttcgaggtatgcgaagtactgtaaaatggggtgaataggaacagtggggtgaataggaacaaaagttcactaaacaattacaataatcttcctaaacatatatattactttcgttgggctatttaatttttttcaagttagctaacgtgatatggctttaggaaatttaggtttgtgttgttg

SEQ ID NO: 11778 - DNA, 598 bp, Diabrotica virgifera
gaagatcctaataaaattttatcatataattcttataattaaatcatcatgctgcacctcgtatcacctttcattctatttactttgtcttctattttttgcactaaatgagaaaaaaacattaaaaactaatatttcagaagtataactaaaaagtaagttgatattatttattaatactatttttacaaacatttttttcatgcatctgcaaatctgcatagagatatacagggaatatcagctttttttacatctgcataagttcttagcgaaattttaacagttacatggtggtacaagtctgttcttgtaggcagtaaaactaaaactttttgaggcttcagagtctaattatctatatgatatccatataaagtggatctagttcttttgcagcatcatcaaggcccgtcaattgtgtgtatgccgccacatcataaatgctcgttttatatgcaatgatgatgctgcaaaagaactcgatccatttttatatggatatcacatattggctcattttcatgcgtagaagccgtgttacgatcgataaagcgtcgaagaatacatacttacctgactgtgagccaatcttgcg

SEQ ID NO: 11779 - DNA, 602 bp, Diabrotica virgifera
gttgtcagtagaaattaccacattgtgatatttaaatgttggggtggcctcttgtttgttttttaagttgaacctgaaatcttattatgttaataattatttcttatcctagctggactatacttatcttttgttatgtttgcttattccattcgcttcgttttgtttatcgaattatgtaagtcgtttatatatcagctgctagcagatcatctagactaatttttatttcaacagtttttttattctgttttgttttatttttttaaatttccgtagtggatgtttctgtttttatcttgttccacagtcccaacgtttttatttattattattttccagttacctctcatactctattacctctattattaatttttgtctattctctcatatacctaaacagttgaagtttttttggtttctataaaagtgtcaattcgtgctttatcaataatttttttggattctttatttattcattgtttctactgattttatctgcttatcgtcaaaaaatttctttacgctcattttttttgctttattactatccatatttcacatatatttgaatatatctcgttttataatataaaaca

SEQ ID NO: 11780 - DNA, 598 bp, Diabrotica virgifera
ctctgtctcatagtttttgttcgctgtcgtcatcagtctcactttcaatatctgaaaacttatcggctaaagattgaagttccttttcagaaagccctcttttcgacataatgcaaaaaaaccgattgggttaaatatgtcccgcttaaaaataccactgggacattattgccccactagggttattcttagaaaatcagtaatatttctatcaaaatactataccatattattagaatatggagtatccactgatataaatgcacaaaaatattcactttcaaaaatctcgacgaaaatggtaaaaagcgaatataaacgcattaaaacatcgagaacttgtgaaaataaatctgtaactgactccggaagtcatccagtgttgtcaattcaggtttattttcttgcttttgactaataatacccctaaagcaaatctacgaaatcgggacgcatttgagccagtaaatgtttttaaactttttagtgggacatatgtatcccgagggggccgaaaaggttaagaacaggatcaaattacaacttcacatcttttgaacaccactacgcatgcgcctgtagttctaggacatacaaa

SEQ ID NO: 11781 - DNA, 601 bp, Diabrotica virgifera
  SmartBlast Evalue=1E-10; Info="CG9134, isoform A n=2 Tax= Sophophora RepID=Q9W0I2_DROME"
gaccatttatcatctgtttcccgggtaagatacgtgttattccatatagtatcaggtgtggtatcccgtataacaggtgtggtatcccgtacatcaggtgtcgtatcccgtgcaacaggtggtgtgttataccatatatcaggtttggtattccatatatcaggtgtggtagtccgtataacaggtgtggtagtccgtataataggtgtagtatcccatacatcaggtgtggtagtccgtataataggtgtggtaagcgttttaacaggttcaatttctgcttcacacagtgcatgtacgccgcaatcaagtccattcctatcgttccaacccaaacccgtgtaccagttaaatctcacttctatacaattttccttgtttcgtatgttgtctggttggaagcgcatccagttgtagtatttaatcgggcgccctgtactcatccatacccatctgttgtccagtttggctcctgaagtccaaaaccaatattccatgctatcaccaaaacgttccttcatcagttggtaaagaaaataattttcatcctcagattcaatactaaccaggctcatgttaagagatctgcaatattcctgtg

SEQ ID NO: 11782 - DNA, 599 bp, Diabrotica virgifera
cgaaaaagccatctgggtggtatcacttgaatctcccgtacctagttcttcgcaataatcaaaataagatagtttttcagcagcattcatcactatctttttcaaggcgtccgtagaaaattctgcatttttttaagacattataccaacgcaatttaaacttaggatggaccattgcggatataatgccctcttccgatgacaaattaagtatttcagagaatcttttctccaagctctgcatattttttttaggaaaaattcaccgccagaactcgtgtttgaagctttaacttctcccatttattcctcaaagatcacacaatcacaatcttctccttgcagaacatcgtaaggttgtagcgagaggtttcaagtccttacagtactcttctaagtacagcaactcggtttctgtaagttttttttatatcaaacctttgaaaaagggacggtagcttttctttttcacttaaaatttgccgagtcataataagagttccatcttgctacagctggataacttttcacgaatggactgatactgaaaacggcgtttttgcgtgttgctattaatttgctctcccacatgcagcgac

SEQ ID NO: 11783 - DNA, 588 bp, Diabrotica virgifera
atttacgatttggtaacaaaccaactctcagttggtctgtgcccattgaactggcgagtacctagcattttcgatctgggaaacatgttgccctttgagcatgtattctaatatatctaacaacatcgactcgtagtcaccatattttatcaaaatattatatgtaaaccatatacactggcgggcaaaaaatctaggtcactagacgaatcacacacgtttgacgccccgaacttcctaaacctgtggtccgatttgggtgatttcctttgaaacttacaggtttattaattaagaatctcaatatatcaatattgctgccagacaggtaaatgtcattttataccgggtgcaacaatcacactgtgtttcttccttaaagttcgaaacaccctgtggaagattatagcacatataaaataataaaattaaaactcaattgcagcctaagccctaattaacattttactttttgaatcatttgcctatgttaaataataaaaaagttaggtacgttaacagctaccgatgattttcatccataaatccccattttctgcttagttattacttacttacttaatccag

SEQ ID NO: 11784 - DNA, 602 bp, Diabrotica virgifera
aaaacgctacgactgtaatcgctgcacaaaacactattaactcaatatacgtagaaaatgctagcccagaagtacttagtatcataacgaagcttaaaatttgtatgcttcgtttccttccacaaatatctgctaacttcggtaacagaagagtcccaattatacctccaacagcttgtgatacaagtagagctgatacttcagttggcttaattggtctttctattggatttacttcggtatcatttaattgcaattttgtaagtgctggtgaagcccatacaattgacattcctcctacaaaccatggcaaacttccagtgaatatcgtaaagtacagaaaaaatgtatccgattttcttgcacttttaacatcattattatcagaacatgtcattgtgttaacatcttttaaaacacactcttcataattagcagatttacatatttcgctgtctgccatattgtaaatgttgaacacaaaccactactattcaaaaacatatttcttttccaactattcggtgtcacaagatattcacacattcacggtcatgactgcatatgaagtcatttactccataagaatacgtgtatacaat

SEQ ID NO: 11785 - DNA, 601 bp, Diabrotica virgifera
tctatcaagattaggtagataaaggtactaatagaaataacacagcattttattcaaaaaagagaataataggaaattcagttagttacatatgatattgggtaaaaatattttacaatttttttcttatgaaaattgttgggaaaatactaaatatgcacatcaaacacgctttttgtatatcctagctttctgatagtgattttaaacagtggcaaacacaaagagaaaggtactttatcgattcaagctatcaattgaaaagctcccttaaacactgatgacttacccaccaagaaaaaaccctttacaacacttggattccaattttcagtataaatactatatggtttaacatcaatcaacaacaacactggcttgaatccttttacaacctttttttaaacctttccttcattcaattctgcattggatgcatttggtgacctcatagcttacctgttcaaaccatattacttgtagttatataatgagctttataaacaccaatctaaaagtcttttacttctgcatcatcatctttcccttactgttctaaagatatttctgttgttgagattaatttttgagaatcaatcaa

SEQ ID NO: 11786 - DNA, 601 bp, Diabrotica virgifera
tatgttgtctcaatagtgtatagattttaggattttgaaattagctatttccaattccattgcgtttaaatgaaaggaaatagttaattttctgataccatatgtcaaaagttgtcctcgactgaaataaatctaaaaacatttacaaaagtttgataaatggtttttaaattgttaatttctcaatttaggatcttcttttgtcacatcctatatgtatatctatttaaaatgtatattaatttaaaaatgtttgtactggttgagaatatccgtagccacccctgtagaaagaaacacattcatccaatccatttttcacatacatttttaacatctatctgtctatttgaaagaaaaaaatctaacggtagtcaaaactgcgtgcttcaagtaatccaaaaatccaaaaagaaaaaaaaatacacattaacttggtccttctgtatcatcgaaaaatttcccttcgtcttagatattactaccacttcattttggcttttgatatgattttttattactcgaagcagaaatttttttcaatttcccacttttcctccaaaagtgacagtaagaaatgtaaaattcgaactgggctctc

SEQ ID NO: 11787 - DNA, 602 bp, Diabrotica virgifera
  SmartBlast Evalue=3E-36; Info=SWI/SNF-related matrix-associated actin-dependent regulator of chromatin subfamily A-like protein 1 n=1 Tax=Harpegnathos saltator RepID=E2BD94_9HYME
caaaattgttttgaatttttcaacaatttgtacataaataaaatactaaaatctgttttatacttttgaaaaatgattaaataagcaatggcatctgtatctaatttttacaaacaaacaacaacagcaactttttccttaatatctaaagaacgatttaaagttgatacaaataagtttgatgaacaaattatccaaatatttaaaaatattccatcaaaactatatgaccccaagaatcgtatttggaacttttccatacagcaccatgacttattactctttgaactacagaagttacgggagaaggtgacagttgaacccattccaaaatttgttataaattgtttgaaagtgccacctcgtgaaatagacatcgattttaataggcttgatcctatattatctgctacacttatgccatttcagattgaaggtttaaggtttggaatcaatagaaatggtaggtgtatgattgcagatgatatggggcttggcaagacattccaagctctggccatagctaattattatcaaaacgactggcctcttttgatagttactactgctacaatgaaaactcagtgggaggaaactatagc

SEQ ID NO: 11788 - DNA, 601 bp, Diabrotica virgifera
  SmartBlast Evalue=4E-13; Info=Protein AMN1 homolog n=5 Tax= Eutheria RepID=AMN1_HUMAN
attccggttattgcgttgaagattttgcttaaaatgtacatgcatgaatgaaaaatcatgtttaaatcaaggaaatgggacgtgggtgtacaagcattaccaaagcccatcgattcactttttacattgtttagtggagctactaaaaaattgtcccaatttggttcattttgtactctgtcgcagcacggaagtgaaagatgaggtgttagattgtatggcagaacattgtccagatctgacatgtttggattttggcggttgttcgcagattactgatataggcattaagaaaatttcgaggttgaaaaaattgactggtgtcaatttttctgctacacaaattactgatgaaggagtgagttgtcttgctaagggacccagtggaccaaaattaacggaacttagaatagaagacactcaggtgaccgatgttggtttgagaagtgttgcggaaaactgccctaaactgcaaatattatgttaccgtggccgacaaaaacaagatttggatagcttcgtacctttccacaatgggttaaagaacttgaagcaagttacatggacagtgaactggtaaagtgacgttccttcgggccta

SEQ ID NO: 11789 - DNA, 598 bp, Diabrotica virgifera
ttacacgataaaaatatcttttgatgagtggaacaacactacaaagatagaaaactttcagaagtaaacgtatttcttgcgtattgattatggaaatagtgaataacgataaaactgaatcagtcgtgattttttacatcttcaaactggtgcaatcttactctgacatggaatcatacatgcaattacgaaaccctgtgcactagaattctataactactgagtaataaaatgttgaatcgaaaaggatcactgtgattcagtggcaacatagcaacttctcacgtcggcatcgctgcagtcgttactgtagctatgcaatgttgtcaaatttaaattatatctttaattcctttttttgtaacgcattgcacattattatatatacaggatatctacaaaattagttaataggcatagtttatgtaaattatgcattaaagaatataaagttaaaagcaagggcacgttcagttaataaagatattataaaccacttccaaatagcaggtattttatgaaaattaacgaatacaccatagaagacagtagttggagataaccttcaatagtaagatataggtacctggattatgac

SEQ ID NO: 11790 - DNA, 592 bp, Diabrotica virgifera
  SmartBlast Evalue=7E-47; Info=Pebbled n=1 Tax=Tribolium castaneum RepID=D6WSG7_TRICA
ctgcagagcttgtttctggttcaatttctcttctgcggatatcctcttgtaatgtttaaggatgatcataatgttcttttctatgaattgggcgtggatggacttgggtacggtgtgggggattttaaggcctatggtgttgttgagttggttgaatatttcgtttaggatcaagctgggctttaatggcacttggatatgggacacgaagactttttcgtccgtttgttcttggatttcgatttcatcccacctactgagaattttgagcatcctctccggacaaatgttgtttagttcctcacaatgcttctcagtggcttctaacacgctgtttgtccaattggtccacaaattctggcttgtagtgttgaaagaatcacacactctgatccagtcatcgttggagatgttaaatatgcagcatcgatgaagatgcggacacagcaacgtgatggcttgcataaatcttgccagaatcgtggatttcgtgataaagttggatgtttgggtggttagaaggttattacaataatttgacagttctaaacaagttttaatgcactctgcttggagatgattttcgatttca

SEQ ID NO: 11791 - DNA, 600 bp, Diabrotica virgifera
catatatacaaataaataaggacaacaatataataagtcttccccatatataaaacctatccatatttgttcaactgtttgatctacccctgtaacacaatactacacttcctcgggttcatctatagcctccctctacgccccgcaccgctgacgtatttggttcactaagttcaatggtaacatatggcccatatggtaaaaattagcactcgagcaccaccccttagcggcaaaagttatataagctcaatgtgcaatgttaacgcagttctacatttctacgtaacatcgttttattaaaaatttggaaaatgttggtccttcgatccggatcaatagaatatgtgtggtttaattacacatataaatgtttttccaaattttaataaaacaatattacgtcaaaattcaaaactacattcacattgtattaacttatattttagtctttcgcagctaagggatggtggtagagaggtgagttttaccatatgggccacaattgaccattgggccagtaatcaaacacgtcagccgtgcgggccgtcgagaaaagctatcgataactccgaagaagtgtaatattgtgttacaggg

SEQ ID NO: 11792 - DNA, 598 bp, Diabrotica virgifera
  SmartBlast Evalue=4E-50; Info=NHP2-like protein 1 n=4 Tax= Apocrita RepID=E2BIR4_9HYME
gtttcttggttagaggttagagcgcgcttaaaccacgtttgtttattttatattctctaatcctcagtgaagcgaaaaaatcgcagagaggacagagtaaatagtttttgattactatagtgtaaaaaagaattatctctacatcaaaatggcagaagaaatcaatccaaaagcttatccattggctgatgccacattaacaacaaaaattctaaatcttgttcagcaagctatgaattacaagcagttgagaaaaggagctaatgaagttacaaaaacacttaatcgaggtatagctgaattcatagttatggcagctgatgcagaaccattggaaatcttactgcatttgccccttttatgtgaagataaaaatgtcccatacgtttttatcagatcgaagcaagctttgggaagagcatgtggagtttcaagatctgtgattgcatgcagtgttacaattaacgaaggttcacaattgaagcctcaaattcagacgatccagcaggagattgaacgcttattagtataagttttgagtacaaaaatataaaaattaagttttatgttttctacattttttctaaatataagattt

SEQ ID NO: 11793 - DNA, 601 bp, Diabrotica virgifera
  SmartBlast Evalue=2E-53; Info=Afadin n=1 Tax=Harpegnathos saltator RepID=E2BUW6_9HYME
cagtgatcccatcgtaccggtcgtcttatcgtcaacattctttaacaaaaatcttccttctctatcatctacgtgccatttgagctggaccaagagaggcttttcatcgggaggcatttttctctcctggcaaccctcatgtaattcgtagagcgcgtacgaaggtaccgacagcattctcatatccggtcggaatttttcaactagagtaccgatgacgtcttctacggtggcatccgaagctacccttatgcattttgtggcgactttctgaccggagtcttggaagtagaatcgcatcactccatggaattccaggtcctcatttggttcggagagttcgaaaaggtccaatctgttagcattccactgattaacgacatgtcgcagggcctccctctcgagggccctgcgttcatttagacttcccccgtgcatctgtaccacctgttgtgagggcacaactgcactaacaaattatacacattgagtaacaacacactacttatactttcagttaattaaggcacttcacacagtaaaaacttaaattccatacatccttacatgactttaacacttaacaaaattttcaaacttt

SEQ ID NO: 11794 - DNA, 596 bp, Diabrotica virgifera
acatatctgcaatagacaaaaaaatcctaggtatgttaatcgaaaatgaaggcaaagcagacagtttttataattcataaaattataaactaattggaagaaaaccacagctcggttacaaaacaatgtagtactgggcaccaatatttcatctccttatatctctcattgttgttcattccgttttaaagacgttctacagtacctgccaactatgaaaaatcccatattttgtgacccctactttccatccaactttcgcaaatacccaagttactagggttagttcattctgggcgaaaaagactacaaaatgcattaaaggccaattccaacataatggtaagccacgattttcggaattctattttatttcactatctatacagggtgtttcattaagaattgtccatatagtcactggagaaaccctagcacaaaatacgaagattcaacctaaaacacttaggatagttttaagctgttaccagaggcgtgctgtagggatacctacttgcctttctccccctcacaatcttcgccactgtcgcaataatcatttcagcatgtttgttgattcttcgttactttttatg

SEQ ID NO: 11795 - DNA, 595 bp, Diabrotica virgifera
  SmartBlast Evalue=2E-18; Info=Probable ATP-dependent RNA helicase DHX35 n=1 Tax=Harpegnathos saltator RepID=E2BPC7_9HYME
cagtgtcccgaacatggtctatttcttgcttatttccctggaataaagctcctattctaaaatacatcataatctcataatgtatcagtaccgttcagcttgtgaaaaataaaatttttaacatcaataatattgatctcagtcacacagataacagacaataatataccataaccaacgtactgtatatttcttagaaactcccacaacttatcacaaaatatcgaaagcaacaacacgtgcatcagattgtggacgttaatcaccctccacaaccacgccatgaggaagaagaaagaactcctgaagacttcttgctgcttgactttgtcatcaggcgatgcatccgggttttctagcatgtcttggtacaacgctatgtacctgttccacgccgtggaactaatgatgagctgcaaggcgaaacaacaaactttcctcacaactttcttcgtagtaacttttaaactatgaactatgttggtctctttgctgtctaccgtggtaggcaactggatgtatcctcttcgaggaggattgtttttgagaaacacgaatatcccgatgattaaggccgtgcaaccgatggcgtcgc

SEQ ID NO: 11796 - DNA, 600 bp, Diabrotica virgifera
  SmartBlast Evalue=1E-37; Info=Protein crossbronx homolog n=1 Tax=Aedes aegypti RepID=AKTIP_AEDAE
cattatgcacgcatcacactcaaaggatggcaattttcaaagacagggatcgactagaagagttatcccctcagaaccgatttcttaccctttgggagacaaacagaatgaagatgtgcaaaagttgtacaagttatataaacaagaatatgttattttagcagaatataaaatggtacaaaatgaaaacatacccggtgtttatgttataccgtctagggagtcttcattagtatggtttggagtaatatttgtaaggagtggatgttatgaagagggtatttttaggtttactatatttttggatgaagaatttcctgattctggacatcctaaagtgatatttcatacaaaaatatttcatcctgtgatagacgctgactctggtgaactgaatctgttaaaagcttttccacagtggtctaagttagaggaacatatttggcaagttgttaaatatatacaatggatttttctagacatggatagaagtattgagcatgctgttaatacggaagctgcagaaatgtatagaaacaatctccaagaattcaaagaaaaagctgcagaactggttaaagaaagcaaatcgcatctgtt

SEQ ID NO: 11797 - DNA, 595 bp, Diabrotica virgifera
ggcttcgtgtatagcagcaatttcgccatcatagttggtgagaggggcacccacagctatggagcctttggagaacattgagacatatcctgtcatcgcagtagatgtggagccactcatgcgctgggtaattggtgtgtatcgtctctagggtggctttccttaggacaatgtctgacgataagtgcttcgggtcgttatggttttcaagacgcaattctgtgtttggtagacagcgggcgagtgtagtttgcgctgggaagggggcggctttcgacaggtcaatgtggtatttttccatgatttgatttgctactgtaagcggagtggtttgtgttttaagacgtgaggctgcttgtctatattcgtcccatttttgtggaattattcgtctttgcctttcccagaaggttaacgcgtgttgctctctgcggcattgtattggttcaataccggtctgggcttccattgatgtaatcggtgttgattttggagcaccggtgatgacgcgaagggcagtgatctgggcgacttcaagcttggaggtggtgtttgtactcgcagttattgtagcttcactcccatattctagtat

SEQ ID NO: 11798 - DNA, 586 bp, Diabrotica virgifera
  misc_feature (447)..(449): n is a, c, g, or t
gtcaacctcaactacaaagtaaagttaatgagaattccacaccaaatattctgaccgaaacaacattagaccatggtgacatagaagttgaaattgacgcggaaatagcagcagagataatggaagactgggatcaaagtaaagtaatgtttgaagagtacagaaagtctcagaatcctttatgtattactaaaacaaatcctgctcttgtagaactggaaatattgatatttcctctacttagagattttctctataaactattacatcgaacaatacaagaggactgctgttatgagcagatcaaaatatcaacatcaactttgacagttattttgacgaaagaatggttaccaaactatatcaaagtattagaaatccagaagtatctgtctgctttgatcgtttttacttcagtgaaactaatgaagaatttacaatatgcgnnnattgatacctgtatcgaagacttaccaaaatttagtaaaaagctgcgtggtgatcgtcaaatggaacaatattacagaagtgattacttagtaattatcacagagcaattggtttagacgaaagaaaaatgaaatat

SEQ ID NO: 11799 - DNA, 601 bp, Diabrotica virgifera
  SmartBlast Evalue=5E-51; Info="Isocitrate dehydrogenase NAD, subunit gammaputative n=1 Tax=Pediculus humanus corporis RepID= E0VT16_PEDHC"
taatttcatgatgttggctttgtgaacaatggtaactttttttcttccatttttggatgcgaattcgaaggcccaccttccaaacctttcactgttttctcgtgtgattatctttaagctttccactataccaggtttggactcatgttctagcattgcatattcgccctctgtattctgcctgagaagatagatgtccaatgctggaaacctgcatcgtacattaggataacttgtacaatgtactaaatatacgaataagtccagttgagcccttagacttacgttggaggaagtatccgccaaagatggaatatgaccttttatggcaactccgtttcttctgatggatagtaatgcaatttcgtcagattcatctactacttcaaagtctattggaacgtatgctgcttcaaaaatttctttgacatattccatcatttgaggacctgatcctatacctggcagcatcgtaacaattctccttcccccatgagtattttctggtggtggtgacaaagtactccatataggcacctgcttgttcttcactagtccagcgaaagtgtcagctgcagttgccaaatgcctcgttaacacc

SEQ ID NO: 11800 - DNA, 595 bp, Diabrotica virgifera
cgtaactcttctaaaaaattcagtcaaaatacttgaacttaaaaataaattgattgtaaactaaattatgaataaacgtgagtgtatcaccaaagaatatagacgttaagtagaagagtacggccctgtaacatttcagcataggatgttgtgttcctactgagtaggtgcatgtgacctgacaacgactactgcgcgatctcctcaccaccgcggccgcaacatcccttgtcaacaagcctatttctaaaatatggaagagtggagcagctttctttagatacttattttcttacctaaatgccatgtggtcgtgtgcgtacaatacttgccttttaaatttttgcgttttataaaattagagatgcaaaaactactgatgcaactaattttttttgaaaaaataaatattattttactttaataactgaattttttagaactgaactatataaacaatattgtgacagtggcggctggtcctatgaggcaggtgaggcagtgcctcaccagtatatcaatcgactatttacgttatttcgtcatcaattctttaaatacaatttaagtaactctttgaaatttgctaaataga

SEQ ID NO: 11801 - DNA, 601 bp, Diabrotica virgifera
  SmartBlast Evalue=4E-14; Info=Nucleolar protein 10 n=1 Tax= Camponotus floridanus RepID=E2AQ01_9HYME
agttggtcacttgcaaaaacaccatgtacttaatacacacgaatgtgtttgtattaaatcattgtttttaaaatgtatattacgcataggtaacacggttttttgttgagaaaaatgaacactgttattgtttgttgatatttgtgtagttttaataaaaattgttacagttctgataagaccgttaaagtcaaggatatgtttccgatggcctcggagcagcttttaacttcaagttcaagcctagaggataccgaaatcgtcagcgtcgctgtcccagatagctcaactcatctcagtgtcactacagtattgaattactgtaaaagtaaaattctcagaccttatctgagatttttagggtttatgggacttcgaccactttttggagaacagcaagatgccttcacaggttgttggaaattcgttaatgttttatacacttcttttatcctcgttatcttagtgatgggctacattttgcagtatatgtcatgctttagacgagaaagagggttttattacgtgtttaggacttccaatagaacactatacgctgaatatacttacaactacaaagaaacctgtgatggatccattg

SEQ ID NO: 11802 - DNA, 599 bp, Diabrotica virgifera
caagtacttcacccagaacacacaaaatgaagtatctgtatttgttttttattgcttatatcttcgcctacgtttctggatctcagcttaaaaatcaacaacatgtttgtaactgccaaaagactttagaaaccatttatgctgatgtcctccagcaagagaaagctttaaatcaaacccttattgatatttctgttcttgaaatagagcttagacaactcgatgatcttcttgaaggacaagaagataagctaatagacatctcggctgaattagcagcactaactgtaactaagaactacattaaccgtttacttgccgatggaagccaagccctccaatgcatcatagacaatctcaaagaagtttgccatgatctacacgatgacgtcgataatgatgtcgatcaacaacaatctcaaattataaatattctaagtgttgttatgaaagttgaagattgtaagaatggaaactcatgtcctgctgctccccaataaaatgaactgtaaaccaatcatgctcgcttaacacaatttcttttgtaaaaactgtacacctacatcgtcaataacaaataaagtacacaatataaaaaa

SEQ ID NO: 11803 - DNA, 601 bp, Diabrotica virgifera
ttttgcaaatttcttaaaattttaagagttgtgtaacgttagtggttcatagttttattaccattttaggaaatacagttctggttcatcgaatgtagaatccgtcaagatgcaagccaaaaatattgttctaaatcaatggagactcatcaatgaattaaaaaagtatttttcaaaatttaccaatgataaaacatttgagactgcactaaacaaagaatttgcacagtttctgcaaaaaattgattctaaaacgtatgggaagggtcttgtgaaatattttacatcacagtcaacagacatagtaaaaaatacaccaatgcatgaaactaaagtagaaaaagatgtaaaacaggagcaaagtataccaagtcgtctatctttacctatacaaaatgttctaagtggcttaagtataaatattaagagtaaggaagatgaaaagaaagaaattatacccagatggaaaactgtaacaaaacccattgtatcacaggaagcaataggagccagaactagtcaaattttagtatcgatcagtttagctgataatgaaactatgaaaattcgaagaattgaagatttaatatctcatttagaa

SEQ ID NO: 11804 - DNA, 599 bp, Diabrotica virgifera
  SmartBlast Evalue=4E-50; Info=Vacuolar protein sorting- associated protein 13A n=1 Tax=Camponotus floridanus RepID= E1ZV01_9HYME
ttggtaatacctaatactaggccgtatgggtttcctaagacatccaatcccaaaactaacacataaaattgtttaatagcttgtcctacataatgactagttgcttcactaatcaattgcttctgcgtaaggaaagtgaagttcctttcgaagaatgctaacttgaacacaacatcatttaagtctgtaagagtgacacctatgccttgaagcagggcgtgcactaatggaggagtagatatattttgactggaagaacttgatcctgcagctagagagaaactaatgtggattttaaatggtgaaaaatgaagtaagatcatagaagcttttttgttcttgactagattgagtggaagccagcgcgtagagggtttcttcaacgtgatgtttgtctgtcaagaagagttgtttctctgtttctgcagatgcctcgtcttcttgcaacatttctaaaatactacttacgaatcccatatccaatttaatatggaattcttgaactaaaactttaaagtatttgaactgaagaatctgactgttcttcatcaataactggacaatactaacttcaatgaagggtttgattccatcattag

SEQ ID NO: 11805 - DNA, 600 bp, Diabrotica virgifera
  SmartBlast Evalue=1E-44; Info="UDP-glucuronosyltransferase 1-8, putative n=1 Tax=Pediculus humanus corporis RepID=E0VMM1_PEDHC"
ttcccttgctttccattatgttaatatttagatgttggtcagcacaaaatggtattccgactactgggacggcattatacgctgcttctgctgtactcaaagccccaccgtgactaataaataattttaaattcggatgcgctagtagatcccgttgtggtaaccactttttgataataacatttttgggaatattcgttaaatttcctttaaatttccatagcactgtttgttttaactttcctaatgcatcaaggattgccttgcgtttatcttcgctgaatgaagacggtttaacatttgttccgagtgcaaataaaatgacaccttctttgctgttatccatgacacgttgaagatcctctggcagtttttttgctggtttgatgtgcaagccacctactggaattatgtttggagttagaggttgtggatggttaaaaccttgcattaaattacacaaaagtaaagaaatatgattttcaagggaatctaaagagtccatttgttttccaaatatttcttttgcttgaccctcgacaacgttgtttaaataatattttcttactaggccctcagctcttatccaatagaaatttt

SEQ ID NO: 11806 - DNA, 598 bp, Diabrotica virgifera
aaaacataaggctatacctagttgggttttaatttcagtattgtaaaagctagaatattccacagggtgacgcgagctttgagagaaattacagtttgattggtacacccggtatacaatgacaatttgcctgtatagcaataatattatcacagcgatgttttgaagagtagggctatggcatgttaaaagagtcacttaaatcagacaacaggtttaggaaattcaagatataaaatattacccatttttaaggtggtgcgttaatttcttggagaagtgtagttcgcagattttataataacttgttaatgcacatacacacaattcatacacaccacgtttggtagaaaaaatctgtttaaaacgaaaaataaatcactttagcattaagggatacgtaaatttatttactaagaccaatgtgaatgcgcaaattctcgcatcaatgtgttttaaatgcattcattttttcgaattatggggaaactaataagtatttttgaaaagtttaaacgcagaatggaagatcacatgattgccgagtgccgaaaggcccttagaattaaccaatatgtttcttttaatgatatatttg

SEQ ID NO: 11807 - DNA, 598 bp, Diabrotica virgifera
cacctcactcgcatcgatatcgtatttcgggcaatatttccgtcaacgacagcagcagtggcaatagctgagtataaatccggcatgatggatcaccggcaacgatataaaacgacattccccacaatacgtagaggagttctgccggagaattgatctggtattttagccaaatggtattggctgaaggccaatcgcctctgctaaagaattgatttagtagcagttcccaaaccgggctcttaggtccggcgcaaattgaacctaagcgagacacaacctgcgccggcgagacgggcgacccgtgcttttatttttctagcgcaccgcatgttgaacccaatccgacccaaccgttggctggcactgtggcgaatagagtcaggcaaaatcaatgcgggcgtgtaacggttactttcgataccggttctcagtggtactgagtacctagtacctaggcaactttaaatcgatatttccgtacttgtaacgtattaaatacctaacacctccctagtactcgtagcgacatgactttcgaaaacatccaattcgatcataagcgggcgcataaaaagatgtcttacgctgaatattt

SEQ ID NO: 11808 - DNA, 597 bp, Diabrotica virgifera
aaacacaaacagtaagataaaaatgggcaaaattgtgttattcttaggtttattttttacgtttttcgtggaagacggtacttccataaaatgttatgactgtcgatctgacgtcgactcacgttgcggagaagatttcgacaaggaaattcctgcacttgtaaattgtaatttgcggtataatgaaattggccaagttgtacaccaagacatttcttcctgtgtgaaaattattcaaacaattaatggtcaaaagataatactaagaacttgcaaagaaagcaaatggaactggcacaatgaaagcacttgtgaagatagagataaacataatgctttagcgatgtatgaatgtagaggtccagattgtcaacaaccaatgtgtgataactgtaacgccaactactgtccttgtaatgaggaaggatgtaattctgcttctaatttaaacatatcaatgcatattgctactttattaacaatattaacacatttttttcaaaaaataacaataaaataagttcttcagttgaaggaagcaagattatttcggcaaatgtttctaaaaaatctgaatgaagcttttgaaatatagat

SEQ ID NO: 11809 - DNA, 599 bp, Diabrotica virgifera
  SmartBlast Evalue=2E-12; Info=Coiled-coil domain-containing protein 115 n=1 Tax=Camponotus floridanus RepID=E2AGL1_9HYME
caggtcactaatactctgcatagtatccaacaactggttctgaatgtttaccgatttaatactccattgtaaagcctgtctgaacatcttctgtgcaaaggtaaggttttggggaactaacacaccaaaccacctcagaggttcttgaactgtctcatcttccgtctttttaatctctctcaattcatagctctttctgcccaatgttgtgtcacttccttctacttttagacacgaagaaaactctggactgttttctgtgggtaattgtaaagctgaaacattgttgtggcctaaaatatacctggattttgctaaatgtgactcgcccccagacatggcgttttctatgttcagtttcagctcaatttgttcttgaactaaaagcagggagtccaaagtgagtttatctaaagtctggcacactttgtcccaatcttgtggttcatttacttcgtccaagtcatcgtctgggtcactcactttttccaagtcatcttctgattcactcactttgtccaagtcctcttgcggttcagtcactttatccaagtcatcttgtgcttcactcacttttttaatgttttcttgtggttcac

SEQ ID NO: 11810 - DNA, 599 bp, Diabrotica virgifera
  SmartBlast Evalue=6E-43; Info=Lipocalin-1 interacting membrane receptor (Limr) n=1 Tax=Aedes aegypti RepID=Q16UA7_AEDAE
ctgtgcaagtgcgtggtgaagtgaaatagttcaaaaaaagtgttcgcgaatttgtaaaaatatttatcggaatgttagcagtttcacagttcgtgtaaacaattataaacatgattgaacaattcgtcttaaaaggaccgattttcacagataggtgaaaaattatggaagaatatgaagatgaaccagatataaatgaacaaatttttcacaacaacgtgagggagcaaattatatttctcctgctctttatcatcttatacgtatccagtttcgccttgctgtgcagattcaaacgacgaggcaaagaagactacttcagtaccgacgaagatgaagtcaccgtgtacaggatcagcacgtggctatgctctttctctttggcggtttctatattggcagtactactgttgcccatatcgatcgtctccaacgaggtgctggtcaactaccccaacagctattacataaagtggctgaattcgtcgcttatacaaggtttatggaattatgtgttcctgttctctaatctttctttatttatcgccctcccttttgcctacttgttcaccgaatcggaaggattcttcggtcatcgc

SEQ ID NO: 11811 - DNA, 597 bp, Diabrotica virgifera
cccatactgatttttggtgcaacaaccttatgtttaaagaagatgaagataattgtatatgcgcaattttagattggcaaatggtgacttatagtagaccaacgaacgatttagctctactgctcaacagcagtgttccagccgaactgagaagactacacaccgggtctttattggacggctactgggtatctttggtagaaacctgtagaaaactgaaattagacgtagagaacgaattaggttatgacagaaaaaaattagaagaggactttagaaagtctcaactgctagctcttttactatgcataggatccgtcgatttggccatcggtaacgcacaaatggaagagagattgttagaattgctgaaagatctattcgaagaaggcttgctcaacgccgatgtagcggccaaggctcaaaactaagtgatattcgatgctaagattttcattcttgtaatacgcattctttgaagtactggttgtgacttagcgaaacgaccgtcatcttgaaaaaattaactatcattttattaattatcataatgttttattgtagttatttagtggcttattaaatggttataaacgc

SEQ ID NO: 11812 - DNA, 596 bp, Diabrotica virgifera
  SmartBlast Evalue=2E-12; Info=Uracil-DNA glycosylase n=5 Tax= Lymphocryptovirus RepID=UNG_EBVB9
ggtgaagtatagtcaagttttattacttacacagttttcttcttctaatggcgcaacaaaccgttgtgagtcctgacatgatggacaatattcaattgtttaattttgttgttgaatcacgttatacgttatttagtaacagtaatatacctgacttatggaaacctctactgggatttatttttcggactcagcttgaaccgataaacctcatagaaatgattttacggtacgttcctccaactatttggtttccacacagtgataaattatggtctttcacaaaattttgtagacctgaagaagtgaaagtggtcatagtgggtcaagagccaagtgatagttatgctactggtctggcgttcagtaaagatgttggtacggggatttatccctcaacaaagaacattttagaagaagttaaaagtgatattggtgaagagaaccttagacgagaatttcgaacggattatggaaatctggacttatgggctaaacaaggagtccttctcttttcagctctaacaaattctacatatataactcatcaaggaataggatggaaatatattttacttgaattaattaaacagtta

SEQ ID NO: 11813 - DNA, 591 bp, Diabrotica virgifera
  SmartBlast Evalue=6E-40; Info=Endonuclease-reverse transcriptase n=1 Tax=Bombyx mori RepID=D7F170_BOMMO
aaggatgaagatatcagatgacttctacgacgacctagaaagagtgatagatacgatgcccaaacaagatatgcgcatactctgcggagattttaatgctaaaataggcaaagagcctagcctacaccccacaatcggtaaacatagccttcacaatatatccaacgataatggcttaagactcacagaaactgcagcagctaataatatgttaataaagtcaactatgtttccgcataaagacattgataagcaaacctggatctcaaacgaccatattacgcgaaaccaaattgaccacatcattgtagatgcccgacatgggaacaatatcatagacgtaagaagcctcagaggaatagacggagacacagatcattacttagtcacagcaaaagtaaaatgcagaatatctagccacaaatacaagaaaacaatgaacccacaatggaacatggacgaaatgcagaacaccgagaaacatcaaaaatatatagaacaacttgaacaaaccttgaactctgaaacagtttacaattatatagaaaagctgtgggaaacgactgccgaaataataaccaagacagctga

SEQ ID NO: 11814 - DNA, 594 bp, Diabrotica virgifera
actaaagctgcgatgtttggcaacaatgtttactttgtacacttcatcgaaggaggctgatatacaggaggcatctccacaacttgctcttatcatggttccgtctacttcagctaatggaatttccgtaagtcctcaaaagctgttcgtcattctgcacacgttcatcatccttctgctccttcggcatacaccaggttagaaaatgtttctatttcctgatttggagctgcgccagagatttgtgtttaaaactttttaatgttcggtaagagatatttcgccaattttatttgaaaaatcacaatagtggattggattagtgtaacaaaagactataacgtacaagtatttgtcaaatatttgtgataaatgtgagaatataagtccgaatatgcaataaaacagagacattggacttaaatggatgttacttggattatgtgtagttttgtagcgattcttaaatttaaaagcaggtcaacgatgtcgttgtgccaaattatattatttatgtttgtaaactagagttttatgatgaaaaatgtctgtttttagttttgctaataaattctaaaagggtcgtttcctatt

SEQ ID NO: 11815 - DNA, 599 bp, Diabrotica virgifera
atatgctatatgccccgtgttggcttaatccgttactgttcaaatttatttcttaccttttaacctaacaactattaaacaatggtttcgaattcacctgtataaagttgcgagttggtcaggtagaaaagttacgaattggccggtgtacattttgatttaaaaaagtttgtcattaagagttacgagttggcgcgtgtccgaaggtcaaggtcaaagtaaaggccgctattggatagccaggaggggtcctagactactagtgcttttccttgttccaagcttctgcatgttgccaaatagcctgtaactcgcggaattggaataccccgtaaatcttataattttccgagtggagtttctatatcttgaagatccttcatacgattgagttgtgccatagccatctttactttacaagccatgaagagaaaaaggcaacgtcgcaattgatgacgtcggtagtctgactttctgactaccgctttcgaaactctggtaaaatttttagtattttttgtcgaacaagaaaatattattaattagaagtttgtacaaaataatattaaaagtaattccttgtaagtaacgtttattat

SEQ ID NO: 11816 - DNA, 599 bp, Diabrotica virgifera
  SmartBlast Evalue=3E-89; Info=Glutamate [NMDA] receptor subunit zeta-1 n=1 Tax=Camponotus floridanus RepID=E1ZZB3_9HYME
tgttgcctcatacacagccaacttggctgctttcctcgtgttggaaagaccgaaaactaaactgactggtattaacgacgctaggttgaggaacacaatggagaatctgacttgtgctacagtgaaaggatcatcggtggatatgtattttagaagacaagttgaattgtctaatatgtacaggactatggaagccaacaactacgatactgccgaaattgcaatacaagatgtcaaagaggggaagctaatggcgtttatatgggatagttctcgtctggaatttgaagctgcacaagattgtgaattagtgactgctggtgaactttttggtcgctcaggctatggaatcggattacaaaaagggtcgccctggtcagacgatgtaactttagcgatactagacttccacgagagtggatttatggaaagtctggataataaatggatacttcaaggcaattttcaacaatgcgaacaatttgaaaaaactccgaatacgctgggacttaaaaacatggctggagtttttattctagtaggagccggcatagttggtggtattggattgattgttatagaaatggcatacaaaaagc

SEQ ID NO: 11817 - DNA, 599 bp, Diabrotica virgifera
  SmartBlast Evalue=5E-48; Info=Peroxidasin n=1 Tax=Tribolium castaneum RepID=D6WFS4_TRICA
tgtgttggggacgtgtttgttggaggaattttggaagatcagattgatggaggaaaagtaggtccacttttccaatgcatcttgatcgagcaattcaaacgtctcagagacggcgaccgtttttactacgaaaacccatcagttttcaaaccagaccagttagctcaaatcaagcaatttaatcttgcccgagccatttgcgacaacggtgataatattaccagaataaccagagatgtttttagactaccagaagtccaaggaggatacgttagctgtgacgagccaccaaaagtagatttgcgcttttggtacgaatgctttgcagattgtcagtattttgaaagatcagagagaggttgtcacgttgacttcagaactgaaagaaggcacatactggccaaacgggaagcgccacctggtgccttgattgggaacgaaaccgtcaacggcgaagaaataagtatgttgaagtctaggattagtgttttagaacaagacattaataacatgaaaaataatttgaaagagtatgatatttatgtaaagaaactaaaacaagatgctgaaaattaattttattttttttaatcgctcag

SEQ ID NO: 11818 - DNA, 597 bp, Diabrotica virgifera
  SmartBlast Evalue=2E-10; Info=CG8321 n=4 Tax=melanogaster subgroup RepID=Q7K0Q0_DROME
ccgagctggtaaatataagaatttttaacaaaacatgtcgcggccacggtacaatgtgcgtttctcgataagtccggataaagttaactccaaagaagagcaaacggtgtggacagaatggaaagtagctgtttatggattagtgatatcattattaattatagttgtgaaatttttcaccaattacggaaaccagttagaaaaaacattcattgaagacaaactggtgtattacaaagtgtggtctgaagatggacaagagatgtttacaacaacatggaaacatgctgccaaatacagtaatatctggttgccaatcgtatgtggtgttctgagctcctatttcacttggatgatggtttatttggattcgaatgagcctggcgtacaaccacctagtccgttctcgcccaaaaagtacaaggaacaatctggacatacttttcatctgaattatgtttttgccataattattggatttctagtcagtggatatatgtttatgagaggagtttctatagtatattgaagtgttgtataatatatttaggattcatgaaaaatgtttacacaaaactcttaatatatcatcacaat

SEQ ID NO: 11819 - DNA, 583 bp, Diabrotica virgifera
gcccatcaaagcaaataattgctcataaacaaacaatttttaatttatctctttgatttaatttgtaatacacattccgtttaagaataggagatataccaatttaatttatatggaatcgtattaccatgaggaacacactaaactatcatgacgtgacttcgtttactttattgacttgtttaacctctaatgttaatacataaatatcttaactaggcaaaaataattaaaacaccatatacggaatcagtaaacactttgaaagtgcttgcttactggagacacgttgcattgttattttcatggttaaatgaggtagataaaattaaaattactacaaacgtaagaaatgttttttgttaaagtatatgcagattatttgatcataaattacgaattgtaattagttatgtcaaagcttttaatgctggttaaaggaattttgtcaataaagaaggaaagtattagatacgctcatcttcatcatattattaattacacagacactgatagctttttaggtcacgttgaagcctgaagtagtaattaaacaaatcctttaaagactgtcgattatttt

SEQ ID NO: 11820 - DNA, 598 bp, Diabrotica virgifera
  SmartBlast Evalue=7E-84; Info=Yellow-h (Fragment) n=3 Tax= Tribolium castaneum RepID=D1LZK8_TRICA
ggctgtctaggattgtacggactaagtgacattccaaatattccgtcggtccattcaaagtctaaatgatgaaccttatatgcagctgctaaaggctcaggataaaataaatgatcagtaaccctccatgagcgcatcttagttaagctgaaaactacaattccgtatctccaaacatcggcaagataggcataaacattgtcacagtcatctcgtacatcaacaattatatttgagtacaaactatcttgcttgataaactcttctggcagctcgtatttcactaataactcgtcagtttttaagtcaaaaaccagtatttttggagggcaaacttgctgaggtttcactgtgacgtgtataaggccgctgtccaaaacccagagtcggccacaggtgtcagcatcaactctgaaaacggaggtgatgctttcgcatcctcctgaggtgtgccattcccagtttggataaggtactaacttcggcgacggttcttttggaactcttggtatcactgccaaagttgccggtacgcccggcttccattttggcatagatacaaatattcggtttccatatacctccacacctaatggaa

SEQ ID NO: 11821 - DNA, 600 bp, Diabrotica virgifera
agtaacggatgctgctcccgtaattattgaaacccctatccgagaatcagacttggaaacgacagaaagtgatacggatgaggaattctatgacatcgccccacacttgctggccaaaaagattctcgaagagaaacgccaacaacttctcgaattaatgggtccaaataatgttccaaacggctcatttatagaaagcacaagcaggccacctacgccacctccagaagtcgtagagcaggaacacgaagaaaaaagaaagaagaaatcaaaatcgaaaaagaaaaaaaagaaggagggcagagaagaggccagcagaagttatcgaggaagttacaaataatattatctcaccagatatacccattccaccgtattaccaacaattccatcagcagatccaacagcaacagcagctgcaacaacagcaagaacaacaacagcaaatccagccgcagccgctcactgtagctccaattaccttgacaattcctaaaacttctccaatatctagtccttcagcttcagtgtctacgccagttcaaacagcaccttactctaaagtacaaactgagtctctatatagtaggcgagattcgt

SEQ ID NO: 11822 - DNA, 599 bp, Diabrotica virgifera
  SmartBlast Evalue=5E-34; Info="Solute carrier family 2, facilitated glucose transporter member 8 n=1 Tax=Zea mays RepID= B6U615_MAIZE"
catttgatgggtcacattaccaccagatttttggaaaatgaattgagtgtataccaggaaaacacccataccagatgtttgctgggtcaacctcagaaagagaccagcaacaaaagctcttctgttgcttttgattttaaataaatcaatccagtttccagattctgttagctgtctttccacgtcttccctcagctgtttgaaatctccatcaacgttctgttttctctttaaaaactttagagactttttagcttcgtcgtatcttcctttcatgatgtaccaataaggtgattctggcataaaccaaaacaaaacgacgaataaaataggtagaggcatgcaaataaaagaggtcatccgcactccgcagtagctaccgatgatgttgatcaaaagttctcctataaacatagaggtgggtaaagcattaccccaagtaccccttatgtccggatgggagatctctcccatgtaaatgggcaatactgaaaaagaacatccattagcagctcctgccatgaaccttgctatgtagaagtgatacttattcgtggcaaaggctttgatgatccaggctaacatatgcgggatagcta

SEQ ID NO: 11823 - DNA, 599 bp, Diabrotica virgifera
tgtttttggttcacttattaatgggtcaaaaggtaatgtagaatggaaaaactattccaagatagaagtatatggaaatgctatacagatcgacgtgttgcccctcaatgagtctatatatgtcggtcaagtacatgtttcggataatattagcgatgctcaccttccagctaacataatcataggagaaaactacaccagagtgactttaaacaaaaaactgctctttgtttttgaagatataaaaatcttagtcagcaacaacaaggacaaatttggttggaaatttaccaacaaggacaacttatacaaaaactttgatcaaaaggagtacgttccgcttcaagtaggatgggagtataattcggtagaaaagttcaacgcttctatatacctaggaaaagcattgatccctgcgttgggtggccattttataggaaaggtctataagggacatccggacgaaaaccgaaatggtggattgtggattgattttcctgatgaggaatatccgtattggttaaataaaggaaattttgaacttgctgttttatacaaatagctttttaaaataatttattgtacttatgtatgtgtat

SEQ ID NO: 11824 - DNA, 589 bp, Diabrotica virgifera
tattaatctattaaatgaacctggagctgcaaagacaggtgatgattatcagtactgtgtaactactatggctgtagcgggaccagaatacagcaagtgttcagatgagagcattttggagaaatttaattataggaatattttggcaggaaactataactggaaccttacagttatgcccatgatgcgtaaatatcaatcatacaattacgacaatccaacccaaagtccatctggtgaattgaatctaccattaacagccctgataccgtgtattgataatgcgacagtagtatgtgctccagagctagtcactatctgtaccggcttcggtgaagtcatgtgtataaaacctctaacagctacttattgcgagcagtacaatactacatgccagacgagccaaatagagtgtcaggaaaacatcgaacaagatattttgtgccaaaacaaaacagaagaagaactagttattaaagaagagaaaaagtttgtcaacgtagagatgccctttgccaatgtaacactaaacaccaatttgcctaattttgatattacaacgttcaatggtaccattccagcaagcgct

SEQ ID NO: 11825 - DNA, 593 bp, Diabrotica virgifera
  SmartBlast Evalue=7E-31; Info="CG8889, isoform B n=6 Tax= melanogaster subgroup RepID=A1Z8S4_DROME"
tgaaggtttgagcattagaggcacatggcttaaacctataaacaattcgtcagtattataaaagtccctcgttttcttatatactggaatgtcagaaatcaagcgatttatcttgaaaaagcttatgtttctaaaagtaataaacttcggctgggagaacgcttgttcaaatctgtcaatcttttctttggtgaccaaggtatcttcccctccaatatcattatcgcctggaatccagatgtgccttacaattgaacttgaagtagtatctagaaatatatcaaagactcttctaacatattgatgaaattcgtaatttgtagctcgatgaccttcgtccatcaaatctccaagaaatattactatatcaggttgaacaaaattatatgcttgtatatacgtctgtttcagaaacctgtcactatcaaagatagtaaatggggtcaaaaaatgtaaaatttcttcattatttccaataatttggggatctgctactaagagtattttagtacatttttcttgatgtttacattttaattggtgccaatttagagtatttatgtaataagaaaacaattctatgtaaattacac

SEQ ID NO: 11826 - DNA, 591 bp, Diabrotica virgifera
cttatcgtgttcaggttttaatgaaattagcgcgattatttcattcataggagatcctgaccaatagaaagctacagaaataaaaattaaagtgataatttttgataatttcccgtcgtcaagttgattacgtcagatacccgtcgttgctatgaaaaaatacattcagtgacattaataacaattaatgtttttaaaattataaaagtgatgaatttcaaccgtcaaatatttataacaattgtgtgtttaattgtactaatttgtacttacgtaaataaattacaataaaattttggttttgaacagttttattcatgaaataatcgcaacaaattgcactcgatctctaaaattaatacagaattttagagctcttgtgtaattgctactgataattcaatgaaataaaattatttaacataatatttaaaagtcaggtcagtagacaattacactggttttgaatcgtcgtcatggaaaccaatatcgtcgccgtggtaacccattatattgaaagtttggttttgacaaccttgtcaaaagaattaatttgtgtattttcacttctaaataaaaattgatataact

SEQ ID NO: 11827 - DNA, 599 bp, Diabrotica virgifera
  SmartBlast Evalue=3E-19; Info="F-box/WD-repeat protein 1A, putative n=1 Tax=Pediculus humanus corporis RepID=E0VMR7_PEDHC"
gcatgttttcgtttatttgatttcaaatatacctcatttaaaatgccccatataatagaattaatataaaaagcatattcataactgacacaataattttaaatactttttcttctaaacaattgggtaaaacgtataaattgattttccgaaaagaatatatcatttacataaattgcaaaatgtacagattactagaaaattaagttcaaattaatttaggtatatccaagaagagtttcatagtcaccattacttgcagacctcattcaggcattttacagatcgttgtcccatcttgagacacactgaaaatcacgaataaatataattttatttgtctatacaaccatagttaacgtttctgttttgaagattcactcgtacgaattaaacggtgatggagatttaggctcactagttttaggtttggggtcgggtacagaattcaaaaagtcccagatgagaatagtgtcatcatgcgaactactaactatctggaattcgtcaaattgtagtctgaaaacacgaccagtgtgttccactaagtaccttaaacataaagaattcgtcggcgccctaggatccaacgctgccaa

SEQ ID NO: 11828 - DNA, 598 bp, Diabrotica virgifera
aatcttgttcttactgacaatcatgatttttgttttttttttgtgttcagggccatttcatacctctcgcagtactgcgtacgcgtagtgcgatcaaccaaaatgtgcagcccttctctgctgtccgcaaggagtattgtatcgtctgcatatcataccagaagaagaaccatacttgacacaaattttcacttcgtttgacctcgtagaggaagggggttatgacgaagtgtacaaaggtacacacaaatacgaaaataaataataatatgtagtctcccgtttttatacagctaaagcgactttgggattatagcaaggtagtctgctatatctagggcttgcggtatacaaggaaggtaacagggccagtgctacgcttcaaccgtctattattacccttggttttacccaaggtactcattttattcaggctcagttttttataagtttataaataatcattcagaagttttctcattcattgtaataaaaagaggtcttcgtttacagaaaaatgtaaggattgtttatgtatgtgtatattgaaatgtgtttataatattttaacattactcaacaaaatgtcttaattatt

SEQ ID NO: 11829 - DNA, 593 bp, Diabrotica virgifera
ggggcccgtccgggcccggtctgaaattatgtaatcccaaccgatatttttgttgtcatcactggcgatgcacgaaaatgacacggatcgcacggacttgtatatcggtattttccaaaatgtaagttgcttctcaagacggtatttaattttatccattaaaatattaaaagagtactgcgacattctaaaatattcgtgaaattttgtttcatcgtccactaattctcggtatattttgaattctccttgagtttgtctttttttccatatatgatggacactccatcttctttgctttcgccttttctgctcttgctcttcctcttcatcgagtagtaatgccaacacggtgagatcttctatccaagccgccatattttcaactatcttttacacagatatgtaataacgttttcctctctaattcggcccggtacgcacactgccacaacccggtcgtatgtaaatattgccttaaaaatacccggactcggcactgacccagaacggacacggcccgggtatgtataaatgggccttaaatctttgtattttgtgccaagatttttccagttaccacatggacaatt

SEQ ID NO: 11830 - DNA, 593 bp, Diabrotica virgifera
  SmartBlast Evalue=1E-74; Info=Myotubularin-related protein 2 n= 1 Tax=Harpegnathos saltator RepID=E2B9S6_9HYME
tcctcatactgggattccatctacaataataagtcttccataacctaatgtgtctaatactagctataggtaccaaaacaacttgctgcaaaggattcgcccaataaagtgggtttctgtacagattcaaatggctgttggtgtaagaccacagtgatatggtatgttctttaactttctctacaactctttctctttcgctattaataaaaatgtgccgaatctacatgaatacaaatggtccaagatagttataaggaaagattcgttgaattcaaaagcgtttggaaactgttgcgttacttgccacacgcagtctatgaattgtaaaaagatggggaacggtcagcgtctgaatggtggtcatctccatggcccactctctgttggaacttgtggccaaacgacatccattccttttcgattaatatttcaaatcctttgattgttctgtagaacggatctagcaataacatcgcaagggcagtcaactgggcggttcggtcccaaccatcggaacaatgaactaagactgacgttttgtggctctctaccttatctactatacgcaatgctccggctaatatacattt

SEQ ID NO: 11831 - DNA, 587 bp, Diabrotica virgifera
ccccggacaaacttttttagattctttgggtcattctgagcaaacaaggtctcttgtgattcctctccaagactgattgttgtcaagcaatacgcgattcaaaatttgaaaaacgcgaaaatgggcattttcaaggccttaataactcggttaaaagcagtgatgtgggagggaggggatgtgacatgaggtgaagtagatgggatcgctttcacgggctaaatggggaaggcaatatggcggaacaactctttggcagtatattctgttctatataaagtatataattataaattgtattatattatatatatatatatatgtatatatatatatatatatatatgtgtatatatatataggtacacgaacataatgttggaacaagcagtagttctgcgaataaaatgccaatttaccgaaattcttttatttattcatttttttaattgtaattatgaaattggcaaaaatttttaggttaacagtttatatagattttatgttgattactatttaattaattgtttgataaccgaataaagaaacagaatcaccctgtatatgctattctcatacattttgag

SEQ ID NO: 11832 - DNA, 593 bp, Diabrotica virgifera
  SmartBlast Evalue=3E-47; Info="Spore germination protein yaaH, putative n=1 Tax=Pediculus humanus corporis RepID=E0VQE2_PEDHC"
acacgatgtagacactgagtggatagctgctgtaaagaacgctggtagagaacggaagcttaaaatagtgccaagggttttattcgaagcgtggactagtggtgactactcaagcttgttatcaagcaaagaagaaatgaagcagttccttaaagcacttgttaaagctgctgaacaatacagatttgatggatatgtgtttgaattttggacacaattgggaccagtgttaaaattcgacatcatagttaatttcgtaaaagctatatgtgatggtttggcattagagggtttacagactattttagttgtaccaccaaagacaggaaaagatgatatattcacagacaagcattttgaagctttatatgaccatgtagctgctttttccttgatgacttacgatttctcaaattatagacaaccagggcccaactctccaatacaatgggtagacgattgtatcaagttcttgacgaacgatgaaaataaacgcaagaagatccttacaggcctgaatttctatggaaatgactacactgttaagggaggagacacaattgtggccaaccagtacatcaatagactggaaa

SEQ ID NO: 11833 - DNA, 592 bp, Diabrotica virgifera
ttgtgttatacagtttttttaatataaattgctatgaactgttgtgtataagttattttcttatacaggtacatattctccattattttgagtacctatctttccgacaaaaaattatgaaaatttctaaatttttggttatgataaattttgactcatctgcattcaaaattgacacgcctcatagctatcagacaatattactgaatcatatgcgtgttgtttttgtctcattttatcaatatgttttccgcaagacctctagaccatttttcaatatatattctaagttgtttctaagttttaacttactcaaatattattaagattgataatatttttactttattttatatagattactttgagattaaaataaaactacttttctggaaacgatgaatacatgttaacaatctggcgattggtcccgaagtcgtcaaaagatatatttagcctgttacttttagcaaatttctgtttatgtactaaaatttaaaattttactacctatgtgaagcccctatgtagtctgtatattagttttattgtgatatttattatttgtataagattatttacatttaaataa

SEQ ID NO: 11834 - DNA, 598 bp, Diabrotica virgifera
  SmartBlast Evalue=3E-69; Info=Zinc-finger protein ZPR1 n=1 Tax= Culex quinquefasciatus RepID=B0WNF5_CULQU
tggtatgccaagggaacaagtatcagatttcagtaaatctctagagaaatcttccttattttttatatcgacttcaattttaagaccttttggttctattccacctcctgatttaacttcatttgttttatgcccacatgcgtcacatgtcgttgccataatcactacctctttaaagtgtggaatatttgtcattttcatattggtatgacaaggtgaattacaggaaggacaattcgttggaaattgtaatacttccccttgtaaatcttctaacgtaaattcaccttcaggaataggatgcagtataccactttcctccttgcctgttatttcactttgactaaaaagacccaattcgtggtcttgctctttggtcctgataaaatgtgtagttgtacaggagttatcaatcctgggtgcatttggattctctataaagctatttccagaaatatcttctagtattaacgtaaatggagtttttacttccttcagttcttgtaatttctttataaactcttctatttgctctgcagcttctggatgttgaattttcctaacgggttgatcttgctccaagcctgttatactccta

SEQ ID NO: 11835 - DNA, 599 bp, Diabrotica virgifera
  SmartBlast Evalue=7E-15; Info=Endonuclease-reverse transcriptase n=1 Tax=Bombyx mori RepID=D5LB38_BOMMO
cctgtttgttacgtgttgtgtccgtgatattttccacattctttgatatcaccacatctcgctggcaagtcctttcttcagttgcgactgtaattatccaggattcaactccatataaaagggtaaaggatacgtagcatctctatactctagttctaatttctatttccagttttccattgcatgatactgcttccatcttattgaaagtggttctggccgatctcattgcgtcgttttactttagcagtcccattgttcatttagcttacattccaagtaattgtatctgggtactttctgtaaagcttttcctcaaacgtagattatttcgtctttaatcctgttcttactgacaatcatgatatttgttttttgtgtgtgtgtgttcagagccattccatacctgtcgcagtactgcttagtgcgatcaacccaaatttgcaggtcttctctgttatccgcaaggagcattgtatcgtctgtatatctgaggttattcattagtggtccgttaattgatatgtcttctttgatttcttctagcgccattttaaacatctcttctgtgttgtattttgtcgaaggctttctcaaag

SEQ ID NO: 11836 - DNA, 598 bp, Diabrotica virgifera
ggtatagtggtgaaatgcgagaaattggttcgtacatagatgaaacggccaacttcatttgggaaaatttcatgaagacactaattcaaggctacgtcgaaaacggtatgcagcaggtggctgcagaagtagctgagagaaccctcaggaatgccacgcaaacaacagtaaatggtggtagaaaagatgcatgattagtaccttttaagaaaacgcgtaaattattgaaaattcccaatgctaccgctacgttacatatatcctcgaaattaaggaaaaataccgtacctaagtactatctgtaatgtattgtatagaatggattgttaaatcttgccatcttcctttcacttctatgtacagatttgtagccttgcgtgtatgtatatatgtaacattattttattattatattgtgatatcttggcaatgttggtattagagtaaatctttttattatttattattttatatcgtatacgtttttttattttaatagaaatttctttacatctgacaaaaagacaacaagtatgcatttatctaaaaatataatgctagttttctttcagttttgttaatatcattatctttacgt

SEQ ID NO: 11837 - DNA, 594 bp, Diabrotica virgifera
caatgacgtaggatgtataaattttatacttcatagatcaggtaaaacaaatgagcagctattaatagccctatttctatatccttcgtaaagtaatccttcgccagtttggtaagacttttcgttgatctgtatattgtgaacatcgacaatgtgtcccaactgtcaggtttaaatcttttttactaatatgactaaaatcgttttaactctaaaacttattcgtttcatgacatttctagaggtaagttacatatttccagatattataaaaatatattttatattaatcaaaccacgattgcatctattgctcaaaattttttaaaatcatttgagtattcaacgcaattttgtatttacttcttatttttattcgttataactatttcccgccaaaaagaattgtatactactggtgccatctattgccaagctactcctttgttatttcttattatatccaaggaaacagagaactaaagatttcttacgctgaagggcaaattgtggttgcaacctggattcgagccttctaggatttacaaggcaacggacgagtaaacggaagacatggtgaatctatgatatgca

SEQ ID NO: 11838 - DNA, 598 bp, Diabrotica virgifera
  SmartBlast Evalue=3E-57; Info=Putative cuticle protein CP6 n=1 Tax=Leptinotarsa decemlineata RepID=B0ZYQ2_LEPDE
aaaatggattggctaaggatcagtttattatgtatatgtatattcaacatctatggtgcaccacagggagagaaagaagttaaaattattagtcaaaccaacgaaatcgcccctgacgggggatatagctggagttttcaagctgataatggaataaaagctgaagaaacaggtaccttaaagaaaaccaacgatccagaaaatcctcaagttatcactgctcagggaaattatgaatacactgacaaggagggtaacaaaatatcactcacatatgttgctgatgatgagggcggtttccaaccacaaggagcccatttaccaacctctccccctattcctccaaatatacaaaaagcgttggactggatagcatcacaaccatcaacgactgaaagaagtggaagaaagtaaattgcagcatgttgaggcttaaattaaacacccccgttgtataatactctgtgataaataggtccccttttccatgaaataggatttttttaccgatactggattgttttgtgacttggcatatgagttaatctatagagatatggacatacaatttcattattattgtcctaatttttaatag

SEQ ID NO: 11839 - DNA, 598 bp, Diabrotica virgifera
  SmartBlast Evalue=4E-24; Info=MDL2 n=16 Tax=gambiae species complex RepID=D3KAA7_ANOAR
gcaactcagtggtctaggtagtactcggtagtttattgcctgactaagtgataaggtgcaaaatgaaatacgttttgattgttgttttatgcaccgttgctgttgcatacgttgcggctacggcagtgaaagaatgtcccaacaataaaaacggtttaagttaccctgatttagcagacagggtttctcttcacaactgtaccaaagctccatgcagagccagaaaagatagctttcaaaaagttgaatacaaatttacaccagataaagattacaagaacctccatacaagagtaactgctgaaatattgggtactgctctacctttccctggagttgatggtcagtctgcgtgtcccaatttatacgaggaagacaagactacgaaagtaaaggattgcgaagttaaagcaggaaaaaactactattacaaaaacggttttgaggttttaagaatttatccaaggataaagaccaatgcccattgggaactctatgagccaaaaacttcaaggaatattatgtgtttcgaatttttggtccggataactaattagtgatattttgataacctacattaaacaataaattttttatt

SEQ ID NO: 11840 - DNA, 597 bp, Diabrotica virgifera
cgttgatgaagtatattcaaagttgaatactatacgagtattcaagttgaatatttttttgttaccgaaagctctattattgcacaactatggaatggaaaataatcaccatggctataatcctgtttcaggtttcatgtgtttcgccagcagtaataccagaggaatataatagtcaactccatagtctacatgaagaaatcgtaacagaaatcacagaattttctctaattttagttaacggcaaagataggttgaaatcaattgtctacggagctaaagaatcacttgagtctgaattagaacaactcaaacaatacatgagagaaaccaaggtggatgcagcagatgaaaataaagatatttctagttgcttagatgaaaatgttttagatacgatagacataagtaacatagatatttgtgatcaaatacctttcacacaacgcattgaaggtatggccaacgatttagatatcagacaaaaagagttttattcggatatgaacagttgtacgaaagaaaaaaactgaagaaggtacaaatgactgtttggatgggaaaatagacgaatggaaaagaaatctcaaatcgtgt

SEQ ID NO: 11841 - DNA, 594 bp, Diabrotica virgifera
cgatgtcatctttgttgacgattcaacacccaaaactaccgctacaaccgtaacaacacccacgcttcctccaggcctatctctcataaagaagactcaggctggtgtcctgagaaccaatagtccgagtacaacttccgtagcaggtcctagcggagttaccaaaactattagagctactccttccaaaccttctactagtgctggtaatcaaggtaaaggaggtttcctgagggtcaaatctttctcggcgctgcaaagtgttacttccgagtgcatcactatccccgacgatcgttcagaagatggagatggagatgcagatgtgttgccagttgaagaaacggatcccctccaaatggttgaagttgtggatgaggaagcagcagacaaatcaaaggaagcaaaagttaaagatgaggacgatgacaaaaaaggagataaaaggacaagagtagtaaagaggacaagagcagtaaagaggacaagagcagtaaagaggacaagagcagtaaagaggacaagagcagtaaagaggacaacagtagtaaagaggacaacagcagtaaagaagaaaaaagtgatgaagaggtt

SEQ ID NO: 11842 - DNA, 598 bp, Diabrotica virgifera
  misc_feature (553)..(553): n is a, c, g, or t
  SmartBlast Evalue=5E-83; Info=Negative elongation factor B n=3 Tax=Culicidae RepID=B0WYZ6_CULQU
caaactgaaagaactattagtgaaaagttttcctgtaataagggttaaagctatgagacccatcgttatggctattttgaaaaatattcctcagattgaggaccactatttaaaagtcttagttagggatagagaactatatttagatacagatacagaagtaaaaagacagatatggaaggacaatcagtctctttttggagatgaagtatcacctttactcagccaatacattagtgagaaggaaaatgtactatttgatcattcaaatttagcaacgcagttttttggaccttcaccaaaggtaagaagacaaggagaagtcgtccaaaaactagcccacatgataggtaacagcgtcaaactgtacgatatggtacttcaatttttaagaactctctttttaagaactcgcattgtccattattgcacactacgagccgaacttcttatggcacttcacgatctcgaagttcaagatatcatttctatagacccttgccataagtttacttggtgtctggacgcatgcatcagagagaaaacgttgacnttaaagatcgagagagttacaaggttttttggacaatgtgaaacg

SEQ ID NO: 11843 - DNA, 594 bp, Diabrotica virgifera
gtacactgaaataagaacacgagaaagacgtgaaaaatttgaagaacaacgaagaaaggcagataaaatatgcagaagaaagaagaggagatacgaaaacgaccaaatactaagaatggaggaagatttcaatcagggtgacactagaggagcatataaattcgtgaaacaacttagagagagagatataaaccacgcactaatctttttagaaatagcgaaggacaaattatcagtgacgacgcagaaataaaagtaggttgaaaattttttttcgaggatctacttacagagcaagtacaaacaaacacagcccatacagtacctgatgtcgagatagcagatcagaattaaataatgaactgacaaattcacccacaagacaagagatattggatgccattaaagcactgaaaaataataaagccccaaggattgcaatataccagctgaaattctcaaaattggaggacacacattgatagatagattcaataaactagtaagagacgtatggaacacagaagaaattccaggagactggaagagagcaattatatgcccagtccacaaaaaagggagtcaaactgaggt

SEQ ID NO: 11844 - DNA, 598 bp, Diabrotica virgifera
cccgcagaagctccatataccaactttcagacaaatcaagagatccaaaattatttttgctccaaaattgagtgatttgaaatggaatcacccatatacattgtggccttcaatgtgttaattacataatgaaatacatggaatgcacatactaagaatatgcaagagaaaagtattattaataataatacatacagctttgaggaagctgagaggtttaaatatgtgaaggttactaagaaatacatgctatcaagagggccaaattaagaatacacagaaaggttattaggactgtagtagctatgcatcacagacatggacattaaataaaaagcaacaacaaatggtgcagatatgggaatgaaaagtaccaaggaaaatattttgaagaaaaatggagaacagtgtttggatcagaaagagaaatgaagatctgagagttataatatgggaagcccatcatactgcggataataaccaataaataaataaatacccaataactaagatgtctagaaaacatacagaagatgctagaaattagaataagttgaaaattaatataaagatgatctaaaaaaactcaacatcacaa

SEQ ID NO: 11845 - DNA, 597 bp, Diabrotica virgifera
ccattagaagaaaacaatagaaaaaatgttgaggaaataaaaatagacgctgacatagatcaaaataaagatataactaataatctagttgatattggatattcaacaaatagcaatgttgaaatagtcaattctgagcaaacaaatgaggaaagagatacaggatgtgacttagttaatgaaaatgctgttgaaatcactcctcattatgcaagtaatgccgaacaaaacatatctatgtttgaggctatatcttcagaaaaagttgcctctaaagatcaaacaaaacatactcaaattcctacttctagtgcaattgagattactcaggccaattatggtgaaaatatctctcaacatatagatattaatcaagaaaacctgtcaatatctgaatctaaagattcagttagcgaggtacctgaaagttcaacaaagcataaagaagaatctaataatcaactagatttaggtgtaaacaaagatggaataaacataactaaaactaacattcaaagaaatgggtccaataagaaggaagatgatgcacctggcagttcaacacagcacaaagaagaagttagtactcaactagat

SEQ ID NO: 11846 - DNA, 597 bp, Diabrotica virgifera
  SmartBlast Evalue=4E-39; Info=Cathepsin L-like cysteine proteinase CAL1 (Fragment) n=1 Tax=Diabrotica virgifera virgifera RepID=Q9GU62_DIAVI
cactttacttattagaatataataataaataatttgggtaaaataaggatttagaatcatatttatgtgtttatttcattttaggcttttttggccactttttaaatgtgtgtaggtaggggctcttgaaggtcaaaacttcatcgtcaacggcaaatccgatctacttagtcctcaagaactagtagattgttcagatgaatttttaaaaagtgactgtgtaattggaggagacatgcttgcagcctttgaatacgttaaacatgagggtcttgataccgaagagcagtatccgtatgacgaccataaattgtcatgcagagcaaaaagtcccaaagcaattcatattgatggatataaactattggctcgcgatgagaatattattaaagaagcagtcgctaccgttggccctgtctctatggctctaaattcttcaccgctccgtttctacgcaggtggaatagttgacggtgactgtgatcctgatcctgaagctattgatcacagtgttcttattgtcggttatggatcagaaaatggcgaagattattggattgttaaaaactcatggggtagttcatttggtgagaacgg

SEQ ID NO: 11847 - DNA, 597 bp, Diabrotica virgifera
  SmartBlast Evalue=6E-11; Info=Drosomycin n=8 Tax=melanogaster subgroup RepID=DMYC_DROME
aaataagaaaatgaagggatacttgattttcacacttttgttgctacttacaatcggtactgagattgctttcggtgattgcctgtcaggaaagtacagaggaccctgcgctgtttgggataacgaaagatgccgaagaatttgtggagaagaaggaagagtttcagggcattgcagtgcaagtctgaaatgttggtgtgagggatgctgaccctaaactggatctacccaacaatggattgaaggttttaaatttatatctagtaatcttttattagtaaaaattttgttttaattttttgtatttctaaatttttggtctatgtaagtaacacttctttaatttgattaaaatgtttgcattaaatatttttttcttgttaaactgggcagattatcggagaatagaccatttttggggctgtacttatgttataaattgatgcgccagtagttaaaggttaaattgtctacgcaaaaaattgaagcgagcaattaaatttagtttttatgctctttttaaatttggagacgtattttgaaaattttaatatacagggtgttgtttcaaggtcacaattattttaattttttttt

SEQ ID NO: 11848 - DNA, 597 bp, Diabrotica virgifera
atggttttactgagaattgacaatgagataacatgtcataatcacatacaattacattttacagatttttttatacatctcacgtatttcacatttaaatttcatttcctattacatggaattttaaaatccaattaaatttcacagattttttttatgtctcacgtatgtcacattaaaatttcattttgttttacatcgaatttagttggttcacaaccaacattgtgcaatttttaatagtgcggtatctgtcaaaaatcttaagtcatacttgaaaaccttcgacactttatatatttcaaagcttctaaaaatcgcttatgaaataatgaataaaaacggcatatttcagatacaattgacacaaattaatcaaaagagaccactattaatgttttaaaaactgattcattcacattgactcgattgtcacccaacgggatgttcacgttcacccagtcgttcatagacctaactgccgcccatgacacagttaaccatcaactgttactcgcaaaactctacgaaactacgaggatttccgacttacaaggttatagtccaagaggcagcgctgaaaaatttctctgaatt

SEQ ID NO: 11849 - DNA, 597 bp, Diabrotica virgifera
  SmartBlast Evalue=5E-91; Info=Splicing factor 3A subunit 2 n=5 Tax=Apocrita RepID=E2AVG6_9HYME
gctgcaaatagaagatactgccatttacgatctggtggttcgattttttgttcataagctgacataaaacggtgacggggtagaatcatatcacttatttctggataatcaatctggaacagaagactctgttgtccactttcggcatctctttgtttcgttactctataaccaggtcgaccaatcttcacaaacttcttaggttctactctgggtttctctggttgcaaaagcgtaggagcatccttagcctctttggctgctcttctagctaaatttgcctgatgttttttaccctgagtatgggctaagtaacttccttcgttgttgtgcaacgtcaaacaaagtttacactcgtatgagcccaagtggtttttcataaaatagggatctttttgtagatctatagtttctaaagctagttgtcgaagcctttctctacgatccctgttagtttccgaccaagaggcgaccccgcctccaccggtctttcctccaggtctgttttggaaatccattattctcttttattaattatttattcacatcaactaaaaattaaatactaaacattaaacatagagccttaagaaaggc

SEQ ID NO: 11850 - DNA, 598 bp, Diabrotica virgifera
taataataatttatttataatatttagtacagtctttttgcatttttattgtcaattaaggtctagcattaaaatttaaatatacgcctgcttcaggttttgtatttccaaagggtccaccgtggtgctgacttagttgtcctgtcaaatcaatgttaagttttttatcttgaacaaagttgtatttaactccagcattgagatcagtaccatatccaggagtcctgtctgcgcccacaaaggcagtagtttttgttggcttattagtgtattctaaacgacctccaaaagaatctggtttcagtccatgggaatcccaagcttttgaaccagtgtaagcaccgtcaaatttgtgggcaccattttcccagagatttcctttttgaccaagagtgtatccattttggttggcgccccaggttaagtctctcctttctctgtgtactggaactacaagatactcctgtccactctcatcttcaatgacatccaatggaagggatacaaccacggcaatgcaaaaagcaaagataactagacctttcattgtgaaatataactttcttaattattgcttaaagctgctattgaactgata

SEQ ID NO: 11851 - DNA, 598 bp, Diabrotica virgifera
  SmartBlast Evalue=2E-11; Info="Proto-oncogene tyrosine-protein kinase abl1, putative n=1 Tax=Pediculus humanus corporis RepID= E0VZT3_PEDHC"
ttggaagccatgggggtagcatatattgcagaacctgccggtcgacttataataggcttcaaggctttacagcgtggttttggtgggtattaaaggtttatcttcgtttccaggaggccacgctttcttatcagtcttacttaatttgaatgtgtcatcagttatttctacgggattttcgattatttcttcggttttgcttattttttattgataattttggacttagctgaacgttccctaccatatctgagctgtctttaggctcccaaagcttttttaaactactaatactacctgtactcttccttttgtcatcactatcatctagttttaaattcccactatctgaactcgccgtactttctcttttgttaatatcggattcgttgtcttctctgtcttcagatttcttgtcgctctctacttttcgcagccttgatttaaaatctataataacgggagcgtctttctcagtttgttctttggtaattgtttttttagcgtctacttttttgagctgggagacgaatgttactccgttattcgttgttaaatttccttgagaattctttctacctacgctaatctctacatc

SEQ ID NO: 11852 - DNA, 597 bp, Diabrotica virgifera
  SmartBlast Evalue=2E-27; Info=Eukaryotic translation initiation factor 4H n=1 Tax=Bombyx mori RepID=Q0ZB75_BOMMO
ggccggtcgcagcggttatgatgatagagacaacagagattatggtggaggccgacgaggaggtggcaatacaggaggcggcagaaaaccccttcctactgaacctccttttacagcttacataggcaaccttcctggtggggtcatccaaggagatattaatgttgtttttaaagatttgaatgtcaagaatataagacttgtcaaagataaagaaaccgataggtttaaaggctttgggtatgtggaatttgagaccttacatgatctagaacaagccattagcatgaatgtagaggttgatggaaatatactcaaaatcgatgttgctgatggcaaaagaaacgaaagaggcggcggttttgacaaaggcggcagaggtggcggtagagggaacagaggcggcggagccggtggcggttttaggggtggcgagaggtatggtaatgacgattttgaaggacggcctctttctagagggaacttcaatgatagagataggggtggccatagaggaaattacggtgacgatggacacagaggtgactggtctcagaataggggacgtggtggtaaccaaggtggcagtggtggagg

SEQ ID NO: 11853 - DNA, 597 bp, Diabrotica virgifera
taaattctggtttatcgtcttttttcttcttgtttttattcggttttttgtttaagagctcatttaaaagctcgagctcttcatcatcgtcactagtaaattcaggtttatcatcacttttctctttattcttattagttttcaatggatttataatgttttcaatgtctatgttgtttttatctaaaagattttgcattttttgggaaacgataataggtttttttaaacacaccagggtcatctatgacttttttggcaagtcttttttcttgtctatctcgattgtcatctatgcaaatttcttgaagagcagtaggactatacaacctcctgaatcttcttcttggttgagaatcaggtggaatactgacgtcaatattatttacatctgtcgagctcattgttctccgtaggatcttttcatcatctctttttggtttaacagccgaagcactgatagtctgtcttcttgtactagctttaacaggtgttgttttaaccttctttgcaggactaccttggtcgttagacgaaacattttctgtcgttgatggtgccacagtttttcgacgatttgctctagatttgggttca

SEQ ID NO: 11854 - DNA, 586 bp, Diabrotica virgifera
  SmartBlast Evalue=9E-44; Info=Protein kinase C inhibitor n=1 Tax=Bombyx mori RepID=Q2F5W9_BOMMO
ggggtaaaatatttaatatttaaataaacaaatataactaaataaatagtttctatttatcctggcggccagtccatttgtctccctcctaaaatatgaatgtgcaagtgatacactgattgacaaccatcctttccattatttataacgagtctatagccatttggtactttcttctgtgcaagagttttagctgtgtatatgagatgcccaagtagttctttatcagttgctttagcatcatcgagccttgggatttgctttttaggtattactaaaaaatgtactggagcttgaggattgacatcattaaaagccaaacatttatcatcctcgaaaattatatccgctggtatttcttttgatataattttatcaaatattgtgccttttttagcatcgtaacttgcactttgagattttttaacctcggagctcatttctctagttcttaaaatttggtgacagcttgaaatgtcaaataatttccattttacgttttttatggaattcttcaccaaaaaagccattcttttaacacaaaaatattcaaagcaaatcttcaaaaaaaatcaaaaaaaatcgg

SEQ ID NO: 11855 - DNA, 596 bp, Diabrotica virgifera
gcatgtatgcaatcatcaagcgactacgcattgatgcaaccatcaagcgactacgcattgatgcaaccttccaccacaacagctgaggtcactgatagacgagagagccttgatacatcaccactgatcggtcatctttccttgatcggtattaaggaaagccagtcaatgtgctttcaacccattaaagaagattctggatcctcaccggtgaacaaaggtggagaaaaattgatgactcttcagactacatggagttatcgctgtcagcctctagcagcgagtgcgtctcacctgccgcaaaaatctcgcgtccaaattccgtgaatagtgagtcagccgccaaatcgtaattttttatcccgcggcaattctgataagtcgcgtccaccctctgtttcttcggacacttcgcgaagtgccacatctcggccaagctccacatctagtgagctttggtcgtcatcttcaactctagtcaattcgcgtcccgaatctgtaaactctgatcgaatcgaagggaactggacaaataatccttcacagaaggacgccaaaccagaagaaaagacggaaaataaactgcattacgctag

SEQ ID NO: 11856 - DNA, 598 bp, Diabrotica virgifera
caataacaagagccgatttttttggaccagaaggcatcaaaccattattgttgtgaaattctgacttaagccatttatcccaaacatcagtgatatatcatccgatatagtctcactattttcaatctatttcatccagaatttctgcagtagataatggtttcttactaaaaaaacattttctcattatatttcatgtgcccaacgggtcgttaacgacccatcaaaatataatattatgttgttctgaagctattttcttgtggcatttttataatcaagtgcattcagatgggaagtgagccacaattttgcctaaaaatgattttatttgacaacgacacccgacttgggcgtcgaaacgttaataaaatcatttttaggtgaagttgtggcttgtttcccatttgaatgtacttgattatataatattatatttatgacataataaatatcaaattattttgtactggtttgttttttaaccaagaggagtgattcaaatttaccgcgctttattgcttgtttgtaattggtccaaccgcaggcaagtttactccactgttataaaattttgacactaatgacatttatcaaa

SEQ ID NO: 11857 - DNA, 597 bp, Diabrotica virgifera
  SmartBlast Evalue=7E-31; Info=Sperm-associated antigen 7 n=1 Tax=Camponotus floridanus RepID=E2A3M4_9HYME
gtcaaactaaaagtcaagtgtttttatttcaaccctgaaatctttaaaaactaatttaatatcctcaataataacaataagaacagttttaaaaatggacttactaggatcaataatgaattcaatggataaaccaccaagtttaaccgaaaaagaaaaacagttaaaaaaaaagaggaaagaagaaattgaaagacgccaaaatgaagaaaaagataagctaaaacggtttaaagatcgagtggaagcaaaacttttatcacattttaaggatacatccaaccttactttaaaatttgaacccatggaccaaatatgtagaagcatagttcatgaattagctgaggcatgtggtctgctgtcttttgcctttggaattgatggtgttgataggtatataagagtatacaagaaagaatatcctccctgtgaagatgaattagctgcaaggagaagaggtgaaccttggaatgaagaagttaaaagaagactaattgaaaaacgacgactagataatttagatgaccaagaacaagaatgctcttccaaaaaatctaaaaagttcataccaaactcaaattataaagataagtatgt

SEQ ID NO: 11858 - DNA, 593 bp, Diabrotica virgifera
  SmartBlast Evalue=1E-22; Info=Histone-lysine N- methyltransferase SETMAR (Fragment) n=2 Tax=Camponotus floridanus RepID=E2A795_9HYME
catgtttcttcgacggttatgaaacaaagtagaaactcctttatatcacgcttaaacagtctcagacacttctctgagtagtctcatggttgcgtttattgtccggattgagcaaacgcggcacccatcgcgccgacagctttcataaccaaaagtcatgtaaaatatgacacacgcgatctcttgacatgcctactgtcttagctatctcgcgcatattcagtcggtggtctgccaatacgagatcgtggatttgtttcacgtttttctctgtggtaggcgttttctgggcacttgggcgtgacttatcaaataccgacgtgctatcacgttgaaactcattaaactaatttgtgatagtcaacatcgaaggagaagagtcactgtacacgacatccaaccgctctttgatttcgctgcgggattcccttccaaaaattttgctctttttcatttttctaaaattcacagatacgcccgttaacacacgcgtttaagacaaaacgacgagtccgattcggctgagattttgacacaggcccagtgcccagtgttgttaactccgcaactgaatatttccgtagagggcgctt

SEQ ID NO: 11859 - DNA, 590 bp, Diabrotica virgifera
ttcattgaaataaacttaatgacatgacgtcacaattgacgagctctatgcaatgtttgcccgttagcgacatctatctttgatgctcgaaattacaaaatttaaaaacttcctaaaatcgtttataaaaggtatattttattaaatatcccttaaagggctacagcacagaacgttttcgaactaaaaaattaatcatcagtgctgtttacaggttttgacactgatgatgaactttttagttcgaaaacgttgtgatgtaggatgtagccctttaaggggttttaaatgaaatatgtattctataaagcagcggttctcaatctttttgagtcaggtaccaccaaatactttttattatttttggtaccacctaactaaaatacctatctagctaggtgatctaattacctataattgtgccaatagtggtgctgatattttgactgttttgagttttctgtactacctcaaataatgaaatgtaccaccagtggtacatgtaccacagattgagaaccacggctataaaggattttagtaatttttattttccttgaattttaaaaaactgtctattaaaatttgcc

SEQ ID NO: 11860 - DNA, 591 bp, Diabrotica virgifera
ctgtcagctatattttcgtataagcctctacgggtcatatatgctgcagttttttgtataaaaagccttgccatttggttatttcgtcaaaattaatgtatatttaagaagtcattcttacatacataccttttagaccacgttggtcttttagtgtgagatttgcacattaatatgcgccagcagcataacaaacatttaaaaaggtgttggtcccatgggaccaacgtggcagggaacgtgttaaagcagaaagggtgtgaaagttcattggagcacgcattttttgtggacactgccagttttgaaatctatggtaatctatatattttcttggacataattataaaacaatcattctgccactcgtaatataatatgtgtaaaacacacacggagcaagtgtttctacctcaaagagttttttttgcttactataattaaaaattacttcctaattattcactaatgttggcggagaaacaaaacattatacaacagtacactacgcccagaatagcaatagacatcagctgcacgcaaactagaagatggatgcagaattcatttggggcttaaattacagggttg

SEQ ID NO: 11861 - DNA, 596 bp, Diabrotica virgifera
  SmartBlast Evalue=1E-87; Info="Laminin beta-1 chain, putative n= 1 Tax=Pediculus humanus corporis RepID=E0VA99_PEDHC"
ctccgcttcgtataataagaaatcaagactagcagtgaagtattgttgttttggagtatcacacgttctacctgtcatatgatctctacatttgcattgtccactgattacatcacagaaattgtcgtatgaaccacccgggtcacagtcacattgttgacaaccgtcaggcttgtctgataatccccaatattgaagaagacattgattacaatttctcccagttacgtaccgtttgcaagtacattctccattgtctacattgcaaccttgattgccaatcgtaccaaaagtatcacaagtacaattttgacaacctaaaggattttcttccgtgaaattccaaaaaccgtttttacaaacatcacaacgacgtccctcaacattttctttacagtgacaaaacccagctattaaattgttcactgggtcagtaacagagtcgcagattcctccatccaatgctccacgaggatcacaatcacagggtcgacacacttctggatcttgtatgtccctctggggatctctgtaataaaacggtttacataattcacaatttggtcccatagtattgtgctgacagccatcacaaa

SEQ ID NO: 11862 - DNA, 596 bp, Diabrotica virgifera
tatcacaaatatagtgattttaatattattttcaaatatagcaatagtcaaaatgagaatgaacagttatacgccccagaagattgcaagccagaaaaacggggatagaaaagttgtacgattaactgcaagatgtgatggatacagaaaagcagttggcaataatttccagatgacttcaatgtcagaattggatcatcggtaataacacgagtgaaacaatagaatttttgataactgaagaatcattttattgttacgaaatggaacagactctttgtacaaacaaatgagtatgttacttcaggcgaagcatcggactgggctacatactaaaggcatggagatcaacaagggtagcattcataccaaaacctggcaaaaccagacaggtatcggcaaaatccttaaaccaataagccctaatgtctctcgtactgaagacataaaaactgatcggcagacatattagaggctgaatactagttgaaagaccgatgcaccaagacaaatatgcatatagatcagaagtatcaacagaaacagcacttcatctagtacagaggacagagggtgaagtatgtcctgacacctgc

SEQ ID NO: 11863 - DNA, 593 bp, Diabrotica virgifera
  SmartBlast Evalue=2E-40; Info="Isoleucyl-tRNA synthetase, mitochondrial n=1 Tax=Harpegnathos saltator RepID=E2BKJ2_9HYME"
aaatttttttgtttccaagaaaaatatgtttaataagtattaaattaattatatgtccattatcaatattttaaaactcgacgaccctggtcgtacttaacagttctagtatgttattcaatggaaattttaaaagtttaaaaaacgttggaagggcatattgtacaaacgcaaaaaagtatgcagtattgttaccaaagacaacatttcctttaaaattgactggtaaaaagcttatagaacgagatgaaaatgtatacaccagtgccgaatttgagagactatacaattggcagagggggcatctatccgaaccagaatttgtgttacatgatggcccaccttatgcaaacggtcggccccatatgggacacgccatcaacaaaattttaaaagatacgattttacggactgccattttaagaggtaataaagtacactacattccaggttgggactgccatggattgcccatcgagttaaaagcgttaagtggttcgaaagagaaagatcctattgaaattagaaagagggcaagaaatttcgctaaggaagcaatcgaggagcaaaagaaggtattcatgtcatgggga

SEQ ID NO: 11864 - DNA, 596 bp, Diabrotica virgifera
  SmartBlast Evalue=4E-67; Info=Transmembrane protein 222 n=1 Tax= Camponotus floridanus RepID=E2ACU0_9HYME
aaaataatgtaaataaaaacaaatcttcattatatcttttaactcgcttttcaaatgattgaatgtgagtcaagtgaaataatgtcggaagaaattgattattctagagatagatatccattttgtatcgtgtggactccaattcccctgttgacatggttatttcctccaatagggcacatgggaatagccctatcttctggtgttatacgagactttgcgggaccatattatgtttctgaagataacatggcatttggaagacctacaaagttttggcaacttaaaccgacactagtgaaaggaggtgtaagttcatgggatgcagcagtgacagaagcatcagatatctacaaagggaggatgcataacttgtgctgtgataactgtcattcccatgttgctactgctttaaatctcatgcagtatgaaaactcatccagttggaatatggtgaaattggcatttttgatgctaatacatggaaagtatgtttccgttgcaggatttttgaaaacatggataccatttttactcatttgtacattaattttagtaacttattctttatcagtaggtttttaaatgaaatattg

SEQ ID NO: 11865 - DNA, 594 bp, Diabrotica virgifera
  SmartBlast Evalue=8E-61; Info="Tetracycline-efflux transporter, putative n=1 Tax=Pediculus humanus corporis RepID=E0VPH8_PEDHC"
gtctccttaaaagttgtcacaaagaagattaaatcaataagagacaataggaacgcaaaaagtgcagggacaataaaccattcaccagaacgtttcttggcccatacagcaaaacctgccccaattaggggtccaacaataaatcccaaggaaaatgctattccaattagtgccattcctttacctctagtatttatggaggatacatcagtaataatcgccatacttaacgatacatttcctttgctaatccctcccagaaatcgagctaatataaatattacaagatttttggaaagcgcccatagaatatatgaaagtgatataccaactaggcaaataaccataattgttttccttccaattatatctgacagacctccacagataggtgcagctaaaaattgtaggaaactaaataaggatcctaggaaacctccaaataacactgaattatattcttctggagcacccaccaatatttgaaattcatgaatttggctagatagccagttgtacaatcctttgctatcattaattttataatggtccaataatgaaggtaaaagaggtaatatcatagtaaaggcgaac

SEQ ID NO: 11866 - DNA, 592 bp, Diabrotica virgifera
gaaaaactgtgttattatttgtgtttaattaaatccttctctattaattacctaaataaggatatccaaagctacaagatccacagcatggagagcggggaatctccattagaagttttatctagggctgctacaatggtccaggagaaccaatccttaggagtatcagatgacccgacgaaaccttacacaaaacatacaacaaaatggaacgagaaaggcggccgagacctccagattacccgaggaaatcctccgacccgaaatattccgaattcgtcgccgattctccatcgccggcggtggttcctgagagcaacggcgtctccgtgccggatacgccactggatatgagcgtcaggcagagagggttgccgccctcgtatgcccagaccatcagcaatcccgggtacagatctagttataggccttctgttattcacaacggagtgccgccagcgagagaagagttaccgtcaggtatctctatgtgcgatccaataattgacgagcacttccgacgatcgcttggcaacgactaccacatcgtattccaaaacaacaattcttccaaagacaaagaacaacagtc

SEQ ID NO: 11867 - DNA, 589 bp, Diabrotica virgifera
  SmartBlast Evalue=3E-15; Info=Zinc finger BED domain-containing protein 4 (Fragment) n=1 Tax=Camponotus floridanus RepID=E2A146_ 9HYME
gatatgtcggtttggctgtctcccagcaaatccaaaatatgctctatgacacgctctttagtcgacgtatttttaaaaaaattttgatttatatcttgggtcaatgaaggtcgccgtggaaaacaatatttcattctctaaacctgaaaacttgcgaatgagctcgtctttcaagacagtaatcgtatcaccaatgtgctcatcggaagaatcaagatcatgaacaactttttctagagtggtgattaagggaatcacagaagaaatagaaacatcgctagcacttaactctttggttatttcttcaaatggtcttagtaaaccgataagtttttcaataatcatccactcgtcagaagccaattgggggaattttattatttgccgatgcgtacagacataacgactctttgacttgtaaaatacgctccaacatataaaaagtgctgttccacctagtagtacattcttgtatagtcttcagtggtttttgattaagccttttttgtatactagtcaactcatcttgggcactggtcgaatgatgaaaatgagttgccatctttttacattttgttatggcagacac

SEQ ID NO: 11868 - DNA, 596 bp, Diabrotica virgifera
  SmartBlast Evalue=1E-100; Info=Nucleosome-remodeling factor subunit NURF301 n=1 Tax=Harpegnathos saltator RepID=E2BIZ0_9HYME
gttccatggtgattgtgttggcataacggaagaaagtagcaagacactaacagagtttatatgcaatgaatgtaaacaggccagagattcgcaaaagttgtactgtctatgtcagcaaccctatgatgattcacaattttatatttgctgtgatcgttgtcaagactggttccacggaaggtgtgttggcattctgcagtcagaagccgataatatcgatgaatatgtatgtccaaggtgtcagcgaaacaattccgtcaactttgcaaatatgaaagatttgcaacctaaggaccatgaaggattgaggaagcttatcaagcaattgcaggttcacaagagtgcctggccatttatggaacctgtggatccaaatgaggctccagattactataaagtgataaaagaacctatggacttgcaaatgatcgaaacaaaaataaacgatcaggtctacacgaaactgagtgagttcattggggacatgacgaaaatttttgataactgtagatattacaaccccaaagaatcgccgttctacaagtgtgcagaatcactagaggcatatttcgtcaacaagataaaatgttttcggg

SEQ ID NO: 11869 - DNA, 595 bp, Diabrotica virgifera
  SmartBlast Evalue=4E-49; Info="Importin-4, putative n=1 Tax= Pediculus humanus corporis RepID=E0VW37_PEDHC"
gttttggctggatagattatttattttacacaatggaagaaatattaggaaaattgctagtgtctaatagtaaaactattcatgagggcactaaagaactgaaggaagcttttaaaaaaccagaagctgttctcgcattatgcgatgtcttagttacctccacacacccacaaatacgccaaacagcggcagttcttcttagaagaaaatttgggaaaaagagatattggagtagaattaatgttgatataagaaaaaggattaaagaaggaatgctacaggctttggtaaatgagcaagaaaaactggtaaaaaattcgattgctcaattcataggtgtaataggaaaacatgaatttccggaaaactgttggccagaagttttacaatttatccacactttaacaagcggtgaaaataattttgataaagagcttggaatgtatacactgtcaataatgactgaaatcgctcagagttcttacatagtacatgctgagtcttttgctatattatttacaaatattataaatcaacttacagatctaaaattaaatgtaggttattatacaataattaccatgaaaaatcttgt

SEQ ID NO: 11870 - DNA, 595 bp, Diabrotica virgifera
ttgccaatagtgataggcattattgacagaattcagtcagtcccttgtattctttcacacttcattctagtgtaggatcttttgcagtagtgatatatatcaaagaaaaaactatataataggtatagaagaaacaagcatgccattaaaatagtagtaaatgccagagtccacaatcagcaaaaactagtaactcataagactgttatataaggcctaatattcattattttatcatctcaaactgatcagatatgaaaattaggtacatctgtactatatatgtaaattttttgttttgagcacttaattatcacaatgaaatatcataaatcaaaaactaaagaaaaaagaaaattcgttgtaaaaactttgtacttacttccttaaaaattaatttttaaaaaatatcacattgaagctgccaacttcagcattaagtatttatacactgaaaacatgtgatacatctatactatgattaagatttaaactgtgtgtgtgttcacaaagaggggatgtgaacacacacaccacacagttcaaatcttaatcatagtatagatttaactgaaaactattttgaatgcaggta

SEQ ID NO: 11871 - DNA, 595 bp, Diabrotica virgifera
  SmartBlast Evalue=7E-23; Info=4-nitrophenylphosphatase n=1 Tax= Aedes aegypti RepID=Q16MH4_AEDAE
gttaaatttaaacgacggactaaaaaaatggagataaaaaattttgttgacatacccaaggaagagcaggctaaatttattaattcatttgatcaaataatgtttgatattgatggagttgtattggtgtatttgagtccaatcgtaggagcatcagaatgtgtcaaaaacttgaaaaaattaggcaaagctgttcactatgttacaaataatactgttatgacgacggaagacatagctaaagctctaatcgagaggaattttgataccacaactcgtgatattgtcactccaatagagacaaatatagcctatttaagtaaacagaatgtgaagaacaatattttcctaatgagtaacaatccgcataaagatgcacttaaaaaggctggctttaatatattacctgaaaaattccaaattatagaagaaaacacaaacgcactttttgaacattttgatagcaaaataaatgtagatgctgtcatttacgactttgatttcaatagtaactatgtacagctgcagaaagcattgtggtgtttacaaaacaatccggactgtatatttttagttacacttaacgataaaactg

SEQ ID NO: 11872 - DNA, 594 bp, Diabrotica virgifera
  SmartBlast Evalue=5E-18; Info="Uracil-DNA glycosylase, putative n=1 Tax=Pediculus humanus corporis RepID=E0V914_PEDHC"
tttcttcacatcttcacttaagtttctagcgtacagtccccaaaacataaataccaaattcttgtttttatcttgtagttgtctagtcaattctctagtaatattctgccaacctatagaaagatgacagtcgccaccaactcgttttgtgagagctgaatttagaagaagtactccttgcctagcccaatattctagatttccacaatcttctgaaaatggtctaagcttttcttcacctatatcgcttttaacttctattaatatatttcttgtagaatcataaacagtttcgctattactgaatgccaaaccagtggcccccaaacttggatcttgaccaactataataactttaacacattgaggacagcaaaaggtcgtaaaattccacattttgtcacttgatggataccattctggatcttctgttaaatgtaaagcgacggtttctaaacactttaatttgttgttgaaaacactagccagaagaggttgccacaattcgggtatatcactgttttcaaataatataggatatttttaacaaaatatttaaacgggtaattattattagccattttatttataaat

SEQ ID NO: 11873 - DNA, 595 bp, Diabrotica virgifera
aaagcaagttggacggagacaaagaaaaaagaaaatagtacgaaaacagcaatggaagaagacactaccgaaaaccgaagagagaaagaaatactcactgtcggtgcggacgcctgcagcgtacttaatagtaacagtaatgttaaggtgattaattattattatggcgacggcgtccgcattgagggtgaaaatagtaatagttataggtacaataagagaaatgatgattttttatgagaacatttgataattttgattttgtttttaatagtgacgtagactttaattttaagaataggggtaaagataacagaattgtaaaggtaggtcagaaaaacgagcaaactgcaataataaaccaagacataactcctcatacttgtaatgttagggaaagtcagggcaataatagagcaaagagtattggacaggagcgtcatcatcgggtgaccgctgggggcacatcgggggattttcccagctctagtcaaattaaggcaaaaaatcaaaattcaacaagtaaggctgaaataaaagtggccacgatggcgacatagagattgaatgtacggaagagactagaaaacaggat

SEQ ID NO: 11874 - DNA, 595 bp, Diabrotica virgifera
  SmartBlast Evalue=5E-42; Info=CG5569 n=5 Tax=melanogaster subgroup RepID=Q9W1H9_DROME
acctcagaaatataacaaaactaacacaatatctcaacaaattttcacctaacagtaatgtgaggagaaatatcagctcaaccacaaagttatttattccaggtgcttatgaagcttcaggtcaaacgaatgtacaaattttgaataaagatacagagttaggaataatgataaacgggttcagtcaggttggatttaggctgaataatgacttcactgtgttaggatctatggtcatatttccgaggtcagttctatcatggaatgtacatgacgtttcagagataacagaagacacccttagcctgtttaccattttagaaccaaaaatagacattttagtgataggagtgggtgatagattagacaactttgatttttacaaaaatctattacctttcatgagaaagcaaaaaattgccttggagattcttcccacagaatcggcatgttccacatttaactttttgaattctgaaggaagaaatgtagtgggtgctatgataccgcctaaaacgtttagggtttctgaggatgatgaattagtttccaaaatgagatatcagaatttatatgttaaagaataaatagtttt

SEQ ID NO: 11875 - DNA, 597 bp, Diabrotica virgifera
agacggaactcgaactgccagggcctattcctgcggatccaagccggaaacgctaaaagggaagaagcacgctgaaatatcagcagatagtgccagagtaagggctttcagtgttggttctaagactaagaaaggacctagcaggattttatcacatcagcatcacgctagtctgaagtccattagtgcgccgattttaagcaactcaaggagtcacagctcccatagctccaatgatcccatggacgatttaatggaaatggatttctctaaagcttccaacaataatcattcaggtatggattcgggcaacagaactatcactacaaataacggttatgtagaaatgaaacctggcgttgaaattgccccatctcataattcagacgtttcaccatatgttgatatgtcgggggcatcttcttacatggatatgagtggtagttctccttcctcaagacatgaagacgaatgcagctcattcgtggatattaacagacagtaccgactgcctgcaaataataattatgttgacatggatgctggaaggaaaaatagaactaaaccatcaacgtcaccagcttggacttctgatta

SEQ ID NO: 11876 - DNA, 594 bp, Diabrotica virgifera
  SmartBlast Evalue=6E-37; Info=Activator of basal transcription 1 n=1 Tax=Harpegnathos saltator RepID=E2BFS2_9HYME
acctcaaaaaaatcaggagggttgaaaatttgtttttgatgaatgtttaaagtaaaacttgattttatagtgtaagaagacgtattaagtaagaataaaaatttttagagtttgttgatttatataaatatgactgaagaaatggaaaattcggattcagaacccactaccagcatagaaaagagcaaaaagaaacctaaaagagggattatttatttatctacaatacctccatacatgaatgtggcaaaaattagagaattttttagtgattttggacaagtaggaagaatatatttagaattggcagataaagaattgaaatcaaaagataaagacaagccaaaaaagaaacgaaaagtagcaaaaaaattctcagaaggttgggtagaatttgaaagaaagtatatagccaaacaagtagctgctcttcttaataatacacaggttagcaataggaaaaaatctaaacagtatgactgtatgtggaatattaaatatttatcgaattttaaatggacacacttacatgaaagattggcatatgaaaaagcagcaagaagacagaaactgagggcagaaatacaattagcc

SEQ ID NO: 11877 - DNA, 595 bp, Diabrotica virgifera
gtacagcaaaactatttggaaggacaacctcaacaggctgagtacctacaggtgcaggctcagcaacaacaacaggatactcataaaatatctagtgtatcccaaccggagttgcttcacccggctccgcaacatcatgaacacagacttagcgttgatagtcaaatggataaaattccaccaggaattatgcaagatcagcaacagtctcttgcgaatttccaacagacttaccaacaacaacagcaccaacaacaacaacaacaacaacagcagcagcagccgacatatgcgcaagtagtgcaacaccagcccccaaactatcaacagcaacagagctaccaacaatcaccagcgagttatccacctcagcaaacttatcaaactcaagacagtcaaaattaccaacagcagaactaccaacagcaacaaagctatcagcaaagtcaacaggagcccatgatgcatattattcctggtactatgactcaaattcctcaggagatggggcagcagtatgtacagcaacaacagagctttcctcaacaacaggctcaaccacaagctacttatcaacaacatgtaccacaacaga

SEQ ID NO: 11878 - DNA, 592 bp, Diabrotica virgifera
ggggtgtaaattctaataaatatcctaaagctgctaaatattcaggcttactttggttatacctctctataatttattcgttacgtaaacaaaagcttttgtctatacaatgctaatttgttacaatgaacttctaaactcaatgcctcagaatagtcgttcataattattctaaatccctcaggtacatctctgttgtcttctagtaattgcaataaccaatctaaccaaatcagaccacaacgatgatttcgcattaataatgcttttgttatccatgataataaaattacagtattttttgaataatttattacagaggacgaacacttatccttcgttttatttaaaaattcagctaaattttcatcatcgtcttttttgttaaccaaattggccaataattcacaagcagtacttctaacaacgtcactttgaccttctatactgaaagctctacatatatccagtaatttgtaatctactttaacatcttgtcgcaacgttgacaccaagccatccattatgaccatattcaaatcacagtaaaaaattttgtcaaatatactctcaaaatatttgtcatatatgg

SEQ ID NO: 11879 - DNA, 591 bp, Diabrotica virgifera
  SmartBlast Evalue=5E-56; Info=Vacuolar protein-sorting- associated protein 25 n=1 Tax=Camponotus floridanus RepID= E2AVA2_9HYME
atcacttggatccgatgcacttcatcaatagctaaaaaaattttgctccttgtatctcatcttctagtataagttcacattttctttcattttctagaacccgcaaaactttaataagtacctcttgattcattccaaaaaagattgcatctgaaacatcctctccttgtgtgagttcaaataatgtaaccactgtattttgcatacccctttcacaaatagaatcatatacaatgctagcccattcctcttgggtatgccaatagatttcccaccggtttttgtttttatctacaggagatgcatggccacttttttgcaattcgcttagtatagagattataacgttttgttctaattttctgtttattgatgaattattaaataaaggtgactggtttgtgtctcttacatctagggtgtaagttttggtttgttcgcaaaagtttaaaattaatgacttccatgcatctacttgctttgctcttgtttcaggatgtggctgcaacgtgaaaaacggtggaaaattgtattgccatggccattcaatatctacttctggcattttgtatttccaaatttctaattttt

SEQ ID NO: 11880 - DNA, 590 bp, Diabrotica virgifera
ggaaagtcctgtaacgttttcccgcttcttgactttcattagaaaaacttcaaaactctaacattaccatcgtgttaagcaaaacattttacatcaaaaatgtctttttcatagtttttctttccctaaaatcaaagcgaggtctgcattccaaagcaaattcaacacattttaatccctggtaccatcacaatgtgacagtggcgttttgaaatgtctcagtgggcccttgtcactttcaatatgtgacaataatgctgtcagacatcacagtgtttaagtatcactgtcaacatggaaaataatgtcacattttccacttttccggctttcattggaaaagcttcaaacattaccaacgactaagcaagagattttacatcaaaaatgtatttttcagagttgttttttaaacaaagttgtttcaaaagtaaatttaacataatttaatccctggtaccattaaaatgtgacagtgacgctgtcaaatgtcgtagtttgcttgtatcactgttaatatgtgacagtaatgccgtcaaacgtcacagcgtggcagtatcactgccaacatgtgacagtgatgctgaaat

SEQ ID NO: 11881 - DNA, 595 bp, Diabrotica virgifera
  SmartBlast Evalue=2E-37; Info=Pol polyprotein (Fragment) n=1 Tax=Drosophila buzzatii RepID=A1BPH1_DROBU
cgattaccatgtcgattaatctgcacattgcttgtgcggaattatttagaccaaagggaagaacattaaagcaaaatactccacgatttggaatagaaaagcggttttgattttagactcctcatcgagaggaatttgatagaaaacatgtcgtaaatcaatggatgttatatacctagcatcacgaactttagagataatagagtcgataaggggcattgggtaactgtccggaagagttatagaattcagcttcctaccatcaaaacagacgcgatgtgtgccgttcttctttttaacgagccatagaggactcatccaaggagttggagtgtgtaagggttgaataacctttagtttcagcatttcgtcaacaccttcattgaggattttctgcattgcaggcgatagagggtattgcctttgttttactggctttgcatttccggtgtcgatgtggtgagtataaagggttgttcgaccaatagagtcctctggagctatttctttgaatagagaaatgatcgaatctaattgagcgagttgagatggagataatgtgcatctatcagaaatcgtattaataacgcaagtt

SEQ ID NO: 11882 - DNA, 592 bp, Diabrotica virgifera
  SmartBlast Evalue=5E-58; Info=Dhcr24 protein n=2 Tax=Danio rerio RepID=A7E2N4_DANRE
ctgacaaacatagaagtaaatctagtagatgttttggaaatcgacaacgaccgaagggtagttaaagttgaaccattagtatccatgggtcaactcacagcaacgttaaatcccttaggctggaccatccagttttgccagaaatagacgacttgacagttggtggtttggtgatgggaaccggcgtagagtcatcctcacacatctatggattgttccagcacatctgcatctcttacgaattggtactagctgacggtagagtggtaacctgtaacgcggatcaagaagctgacttgttctattctgtgccgtggtcatacggaaccttagggatcttgactgctgtagagattcgcctgattcctgctcaaaagtacgtcaaactagaatacgagccagtgcgaggtccggataatatagtagagaaattgatagaagccagcagtaacaaatccaacgaatttgtggaggttttgatgtttagcgagtctgaggctgttttaatgactggtgtacaaatagacaatgctttttcatcaaaagtgaacaatattggacgatggtataaactgtggttttttaaacatgt

SEQ ID NO: 11883 - DNA, 595 bp, Diabrotica virgifera
  SmartBlast Evalue=3E-18; Info="Beat-IIIb, isoform B n=3 Tax= melanogaster subgroup RepID=Q9VJF7_DROME"
cgtgcgtagacgtttcattaccaacggtaaacaaagagaagaagtttttaattgacggtcattttgtttagtccttggaggagtacccatagtctggactccatttaaaaaccatataatgcttggacgtggatgtgccggtggactagtacaagacactttgtcattgtcgactgttagaactggttccccctttggtttctcaaatacaaacatcagttttcctctattaatagattgaaataatggtgcctcccaagttacctcgcaaatatatcttcctgtagctatggtttgtaaattgtttaagactaagttgttgcctgagctgttgtttatatcaactgatactccatttagtggaaaaacttgtttgtgcggaacgtcatttggtatccatcggaaaatttcatattgtcccatataccacttcacggaataaatgttgttatctggactgtaatcacaatgaattgttacattttttcctacttccacgtatcttggaaggcttacattgacagtgtgatcatcagaagcttcacaatcagtacttgataaaagtacgatagcaatgccaaagacgtatgttaac

SEQ ID NO: 11884 - DNA, 596 bp, Diabrotica virgifera
ttcacccattccatagcaaacctctggtctttaagtccgatattcagaggaataactccatcgttagtcccaacaaaaccaaaaggtcccagtctgtagttgaacgttacaacgacaatgccagcatccattagatattttggtccaaagtaatcgattgtagcagcttcaaaaacaaatgctcctccatggatccataataatacaggaagaaggttgttgctgccaggtttttgtggcgagtaaacattgatatatagacaatcttcacttagcttaaggttgattaatggtgatgaggcttgataacaaatgtttgtatttttagtggtatcgagaacatgtgtccaaggcttcgctggtttggctagttgaaatctgttttctcctataggtggtgcagcatacgggatttcttggaaagcataatagtcgttacccttctcacttttaaggatatgtccacgaatttttccttcctctagttgcactatagtcccatcatattcatagctttttgctatactttcctgtatagcaattattgcactgattattataactacttgcaatgtgttaaacgcttccatgatcac

SEQ ID NO: 11885 - DNA, 594 bp, Diabrotica virgifera
  SmartBlast Evalue=8E-35; Info=Rho GTPase-activating protein 21 n=1 Tax=Harpegnathos saltator RepID=E2BKC4_9HYME
agttggtaagaaggattgagtaggaaaaactttaaggttagtaggagacacaatttcttctttggactcttgcgtcgaacttaaggctttatttggtttccttttgacttttctttgagcagctgagattatagttgagaacaaagcaccattcttttcttttggatgtgttagagctccatatttaccaatattatttaacagcaacgattggttattgttatcaaattcttcaaggccatcaatgaggctttcaggtacaggaagattatcttcagactcgttttctgggaagaaccaatcagcatgtgttaataatgtctccactatcttatactggttattcatgtggttgaccatactttccatgttctcctcttcaggtctgactatggctggaccaaatactattgcaagatttttgaaatccatcttatttacattcgaattgttgcctactctcctcagatgcatcactatatgtttgagagtatggtaattatgacgcggaagactttttaccaatcgcctcagttgttccatcctttctttcggattttcaattttgtcagccttaataaaactaggatataa

SEQ ID NO: 11886 - DNA, 595 bp, Diabrotica virgifera
aacagtagatgatttcaatacaactgaagatggttccaatacaacaatagacgatactaataaaacagctggtgattctaattcaacaacagacatttccagtacaacagcaggtgattccaatgcaactgaagatgattccaatacaacagctggcgatactaatacaacagcagatgattctaatacaacaacagacatttccaataccactgaagatgattccaatacaactgcagaccatactaacactagaacagatgattacaatacaactgatgacaattccaatacaacaacaaacgatactaatacaacagcacatgattctaatacaacaatagacatgtccaatacaacagcagataatttcaatacaactgaagatgatcccaatacaacagcagacgattccaatacaacaggagacaattcctatacaaccgcatacagttccaattcaacagcagatgattccaatacaacagcagtcgatactaatacaacagcagatgattccaatacaacagcagacgattccaatacaacagcagacgattccaatacaacagcagatgattccaatacaataaca

SEQ ID NO: 11887 - DNA, 595 bp, Diabrotica virgifera
  SmartBlast Evalue=7E-17; Info=Antennal binding protein 3 n=1 Tax=Manduca sexta RepID=Q8WRX0_MANSE
ggaaaatataaaaatttcgataacaaaactcaaataagtacaacaaacacagcataatgtatcggcttatattaccagtatttgtattattcgtaacagccaaaatagcagcacatcctttggacttatcagattttaagcaagaagttatagagcttacaaaagtactacacaatgaatgtgtagggaaaacaggtgtgaatgaacaaataatagataaagcgaaagagggtgttttcgaagatgacgttaaatttaagaaatatttgtcgtgttgctgggtcacctcaggtgtgatggaaaagtcgggaaaactgaatgaagacatgcttattggtttcatacctcctaagtataaaacaactattgggaaatcagttctgacatgtcaaaaaaacgttgcaggtataaaacctcttcataatatggtatttgaaatggaaaaatgtatatatgccgctgcgccagagctgtttgttatgttttaaaacgaaaattacttctctaatagacctgaagacactagccgccataattactattagattatgtttaaattaaaaatagatgtgaatttagtataataaaacctgtt

SEQ ID NO: 11888 - DNA, 600 bp, Diabrotica virgifera
ttggtaatgcgtagcttgaacactcactaaaaggaagacaacactaaacatataaacatatttttaaaataacaatttttgttgctatacctcagtcgaatatcctaaaatattcagattcctgaaatttaaatgtattttcacaacaaaaatgtggtatagagttaaaattgttattgagtgaagatcaaaaataagttgttttctttaaaaggtcaaaataaaatcatcagagctaatttccttgaatataaagtttttttttctgaaaaatggctttggcagagccaattagcctgtaccaaaaattatataaagtttattttgactaaaaattatttttgactccgtgaatatgaagataaaattgtatgttgagtgtcaccttgtacagcaatataaattatttaaataatatctaaaactgttaacattcactttttaataataccacattacaaaaaaaaatctgctgttataattgatgaatataattttgagatattcaatttgtaggaaacatcgtcttttatgcaatcaatatttcctttttgtatctattttctcctattaatttttttctttcctattttgctttcg

SEQ ID NO: 11889 - DNA, 586 bp, Diabrotica virgifera
  SmartBlast Evalue=2E-21; Info="Solute carrier family 2, facilitated glucose transporter member 8 n=1 Tax=Harpegnathos saltator RepID=E2BLV7_9HYME"
ccggaaagtccggtttatttgttttccaaaggtagaaaagatgaatgcaggactgccttaaacagactaagaagtaataaaactactaatgaaattaacagagatatcgagattttagaggcacacgtcaaatcagaacaaaacactaagaggaacgttactatatttaccctatttaaaaccaaagaaactagaatagggctactgctggcaattttaccccttgcagtacagcatctttcaggggtttcagtaattatgagtttcctagctccattttttaatcagctggtaccagcatctctgggcataaggtagctgtgattgtttctatagtaaaaatttcttcgtttacatttacttcaagtgtagtagaaagagtaggacgaaagagaatgttattaatttctagtgttggaacaggaataccactctttttcttaggctgcttcttctatttaaaacacgtaaattctccattaattcaccaattccagtggttaccaatcgtgcttatgctatcaaatgttttaatgtattctatgggattaggtcccatacctatggcaataatacatgagatctt

SEQ ID NO: 11890 - DNA, 591 bp, Diabrotica virgifera
ttataatattgtctgtttatcataatcctttcttagtttttaaccagcaacataaagcatacagtccacgcccctgaaattatattaataatttcatatacatatgtacatgccttgattgtacagttctacgggtgaataggaggaatactacacatgtaatttctggttatctgctattggcgacggtataactaaatcttcaaccaaattaaacaaggctaaccgaacagcaaagctttctttcctacaataaatgcgtattaaaaatgtgcgatgtgtgaaagagtaaaattaatcattactctttttgtcttacatctgccttaacttcattttcaaatcttctgcacaattttacaatatacagaaatttagtaaatctacacggttttagagtatatgtctaaacagctgatgaatattacccaacgaatattgtaggaaaaattatttatgctatgttaagtcatacatgtttcgacatccattgatgtcaaacatcgaccctagccaaggtcaatatgaataaactagccacaaaaaaaaagggcaatggaaagagcaatgctaggtatacgactatcagat

SEQ ID NO: 11891 - DNA, 593 bp, Diabrotica virgifera
  SmartBlast Evalue=7E-15; Info=Protein 4.1 homolog n=1 Tax= Drosophila melanogaster RepID=41_DROME
gctcaagaagtacctcattctccaactaaaagagctactgctactgcgtttaactatgctcctggagaagttggtaaaattaaaaaagatccgcatcttagagatcccaaagctgatagtgctgcctttttggcaggagaacaatatctgcaccaagctccaccatcgtcacaatcacctaaatcagctggatctcctacagttgctgctgctgctattgctggtgctggtcccagaaaacaagacctattactttatatgttgttactggtagtagagatcccaaaacaggttacattgacgtggcttctgcaacagttgataaaacggtcggacaacaaaatgtagatacgggactcattgactgtaaatatggattaatagatccttcaaacggtacaattattattacagatcctacaaatgggcaaaaagaagttgtccaaggtcacatagatccaattacaaaacagataatcataacttcggggtctgtcattgatcccaaaacaggcaataagagctcaaacttggggcaaattatcgctatttgtgagccaagacctaagggtgactaacaaactggtaactcc

SEQ ID NO: 11892 - DNA, 595 bp, Diabrotica virgifera
gtctggtgggatgtggagtggcattgtgttgttttatatgccattagactgaaaacttagtcttttgttctgatgtaatttgatcatatatctagaaggaaagaggtcatggaaaggttgatcgtcgaaggcagaagatcaagaggcagatctccttcgcggtagtctgatcaaattaaaaaaatcataggactctcccttccagaagcatctcaaaaagttcaaaatagagttgagtggtcaatcaaacatcatgatgttatcatatctttgcgtaggataacggactgaggaggaggacttcacacaacagtctgcacatttgatacaacctagaaaatgtggtgtttagcatccactaaattgattagttgatacccgtgttgtgctgccccccccccacttgcaaacattaaaaacaaatagcgctgatttatgagctttcatattccgcacatcaaagggctgactcagcccccccccgcactgcttaaaaatggggatattgaatcgattttgcggcagaattgcgagctatttatgagctctttcgaagtgatgtagtttcgatttttgagctcatcccctttacccc

SEQ ID NO: 11893 - DNA, 592 bp, Diabrotica virgifera
caaccactcccaagcaactttcaattatccgtatttaccaacacaaactttcctttttctaaatatcttaatggatttcaagaaaaaataatattccccatttcaattttactttctacattaatacaacatttacaaatttaatgacccattatcttattcactagagtattagttagcggtggttaatgacaaatccttccgcgaacactttctttgtacacatcactctaattgtttatttgagtcgtattgttccgaggttcgtaaacacttctccgaatcactctcttaaaagctacttagacataatttgttttatacagggtgttccaaatttacatgcccgtggtcgagaaaaatgaaaacctttattttaatttgactttaatttataattataaacttttatttctaatatcaattaggaatataacaaatccccgcctttgtattcgataaaatttatctgcatctttaattaaattttctcgaggcaaaaaccaactccccgtatattaccttgctttaatctatgtcttataccccttcttcttgtattactctaattaatcccacctgtagagtaata

SEQ ID NO: 11894 - DNA, 593 bp, Diabrotica virgifera
  SmartBlast Evalue=4E-39; Info=Zgc:162613 protein n=3 Tax=Danio rerio RepID=A3KNW8_DANRE
aacacgtacgaaaatttgaaaaatgatttctgtcaaagataaaaaatataatatttttgtttactaatttttaaaaagaatggaaaattgtgaaattctggtttctgaacagaatatttctgtaggagatgccacgttctatattaaaaaacctggtaaaaatgaaataaaacatataaactaagactggatctatgtctttaacattccgaagtgttactaattttattcgtgagatatttctaccggttggttatcctgaaagcgttagtgaagactactggaactatcaagtatgggatacagcacaggcattctgcagtactattattggagcttttactactagatctatcctgaaaggtgttggggtaggaaatcaagaagccaacgccttatcagcagcagtgacatggattctgaaagatggaatgggtatgataggaagaatcgtttttgcttggtggaaagggagctttttggacacagattgtaaaaaatggagattctttgctgatattctaaatgatgctgcaatgtgtatagaattatgtcttccatatttttcaaattactcaatggaacttttatgt

SEQ ID NO: 11895 - DNA, 592 bp, Diabrotica virgifera
  SmartBlast Evalue=2E-48; Info=Protein FAM38A n=1 Tax=Camponotus floridanus RepID=E2AY04_9HYME
cgatattggcaagctcttttaggtttcaatgtagcagtgattttctttaaatgcgccttccaaatattaggatgtatatacccaacctacattccaaacaatctttgttggttaattcagatatttggaatcacttgcgtccgaaactattcgactgtagtaccaccgaaatccataatcgaaattttagacgacaagactgattgtactatcccgtcggaaggaattacatgggatgtcatttgcttcatcatgttgattctacagaaaagacttttcaacagttataactttttccatattgtagatgatacgaaagcaacggcgattttagcatctagaggtgctgaacttatggaagaaatgaggcaaaaaacgatgaaagaacaagaagagatagaaaagagagttcttgagaaaataagggaaaagatggaacggattaaggcgaatcaacaaaaaattcaagattcaatctctacctgtagacacacacaatataaaatcaaacctccagtgacgtataaacaggctataaggtcgggtgattattacatgtttgatgaaatagaagatgatgatatagatctac

SEQ ID NO: 11896 - DNA, 592 bp, Diabrotica virgifera
agcggagtggggagtagacggtggatttggaggcagtgatggcagagacggcgagtggatagtatgcgttggaggcagtgatggaagaggcggcagttataggcgatgcagtcatggcaagcctggcgaaggggaggttattgcggaggcgaagggtgggaataagcaatggattcgtatacactgatatcggatgtggtgtaggcggtggatatggcgatgacggtggctttggtttcggtgtaggagtgagttacggacttggaaaataagaacaaaccagtgatttccattgaaaaatataaaaactattcttaacttgaaaacagtcgcgctctcttctgtcacgtaagcagtcgcgcgttagaataaatctaaaaatacgaatttaaatttttggtttataataatatttttatttattgttattttaaaaatatgtatttatttctaacaattttaaagctaatttgttatcaccagagccataaattccacaaaaaataacaaaaaaattaaaaaaaaatacctacgcattactgcaatttccctcgaggcactaatgagtggaaagtcatcacggaaaaggata

SEQ ID NO: 11897 - DNA, 594 bp, Diabrotica virgifera
tgtgttgggcttagttacaatacagagagtgtatttctgtttctaatacgcccagacatgaagacactgttaatctgttgttttattgtggcattttgggaggtagcaattggaaagatcaacttctctccagaatatgaagacaacatgaataaaataattgattcatgccaacaggacccgggtactcgtgcttctgatgattggatacaatcagaagacctggaaactgcagaaaatcaaggctctcatatattatgccgattagtaaaatgcggcagcctattccctaatggggatattaatcccgaggtaatggaagctgatctttcgtcaggtataccaactcgtgagatcgttcaaaaaattctcgacgactgtggaagacgcctgcctggcttgacagctgaacaaagcgcagtcaaaaattttaagtgtgtcctttcaacttttcagagtttgtccggtgaaaagtaaatacacactataatataataatttgttaaaatgtaaaataggtcagtcgctttaacttaaaaatgatgtattatcttaaaaatgttgtacttactaaaataaaaatctgttttcact

SEQ ID NO: 11898 - DNA, 594 bp, Diabrotica virgifera
  SmartBlast Evalue=4E-12; Info=Zinc finger protein n=1 Tax=Aedes aegypti RepID=Q172Y4_AEDAE
aaattgacgggaacaaacgtcacatttaaaatttttctcttaattatcagtaagcatatgtcgtgttaaagttactttaactacaactacagataacacacttaattttattaaaattacacacttatttattatgaactctttccatgtgtcttttcaaatggtaatttgtactaaattgtttttcacaaatatcacattttggaatgtttccctcgtgttgatgatttttatggacacctagagcatagaccgttaaaaactgcgcgccacaaatttgacacgaacgtgatcttttgtctttagcatgaatttttagatgcctttttagtgcatagtgtgtgctaagcactttcttgcatatatcacacgttctgttggccacgaaatcagccctacagttatcgtctgctctaggtgtcgtaggctgttgttcagccctatggtcatcttctgctctattccggtgaatttttctatgtcttttcaatgcgtaatgagtactaagaactttattgcagatttcacaagttctgtcgtccacgaaatcggccctgtttacttctgccctggatgttgttgcctgatgttcag

SEQ ID NO: 11899 - DNA, 594 bp, Diabrotica virgifera
ccgagttgattttatgtataagaatgtatataatataaaaatattctaacgcagcaatgatccaaacaaataaaaaaccgtcacaagaaaagctgaaaagctccacctgggtgcagaattgcataaatcgccgtcacaggtttgacacgataacactgttccaacaagcgctccgatactctgtcgtacagcttcacaggtgttttggccattgatggtccttggtgaacaagtccttactgtaaatgtgtagttcgaagcaagtttgctatccactacatatttggtgcaaacaaagtcggtgtccgaactatacagagtactatatttattgaatagactatcaccaccaccattaattccttcaacgtctgttgatctatagctgttaaaattggtgcagttttggatcagagcgtttttggaattgaaaggatcattacaactttgatccttgcatgcccagcatttcgatacagcgaaaactgtagcaaattcaaatacgcacagtattaaaacagaaactccaattgttgccgaacccatatttgttaaactaaatttaaataacagcacttcacctgatgatctatt

SEQ ID NO: 11900 - DNA, 592 bp, Diabrotica virgifera
  SmartBlast Evalue=8E-61; Info=Zinc finger protein 598 n=1 Tax= Camponotus floridanus RepID=E1ZVI1_9HYME
aaattcacataatggatgccctctatgagacgtattatccggatctccttttcttctgtgaagccccaactcttggcgattgtaacagcgcttttcgaagctgaaaattttaaggttttcagtacaaatgtcacaatagaacagttcatgttcccttcgcatgtgatctttcaattgttggaaggttttaaaaggccattttctttcggtatcttcgcataatgcgcatcgatgctccaacaatctatgatacgctttttggatatctgaggtacagaagaatatgccgaatctgcgatcctgaagattcgaacgctcgaatctagacaacagagatgaaaagggttcgattgctttggtaaataccactttgggcaagacctgtctacaaatggggcactcattttgcttgcagagcaccctcatcctggtggagcactcaaaacagacagcatgatcgcaggatcctatggaatatatgtccacgctcttaaaacaaacgacgcaaagattttcggtttcactagaatttgcagaatcctttccagacattttcaatggacaatgatgtttctttttcttaaacacaatc

SEQ ID NO: 11901 - DNA, 590 bp, Diabrotica virgifera
taccgctcctctgatcttcacccgtttataaccatgtatatcatcaaaatcggctacaggaaacaaacaggttactaatatacatgtccataatactccaaaacttggcctcggcctggagggggttgtgtcacgaacaggatatttttttttttcccttatttctctaaactatattggcatagctaatttttttatgcaaatcaacgaaaaaaatcataatatataaaattaattattttaataaatttttatggccaaaaagaccaggcgatgccttacagtgatatctgatatcctaatttataaaatttagaccctgtatttaatagttaattaaaaactaaaacatctatttacttaacttttagtattagaattgaaataaattgaagtgtcaaaaacgatgtgattatgtttgggtttgtttccctgatatatttttgagacacgatatacataaactatccaaacttataatattcattaacaaaaaaaatgattacaaaatcattgaatcgaaaaaggtaaactgaaatgttctgaagagtgtatctatgcatgatttttggaatagaggttataaaacc

SEQ ID NO: 11902 - DNA, 593 bp, Diabrotica virgifera
  SmartBlast Evalue=1E-23; Info="Cyclic AMP-dependent transcription factor ATF-6 beta, putative n=1 Tax=Pediculus humanus corporis RepID=E0VKG4_PEDHC"
gctgtcttcgctgctactgcaagatggcggcgttggaggtagattgtggaaagctgtttgttcgattttgataacagaattcgctttttggataggtaactgtattctttggggaattactgtgtgaggggatgttttgagggtggtcgtcgctgttttgaatagagctgtgtggtcttcgtgggagggagacatttctacatctaatagtacgtcactggcgtttacgtaaatagactgtggtgatgaagggcaggacgaatgattgctgtctgtctcactagctggttcatctttgatatttaaaggatcgtgttggagattattgcatgcggtcttcattgaaattactgggaaacactcatcatccatttcatcaactttgtggtgtgaagtaggcgaatctggtaaactatctccatctgatgtaagactgtaagaatgttctgtcttaataggtctggttcccaaagcggcgtccgtcatcagtctatcgtgaagaataactcccggcaggtccttggttggtatgtagctccattcgatggtcatatcccctgactgcatttttaatacctcttgcatcgccggat

SEQ ID NO: 11903 - DNA, 594 bp, Diabrotica virgifera
cattgtgttgggcttttcagaagtacgtcaaataaacttgctttctttaagtaacaataaactagaatcttttgataaagatttgcttaaaaacgttgtagtttgggatttaagacttaacaataatagcatcagctgtttcgatggagatctagataagttgtttaaagcaccttacaactatatagagtacaatcctttcacatgtccttgcctacatcgcttaaagcattggtcgaataaaagaggcaaagagcttggtattgctgattcaaaatgtactggtggtgacgatgaagaagaagaagataaggttatcgaaatggaagaagtttttgaagtagagaaagatgtctatgctatccagaaaattactttggtattaccgaaaaattccaaacttagaaattaaatataaaataaataagaatttgaaataatttttagcttttagtaaaaattaaattttaattaaaatcgttactatgtacattttgtagtattgttgtaagaggttattactaactttatttatattagtatattattatgtagatattacagagcctataccaggtaataaataatttgttc

SEQ ID NO: 11904 - DNA, 592 bp, Diabrotica virgifera
  SmartBlast Evalue=7E-28; Info=Serine protease H137 n=1 Tax= Tribolium castaneum RepID=D6WUF7_TRICA
tgactggcttgaaatagttggttggggtcttacagatcatggcgaaaccaatgtcaaaatcaaagttaaattacctattcgaaggagagagctatgtgtgagagcttacagatcagtaggacttaagctaagtgactcccagatatgtgctggaggaatatacggaaaagattcctgcaaaggtgacagtgggggtcccctcctaggacatttggaaagagagaagccttatcagtggtatcaagaaggaatcatctcatttggaaatcgtgattgtggtgtagaaggattaccgggaatctatacaaaagtttctagttttttaccttggatccatagtcatattagagagtagtacctaacttaaaagtatgtaaactagaaaagtaaatgtctccaaaccaattaatcatttatgaccatttctatcaaaatttagttcttagtaatttgttttaagctcatgatttatttatcttttattataagcattccacaaatattttgttttgatgtgttttgtgtttattcgcatggtgtaatttaaaaactacacctgcgagcaaaaaattgactcactcaatgaattgta

SEQ ID NO: 11905 - DNA, 594 bp, Diabrotica virgifera
tcgttacttttgtataaaataatcatttacagtattcgttactttgattacttttgtatctgagtaccggtaatcatatggagaatcgcatttctcaatttatattttgtattagtaggatactttgattactatgattacttttgtatttgagtaccggtaatcatattgagaatcgcatttctcagtatttcgtataagatccgatataacaacgaccttcaccgatctatttaatggatagaaattaaatgatatgtaatctattatgttaaaaattattaaaaacaaggggtgcccgacataattttgtccagactaattaataattaaaaatgaatttttttttataaattccactaattttttggcccgggcagatattattttagatttttgaataataacaataaaatacacatagaccaaggcatttaggaaaaaataaatgattagggaaatagtgaaacaggaaaaattttcaatagaaaaatgggtggaaatgcttaaattgcagtatacaatgcatcctaaaagtacataaacatccatgattaaaattgaagagcataggactcaatgagtctccctgtc

SEQ ID NO: 11906 - DNA, 593 bp, Diabrotica virgifera
  SmartBlast Evalue=1E-37; Info=Transposase n=1 Tax=Agrilus planipennis RepID=D2WLV0_AGRPL
ggataccactgaagataacgtaaaataaatccacgatcttgtattggtagaccgtcaaatgaaggtacgtgagatagatgagacagtgggcatctcaaaacatctccttggtcatatcctgcatgaaatttttggcataaaaaagctgtcggcggaatgactgccgcatttttttctaacttcgaacaataaacgtaaccatgaggccacttcacgtttgatgctgtgtaagcgtaatccaaaggagtatctacgttgtttcataaccgtcgacgaaacatggttccactgatacacaccagagaccaacgaacagtcaatacagtggactccaacccgcgaacgtgctctgaagagggcgaaggctgtccagtcggtccgaaaggtgatggcgtccattttttgcgattctcaaggtgtgatctatatccacttcctggaaaagggcaaaacgattacaggtctttactatgccgcattattggcccgattctacgccgaatttaaaaaaaaacagccccaattggggaagaaaaagtactctttcaccatgacaacggtccggctcacacctccgccatcgccgaaactgc

SEQ ID NO: 11907 - DNA, 590 bp, Diabrotica virgifera
  SmartBlast Evalue=1E-20; Info="Alcohol dehydrogenase, putative n=1 Tax=Pediculus humanus corporis RepID=E0VAP2_PEDHC"
aaaaatctcttaattaatggagtagagcatcatgttcctagtactaatccgttggcatccaatgtaagccaaattgtagatcagatttcaccatgtagttagaacatacatcttgaccagtgtttggcattgtggctatttagcaaggacagagaaagggaaccataaatggcatggtcttgggaattgaaaactacttaaaaaaccacaaacaaggagacgaggccgtgataatgaacttgtcatcaattagtgttctacaacctgttcctatatttccagtatacgttggaacgaagcacgcaattgtcggcttgacaaggaattggggccatcacttacattatgatcgaaccaaagttagagttgctgccatttgcccaggagctactgatacttcccttcttagaacagatgtatcaaaattgtgttttaatgaagattatcgatatatgcatcaacaggtgatcgagaactttgatgtacaaagtgctaatcatgttgccagagaagccatgaaagttctagaaaaagctgagactggcactgtgtgggtaatcgaaaacagtcaacctccatatgaatataaa

SEQ ID NO: 11908 - DNA, 588 bp, Diabrotica virgifera
  SmartBlast Evalue=6E-19; Info=Breast carcinoma amplified sequence n=1 Tax=Aedes aegypti RepID=Q0IEN4_AEDAE
gtgaaagtagattttcccttttgagctttacgagttaacacagacgtatgcaccgtatgttacatggaaccactggaatctccaggaaagtgaagaagattttccccgaaaggtgttggggaagcacgactagcagaactgaaactgcttacggaactgaggtcgtcttctacttcacgaactgggtaatcagtcgcatcaccagtatctcttaatccgggcgattccaacattgcgtcggccagatcctctttcaattgcaactcccctactcctcctccttcttccaaagttctatggtaattctccagcagatgttgttcgcaactcgatgcagaacttgattctatcagaacagcgtttgctttcgttatcggcatattgatgggtttggagtgacccaaatcgataggttgagattctcctactgacaggggagatccggcaatggttttatatgttttaaaagtaaactgtggtcccatccacaacctcctgtgaggtcctgcatgtgtaataatctccacttgcgacaaccagtgctcatcattataatccggtttattactcttaacttccaccttatcc

SEQ ID NO: 11909 - DNA, 593 bp, Diabrotica virgifera
  SmartBlast Evalue=3E-24; Info=NF-kappa-B-repressing factor n=1 Tax=Harpegnathos saltator RepID=E2BVT2_9HYME
tccatccacattgttttgaattttaattttgtttaattaaaattgtaagtttattaatatttttctgaaatcaaaatgaccaagacgtacccaaccaactgggacataaacaaatataaggatgatacagaaccagagcatcactgggaattaaggaagaagttttttgaagcccataaaggcaacttcagtgaggactatttagttgccttgggaaaggcttttaccaatattgaatttatgggttgcatgtatcctcagaaattgatggttcgcatagctgaactttctaaagatgttgcaaaagcttacagggaggaaaagaaatcaaagttgcaaagaacatttgtaactgcttctagcgctgctgaaaccagaataaaaaataggaggcaagatcctggtccagcacaaagaggaagaagataaaagaaagactgtttattaatattattacataagaatttacagtgggacacatgaaatgaaatgcaaaaattcaatataaaattttattaaaaacatatacacaaatcaaattaattctggattcattataactaataatagtgacaaaataaagtttgtattgc

SEQ ID NO: 11910 - DNA, 576 bp, Diabrotica virgifera
ctgacactttcttgttttgaaaaatttgttcaagaatggaaatatgaagacgtggaaagatatgcagaaagttgagacaagttatgtaaggtctagaacagttcacacaaagaaacaagatgatttatactatgagtatagtttttaatcaatttcatgctatgagtgtaacagaaataacataataatatgcaaggagtatagatgctaggagagtatattatattcattgatgtggatataagcccaactataaaataattaggacagagaaacctgttccattcattgtccctccagactgatttgcaaactgtgagatcaaggacagctttctatcagttatgtattggaaaacacatagctgaacatgcatctgtaaaaactacaagaaaaaatgggtagagaaattaatgaggtgccacccaataaaatttcatgagattcaagaatgtgaagatacatgagcaatttcagatgatgctgcaaggttgggagaaaataaaaagagaaactgagtaaacattgaatttgtatattaagatattaagatttgatattaagataggtttttag

SEQ ID NO: 11911 - DNA, 593 bp, Diabrotica virgifera
  SmartBlast Evalue=5E-64; Info="Rolling pebbles, putative n=1 Tax=Pediculus humanus corporis RepID=E0W098_PEDHC"
gcgattaataatcctgataagtctggtcgaattccgttagatctagctgcgtttcatggaaatcaagctctagtgcagtttttaattgatcgcggagccacgattgaacatgttgacattagcggaatgaggccattagatcgagctattggctgtagaaatgttcaagttattcactgttttctgaagaagggtgcaaaattgggacctgcaacgtggagtatggcacatggaaaaccagacataatgttgatacttttaaacaagttgctcgaagatggtaatattctataccgcaagagcaggctaaaggaagcagctcatcgataccaatatgccttaaagaagttcccaactgaagaccaagatgaacataataaaaccttcaaacaacttaagataaactttttgttaaacttctctagatgcaaaaggaaattaggggaatctcaagaagccattgaattggcaaatctcgttatagaattaaaaccagaatcttacgaagcatactacgccagagcgaaagctaaatggatcaaaacaaatacgaaagtgccttacatgacgtgaaagaagctcaaagaagagct

SEQ ID NO: 11912 - DNA, 592 bp, Diabrotica virgifera
  SmartBlast Evalue=4E-39; Info=Exosome complex exonuclease RRP40 n=1 Tax=Camponotus floridanus RepID=E1ZVC2_9HYME
gggttgtaataaatgtgtattaatttgtgtatgtttattaaaaaaagaatttgttgtaaaaatgaccgaaattgaaactgtatttccgggtcatgttgtagcaaatgttaaatccttgagaggtgttacaattttgggtccaggccttcgccagaatgaggaaaaaccaaacactctatgtgttgcccagccaggaaaactcgtctataaagaacctaatctatattgggtcgaaggaaataggagaagatacattcccaaaaaaggtgatttggtggttggagtgatcattaaaaaatcaggagatactttaaaagtagacattggtactgctgagcatgctgccctatccttactagcctttgaaggagcaaccaaaaagcagaaacctgatgtacaagttggagatgttgtgtatgctaggttgttgaatgctcacagagaaatggagccagagttagtgtgcgtagactcgtattataaagctggtcccttaggaattctctcagatgaaggattttatataaatgtgtctctagtattagcgcaacagcttttagatattgaaaatcctctcttgagaatgattgga

SEQ ID NO: 11913 - DNA, 590 bp, Diabrotica virgifera
  SmartBlast Evalue=1E-42; Info=Vacuolar protein sorting- associated protein 13A n=1 Tax=Camponotus floridanus RepID= E1ZV01_9HYME
cttgtacatcatgttggccttgaagtcaacttcggtcttggggtcgatctgtacgtgccaatcggtgttgggattgatttcggattcccgtaaacatgcttggtacgcattttctagagctgtagagagcttggcgtcaaagaatttgaatctggtgcttgatagcttgcaggattcccatatcacacctgaactagcaattccaaggtacataatttcctgtctcgcttggttattaacaagcgataacccaattccatgtatcgatacagttatttcctgctgaatgacctctagaatattactggcttgagctccttcggccagagccctatcttcagtgaataggagcacccgctgcattccatccaagaatgaagtccagcagatgtgagcgccatcttctggtgcaaattcgccatacatatctttacgtagatcattaataatttcctttttgtttcctcgatcccacacgatggatcttggaccagatggattctcccaggtgtaatagcaacaagttgatgggggtaattccctcttttgaaccgaatccttttcccaatagctgatagtataattagagt

SEQ ID NO: 11914 - DNA, 593 bp, Diabrotica virgifera
  SmartBlast Evalue=8E-16; Info=Endonuclease-reverse transcriptase n=1 Tax=Bombyx mori RepID=D7F168_BOMMO
ttgggaataaaaccagaattttttattaacgaaaaaataaacgtttgtttgacgtttccgctatcaaaactgaatgtcagtttgacaaaactagaaattaatcaatagaaagaaaaatggagattatattgccgggatctacataaagatgatcaacgccaggaacgtttaccaaactccagaagaaatggaagaagaacctatacccgaactatacccgagaatggaataagactggagatcagtaaactcgagtataacaaagcaccaggtccaaataagataacagcagaaatgctcaaagctacagaagaaatcggaataaaattgcttcacttgctctgtaacaaaatatagcattccaaacaatggcgtaagactgaacagaatctacaacaacggcaagacataaaaaaggtagcttccataaatgctataactatagaaccatcttctttatcccacatgccagcaaaataatgctacacataatgaatgagagacataaatctttcctacaaagctaaatagatcaaaaagtcccaagatcaaactgggtttagcaaaggtagaggtactcaaaaacaccatat

SEQ ID NO: 11915 - DNA, 589 bp, Diabrotica virgifera
  SmartBlast Evalue=5E-57; Info=1-O-acylceramide synthase n=1 Tax= Camponotus floridanus RepID=E2A0K2_9HYME
atatacaaacagaaaaaaatcaatgccacctccatcttcctaaataatccttaaaaccttttcgtcgtttcgtcattgctatctttttcaggatttcctgaatgtgcagctgcgtcattttgtcctgcaaaatttgcaaatgatccaccttcggtaattcctgcacgtacactttttgtttctgaagcgttctccagtgcatgcatccttctagagagcgtcggttgacagtgctatctccatcgccgtatatcagagtaggatagcctgttaaatcagttccaggtttgtagtataacctttccacagtctgaacacccgttccatataaacaataaacttcaacgccaggtggcttaaaattttcttgatatggttctgtatctttcctcatttcccaaccgttgggataattgattccttgaaaaattgttctaaatcattgatcgtgtagtttttcttatcagtctgtactaagacctcatctggtttccaaaacagtttcgacggtaacagccaagctaagctcggtgacgtaatctgttcttgtctcattacactctctctgagggcgtatgatcctaaatca

SEQ ID NO: 11916 - DNA, 590 bp, Diabrotica virgifera
gtacttttcgtagccgttgctgccgtcagcgcttcaggcctcctcggccacggtctcgtagccagcagaggagccgttgaaggcgcactaggaggccaatggattcctgatgtaccagttgccggacatggtgcaggtatcgtcggtgccggagtactaggtcacggaagtgccagaggtgccctcgaaggtgcccttggaggacaatggatccctgatgtaccagtagctcatggcgctcccgctgctgtcctcgctgcccccgctgctattgctgcccgcggtgttctcggtgctccccttggtcttggtcttggtcttggagctgttggacctcttggtcttggaggtgtaggacctcttggacttggagcagtaggacctctcggtcttggacttggacttggacatggaatcggacacggagtttccgcaagaggagctttggaaggcgctttgggaggtcaatggatccctgatacccacggtcatcattaagtgttcatgtagctaaggggtacaattttcttttctctttcctttttctctttctttttctctttctttttctctttctttttcttctcttt

SEQ ID NO: 11917 - DNA, 593 bp, Diabrotica virgifera
tggaagaagagtcatagtcccgaattaatccagtttgtttcagttaccggctcattacataagaagcttacaaaatattacccttctttgaaaactatacttgtttataagagtgatatctctgatttctctctgcgatttatgaataagggccagcttcttatagctgaatcaatttttccattagtaaccaccagtaccttcaaagaagcttcagatcttcgtcatcttggattctattcaaatccaggattggagtttcaagacaaatgtttctcagagctaaaacatttgagaaacttaacaatatacaaccaaaccatgcctactctcaaatatactactctttatggacttactaagttaaaaaccttggttgtaatggggtcagatgttgtccaaatcgaggaacatgctttcaaaagaaatactcatttgaaggagctaactctcgattataatcctctagatcactttcacgtcaatatcactttcttaaaacacctgcgcaaactttctttgatgaataccaatttgaagaaacttgaccttccacttttcttcccaatgaagcgtttagcaatcttaggctt

SEQ ID NO: 11918 - DNA, 592 bp, Diabrotica virgifera
acatgaataataaattcgcctcgaagttacaataatttcatatcattgcgccaactctgaattttgattaacaacggcgtaaattgatattaataaatctaaaatcaaatgggtaggtacgtgagttatagagagaaaatagattttgtgaatcgccggtacataaatctttctgcaggtattaaggcagaggcttactcttatcttatagattataaagtaggtataatttggtcagtcgtacctaagtatatagtttctccaatcgacttagcttacgctggattaagccgttttcaatagccactgtaatagtatttatgaatgacagttttatagtcttcaaaaatgtgatttccataattttaaattacaaattacgctgttgttaaccaaagttcggagtttgcgtaatgatgtgaaatgattgtaatttcgagactagtatattcatgtaaatgtcattgcatttgagtgacattatgttttccataagatgtgtgcggtgtcctttcattagttcttaaatggtcagatttcacactttttcaaataagttttaaattacttaaagcattctaccttgacggct

SEQ ID NO: 11919 - DNA, 591 bp, Diabrotica virgifera
taacatatatatacagctgaagcagcctatttatttaatgttgggcaattaacagattacaatctcattctctgtcgaagtcggttccatagtgacggccaagctgagacagttgtttcatagattccatgtctgagaaagaattgtcttcagccttttcagattccgcaagatgcaaagaattattatccagaagacttcgactactactaaaaaatggacgtaaactcggtttgggagtactcgttatagatatagtatcaggttctccagaatcgtcgtcacaactaagcgattccaactcttgaaataaagcttgaatatcacttggattgtctaagcaatctcgtactcttcccccttcattatcaggtaccctgaatcttctgagcaacgatacaaatctttgtttcaggttatgccgagtatgtggaagctttctaataggttcactatcggaaaggtcgactccttcttcttcgcctgaacttatctcatcctcatcttcgctgaaatcgtgttcacgaatcttatgttcatgatcaactggagtagagctaagctgtaatactgaaagtctagcgacaggtg

SEQ ID NO: 11920 - DNA, 593 bp, Diabrotica virgifera
attgcagcttcaacataattgaaaacaaaagctagattttacaatgaaaggtatagctatcattgctttatgcatttccgcagtagtatctcttcctttgaatgtcattgaagatgaaagcggacaagagtatgttttagttccagtacatagagaaagaagagacttaacgtggggcgccaaccaaaatggatacactcttggtcaaaaaggaaatatctgggaaaatggtgcacacaaatttgacggtgcttacactggttcgaaagcttgggattctcatggactgaaaccagattcttttggaggtcgtgtagaatacactaataaaccaacaaaaactacggcctttgtaggcgcagacaggacccccggatatggtactgatgtcaatgctggagttaaatacaactttgttcaagataaaaaacttaacattgatttgacaggacaagtaagtcagcatcacggtggacctggtggaaatggtaaacccgaagcaggagtatttttaaattttgaggctaaaccttaattcacaacaaaaataacaaaagactgtactaaatgttttaaataaatttttatttttt

SEQ ID NO: 11921 - DNA, 580 bp, Diabrotica virgifera
gatagacagaaatattacgatagtgagattattttccaggaaagtgggcaagactgccaatatgacagacgaactgtctatacaaggcagttcgtaggagacttctgaaaagtttgagctttgcgttgatcgcagaagtaaactaaattgaaagggtaggattttgtttgtttttcgttcatttttgattcttgacctatttcaataaagtcggtttacttttcaaaatggaggaagaacctttatgtagatagtatttcaattttcgtcttaaaattaatatatacgaaaaatttgtttcactattttaaatcagttgtgaacttccgatgttgaatgatttttattagtattaaataatattctattgtttttttaggtatggtaatttcatttttagttaagttcttatgtatgtaagtttatagttatcttatggtgtaaaaatacaaaatataagttgttgcttacttgaaatcacatattgatcaagtcgtcacgaagaaagacgttgtttttttactaggagcttctgagtaattttgtcgtaaaaacgaaagtaatgcacatattgatatga

SEQ ID NO: 11922 - DNA, 593 bp, Diabrotica virgifera
  SmartBlast Evalue=3E-43; Info=Cytochrome P450 345A1 n=1 Tax= Tribolium castaneum RepID=D7EJT0_TRICA
tgtgttgggatcaagatatacaagaaaaagctaggaaagaagtgctaagatgtatggaggagcatggtggtattacgtatgaggccatgctaaaaactgattatttggaaatgtgtttttacgaggctatgcgaaaatatccagcagtccctcatttttgtcgaaaatctgcaactgactacaaaataagaaacacggatttagttcttccaaaaggaacccgcatatacataccactattgcctctacatatgaacgagaagtattttccggagccacaaaagtatgatccagaacgttttcgaaattttgactggagcaaggatggaaaactagtatatatacctttcggagctggacccagacgttgcctaggggaccgttttggcttaatgatgtttaaagtggcatttatgcaatttctttcaaaataccgaatagagagagccgaagatactcctgatgaacttgagtttgaaaaaaagacgtttttattaaagccaaagaaggggtacaatttagtgataagatcattatattagcatatatgtagaattacctcaactttttaaataaacaatatactaattgtt

SEQ ID NO: 11923 - DNA, 592 bp, Diabrotica virgifera
  SmartBlast Evalue=2E-27; Info=Endonuclease-reverse transcriptase n=1 Tax=Bombyx mori RepID=D7F172_BOMMO
gaataaacctaggcggtgtcaagatatctaacttgcgtttcgcagacgacactatccttctagcctctgctgaagaaatttctaacttattcacataactcgatgtagaaagtgctaagtggactcatggttaactacaacaaaacaaaaatcatggatattgatcgccaacaacattatgaaactatttgaactattgcggggtacgaggtagtcttctctaagatatatcttggagatctagactttaaataataacacaggcagttgtgaatctgaaattcgaagacgcatacaactagctagatcagcaatgactgaattaaaggagtatgacttgatcgtcacattactatgacaaacaagaagatattcttttcaactctggtcctttcctgggccggaaatggacagtcgatcaatcagatagacgacggattgactcttttgaaatgtggacatggagacgactgcttcgaattccatggaatgcttgtcgcacgaatatctctgttctaggtgaaaataaacccaatcaacgtctctctagtactgtttactctgaaatatcaaagttctttggtcatatgca

SEQ ID NO: 11924 - DNA, 587 bp, Diabrotica virgifera
tgtagaaaccatctcaaatattgaagatcgttctacggctgataaagctgctgcggaagaaatagaagaagaagacgacagatttagcgaaaccgatgaaagagaagaatctcgcaagagcaaggattgtcagtctatcgaggtgaaagaggaggaggaagaagatgatcgatttactgagaccaaagatatatcagaagattatgagtttgatgtgtcagatacagaggaagtatcacccgttattcctacacaatctgaatcgcttagaaatgagactgttaaagaagatattcttaatgttagtcgggatgaggaacaaagttctgagataatagaacgtgaagatgatccagaaattgacattgaaacattagaagaggatgaagagttatccaaagaaattaaaaataatgatgaagctacaattaataaaaatgatagtgatcagccaacaaaagatagtcatgaaaaaataaatgaaaagtgctaaaattttcattacatctgatgacctagaaaagaatcagtaacttcttcggttgatgataaatttgcatgctcactgagatccagtgattcagtta

SEQ ID NO: 11925 - DNA, 587 bp, Diabrotica virgifera
attgtggtccagtatcgttctcattatttttctttcaactttcagaaggctatcttcctctttctggttaatagtcattgtttccatcccatatgtaacaacaggtcttattaatcatcttagaatcttgcttatcagcagatgtccaataatatagctctgcgatattcaccttgttaggccaccaaattataatgatattatgaaggcacctacatatatgcaacagaaacttgatcgtcaagcttgtttctataccttacgttatttaggagaacccacttcatgcggaagttgtgcagagcatccttaattctttgtaatcctgctctgtactttttaatcaacccttctatcttctttcagcgtaaagccaaactaagaaaactaagaaaaaagtgaatgtgtcccagatgccaagactttcgatcattcgtcatacctggacaaccaattgcgttaaaggaaacaggtcacatgctccgtgggtggtgtgttgacggaaacaattaaatgaaattacaataagtgtaagacaacgaacaatatttttattattttggtaaaagtcgtgcttatatctcgta

SEQ ID NO: 11926 - DNA, 591 bp, Diabrotica virgifera
  SmartBlast Evalue=5E-11; Info=Syntaxin n=3 Tax=Gastropoda RepID= STX_APLCA
gtaactgaagtacgatgactaaagataggttaggtgagcttcttaatgcccagagaacaagcagccgcaataatgaagtgaaagtagacattatcacaaacggagacgtggatagtgcaaacgaaaatgtgaatttacgaaaagtgttcgaaagggctgaagttttgggacagtggatagagagtattgagcaaaatgttgtggcaatcaaacagtatattggaaggttggataccttaagcgttaatcatagagacctcaccgataaaatcgaggcgctattccaaaacaacaccagtatatgtcacaaaatcaatggaaaattaaaagaaatagaagcagaaataaaatcagccaataccgactcagcggaaggcaggataaagttaatacagctgaatacgttaaaaacacgttatacgaaaatttttaaaatcaacaatacggaattggaaaattttaggaatattcaaaaagagaatttggaagctcagctcagagctaaaggagttagagtgactgacgaagaacttgagtcattacttgacaataaaagtgatatacagatttttacagaaaatattatagcgg

SEQ ID NO: 11927 - DNA, 587 bp, Diabrotica virgifera
  misc_feature (561)..(561): n is a, c, g, or t
  SmartBlast Evalue=2E-29; Info=WD repeat-containing protein 36 n= 1 Tax=Camponotus floridanus RepID=E2ABT5_9HYME
atctcctcaaccttgatgtgatcaagcaaagaaacaaacctaaagaacctcctaaagcacccaaagcagcgccattctttcttccaacggtagcgtctttgagtggtattcagtttgatgtcagaccagaaacggaagagcagacgaaatttacaacaccacttagttttgtgaaccttacagacttcggaaaattattagaaacgtcaaaaacaactgacattttcaatccagttatagataaacttaaaaagcttggtccttcgatgatagattttgaaataaaatctctttcgcctgacaatggcggtaccttggaagtgatgttacagtttttgaagtgtgtggagtatatgcttaaatctaataaagatttcgaactagccgaagcttatttaagcgtgtttttgaagagccatggacttgttattgctcagactaagttgttaagagagtatctacccaatgtaataagctgtcatcaagcaacgtgggaaaggctccaagataaattgttatattgtacgtgcgtggtgcaaaacttaaagactatgtaattgnttataaaaataaatatattttacatt

SEQ ID NO: 11928 - DNA, 592 bp, Diabrotica virgifera
ttatttctacggtttaattattattctgttgattcccatttaattaactgcttgataatcgaaaactgttgacaactaaatatttgaacgtttttgcttttcctcacgtttctcaagttttatcagcctgatgcaaagaaaactttgaaatcaaacatacgagtaggtagtgccttgtcaacaataattgccatgcgtcatttgagtatgaattacgagtaaaatacaataatggtatgtggaaaacctactcatccaaaagtgagagatattattattcatcagtaccataaagggaaaacaatgtgtgaaatgtccagtgaatggactgtagcaacaactatgtactgtaacggcaaaagctcaggccgtccaaaagctgtttttcaaaggagtgtaagtcatttaattagaatatgtaagttgggaagaagaaatacactacgagaggtaactgctaggtggaatagagaaactggaatgaatgtttcaagagaatgctgtcgcaaatatatccacaaaagcggtcttagtttttatggtatgtttgataggttcttctttgcgataaaaattttctctttttgaagtt

SEQ ID NO: 11929 - DNA, 585 bp, Diabrotica virgifera
attagggattattcttttgttgacggcagatgatttttaatatttttaaatgtttgtcttttgttgattattttagaaacttctggttttgctctcttttctttattgactccaatgtaaaaatttacattgttcccgtttatttccttttcttgtcgtttccaggtcatttagcgactgcgctattatgttgaatgttgatagttcattatagacctcagtatcatctgatgtttcttcttttcccatcaagtattttgtcaatgaaatgatcatatctgtcgtatcggaggtaattatttaacagtcccgatagaagtctgtggacctgatgattttcatggtgttttgtacgtttataagtaatattgcgctacttcttatgaaaattcaactgagaaaaccaacagattttcgacatataacccatgcaatatcattttttattgcgcacatatattctaaatttcactagattttgatccatggtcgtgtttcgtattaaacagaataaatataaataattactattctgccaacgtccactgctgatttgcaatttctaaaattttcactcctattatt

SEQ ID NO: 11930 - DNA, 592 bp, Diabrotica virgifera
  SmartBlast Evalue=0.000000002; Info=Short neuropeptide F n=1 Tax=Tribolium castaneum RepID=D6X455_TRICA
gttccatcaacaggtgtattgtttttcttgtatatacagggttgatttctgcaaagaatgaacacttctaccaccgtcagattcttctgtgctatcttttcatttctcgtcattttagcagtggtgtctacagccccttatgctgattatgataacaatatccacgatctggttgagattcttatgcaaaaggacattgacgaccaacttggtctgcaccaggtagaaagacgtagacaacctcaacttcgtctcagatttggaaaacgcgccgatgactttgatgcttacatgtctcatgctaacggcaacgaaagacctccgtctctacgtctacgattcggaaaacgaggtgatgataccacaggaacaaacgaaagatctccttctttgaggctccgattcggcaaaagatttgatgacgtcccagtaccggtctctggatacatacccaccgaaggcgagaattaaaagtttatcctcaaatatttgtcatgaactatggaaataacgtgaaatttacttttcactaatttcttttctataaatcgttactaaatccttgttgaatacattatatttttattgtgca

SEQ ID NO: 11931 - DNA, 591 bp, Diabrotica virgifera
  SmartBlast Evalue=2E-16; Info=Sugar transporter ERD6-like 16 n= 1 Tax=Camponotus floridanus RepID=E2A9Z9_9HYME
cactcgataggtactttaactcgctttcaataattcataaaagcagaacggatcatttttaacattagtatcctttacggactagtttttaaaagtagcattgataagagttaactagtgaagtctgaactgcagttacctttatcatccattcgttggtcggaactagtgaaattgtaacgcgcgttttgactgttgtgactatgaagttatttgatttttctaagtttaaatccagaatttttcaatatttggcggcactggcagccaatctgggaatgttgtccataggtcttcattatggatggccctcgtctgctatttcagtacttaaaagtggagaatactcatttaaaatgactgaggaagaatatcgtggatgatagccgtaacgccaatgggttctgtgattggagacgttatagcaggcttcagtatgaatatattcggcagaaaaaagatgatatggttttctgctatacccttaacggtatcatggatacttattgcagttgcaaattcttcaggatatttattcgctggacgcataatagctgggattgtagatggattgttatttacagcaattcc

SEQ ID NO: 11932 - DNA, 590 bp, Diabrotica virgifera
  SmartBlast Evalue=2E-63; Info=NIK-and IKBKB-binding protein n=1 Tax=Camponotus floridanus RepID=E2AZP7_9HYME
gctctacagtaatcctagcccgctttaaagcttgcttccgtttcaataatacctgcattctggtatttgctgtaatgtataatagcttctctataccttttggatatatcttcaggtgctaaagcattggtaatcaattttttgacattcaaagcaatagcaggtggagtctgactggatttacgaggcgaaccctcctgtaaactagcatttctatgaagcggaatatttctttgcatttctggataaagcaccaatgctgaagctgcagaaagtccctcataagctgctcctagccataaccaatcatttacggactttaaaatatctgccgcctgagaataatatgacaagctgtcagttaaaagaccagtttgtaagcacaggtctcctaaatgttttgtcatccttcctgtacatcgctttttattatttcttgattccatgtccaaaccaacaaaatccttttttcaaagggtgctagaagcagagacaccctttctaatttctctcttgatctatcaactcgctttgaatcaagaacccaaaaagtgagtttataaattcatttaactggctctctagatcgg

SEQ ID NO: 11933 - DNA, 588 bp, Diabrotica virgifera
aaggcagtatttacattgttttgattactaggattttggtcaaggtttctaccttccgattgaacgttaaatccagtagtgggtgacacaaattttctaaaattttctggttcttttaccggtagatattgatcagtaagtgaactccgaaatttagcattattttgtttcggtaagttttgtacgaatctgttgtcaggttgtctgagtacttgtggagctgaatactgagcaatattttgttgaatgattctttgtgcttctattttttgtaaaagttgtttcaattctctaacctcctccaaagtagcagcatctaccactgctctatcaggagttccgtagtttctttgaggctgagctatggagggattaaattgagaagaactatcaacttgttttggtacaccataaattgtttgtggaactgcttgaacgctgctttgagaatctatatcaggaacaccgtatctggttgatagtggtctttgagctaaattacctttattggaccaaactctgtcaggaatagttctgtatcggctatcttgtataaatttgattggaggcaggttatttcggtacgtt

SEQ ID NO: 11934 - DNA, 589 bp, Diabrotica virgifera
  SmartBlast Evalue=1E-41; Info=Coiled-coil domain-containing protein 6 n=3 Tax=Aculeata RepID=E2B485_9HYME
caagttagtgtaatttccttataaaattggtggtgcttgttattattcatatttttgatatttttaatagttataagacgttagcgctgattcgatcgttatttttcgaagtctattaaatttttttattcattcctatcgtagatttttgtacggtattgttaaggtttttggatatattttttcttaaattgttagtatgttctaaactttcttcattgttcgataacgaaaagtgctcaaacttttttacattaataaaagaatggcagattcggctagtgaatcagattccagtagcattgatggtggacccatcatgatgccacccagtcccataactagggagcaacttcagaagcgcatcgaaagtcttcagcagcaaaaccgggtgctgaaggtagagttagaaacttataaattacgcgtgaaagcgctccaagaggaaaacagggatcttagaaaggcatcagttataatacaagcgaaagcagaacaagaggaggaattcatctcaaacaccctcttgaagaagatccaagtgctcaaaaaggaaaaggaaacactcgctcatcattacgaaagggaa

SEQ ID NO: 11935 - DNA, 591 bp, Diabrotica virgifera
  SmartBlast Evalue=2E-60; Info=Basement membrane-specific heparan sulfate proteoglycan core protein (Fragment) n=1 Tax= Harpegnathos saltator RepID=E2BPV9_9HYME
tcaccttgcaagcacatctgccatctctacaatcggaggagagtgaacctctagggtcgcaattgcatggtggtggggttcctctgtaggtgcaaggcactccgttagatggatctccattatatccaggcagacattcatcgcagtagtctccagtagtgccgtctttgcaattcaagcaaagtccggtatcaggatcacattcgtttgaatatccattgcagtcgcaaatttcgcagagtcccaggtacagaccgtttggtgttcttgtgtaaccaacatcacaattctcgcaagacaaaccagtataaccaagtggacaatggcattgttcaacttctacagctctttggagagaacctgtgttgcgttcgttggcgatgtccaaagagacagaaataagagaggattcctgagtgtttgtgaagtaagtagccttgacgtagatagcttcgagatcagccaggaccataagaagatgttctctatcggccaactgtccatcaatacgctgccagtactgttccaatacggtactgcgaaagttgtggcgcgttggattttgttgggtttgtattgcggttgtagtac

SEQ ID NO: 11936 - DNA, 591 bp, Diabrotica virgifera
  SmartBlast Evalue=7E-47; Info="Protein phosphatase 1 regulatory subunit 3D, putative n=1 Tax=Pediculus humanus corporis RepID= E0VJ64_PEDHC"
catccttaaaatttgctgccgttcatggtctaacacaaaaaacgcaaaactggcccttaccagtaaggactattattatctaaatgtgtccaactagcaaattctgaccacgattccatttttgcttgtactatatcattacattttcttattgcctggcttttagtttcctttctcgaatagatatcatcgttggacagagatctgtgaagagtagatttctttaagagcacataattcttattgtagttattatcccagtattcttttccatcgcatttgaagcacgcacaaaattcaagctttttagtgttaaccggaattggaattttgaaagagaaggtatcgtaaagaacattaatattagtattcatattgtttggcacgtaggtacaaaaacagtcttcataatttttccaatcgttagtggaacacctcacaaaaacctctttgtggaaagataagtttctcactttaacggtacccagtatgctatcctcagcctccttgatgataacgttttctagactgacattatccgtatctagcctctttcggaaagcaacgtaatcagaagcaggttgaggaaag

SEQ ID NO: 11937 - DNA, 588 bp, Diabrotica virgifera
ccagttgtgaaagcaaaatcatgattgcattgaaactattggctattgtcgctatggcctttttggctgaagcttctgacttggactcaggctataggatcatgtcctgtgctaaaagagcaatcaccaacggagttccagaactgaatatcccaagtcacagtcctgtttatatcacccgcaacttttcatggagtggagatataggagttgcaagtgcttcattcgacttccatgatttcatttgggatggtcttccacaatggaatttgactgcaacacaaatcaacaaggactccgacccttatgcagtatttgactttgatctctcctggaaatggatgaacatctctggattattcaacgttacaatcagagagttggtattggaacaacactataacggaaacattcaatttgaatggaccaattcacactggaaaggaaggatcaacgtaaccaaaccatatttcaacctcacccaagaggttaacgatgcccaaattaaatggactgtagagcaccttgatacaacggtaaaaggtcttggtatctggaacggacccgttgaagcaacttttggcacag

SEQ ID NO: 11938 - DNA, 583 bp, Diabrotica virgifera
  SmartBlast Evalue=1E-19; Info=Retinol dehydrogenase 14 n=1 Tax= Harpegnathos saltator RepID=E2BNF8_9HYME
ggggacaagtgtttttcaattggccagtacttttagtaatatgtgcttttttctttaatctttttttcaaatattgttgtatgagatgtaacagcaatgtgtgcttagtggggaagacggctgtagttacaggaggaagtttaggaattggacatgaaatagtactatccctactgtcaagaggttgtaaagttatagtagcagacaaaataataactgaaagtgttaaaaagtcaattatccagaaaacaaaaagctcaaattttgttcttgagcttgtagactttgcgtctttcgagtcggttaggaattttgttgagaaattaaagaaaactgaagaaaaaatagatatattgataaataatgttggaatagggagaggtgatgataaacctactgatgatggtttgaatgtactgatgcaaataaactactacagtccatttttgctgacacatttactcatcgatttgttgaaaaaatctgaagaacccaagattcttttcacagcatcaaatttatcgttttttcgtgcgaattgtgtcaaaagcataacagatgataacatcattgtctcaaataa

SEQ ID NO: 11939 - DNA, 590 bp, Diabrotica virgifera
  SmartBlast Evalue=2E-85; Info=Translation machinery-associated protein 20 n=2 Tax=Culicini RepID=B0WWD5_CULQU
gttgtctgaaaccgaaatttataatttattttaacaatgtttaaaaagttcgatgaaaaagaaagcatttctggagttttgcagttaaaatcgtctgtccaaaaagccatcagagccaaacttattgaatcctatccacatctagaaaattatatagacgctattttacccaagaaagattctcttagaatagttaaatgccatgatcatatagaaattgtagtcaactcaagtggagatttgttatttttccgccaaagggagagccaatggatgcctacattaaaacttctgcacaagtatcctttctttttaccaatgcaacaagttgataaaggtgccataagatttgttttaagtggagcaaatattatgtgtccaggtttgacttcacctggagcaaaaatgactgaagtttctaaggatactatagtggctataatggctgaaggtaaagagcatgccttggctattggacgaacttctttatccacagaggacatagccaaagtgaacaaaggagttggtgtggaaaattgtcattacctaaatgatggactctggcaaatgaaacccgttaaattaagtta

SEQ ID NO: 11940 - DNA, 589 bp, Diabrotica virgifera
  SmartBlast Evalue=5E-47; Info=CG4644 n=5 Tax=melanogaster subgroup RepID=Q9VPW4_DROME
atctaaaattttggtattaactttccatggaactgacgccaattgattcaaagcatctaagcttgggtaaagttgttgcgaaccaacttcattgagtctgcctttttgactagtcgcctgagtaggcagcctgatcacatcacaaggggatactaaatacccacctatatctgtagatatccaaggtataggagggcacaccataggaacttcacatgtgggaaatgtcaaagtttctggaatagattgtcgatatagtttagacaaaacaggatgtggtttaacttcttcttttaccaatcttccttgatttctaaatattgtgtaaaaagctggtaagtaatttttatgtttggtattccttaaaacattaacatcgactttgatatcgtacataacaatgtggtataaaaattttcctatgaaggttaaaactgctggtgcccattgctgatgatccatctcaattgtagcacctttctttttcaaaccgtgatcgatccattgccaaatttgtctgggattcaccgtaacttctttctcaggtaaaatatctagaggtttatgagtatttgcatagttactacag

SEQ ID NO: 11941 - DNA, 575 bp, Diabrotica virgifera
atgaatttgaaggctcaaaaatataagtaaaatatattaaaatttttgaaattacaaagtgtctaaatttaaaatcaaacttttgtatcagcttcccagaagaattttgattacgttgtaagctcttatgcgaagagaggcgatggagctgcattaacaactaaaaataaacaatgttttaaaatgaaaataagcccaaattagttatttggaactgctaaaatcaggtatgaacatgaatatacgcacttcgtagtttcaaaaataatatgttttacttgtgtttttgacacatgaacatggccattttgtgatattttgatctcgaaaaccattaaacttagaacaaatatattttgattccaatgaaaaatataaatatatgttcgcccgggccgaaaaaatggattttattttaaattgttttttcacaatcaatacctacttttcatggacatcaaaacgcaacataatttattccatttgaaataagaatatctataaaataagaatatcgtggctgtgcaacctgagagaatggtacggatgtacatcaaatgaatttttcagagcag

SEQ ID NO: 11942 - DNA, 591 bp, Diabrotica virgifera
acagcttcagggattttaaccaaaacttggagtaaatcaccagcaacctgggctacacatgcaagagtagttgcatcgtttccttcacattcgtcaatttcgtcggctgcctctttggcctgttcgtggattggagctagatctttgacgataggtccaagagtcttaaccaaagcgacgaggtcattctttatacatttagctacttcatctagaacctggatgcgaatgtcaacgatttcagtgtcatgactttcaatgcaagaaactagtttctttccagcatcgttgctaccttcagcaattttgtcaatgagaggtctaagttgtctaagagctttaagagctatttcctctaacgattctagggcttttttgaggtcgtcgtcatagttgtcagcaaatccgtcgatgaaggctggggctttttcgtaaactttatcgaggaggtcttcaatcttgtggacgatctttttgacgatgtcaattaagttgtcatcagctactttgcttggtgaagcaacagctgatgccaagataatagcgcagaagaagaggatgattttagccattttgtttcgattcagctcg

SEQ ID NO: 11943 - DNA, 583 bp, Diabrotica virgifera
ttacaataggaactgacaataattttgtcagtaacttgaacccatacgcttgttatttaaagcagatgctgctttactagagctcaatcttttgggatattttagaaagatgcttttagaatctggctatttccaattttctaaccctaacttttgtagaacagtgatatatgaaggctgtgtagaagtagatcaaacaagaaaaaagtttttgatgtcttagaacatgatcacgatgaagataatcttaatagactgcatttatgtggatcaggttcattaatgtctttcatggcatactttgcaagacatgctctacaccaggttgccttacctttaaggtttttttcagttggtaaagtataccaacctataaaagatgaagaaccaccctctttttttaaatctcagtcaacagagtgtggttagtatttttaatgctgatttagaagataccatcagaagcgtggataaagtagtttctgaaattcgtcgcatttataattctttaggttgtcattatagaattgtcacattacctgcatgtaaaatagaaaactctgagagcctacatatatcaata

SEQ ID NO: 11944 - DNA, 589 bp, Diabrotica virgifera
taatctagtttaccctgccttcgtttcccataactttttagaaaagggaatttgtttagtacctgtaaaaatcctactgcacagtattgtcgataataaaatccttgatgtctttgtaaatacgacggaaccaagtgtaacgcagcctgagataaataaatcaagtttattttgcacctatgcttccagtaatttctgttggttgggaaatagtaaaaacctcagaactttgcaccctctgacgaccgaaagtatttcgttaacagctgctgtgtctggaccaggtacctttgacataggtacatatatagaggtgttctgtaagtcagcaggccaaaaagaagattatgtgttacagtcttgtcaaattcacccaacgttagttgtaaaaagtatatagcggactttggaaattaaaatttctaataaatatgtacaataatttccatatttcgtcgttcagcacgccatattgccatactgctttggagtgaagcagaaaaaattttatcaatatttcctataaaatgtgatattttgttgttgttaaaattacatttattaccaataacgtttaaaaaataagggt

SEQ ID NO: 11945 - DNA, 592 bp, Diabrotica virgifera
caaaagtatatattccgttaatctgcttagctcatgctgggtaatatcgtttgaataaccactacactaataatatttataaataagttttgtggacttgaaaaacgtgatttcgattaacttttaattacaatttacgccattattaattaaggaattcatagtttgcgcgaggatatgaaatgagtgtaatttcgataccaatctactcatctaaatgttgtttcatttgagtgaggttatattttcaataagatttgtgcggtgtcctttatgcagaatcgaagtgtccaaataagctattgggcaattgcctgttgttttctaaactcttttcgcactgttcagaaaacacattcgttaaatagcgacgtatatttagcatcagctttaagaaactggtattgttgagagcaaataattatctctaatgtattttgtgacattataaaccaatgacttacctatgccttttcattacggcacttcttgaacaccactttcctacataatcaactatactaaggttacaatggggatgcactggaaatggacaggccaacacacgttgagtgttacaaggagcactccc

SEQ ID NO: 11946 - DNA, 591 bp, Diabrotica virgifera
  SmartBlast Evalue=1E-12; Info=Variable lymphocyte receptor A (Fragment) n=1 Tax=Eptatretus burgeri RepID=D2KXX5_EPTBU
ggttatacgagaacaaattgaagacgttggatatgcatatgttgaacgatttaaagagtgttaaaaaaattaacgccacgaacaatgagatcggagttttgaattgcaaatcttcaaccggttttaatgttcaattctttgatttctcttataacaaaattaaaaatatcagcgaggactgcttcaatggatccaaaattgaacatttaaaactaagcaacaacaaaatacaaaacattcctgcagagtcattccgttcagctaatatcaaagaactccatcttcaaaacaacctgataaccgaaatcaaaaaggggacatttgcaaacctccacatgagccaactgcttctcgaaaataaccagatagttgacattgaagcgggggctttcgagaattcgacgtttcaatccataaacctggacgggaataaactcagatcaatcagacacggcgtattcgataacaccaaagtggcgttcatttcgatattgagaaatgacgggattaacgaaagagcattcaacaacgtgtcgaacctttgggattccaaaagtggcacgaacaaattagagtttcgaaggactaccg

SEQ ID NO: 11947 - DNA, 587 bp, Diabrotica virgifera
  SmartBlast Evalue=7E-12; Info=Endonuclease-reverse transcriptase HmRTE-e01 n=1 Tax=Heliconius melpomene RepID= C6Y4D5_9NEOP
gtatataatatcggtttacaacgttcttcgacgtcttccgatttccaatctccatctcgttctgtcattccatagatcgtcctcgagttctctgtccctgatttctctatcaactccttctctccaacttcttctaggccttcctggtctgcgccttcctcttggttgccattcgaggatttgtcttggtattctattctccggcattctccttacgtgtccgtaccagctgagttgtttcgtcctgatgtcgtcaacaatagtatgtgtaacccctatgatttctcggactctctcgtttgttattctgtcgcgtctagatattcccgctgaacggcgccagaagtccatttctgttgctctaagcattttctctgttctgtcttttaggggccaaacttcgcatccatatgttgtgatgctttttattatagtgttatatattctttttttattctccttagaaatattttttatcccacagtacgctgttgtgtacgctggaaactactatcattacgaaaatctttgagattttgcactagctttcgtattctattttagaataaataatgtcagttgactga

SEQ ID NO: 11948 - DNA, 590 bp, Diabrotica virgifera
ttggttggtccttgaccagtttctaataagcattggtttcacttactccagttcaccttacttaaattatgtttcatttcattctactatacttggttggttcttggatagttcctaataagcattggttccactaactccgatgtactttacttaaataatgtttcatttcattctactgtacttggttggtccttgaccagtttctataagcattggttccacttactccgctgtaccttagttaaattatgtttcatttcattctactatactagtcattacaaaatattactgaaattcttttttgggtgccgtcttcttaacgaaggttggccatgacttctgcaaagtcgtctctatttttgggcttttcttattagactttgaaagtctaatcctgtcaattctttgatgttgcgcagctaggtcatttgtcgtctacccgggccgcgtctttcttctattttcccttttataataagttgaaggaagttatagctgtcttgagtaaatatgtgtccaagataaaatgttttacgtttaaattcttcttatttatcttaattttatcgcaagttaactcaatc

SEQ ID NO: 11949 - DNA, 591 bp, Diabrotica virgifera
atagcaacggaggctactatagttgcacaggttcgtcatgcccgttaccaaagcatcctggacaagtgactccaagtccaactgtgcaacattctactacagtagcttatcctaaacaaccttaccaacccaataataaacctaattgcggtaataaaccttgtgattttcctgaatcgtatccgcaatattctcaacatcaaccaaattgtaatgggaaagattgtaccaacctcgaaccaaatactaatcccatctgtataggaggagcctgtgtctataataatcaacctcaaatacctgatgcatataagggtgctggaggcaaagacagactttttgttcctaattataatcaagaattgccaccaatagtaacaccagtcatagtaaaagatcagccccaagatggcccacaaacaaattttaatgctggaagtcaagctaatgctcaagccaattcacaaaatggtttcgtctccggaagtgttattgtagaaaaaccagatggtcttttaatacctgtaattgatgttcaacctccaagcatcaatagacctggatattcttgttctggtacagagtgcggta

SEQ ID NO: 11950 - DNA, 584 bp, Diabrotica virgifera
ttgccagtgaattgtaggtatttttaacaaacaatcctgcaaaaattagctgtgagggtatacattttatgactgatgcgtgcccccatatggggggcgcactatggagtcatatagttatattaaagtgtaattggatattgaggtctttaaaacacgcacaatttttcgaaatagagcaagtgttttaaggccagttatccacgaatactttacgctatttttttattagttcacttgtatcatgtattattactacaaaaaaattgaaataagagccaataatgtaatatggttgaatttgtgatgtacattagtatacctttcgttgttatggaaatgagaaaaagacaaattaatttgcaatctgtcacgtaagattaattgttattactggttgtatattgcttaaaaatgagttctaacattgattacttaaatagtaaaacacaatcgcggttgcaataccgcaaaaatcggaagatgcttatataaaaagaatgaaacttcattaaatggatggaagaacaaaaggtaacagacacagatgaacaagttgtgcttgcttaccttcagaaaatgtc

SEQ ID NO: 11951 - DNA, 592 bp, Diabrotica virgifera
  SmartBlast Evalue=6E-27; Info="Cysteine protease ATG4A, putative n=1 Tax=Pediculus humanus corporis RepID=E0VF88_PEDHC"
attggttgtgtggggcaaagaagtgatatatctcgatcctcatcacacccaaaaaacctgttgtgtcgaaaacaaagaaacgatcgaacaaatagaagcagacttaacttatcattgtaaatacgcatctagaatcaacatactcaaaatggatccatcgatagctatgtgtttcttttgtaaaacggaacaagattttgacgatttttgtcagagagtaaaaactgatctgatcgatccagaaaaagagccaatgttcgaaattagttttaacaaaccaaaagagtggtcaccaattttagaaaacgctgtagaagctggagctgcatcattcacagattaccaagaatctagtagtaaatactttgactcagaccacgaattcgagattctctaatgttttgaatcgtcgcaaatgttgtattttgtgtccgatggccaatgtgaactattatattgtaattcataacgactttgacgaacttgaaaacaaaaagtgcttattaagagatattgctatgcatttactttattgtacatacatgaagatcacttgttaataatttttgtatgtatattaaacatgttcatg

SEQ ID NO: 11952 - DNA, 588 bp, Diabrotica virgifera
aagacaactaggatcaatgtcttaagtaggttatagataaattaatacttgcttcgtggtcttacccagctacgctgggtgagttcaccacagtgcagtgttgtaattggttttgcctaacccccaggtgaatgcattttatttaattattattcacccgtgtttttgtaataataaaataggagaatgtaattttagaactattttactaattctactaatataatgtgtattttaaaagtaactattgttacaaaatattacgttgtaaatattcgaatccttttatgtgataacactggtttgttgaaatcggcaacaaaatagatgaattagttctgtgttctgtgtacggtttacatcggttctgtttgacgtttatgaaaagtttagaaatatttattttgaaaataaaaactgtagaaaatctgagtatatcttggttagtgtttttaaaatatctatgtaccagggctgttcataaattaagttagtaaacacaggtatatacgtattatgtgaaatttagggtactttaagttttatcagggaagagactgttttatcaaggaagaggctgttttatca

SEQ ID NO: 11953 - DNA, 589 bp, Diabrotica virgifera
  SmartBlast Evalue=4E-18; Info=CG7044 n=5 Tax=melanogaster subgroup RepID=Q9VDE8_DROME
acgagtttcaactgacgtggcaagatacggtcgaatctttatgtgttctgtacattgtttatcatcttctcaatggactgatatggccgacaaagatagtggtcacggcattgaaattagcagagaaaggaatctccaaatatatgacttgcgatttggctcttctcattgatgatgctgagaattccattacgcatctacttcctgcgttgctacgcgtcaaattgcacgacggggcttgggaggtcagagacagcaccattgaactgctccagtcacttttcatgacagccatcaatacaaaatttacttcctacaaaaagctacttttagaaaatgatctgccttgttcggtattaaggatggccactgatgatggaaatccattcgtcagagcttcagctgtaagatgtgtccagaaagcaatagaaattcctgaattctgggaagctttaacaaattccttcaacttctacgacattgtttaaggatattacaatacgaaactgaaggaatagttcgttgtgaagctgctacgttagtagattgtatcttcacacaccaaagcataccccaagacctaatgaac

SEQ ID NO: 11954 - DNA, 590 bp, Diabrotica virgifera
  SmartBlast Evalue=1E-28; Info="Importin-4, putative n=1 Tax= Pediculus humanus corporis RepID=E0VW37_PEDHC"
attttctatatagggtagaaaagcaacacctgtgtttacacatatatctttaaagataagcacgcttgttccttctcttcattataggaattttcaacagaatatctgcactgtgctgaatcagcacttccagttgatgagccatcaatatcttcttcaatatcgtcgtcctcctcggataattctgcatatacatctatttcgtctttatcttcatcatcatagtgcgtaactattccttcactactttgtatactttctatcatatcattgacaatttttggcaatgcaggactgagctcttctttcatattaatagctaatgcagaaaaaagggcataaacacttttgtttatgtcaggatctgaggtttcatttaaaatttttaatcctaattgtagacaatctccagtaagaggtctaaagttatcaggacctataaactgagctactactgctaaggattctatagcataacactgaatttgatgcatttccgagttaggatcgctattaatatatatctttaaaattctattactctgtcaaaatatggtagcaatcctttcttttactgcactagcgatgga

SEQ ID NO: 11955 - DNA, 588 bp, Diabrotica virgifera
ctctaatcacgatttcccacgttatattttctccccgacccacgaattctaaggctttccgcacgttttctttatttatttatttcattatttattattacacgaattgtttccggcggttcttccctctctttgattttcttcatggccctctcggcaatttcatacataccttgcttcctagtttttgctacgtacgtgtaccacagcctttttccggtggccatggaacttttcttcacattttctatatattcaatgcttccctctttacaaccctcaataatttcataaacatcttccctgattgtgcgtatggcgctttctacccctccctcttttatatcgttattcgttactatcaaacattccttcttctctatcgtgtcttgtaggcccccctgttcccattttgttttttcgtatactttttcttcccatttctttttgtatatttgactaaaatgattaatgttccccccttcgtttaggactcttaatattttttccgtttcttttttttgtctttcctgttttattttgattttacattgttcgcatttcgtgtcttcttcctccctttgtgtc

SEQ ID NO: 11956 - DNA, 589 bp, Diabrotica virgifera
  SmartBlast Evalue=3E-13; Info=RING finger protein unkempt n=1 Tax=Camponotus floridanus RepID=E2AWV4_9HYME
caagtacaagtaaagccccaggatctcaacttactcataaacatgtgcccttccggggaggacctacaataggaatggaattgacaaataaattgttagcaatagaaaaagatcctactttagattcaatggagagagaacagaggaaacaaaatttatgctttgccgcttatagtagtataggaagctcatttttcagtagaggaaatgatactttagggaatgtagaaagtgtagttggtaatgcgttagatgacctaaatttagaagattctttaaatctatcgggagccctagaccgagacctagacaccgactcgccaaccgtttcgaattcaatctcagtgggattggcctcttcgggtcttctaggcagttcggccccagtcaacattcctggctcaacgcgtgccggtctcggaggtttcagcccgcaaggaaacagtcccatgcagaccttcctatcagcagctaggttttctcagcccgacattgatttatttaatcactcgcagatgcagttgagttctagcgcttcgaagattaataactattctggcttcttcgatttcagtcacagagtatatcg

SEQ ID NO: 11957 - DNA, 590 bp, Diabrotica virgifera
  SmartBlast Evalue=3E-19; Info=Pre-mRNA cleavage complex 2 protein Pcf11 n=1 Tax=Camponotus floridanus RepID=E2A439_9HYME
ccccttctattttgacgaaaatgccaatctaagtgttgactatataacatactagcttctggggagaacctcatgccgcaagtactgcattgcataccagaatataacattgcatataggctgttttggcgtactctcagcgtttctggcctgttaaaagtgactggtttcaggctcaatacggttttcttaagttttgagggcgctacgtttggagtactagtagcggcaggtacttcaggctcaattctcatttccttcttaggcgattctaccactttaggtggctcttctactggcttacttggtggtgatgactttactaatccagaagctactagattttggaatatttcgttgatattcaaaattggaggtagcgttgtaaatggttgggaactagcctgagagtcttgtgagttctggttttctatttgatagcctcctgaaaccggcgctggacctgtactggatgaaagtgcattggagaggacgtctaagttattttgttgtatagacttcaacacagaatttggagaatttgaatttctatctggagaatcactacccacaggtttgtccattgttcc

SEQ ID NO: 11958 - DNA, 590 bp, Diabrotica virgifera
  SmartBlast Evalue=4E-56; Info=Protein Dok-7 n=1 Tax=Camponotus floridanus RepID=E2ALX9_9HYME
gtgtgggagtagagccagttgtcaaaagaaatactcgcgagcatctcgcgagtttacgaacataacctacaaaaactttttgaacactttcagataaggattatttattaaactagtggataatttgtgtgttttgtgtaatagtgaggttttactgttcctcctttggaattttatgttgaaatgtgagttttatgataacagtgcacaatggttgataatagttgcgttatagaaggaactgtgaaatttcgagatggcaaaaaatggaaatcgagatggtgtgtcatgaggaaattatctccagttgcagactgtttacacctgcagctgtacagagactccaaagacagatacaaacagggccaaaccaaagcttccctttcgctggaacattttctgggattggagactggttttactttagataaggaatcaaatacggtagctatattatgtcaagatgtcgtcgttgttctagcatttgacaatcgggaaaggcttatgcaatggcaggtaaaattaagttcccacttgaacgacggtcctcatttcttagtcctagtgtcttccgcaccaccaaagtccag

SEQ ID NO: 11959 - DNA, 588 bp, Diabrotica virgifera
atgcgaggtcacaggctatgacgcggatgacgtgaaacggttagtaaattagacgaagtatagtcagaaatgaatgtgaaacttcgaaacccaaaaataattttggctggtaagggttataagaattaaataatcaggaaatctaacatattttgtatgacattatggaaatcacattttttaaattactttttactatttttgttgggaatgaaccacaattttactttaaaataagtttatttgacgtttaaatttgcacttcggaaatcattctcaaaatacaaacaagaacaattacttaaaacttattcacaacaaaaatagtaagttgtattaagatcccacaaggaaaatagcttcagaacaattttaaattgctttaaaacaaaatacacagattgcgcaaattgtaaaatttaagtatacagccaaatctataaaggtttgagctaaatattttgtcatagcttttatataacgcaaaaaaacatttagtcaattgatgtcttgctagataaatcagtgtgcaaaatcaaataatgtacaaaaattgggaagtgtcccacacaaatttaaaacttacga

SEQ ID NO: 11960 - DNA, 576 bp, Diabrotica virgifera
  SmartBlast Evalue=3E-20; Info=SCAN domain-containing protein 3 (Fragment) n=1 Tax=Camponotus floridanus RepID=E2A2L6_9HYME
gctcggagtccgtcctcgtcttgcttagaagccgctgaataaagttttgacacagttggctgagctgcgtgcttcttttccaagtcttgaaaataagtcacatttttgtcttttttatctgaatgcattttattcaaatgatcttgcaaccttgagggtttcatcgcttcattcgaaaatgttttttgacaaagaaggcacataggcgaagatggatttgtaggattttcaataaatccatattttatatattccgcgctgtactgccgtttcttcttttttgcttccgacataattttgtcttcaaaaatgccgaagtaaagaatcgagtattaaaaacttgctaatgacaccactcacagtattcttactgagcaaattaggcactgtacatacagcactttatctcgtcactaaattcacttgttttcgtaataacgcgatgctccttgacgtctgagacgttcggtccctagtagagcagattgtcgaatgacatgactggatggcgtgcgcttttgtatgaggcagcgggcgggcctcgcctcgtcggcagcgggcgaatcgataaaaagc

SEQ ID NO: 11961 - DNA, 591 bp, Diabrotica virgifera
  SmartBlast Evalue=5E-56; Info=DC2 protein n=5 Tax=Culicidae RepID=B0W8S7_CULQU
gccaacaatcaacaaatttttatactgtttttataatagcaaatagttcttctacaacctatctactaagtaatcaagatggagcaattttttacgttaccgtttacaattttggaaatacctcagatgagaattaaaaaaccttcctgggtgaaacagccctctgccatgactgtgttctctatagtattagtttcatattttcttgtcacaggaggaatcatttatgatgtgatagttgagcctccgagtgttggatcaacaactgacgaacatggacattctaggcctgttgcttttatgccatatagggttaatggccaatacataatggaaggcctggcttcaagttttcttttctcgttgggaggattaggatttattgtactggaccacatacacactacaagtactccgaaactaaacagactattattaactactgttggcttcatttgtgtcttggtttcatttttcactacttggatattcatgaggatgaaattacctgggtatcttcagtcataaatatgctttaatgcaatgtattattattctcatttttgtaccttacaataaaagaaagatctg

SEQ ID NO: 11962 - DNA, 589 bp, Diabrotica virgifera
cattaatgttggatcctcctggtccaccaagagcacaagttttgaaagatcgtaagaagaatttaccagagagaggcttgaaaataatgacccgttttgatggcggctcaactcaggaatcatcatgtagcagcaactgtgatagctcccccatcgataatcatcctttagaagatgtcgcctcctcaaatacaattctcgaatccgtaccagatccgacacctatccttcaccagcttcaacatccatctaatccactcccacaacacaacaaagacgagtgcctaccagtaacctcattgcctatcgaatctacttccgtttcgtcaagtgaccttacctcaacaatgaccaatttccctttgaaagaaagaaattttttaccgaagccgcgcgagagtaccagtttcgatcccagagaaccttgggtatcagacagcggcaaagaaaactgcaagtcacaagcgcaagacaaagaagacaatacgatacaatgtaacgaagtatcgtccagcaacttggaggtagatagtacctgtttggaggatgaggaagaagacaactttcaacgaaacggaaagcataattt

SEQ ID NO: 11963 - DNA, 590 bp, Diabrotica virgifera
  SmartBlast Evalue=6E-53; Info=Protein disulfide isomerase n=2 Tax=Culicini RepID=Q16Z37_AEDAE
cggcacaatcaatcatcgcaaggcaagatttgtgcccttcgtcgctaagttgatgggctgctacgctatactccggtttcatcttcttgcagtatccacaccaaggagcgtagaacatcactagaaccactttgtcagcaatttgattctggaatgttttgtctgttaatttcactacggcaggatccattatccattcggcaggttcagcaggaggaggagcaggaacatttactactttgtcgggttctctcatgaagtctataaaatctggagccgttcttccacctttatagtctttcatctccttcttgtagtaactgaagtatttaaacgtgggataacctgtcacgtcgtttgcactacagactgatgggtatacagtacaatcaacagcagtaaattcgactctgggatcatccttgaactctgtagcggcttgagtatattccggtttggcttttttacaatgtccacaccagggagcataaaacatgaccaaggaatgtttcttcttctttaggaatggtttaaatgtctcttcggtcaaatgaactacctcactttcttcatcagcccacggtttttct

SEQ ID NO: 11964 - DNA, 586 bp, Diabrotica virgifera
  SmartBlast Evalue=2E-56; Info=Exportin-5 n=1 Tax=Harpegnathos saltator RepID=E2B373_9HYME
gcgctgaagcaggcctatatctagcagctggcactcaacactcaccaatatcaagacatttggccttcagctcatggaacatactgtaaaatatcgatggactcaaatatcacaacaagaaagattttcattaaggaaaacgcaatgaaattactttctgctggaggtgttagtgatgaatcccacatgaaagatgcccttagtcgtgtaattgtagaaatggttaaacgagaatggccccagcaatggcctggtctattgggagaactgtcagatgcatgtgcctgtggggaaactcaaactgagcttgttttacttgttttcttacgtctcgttgaagatgtagcattattacagacactggaatctaaccaacgcagaaaagatatttaccatgctctgacagctaacatggcagtgatcttcgacttctttctcagactcatagaactgcaggtcagtcagtttagactcaacagtgagtctaacgttaccaaagccaatgctcacggaagagtggtccaggtggttttgttgactcttactggctttgtagaatgggtttctatgagtcacataatggccc

SEQ ID NO: 11965 - DNA, 590 bp, Diabrotica virgifera
aataatcgtcacagaagtgcaagtggaatttttgtgaaagttccaaatatttttatgtgtcaatgagaatttttgagtttttattaaactctagaaaccagggaataagtttggatagaaatttaggcacaaaaaaagacagcaagagaggtaactccggaaactacaaggaacaacaaatccttaccagaatacatcacgtaccgtagatttttgttccgccgttctaaccttaagcgtattcaagatggtagtaaccatttactcagcccctaaaaaagcctctgacagttggtgtgtcaccccaaacaacttcgacgacaagaaggaaaaatcaaactctttccaatccaagaaagatatcaaaccacaaccgaaggcaaactcctacggagcttggggaccaacttttaaaaataaagatcactttgctagccttcattattgttagtctataagattttgtacgaaatttaaatgtatgtggttggatatgtaacttagaggcttagtaataaatatatttttctaaatttgtaaatttcattgatttcaattggaatgtaaagttaattaaagtatttggggac

SEQ ID NO: 11966 - DNA, 589 bp, Diabrotica virgifera
atatcattggatgagtattttcatatagattaccaaacttcgactctaaatgctctaagataatatttacgcaaaaaaataactttaaaccaactaaaatcaaattcttaatttcatttatacatacatagaattctttattttatcaattattttacaacccttcagttgacagtcatataggattatgtggtcctatatagcttgacaattatatgacgtcacttctgcttcagaacgaacgttggtcatctattgatggaacattgatgccaaattttacaggacaaattcctgtgaattgtaatgaaatatatataggttttgtaagtaatatcagtgtagcagtttttgatgatcatttaacttgaaatataatcgacaagcttctcttctcaaataaaattaccaataaagtaccaaataaactcaacattgatcatgttcagctttgtccactttgtaggtatgttgtcaaatacttcacataaagaataatgaaaaaaattaaaccctcaaatagcacaaaacagccctagagtgcaaacaatgtgggtggaggccaacacatcagcctttgccgaccatt

SEQ ID NO: 11967 - DNA, 589 bp, Diabrotica virgifera
taaatgatgtataaatgtagacgattgctttcttgggcaatttttgcagtgtcctgttcgttaccccataagatcttagtgcttttttaaagcgtttcgatgttttcccttatatgaaggtgttactaactaccaagttgaagtcacaatgtcaaaaacaaaaaaatataaaaatagggtaagtgcggttatgattttatagcgaacatcaaaaaccacaaattaggttagaaaaattaaagaaataaagtaaaaataaaataaagttttcttgactttaattttaataataacttcggaatgaaatataggaatttcaataaaaattgattttttaattaatgttgttttctccttagaaccgttgacaataacaaaatattattgcccaagtggcgtaatccaaatctcgagtaattaaggggtgtaaacgcctttctttatatgtgtgtgtatattcaatattgtagatcagtgtatttttcttcctcatccatttcaaaatgtactactactgctaaaattattaccgactcttcacggttgtctttgtcacaaaaagttctcgtcttttaaaacattagaagta

SEQ ID NO: 11968 - DNA, 589 bp, Diabrotica virgifera
  SmartBlast Evalue=2E-14; Info=WASH complex subunit 7 n=18 Tax= Amniota RepID=WAHS7_HUMAN
tggtctcttggacatccagcttcttaaagaccactggttttggtatcgaacatctattagaaacatatcacactctaacaagatatcagttgatagaagtaaggttagatctttagataaaatgttgcaagtttttgaaaatgatctgttaatgggtcacattttaaaagatgtcatagaaaaatgtttcgaagacaaatctttctactatcaaatgaaaaattgtacagtaaatcaagaattacatgcatttatagttttactcttggcggagttagagaaagatgaagaacttcagagtgatatttggttaaagatgaacatctttgtaattttttatttcactatatttgagagtgctgacaaaaaattaataaaaagagtattagatgtgaataagaagcattcaacttgtaccttaataggaaatattttgtggtatccagaacagtttttactcaagcatttaagtatattagaaaaatacattgatgagagggccattgaaaatcatagactgaatttagtaaatgttaaaaatagtaattttcctaaagaaagcagtagtctttgtttacaggtttgttat

SEQ ID NO: 11969 - DNA, 588 bp, Diabrotica virgifera
agatgaatgacagctaacggcacactacgtttgccgtgattggtcattaacgtcgcgcatttgccgtgattggtcgttatcgtcgcgtattcaaaattttgtctcaggagtgaattgcaaaattggaaccgtcaaaatttgagactgcattaactgattctttagtattaaactgtgcctcaagggtaaattttcttgaactagaactaaggcatgaatgttgaagtgaaaggataaccattttacgagtttattatcatttctttccattttatattctttattttattatttactcgctttcagtttgtataaaccacgcaaacttcacagtttatgaaaacgtccacgtatcaaaaaaaaatagggatagggctgtgacaaaagtccaaaaaagtgagttaaatagatgtagatagtatgtaggattgttgagtaccaactattgaactattgccaattaataataacatctcataaactctgaaagcaaaaggtttgctgacaaaatctattcaactttcatcctaaagatttatctataggagggtcacataaagtcagtattggttgacaacattcaacact

SEQ ID NO: 11970 - DNA, 589 bp, Diabrotica virgifera
aaacgggctattatattgttcgtccgccataactcctcccacgcgtcacgattcattttcaaaaaaattaagtcaaagcataaagtgaaacacacgcccatgtttgtagtatatagtatacaaaatgtatatgcacatcgacgttcgtttcacactatgttttgacttatttgtttgaaatgaatcgcgacgcatgggaaaagttatagcggacgaacaatatatactgaaccgaggaaaatcgtaattacagtaggttgtggaattttcatttaaataacttctcctcatttcttgagaccttgttaggacgtgttgacaatctaaatattgttagctcctgtccagagctaagaccatattccaaagttaacaaaacggcagatgtattcattgttaaaactacaacccagatctataatattctattattcatgcatccataatagagtgttgccaaaagtgacaaaatacagtaagaaattctaaagatgctacaaaacatgttctaaacaatatcaacaagttagagctgatgcaccacagaataattaaagtgcatttaaatggtatttggcaacgagtagta

SEQ ID NO: 11971 - DNA, 589 bp, Diabrotica virgifera
  SmartBlast Evalue=3E-10; Info=Protein BCL9-like protein n=1 Tax= Harpegnathos saltator RepID=E2BN21_9HYME
cagcggttttccagttacgtcagatcttccacattcgagagtttcaggttcaaacacgcctacgtcgatggatgtaggacctaggtttcctccaccccctctgagggttgtcgcttccaaatacccagccctcatacgcctactgccgtaactgcaggtgaaaaaccgccccagcgacttcctggagcttcagtgttaagtccacaaacagttcctggtccaaattcggaccctctgaaaacagacctatttccaactcctagcccgcacatgatggatgttcccagatttccaggaccaaatgcttctccaggtgctaaaatgggaggaggtttcgtcaatttatcaccccaagcaaaaccgttagatatgcctaattacgcatgtgttagaggagacaatgttcctttaaatccaaactgtacaagtaccatgtccggcaatccaaaggtttcacattttgacccgatctcatcgttagcacaaatgagtcaacagttaacaaatagtgtagcaagttccctgaatggacagagcaatcaaggtcctccaatgatgaattttggttctccttcgatgcacatgatgg

SEQ ID NO: 11972 - DNA, 589 bp, Diabrotica virgifera
gaacacagcttccaattttgaactcatgggaattcccaattttctgttcacatacctactcgtatatcctgtctgtagtatgttcataaaagtaatgtataaaaacacgtctataaatcgacacgtgaataatttcagttgaacgatgttttcaaattttgagatcttgggaaattggctcctaattgtgcactcttgagaactctgctccggattttgaactaatgggaactcggttcccaatttggaactcatggggattaaaattataggttgattacgaacacccattttccgatgtttttgacgaattatctgctttgcagttgtttaatgttacaaaatggattgttccacatgctgaaaccaaacactttatttttttattatattacaactttaaattgaaattttctaaacattggatagttttatattttgacatagttacagaattttcaaaaaatgtccagagcattgtgttcactgttaatgtttagtataaattacaataactgattacttactggaaaatatatttagtaactgatgtagtaatttttgggtaattgataaatacattaggtag

SEQ ID NO: 11973 - DNA, 589 bp, Diabrotica virgifera
  SmartBlast Evalue=4E-24; Info=Novel protein (Fragment) n=2 Tax= Danio rerio RepID=Q1LVT8_DANRE
gccttgtaatatttgtactgagagcgaaacgttatatacctcggattcttttcttaatcattttatgcagtttcacagataccaatgtccgtactgtaggaaaagttacaataaggcagggactttgggggcccatattaagttacattataaaataagatatcattgtagtcataacggttgtaacaaatcctttcccactcaatggggtcttaaaaaacacgtagctgtgcattcagattcttgtgcgtattcatgtgccgaatgtaataagcagtttaaaacgtatgacacttatatgtaccaccaaaagaaacatggcggcagaaagtttctttgcatgtgctgtggtagaacgttcctccaatcggtacatttgaaatatcacatgcaacagcacactgggattaaacagtttaaatgtaatttatgtgttaagagttacacgtctacatctcaacttaagaaacataaaagacgacatcatccggatcaaattgagacaagcgagatgaagccatacattgtagatcttttgtagattttgacttgtgaattttattttaagattaattataaaactaattta

SEQ ID NO: 11974 - DNA, 589 bp, Diabrotica virgifera
  SmartBlast Evalue=3E-27; Info=Transcriptional repressor CTCF n= 1 Tax=Harpegnathos saltator RepID=E2C1R0_9HYME
gacgcagccattacaacacgccctcacaggacattcttggagttaaggcatgtataatagttaagtcaccatgagcgcaacattttcggaacctccaaccataaaattggaggagacaagcgaaaacgttacagaaattcagtcctatttagaagggttccagaaggagatcgttggagattctgttgttcaacctagttcagggagtgaagaacaagaagtggaaaatgaacaggaagaaggaacttattttgttgaccaagctgggcactactattatcaggctaagggttcaacccaacccgtcatgacagtagtgccaacaattgcaacaagtggagatactgatgaatacgttattaatcaggagaatgatgaagagggtgaggacggagaagagcaaattatccaacaaagtgaagataaccagtttgtgattagttccggcaatgcataccaaagagtgacagtagtaccatctgataataattccggcgaacttagctatgtgcttatcgttcaagatcccttggatattaaagaaggagatcagactgacggagaacaagatatgactgtgtatgatttc

SEQ ID NO: 11975 - DNA, 585 bp, Diabrotica virgifera
tgaggacattcaccatctcttctattctactttccacgtattcctgcatatctttctgggcggcaaatatagcgtggatatttggaaaacgtctacataagtctctaaactcttcagggtgttgatctctaaatgccaatgaaagagcatggagttttccatattcccgaaggatcagtttgcagtgatccatatccaaagctcttcttctgtcatgcattttgtatcctttgttcgttacgttttcaataagaataacttgtgtattttgatcctggagactataaaagtattttggtgcactatcaaaaacgtcgtctacattttccttaattcaaagctcctaaatgttggcaatactgtatggtacattaatgtctctataataaacgcgtttttgattgtttcacgctgttgaaagtagtcgtgttttagaatgatgtgcaggattttttcttcatttgaatgcgcacacttcacagttaaaaagttaatatcactcatataaccagcgtctttaccaggttttccattgaactcgatttggtagtctccgtatttttgatctcgtagaaattggatcac

SEQ ID NO: 11976 - DNA, 589 bp, Diabrotica virgifera
  SmartBlast Evalue=1E-26; Info=Putative membrane protein n=1 Tax= Glossina morsitans morsitans RepID=D3TQY7_GLOMM
cgtccgtttcatcttcttggtataacttaataatctcatcttcatattcttccataatcgattcgcaataatatttaagacttttatttaaatctccatcttggataatatcaacttcagaccaatctgggttcatagtaccatcctcagagagcatgtttaatagtgtcaagctaccatctcttttccgttttgcacgtacgtagttatccatttcagtacaaactccctcaattaactcagaaagagctaactcagatcgagtttgtggtatagatttatgcccataatttccatcgacatcaaggcggtatcccccaacatccacttttttattagggtctaatctgttaacttttttcgttaattcataaatactcttttcacaaactaaacaccgcaactcagttgaatcaatttcaggatctgtggcaaaggtttgacccagtacaaatttaatattaatgcataacaacgctaacattaaacacaaatatctcattttacttatttaaactgctttaactaacaaaatattaataatattttatttctttttgacacgtacggtacagtaccccagtaccac

SEQ ID NO: 11977 - DNA, 586 bp, Diabrotica virgifera
  SmartBlast Evalue=3E-48; Info=UPF0555 protein KIAA0776-like protein n=1 Tax=Harpegnathos saltator RepID=E2BW40_9HYME
cgagtgacgtttaacaaaattgcaaaaacattttgtccatactccatatggttaattttgtttactactaaagtaattttctttaaattatttgaattctccagtttgattgaaaaatggcagattgggaagaggtcaaacgtttagctgccgattttcagaaagtgcagctgagttctacgactcaaaagttgtctgaaaggaactgtatacaaattatatcatggttgatagatcaaaaaatgttagatctgatatttaccagcgatggcaaggaatatcttacacctgctcagttagtatcagatataaagggagaattgtacgatcacagtggtagaataaatttagtagagttagctaaaatcataggagtagatttggcacatattaatgctcacctaaatgatgttttaaaaagcaataaggatatccagtcagtattgggacaacttattgatagctcatatatacagagaatagccggagaaatcaacgagaagctggttcaacaagggcagatcagtattagcgatttaacgattcaatatgaccttcccgctgactttctccagaaccaagtagt

SEQ ID NO: 11978 - DNA, 587 bp, Diabrotica virgifera
  SmartBlast Evalue=1E-40; Info=BTB/POZ domain-containing protein KCTD2 n=1 Tax=Mus musculus RepID=KCTD2_MOUSE
gtcagacgacaataaacaaactgtttcaaaaagtaataacaaacagtgggtaaagttaaatgtaggtggtacatatttttttaacaaccaaaacaacattggcaagagaccctaactcttttttgtacagactgatacaggaagatagtgatctaatttcagataaagatgagacaggagcttatttaatagacagggaccccaattacttttcccctgtgttaaattaccttaggcatggaaactggtaattaacaaaggtctagcagaagaaggtgtgctagaagaagcagaattttacaatattgctgaattaatcactttagttaagaggagaattctgcatagagaaagcaaacctagtaaagatggtaaaaacatgtttatagggttttacaatgccatgaagatgaattaacgcagatggtatcaacaatgtctgatggctggaagtttgaacaactaataaatattggttcccaatacaactacaatgcagatgaacacgcagagttcttatgtgtagtaagcagagaatgtggtataccagattgtccagaaatcaagagcgatcgggaagacagagc

SEQ ID NO: 11979 - DNA, 585 bp, Diabrotica virgifera
  SmartBlast Evalue=1E-42; Info=Endonuclease-reverse transcriptase n=1 Tax=Bombyx mori RepID=D5LB38_BOMMO
gtgtcatttattggattcttactgaaggtcatatattggtttttttgacgttcatccttatgccgtagttattacatatctcattcatactttcaactagatgttgtagatcttccgctgttcttgccattatcacagtatcgtcagcatatcgaatgttattgataacttctccattgactattatcccttcgtttgcatatgagagagcttcttggcatatttgttcgctgtagatattaaacaagagcggtgacaatatacaaccctgtcgtacccctctacgtatttctatttcgtccgatgtttggtcttctatttttatattagctcgctgattccagtacagatttaatattatttgtatgtctctggtgtcaatgttcttactctccaggatttctttgagtttactgtggcgtactttgtcaaaggccttttcaaagtctataaagcaggcgtgtacctcttggttaacatctaggcatctctgtgttagaacgttcagggcaaagagagcatcccttgtacctaatccttttctgaatcccatctgtgtatcgttaatatcgatgtctagttttt

SEQ ID NO: 11980 - DNA, 588 bp, Diabrotica virgifera
  SmartBlast Evalue=2E-17; Info="Transcription elongation regulator, putative n=1 Tax=Pediculus humanus corporis RepID= E0VMQ9_PEDHC"
ttccggatcaatttttgacataacagctgcttcatctatagccgccaaagcacctcctgaaaataaagctggtggaatgggccatggtgctccagggggtacaggccaacctggttggcctggagcacctggccatggaccaggaagtcctggcggtggcattccaaaaggagggaattgtccagtcggtggcccaaaagatgtaaagcctggtggagggcctaaaagagtatgtggtggtggaatctgtgtaggaatcgctttcacaacatcctgtttgggatcatcgacagcttcaggtttattagatatatttgcctgtgcttgagccgcttgggctgcagtggatgtattttggggtaaacctacagtggcagcttgagccatagcctcaacctggtcctgagaaataactttaatgttaggtccatcaggtttagtccaagtagtttctctagttcgagcattataataatatgacttgccttctccagtttttgtttctacccatatttcagcagctgcatctaagggtgttgtaggttgagaagagggtgcgttattctgattagatgtaagatgaggtcc

SEQ ID NO: 11981 - DNA, 578 bp, Diabrotica virgifera
  SmartBlast Evalue=5E-18; Info=Reverse transcriptase-like protein 75 (Fragment) n=1 Tax=Biomphalaria glabrata RepID= Q8MTP7_BIOGL
tgattctttacattcaattagatctttactgtgtacctctactaactgtactccacacgaacgtatgtttaatcatcccagaagatcaacaaatggtacatctattccaacttggcttagtactcctggaactgttttcctcaagaaacatgttagaaattcgaaatatgaacctctggtggaagaagtccaactcctagaagcaaattcagactatgcacatgtcagattaccaaatggaaatgaaaccacagtatcggtccgacacttagctccgagaggaaatacttcccttttggcagtagatgaggcaactattgaagataatgaaaaacatgtagaaaaccagtcccccatgataaatcaaaacatggaaccattgaacagtgtagaagaaattaataccatagatagtcaacttcaacaacattcttctgctcctggtgacggtctaactagttcaacttcagtttccccagaactgatattgcaaaagcgaataagaaagtctcctacctatttacaagattatgtcagaaactaacagcgtgtatgaatgtggtgttcctttctgcatt

SEQ ID NO: 11982 - DNA, 588 bp, Diabrotica virgifera
ctagtaatttattcttgctgatgcaactgtgtagttaaaaatgaagatatttgttttaagtctaagccttctggcattagtctacggtaaccaagaggattatttgaaatgggtgagttacaatggagaaataccaaaagatgcagtgccagctggtatggatgctgataataatacagtatatatcggacgagtgcatttaatcacgaatagggctgaaggatttgttcctggaaatattaatcctggtgtagtatctctggataccgtcctttttaatcaagtttacacagctacagaaaacattgagatccttacagcagttaacaacccaaaactagaatggatattagtaaaagaataccagtttccgaaactttttgaccatgaagaattccatgttgccagagtgggttgggaactagcaaagggcgaatttaattctacaatctatttggggagaacacacttcaacgacagaacaaacattggaaaagtttttaccagcgcaaatttttatgcagaaaacaatgaactgtattttgctgcgaatagtaaaaccaaaacgggatacgtgtttgaggcact

SEQ ID NO: 11983 - DNA, 587 bp, Diabrotica virgifera
taaacatttcttaatgaaattacaaaaagttctatcttgtttgattttttccgaagtgaaaatctatatgcactcccctaaaagacgtgtgccgaaatggatatcgggttttgttgatatttttacattttattattttactacttagtattttttaattgtgactgtctacctttagatttttggattgcacgtatgtgcctgatttcaatttgcataccaaaatgtattttagttttgtgatcaaacggtttaatttagaaaaaaatgtttttttgttctacatggtgccttcgacctataactttaaggaacgcactattttcgcggacatcctgtataaactactcgttttcttgtatctcattgtccttgcactggtacagatgtcattaaacataatataaaacaaaacacaaatagtttacttaagtagaagagaagacacttcagcgcactttgacctttgaaccctcgcgatacagcatcgcgcgtgactgtcgatgcagcagaccgcgtgactccgacgtgtaggggtgacgtcattggggtaacttgtcgggacttgtcgggtgacgtcagttggg

SEQ ID NO: 11984 - DNA, 586 bp, Diabrotica virgifera
atctaaacatttcactcataatatttacattaagaaaaatatatagacaaagtaatgtatttatttaatgttgttgaaaaaagtgttttcagcctattttattaaattaacctttctttgatgcttgtatgattctcgtgtcgacttttaactgcttctgttgttgtgtaatgtgtattgcctatattgtacttcgatatttttagtgtacggaacccatttcgctcatccggaacaaaagtgtgacaactcaaaacaatttttttcaggagagacaacaaaaatagattttttagatcttaatttaaccgtaagttttaaacggttaaaatttataaattaaaaacgaagaatatggataagtaactgtatctaattgtgttaaaaagcagaaccaaaaaactatgatttaacaaagagaaaaaaatcaaattttgagttatgtcacttttattttaaaatattcacgtcgaacatcagagcataacctcaaaagtgtcattgttccgaaataaaaatattcattttaccgccaaatgaataatgacacttccgacatcttacgaagttggaagtagacatctat

SEQ ID NO: 11985 - DNA, 587 bp, Diabrotica virgifera
gaagttcatcgatactactggcaaatacgactatcgtccgcatatctgatattatttgtcaattctgtcaatttctcaacatactctggcatgtttaatttttttatgtaatcgtattcttttgtgtttctatgtatttcttagtacataaacgaacaaacattagtttcggaacttttggttgcatttgtagagattatattgacaaaataaaacaaaactgaatatataaaccaaaaaataaatatcaactaaagatgtgttatagttgcttatattttctatatacttgttaggccaatcatattctttccgatctagaattaaggaggctctagatgatttaattgttttgctgagaaggttgtgtcaagcacgattgaccatgtagtaacccgtttgacaaaattttgactggggttaattataggattggttgattcctgctactaaagaggatgtacatggtctttgaagattaactcaatcttgttatctttattgattgtctagcgtcctcctttgaaaagccgctcactttagtcattggtaaaaaaatgttttttatgttatcgtatatcttccaa

SEQ ID NO: 11986 - DNA, 588 bp, Diabrotica virgifera
  SmartBlast Evalue=3E-90; Info="U4/U6.U5 tri-snRNP-associated protein, putative n=1 Tax=Pediculus humanus corporis RepID= E0VSX7_PEDHC"
aaatatacaccagaaaaataccatcaacagatttaaatgacaaggaaaagaagactcttttagcaaccccagaatatcaggaggtcgaaacagagtcacccttcttgtatttgacttgtgatcttccaccaccacccttgtttattgacgagtttagggaaaatattattccacaggttaatttatatcaactattaacaaaatttaatggtcaaactgagaaagaatacaaaacttataaagaaaacttcatgaaacggtttgaaattacgaggctgccaccttatcttatcttgtatataaaaagatttaccaaaaatactttttatgtggagaaaaatcctacgattgttaattttcctgtgaggaacgtggacttttctgaattcctaacacccgaaatccaagcaaagcatagacacacgatatacgatttggtagcaaacatcgtacacgacggtgagccgaataaaggaacttacagggtgcacattttgcagaaatctaccggccagtggtatgaaatgcaggatctgcacgtgacggatattttaccgcagatgattacgttaacggaagcttatatac

SEQ ID NO: 11987 - DNA, 586 bp, Diabrotica virgifera
  SmartBlast Evalue=3E-21; Info=Haloacid dehalogenase n=1 Tax= Bombyx mori RepID=Q1HQ23_BOMMO
tgccacatcctgtttttttttgttctaagaacctaaacttcaccaaaaacaatgataaattaatttaaaattgatacagttataccgtatgagaagataatgattcgccagaagttttaatgaaatgcttatgaatatcaaacaaacttttaaaaacatgttctttatctatatctggatacttttctttatcattcactaaaacggcgtgccacccacagttccttgcaccatcataatctaaagatttctgatctcctatgtgtaaacattcctgtggttgtagattttccagtttggccgaagacatggcttcaaggaaaatcttaggatcaggtttttcaaatcctacgtgataggatataaggacaaactgaaaatagtgcctgagtctggtgttgatcaaaatgtttcttaacctaggatcataatttgagactactcctagcatgacacctttacttctaagaaacgataaaagtccatatgctccgtgtgctacttgccatacacctgaaccactgtacatatcaattagatgagtcgctacctgatctaatttttcattgtcacaatttatatcact

SEQ ID NO: 11988 - DNA, 580 bp, Diabrotica virgifera
tcttggctgcaactgagagaatgattgatcatttgacctaagtgcaaccaattacaatgacaatcttaaggattgctactatcttgaggattgccacaataatagtaccgtgtacatccagttcacacgtttatcaaccaaaatgttcaacgggaagcttaaattcggacccttttcatgaaaatccttacaagaaattccaaatttaaagacaacgctttggtactactctttttgtaaatgtcttcttgaaaataccaaaaaaatctagtgaaggtgcctttcctgtatctttacgcgacatcagtaccatcaacagacagttcagatgttcgttgacccaacttatccaatgggagaagtaccatcaactgatagtttatgctgtgacaattttcatgaaatatcattgcaaattcaatactaggttatacaaggtgttagtaaataagtatgaaaactttaaggggcaattccgcatgagaaaacaatggcagttcgctccataaacgcacgtccgcaaatgctttgtttccgagatacagggtgttgaaattttttatttcaaactgccaatttt

SEQ ID NO: 11989 - DNA, 588 bp, Diabrotica virgifera
ctgaattatatcttattgtgataaaatgtcatgtcttttgccaaatgccgtacagatttggtaagtctaattgtctgtcatcataatgatgtagtcttctcagaccattgttggacctctaggtcttttatattttacacttttgtcgatttcacagttttctttaataacttttttaagatcaatctttttatattatgagtacctttatatctttaagtacgtctattacctctcgtattcgctgttttaacaaatatataagtaccaaagtaacaccttattttgttgcaaattaagtattgtcttaacataaccactctgatgaagatactaagttttagtagtggtttgtcaaagttttatgttgaatttgaacagcaattcgttgttctactcttatacgtaccatttgtaataccgtttaccatattcaaatatgcatttatttagagaagcgagcgtttttgaaatccaaaggccaaaaaattattgttactggtttttggcgcatgcgtgtttctcttgtagcagcgccaatctcatttaacagccacatctcatatacacgttacattatgtaacggg

SEQ ID NO: 11990 - DNA, 587 bp, Diabrotica virgifera
  SmartBlast Evalue=1E-41; Info="Ribonuclease Z, mitochondrial n= 1 Tax=Camponotus floridanus RepID=E2AAI2_9HYME"
tcctcgacgagatcttccattttttgttttttccggtcactttcgccctcgacttctccttttggtagcaaagtccccttttctcccaacaacgggaaaatatcattcgataacaaattcagcttgtactgaatcctatgaacggcctcgcttcccatacatgtattatattcgttcaacattaagtgtgtggtactggcaggaaaatgctccatccaagctttatacctgggattctcaactacatccttcggtgtaaagtgtacaattaaactagcgatttgagtctcgtctttgttgtatttttgatgatttgtgataatttgactgtttctaacgaatctaaatagtctacggtggggcaatctaagacgataaaaacgaggccaggatcatcaggttcacaaacatctgccgatcggacgacagtaccatttggtagagtcacatcttctccatttttgagtttgccgaatacgggtcccggttttattcccatttggacgcacttttctaaattcaacgctcctggtctgggttgtaatttgcacacgtaagccatagagattccttgttctttggtactt

SEQ ID NO: 11991 - DNA, 582 bp, Diabrotica virgifera
  misc_feature (508)..(508): n is a, c, g, or t
ctaacataagagttgcgtaattaaatttcctacaacataggattagttaaaatttttaaaaattgtcacccttgttgcaaaatagcaataattgcgaaaaaaaccatataaaaacaagtattcgcattttttgtttgccaaccatttatgctgcacttgggaccttcatattttacccataggggctctatgatataataaagcaatactgtaaatttcattaagatcggtgtaatagaatttgcaaaataaattttgcaatctagctttcgcaaaaaaatttatttttccaaaatgttacaggactggaaataagcagatagcaggttgaaatttttttttgcgtatagaacaatactttacctttcaatagcaatttgcaaaattaaaatcgttaactaccacggcgtcaggaatttttttgaataaacattgatttttggtgctacgcgcaggacagcggtcttcgattcacacaagttgatttccaccaaaatttcttcgaaantgtatctaatatatattattttcttgctctatatttgttgtatttaatatttaattccacaaaaatcagactaa

SEQ ID NO: 11992 - DNA, 575 bp, Diabrotica virgifera
  misc_feature (553)..(555): n is a, c, g, or t
  SmartBlast Evalue=2E-26; Info=Small heat shock protein 21 n=1 Tax=Gastrophysa atrocyanea RepID=Q3LGX2_GASAT
tgtgttgggaaacagtgttgtttaagtaaacaagaaaaattttaatatttcgatagtgaaaaacgtttatttttcgacttgtgttgaaaagtgaaaaaatcgttttgaaaaatgtctcttattccttttgataactggaatcccaaaccatttttgtttgatccaaattgggaccgggagttcttcatgcctctaatgttgccaccgagaaatttgatgtcatttccggaaaactttggaaacttttccacagatttatctgatgatgtattctacgataaaacagatttcaagtaaacgtttacgttcagcattttaaacctgatgagatccaagtgaagtttgctgataacacagttaccgttgaagcagaacatgaagaaaaacaagatgagcatggtcaaatttacagacattttgtgagaaaatacacgatcccggagtcctatgacgtgcagttgcagtcgaagttgtcttcggatggagtgttgaccataagtgcgccaaaagctggggatgaattggagtatagaaccatccccgttatccagannnataaacctgttaaacaactg

SEQ ID NO: 11993 - DNA, 586 bp, Diabrotica virgifera
ggactgttcgatctcagtgccatttatagttatacgtctggggtcgtctgtgtttttcattgtttttgtttttgtcatactttttaggccgacgtactgggagctgcctgcgagttactccatcataatttgtagttcctggaatgtgctggccataatcacgatgtcgtcagggaatctgaggtgttgaagacgccttccaggactagattaaaaagttgtgttgatattacgtttccttgtttaactcctctcttaatgggatgggatttgtattttcgtctagttagagcacagacttattcataaatatgttcatctgaatattgttcccttaattaaatcatcatcatcatcaacccgtatgcgtccactgatgggcataggtactgaggaagctgaggaagctcagccctttccatctgtctctgttttgttcggcttgcatccagttaccgataacatgcttcagatcgtcggcccatctggttggtgggcgtcttctgctccgtagtgcttcttctcgtggcctccattcgataatacgttttgtccatcggttgtctgacaatctggcgacgtgtcc

SEQ ID NO: 11994 - DNA, 585 bp, Diabrotica virgifera
  SmartBlast Evalue=6E-75; Info=Splicing factor 3B subunit 3 n=4 Tax=Apocrita RepID=E2BJM4_9HYME
aaaaaaaaatactatttatatatacaaaattacattaaataaaaaaatcacattcacaagtacataacttaaaaactacattctagaacgcgtaacgtgttctaatatcttctagcttcttagatacctcagctggggttctatccaattctgaagctacgaacttttgttttgtaggttccatagagttatactgttcacacatgtctccgtctatgacgttcttgacagggaagtagtaactcctaaaggataggtgatctcttccgcataatggtggattctcgctcctcatatgcatttccaaatgttggaaaaactcgtgatcttcatgagaagtgaatgggactaacgctcctacagttccagacaaagtagtataaattaatgactcgtgtcctccaggtataagtgtagctttctgcaaccaagtaacagtctccccaatgtggaaagctgtaattgtatctgccttttgggacgccccattcagaagacccctatcccaaagagctttgtgtcctgtaggatcttcctcgacatcgtcgcttacatttgaaggtcaagcgaagaattgcaatgtta

SEQ ID NO: 11995 - DNA, 587 bp, Diabrotica virgifera
  SmartBlast Evalue=5E-40; Info=Beta-glucosidase n=1 Tax= Nasutitermes takasagoensis RepID=D0VYS0_9NEOP
ccctcgagataagtaattctgttgtcatcttctaatgtgccatttgtatctgcaaaaccattttcagttatgacaatttctggatttccgtatgtatttttcaaccagtttaaaaatttcctgagaccccatggtacgtcaaagaaccaatcagcgctcccttgggtccaatcatccctgtgccagaggaggacgcttttgtcgttatcaaaactgggggtaccgataggagcgtccgctgtatggtttgtaagtaacgttgaatagtggttaagacccaaatagtcggaggtgcctttgatgtatttaatttcatcttctgtaaaagctggaagacgtgattccgtgaatccctccagcttgctgcgataggctactcgttctttaactatttctggccagtctccgttaaataatggattaccataaattccgatatcaaattgctgagccctttctgcggcatctttatcctcttgattgtcgctgcctggttcataccaggtagcatcgataaccatagcgacttgtcctttattttggccctaaactgttcatcataaatatgccaagctttgcatgcgcaa

SEQ ID NO: 11996 - DNA, 587 bp, Diabrotica virgifera
ctagtggcttgatgaatctccacatggtgcctgtcattttctttggaactgtttcctgctttgctactatctggtacatctttaccctctcgttttgtatggcttttggatggtcccgaagcgttttgggctcgtcttctgttcaaaataggactagaataaatgagatgccttaaggaccatctgccgggaaacctctttttacgttggccggcaacgcaaggcgttacatcattttcgattgaacctcgcatgatttctctctaagttggaatttttctttgtgtatgtgtcagtatggtttcacaaagcacatgttgtacgtatcaactatcttattctgtattcgttgtatcaagacagatactaacatatgtacacaaatattattaataagagctgcacaaacactacaactgcggcgtttgcattagcgttgaaaatatcaaaacaaaactaataaaaattaatcataaaaccagaacactcagctagtacatgttctcaatattattattttcgcgtagtgacaaataacaccattgatagattcctacgacagctcacaaaactgactgattgagatt

SEQ ID NO: 11997 - DNA, 586 bp, Diabrotica virgifera
taagtcgatgaaaacgatggcaaaatgtaccaattgggctttgaattgcttcctcatccagcgtgtaggctagatctggccaccagcgattaccaccttttttccgatctaaaaaatgctcagtagcaagatatatcggtccaatgaggacgaatgattatatatattgccgcttaaatgatattttgatgaataaagaataatttttgcaaaaaaggttgttttcctagttaagcccatgacctacgtgttaagagtgtgatttagacgcatgaatgtattactacacacataggcttactgatttatttgtgaattccaactgaaacctgcagatttatttaaacatgttttctggttaatgtgtgactctaatgatgacctgaaacgacgtccaaaccaaaaccactaagacagattttccttcccgtagaattgattcaaacacaaaaattgcttctaaatgtaaaatgacagaagcaaatcagtgtctaatgactaatttcttatacaatgttaatatcgacatgagcaataaatataaatacaaaagagaaagaaataattgcaattaaatacatacata

SEQ ID NO: 11998 - DNA, 581 bp, Diabrotica virgifera
tctttgtatttcgacagcacatctcagctggaattttaggttcaaggaaatagaagaatcgatcaatcaaatattactggttatggaaatgataggaggacacgtctgtggcttcagtgagggtgcagtagttgtcccaatagctataggtccacgtccaccagtattcgacttgacttggatttattcagtggtcaattatcttttaaatacaatggcccttctacatacgcttttggaattttataaaccagcaatagaaatgtgtatagaaaaagatttgccttttaggataccgtttacatacgtaagcatttacagagaactttatgagttcattggtgatagagaagacttagacttacaaaaaacactctctgagagggtattcgatgaaattaatttaggtcgtgcggaatttgttgatgtataccacttgtttgtaacctattgtctggacaaaacgttggaatgcatgggtgatgacaagaaacaagaagatttagtagagttgtatttaaaattgatgactttggccctggaggatgattactttatctgtgattataacatgaaatata

SEQ ID NO: 11999 - DNA, 587 bp, Diabrotica virgifera
  SmartBlast Evalue=2E-44; Info=Zinc binding dehydrogenase n=1 Tax=Aedes aegypti RepID=Q17E09_AEDAE
gaactttaaagactagttctttcggtattttttttaatcgaaaacaatatcaacagtcatgaaatcaactaaattatttaactacactaacatttccaatgtatataaaagattttcgagtacaacgtcatctaagctgatttattttgaatatggagatccactgaaggtagtaaatttagaagaggaacgtataccagaccccaacgagcagcaggtacttattaaaatgttagcagcacccgtgaacccagcagacattaacaccattcaagggaaatacccctccaagccagaactacctgcagtgcccgggaatgaaggagttggagtcgtggaaaaagtcggttctggggttgttggtatcagtcaaggagaccatgtagtgcctcttacaaataacttgggtacttggcgtacccacattgtgttaaattcgaataatgtgttgaaagttccgaaaaaattgggattagtcgaagcagctaccttaactgtgaatccttgtacagcatataggatgttaagagattttacagcattgaaacctggagacactgttattcaaaacggagcaaattcagctt

SEQ ID NO: 12000 - DNA, 586 bp, Diabrotica virgifera
  misc_feature (562)..(562): n is a, c, g, or t
actcgctaggatttaaacgcaataattgaggattatgagactgaagaaaatgccatatttttctacagaagacgtagattaaaagttactaagctgtccaggtacctaagtttcggttttcttctggtttgtctttttactgatcctcttcgaccaaaatcttctgattgctgtatcttcttctcgcccgattagatctagctaaaatatgacttttgggacagcaggctctccttaaattctatacaactcaattcttatgcctgtgccataattcttgctttttatttctccatatatactcattgtgcttaaaatgtttagctcgaagtgtttcagtagtgctggattcttctgtgtaagagaccacatttcttctctatatgttaagattggtctaatcagagttctatctgagattactttatatagtagtaatacttattaactagaactattctttttttaattcttcaatgacgttctattcagtcagtaatgaacctagtcatatacaggtctccataacgtattagtctaggtacctgttttttcgtctttntagaggcgggcgggctctgacatc

SEQ ID NO: 12001 - DNA, 587 bp, Diabrotica virgifera
  SmartBlast Evalue=4E-22; Info="CG9134, isoform A n=2 Tax= Sophophora RepID=Q9W0I2_DROME"
gtgaacatggcgctgttcaatttaaagtcagttatactgtttacccttgttggtagcaccctcgtaacatctcgcaaggtgccaaactgggaagaggtttttcgagactaccagtcaaaagttgttcctctcagacattggggaaataaaagctactggatgggcaccagctttcaggcaacttggtttgaagcattaaccttttgcagtcaaatgcatatgcagctacttaccatcaactcagaagaagaaaattcagtaatttacagatacataagagaggccagcaaaggttttgaatattggacatcaggtacgagactaattgacggaaataagtgggtatggttcccctatggcgacttaatagaatacacaagatggtcaaacggtcaacctagtgatccaaatggagaaaaatgtttacaagtttggaaagttgatgacaattgggggttacaatggaatgacagaccatgcgatgtccgctttcatttcatttgtgaaagatatgactctcaaaatcaggggagaggacagtcaatattgtaatatgtttgaaaataataaacattatgattatcagt

SEQ ID NO: 12002 - DNA, 583 bp, Diabrotica virgifera
aaaaaaacacaacaaaaactcatcgcaaaggaatcttgacactcctggatcataacacaattatttaacaaatttgcaaagttaataaacataataatctaacatttaaattggaaatccctgtaattggctatataccataattattaaaacgtactattggagtaacaatataacaaccttcgaatgcaaatggtatattaaatatttttcattagttatccaaacggattagtgaaaacaaacatcacagaaagttttcaatcatatcagaccatcatcagtgctaaccgctaagtatatcgataggtaaaactagccacatagatgggccaaaagccgttaaatcggtgttaatgttgtaatcgatttaatgtggtaatggtggtaagtgtaaatgcttacataatgtaattgacccatttctgtggctagtttcacctaccgatgtactcagactgtatacaccgatgatgatctggtatgaccgaaaacgcttatgtgatgtttttttaccaatccatttggaaaaatttaagaaaaatttaagataccaccattggaagtttgttacttcaatagt

SEQ ID NO: 12003 - DNA, 587 bp, Diabrotica virgifera
  SmartBlast Evalue=1E-33; Info=Autophagy-like protein Atg12 n=1 Tax=Biston betularia RepID=E3UKI7_9NEOP
ttacagatttattttgatacttatactttgctacatatatgtatatttttataaacaaatatcacaaaacactttaaagcagtgtaaaatcatcatgttgctggattaacataaaacgtttacctgaaacgataatagattataaacataaaaatgtgttaaatgtaaatgcacacatatacaccactggtacaagacaaaaatcatccccaagcttgtgtcttgcagtagtgaagcactaatttaccctcagtgctataacagtcatataaattcttaactatctgatctggtgatggcgcgaatgtttggtttacatacagaaacaacttttcattgggttctagttttaaatactttctgataaattctattatccatccgattttcttatcactgtccacagtccattttttctttttcataataggtgcgtttccagttggttttaacaaaatatccactttgtgcttttctggagacaaatcatgagtaatgttcattgactgtaaagagtcgcccacttcttggacttcgtcactcattttaattaaatatttttatttatcataaaaactagtgttgac

SEQ ID NO: 12004 - DNA, 586 bp, Diabrotica virgifera
  SmartBlast Evalue=3E-27; Info=Take-out-like carrier protein JHBP-1 n=1 Tax=Apis mellifera RepID=Q5XUU6_APIME
tgtgttgggggtgcttactcatcctgtttatttccgttgggtttgcatccaaactacctgatgctattccacgatgtagcaaaagtaagccagattttaaagaatgcgtacaaaaatcaatggaaatcggcatgcgagtcttagcttcaggaaacaaagaactaggactgctacccattgacccgctatttataaaagatatgaaaatttcttcacagggaagttctgtcactctcgagcagaaataccataatataaatgttcatggaatgacacataccgacattaaagctgtaaaagctgatttcacagataagtgtgaatattatatcgaggtatactcgcccgcattaagaatggaaggagagtacgaattaaatgggaaaatattggtatttcctttaaattcaaaaggaaaatgtaacgtaactttagtggaaaacaatgctgtccatgcaatgcagtgtgaaaggtatcagaaaaatggtaaaacgtatatgaaatggaccaattataccataatattaaatccaaccaggatggtatacgattttgataatctatttccggcaaatccacagataga

SEQ ID NO: 12005 - DNA, 585 bp, Diabrotica virgifera
  SmartBlast Evalue=4E-31; Info=SH3 domain-binding glutamic acid- rich protein homolog n=4 Tax=melanogaster subgroup RepID=SH3BG_ DROME
taatttgttagtgtattgttattgttgtttattaaaatggttgtacaggtgtatataactggagtctcttgtaataccgaggttaaatcacgacaacaaagagtgctgtctattttggattccaaatgcattaaatatgaaaccgtggatattacaggcgaagatggtgaaaaaccgaaagcgtatatgcagttaaatgccacgtctctggggggaaccctaaatgatcctgtgccgaaacatccactacctcctcagttatttaatgatgggatttattgtggggactacgatatgtttgatgaagctaacgaattgggagaattaaaatcatttcttaaaatcgaagaaaccaaaattgaagacagcagtgaccttattgaacctgaagatgtaatacaagtttcaaacaaagaaatagaactgatgggttagcaagtattcgctaagaagtagtgtactgattttttttatatatttcaaaaattttatttcgcatctcaagatattttttaaatgtgataattttgcattgacttttgtattaataagaaattagataagtaattaaatataactatacat

SEQ ID NO: 12006 - DNA, 586 bp, Diabrotica virgifera
  SmartBlast Evalue=3E-46; Info=Importin subunit alpha-7 n=2 Tax= Formicidae RepID=E2AIW7_9HYME
ataggtacagcccctgtttcaatgaccattcgtgtttgttgagaagttcctgatgctatgttggttaatgcccatgatgcttcaaactgaagtgtacagttagatgaattctgcaagaattcaacaaatcttggtacaattcctgtctgtatgacttcatcaatcgggggattgggttccctgctgagcagttttctaaacttctgagtagcttccaactgcagttccggatctgtgctgtataaattttttatcatatctggagtgatccatgttgagacaggagatgtgctatctggatcaaatgaaagaggatcatcttcaggtaataactgattaacatttacatttcgtcttttattcaactgttggtctcttttagcttttcttaactgtacaccttcttcttctctacgcctccttaattctacactatctaatgcagcatttttataccggtgcctatgggctgacccagacatttttgttttaatcaattaaactaatatgagaacgtaatttatagcaccatttaccttgttttaaaagaaaattttatattctcgtagaaacgagaaaatttagg

SEQ ID NO: 12007 - DNA, 586 bp, Diabrotica virgifera
  SmartBlast Evalue=8E-10; Info=Transmembrane protein 8 n=1 Tax= Camponotus floridanus RepID=E2AI30_9HYME
gtgttgggaagaattcgagaaggtaccgatgtgggaggaactttacagtttattttagcttttaagcctagagttttgaagaaacagtatctagcgtttacaagcgaaccagagaatcatgtgatagtagcttgtatacgaagaggagccatcgaagttcctacttggccaaataaatgcagctataatggtatagaaagtcactctcaattaattttgaataagacaacggagaattccactattttggtaccataccctgaaagtggagtttggtacgcaacgtttaaactcttctgtggcgaatgtgtaccttgtcattgtccagaatcatgccaagagcggtatgaacaatgtgtcatagattgtgagctcacttgtgatggatctggagaatgccagcaatgtactacaaattgcagtgaaaatatcatacaggaaacagaatgtgctggttgcgattgcgatggaccatgtttaaagagcaacttaacttgtaatactagccttatatttgacatcgggtctcatccttgcatttttggccagtgctctagaaacggaagatgtatgttcgtagtttctg

SEQ ID NO: 12008 - DNA, 581 bp, Diabrotica virgifera
  SmartBlast Evalue=2E-98; Info=Heartless n=1 Tax=Tribolium castaneum RepID=D6W6I2_TRICA
atgttgtgtaagagaaactggaaattcctcatcgcaacttgactcttgactcgaaggaggagtatctagttgaggaagacctaaatcaagatattcttcgttcgctgtaattgttaatattctatctaagtcttccactagttctgaaaatatcggtcgttcgtttggttggtaactccaacattctcgcatcagcatgtatatttctagagaacaacagggaggtttctccattcgatgaccattccgtaacaactggaagagtttttcaacacttggtaccgaaggatatggtgtacctcccaatgtcatgatttcccaaagcagaattccataagaccaaacatctgactgtgtggtatacattcgatgaaatagtgcttctggagccatccatttaactggtaaccttccatctgtcgtctttctataatagtcactgcagtgaatatctctagccagaccaaaatcggctattttaggatatagtcgtcactgactagtacatttctagcagccaaatctctgtgaatacaccttctagaagcgagatactccatacctcttgcaacttggtaagc

SEQ ID NO: 12009 - DNA, 583 bp, Diabrotica virgifera
gtcgacacaatagaccaaatggcgaggaaatgccaaatagaccaaatggcatttttcttatttaaaatttacatagccacccacaatggaatataaaaacgtaatcgaagggttattttcgaaatggctcagaaatagtttaaaaactagttattgtcttggtaaccctttttgtttcatctgtttttgattctaacaattgtttgttatcactcattacactatttatatttgttcaatcgctcaaaatgaaagggtttacaccaaaacataattgcatgtgccgtttattcgtttctaacataaaaccctgcctttaaaaagaacaaaatttcaaactggcaattcaaagtttacaacatcgtcaattttgttatcatgataaaaataaagacagtcataaaaatatctaatcatataaataatttattaattacaagtagcaccagataccagatgtaaaagaaacgtgaaccatcggtgaacaacctatgaaaaaatcttgcactgtgtgctgtctagcatatgacgtgagcatcatatttggtcctttgaacaggattttgtaaaatattaatagaag

SEQ ID NO: 12010 - DNA, 584 bp, Diabrotica virgifera
acctactataagcagaattggggaaacacgtgtggtcaaaatagcaagagataaatcaccaatcggtagaagtatcggccgatcacgcaaaagatggagtgataaccttctatagaggtatcaatccgccaataaacaagcagaatggcttataaacaggaagaagaagaagaagaagaacatatttctcaaattgggctctgtaatgccattgtttattatattacgtatatgtgtgccaaataacttgacaaaatattcaaaattaaagctgcaatctaggaacgcgttttccgtcttgatgtagcctcttaggtatgtagaataaaatgtaggtatattggacaaaacttacttttacatctgcaacttgccagtcgacggtaaaactgtctacaatgggcttaggtgttaagacagtggggactttttgtgcgctgattcttccagtccattttggtttaatcatggttatgctaaaaaaattgtcgtacgttaattctaggtaataggtgaaatatacatattattgtgtattattgaggaatcaataaaatttatgcaaatttatgatgactgccgaa

SEQ ID NO: 12011 - DNA, 586 bp, Diabrotica virgifera
  SmartBlast Evalue=6E-79; Info="WD-repeat protein, putative n=1 Tax=Pediculus humanus corporis RepID=E0VNW1_PEDHC"
ccaaagatcaaaacgttatcatctgggacgtcgatcctgatgcatgtactttatcgttaaagaaagtactagaagggcacaatactggtgctgcgtacatatcgtggaatccggattctactcatcttattgcgtgtggtcccgatgatagtccagaagtgtggctatggaatatagaaaccgaaaacttccttaaagtcacacaatcgcaagaagatgctctcgtatgctgtgcctggaataaagacggaaccaaatttgtcgttggaggtgtacgaggacatttttatcaatgtgatttgaaaggaaacgttttggactcttgggaaggcgtcagagtaaacggcttgtggtgtcgtcaggatggtaaaactgtattagcttcagatactcatcatagaataagaggctacattttcgaagaaatgactgatcagcaaattattcaagaagatcacccaataatgtctttcaccgtcgataagaaagacagattggctctcttgaacgtcgccactcagggtgttcatctatgggatttaaacgatagatgtctggtaagaagatatcagggagtaactcaggg

SEQ ID NO: 12012 - DNA, 586 bp, Diabrotica virgifera
  SmartBlast Evalue=3E-15; Info=Tyrosine-protein kinase Src42A n= 2 Tax=Apocrita RepID=E2B7Q6_9HYME
ctcagaacgtttcggttttttaacgcaccacaaaactacagaatcgatttttttaagtttatttcaatcgaattatgttttatgatcaattcaatctgcagcttttaagtgcatttaaatagaagttcatcgatacgatactgacactgattctttactttatttatcccctttcatgtgtatttatcaaccctgtttgactttttttatactaatcagtatatttaataatgctattgatacctaccaacctccttgataccacgacttttctaaactgatcacgacctgtcaacatctttaaaatcgtaacatagaagtcaaaaagtataaaaacataagaagtacggcatatctatctataattattgataaatagatatatccacctccctattaatggtagtgtacctcaatggagttacgcaaccaatcagcaggggggtggacgtgccctcagtacgcggatgcttctttgtattcggatccttccatggtgaagaaatcttctagtttccattgaagagtttcaaaggtaggccttctcatgggatctcggttccagcactcgagcacccaacacaat

SEQ ID NO: 12013 - DNA, 585 bp, Diabrotica virgifera
agcatttctaaaaaaagtaaaagttatcaaaaatcatattttatataaatcgcgtcaactttaaagttgccagttaaatatactaatttaaaaatgctttctcgtttaacattgttaaccctcttcatttcattggcagccgcagcaactgtcagacccacatacgacgtctatggtaattacaaaacagacgaataccacaagtatacatccgattgctgccgagttccaaactgtgatgaattcggaagatgctacgactcaatagaatgcggccatatttgctccaccgcaaattatcccaaagcacaagttaacagaactccgggatatcacaaaaagagttcatacaccaaatacgactgtcattttggggagtgtaatcattatcagttcacttgcgaccactgccccgatccagcgcaatacgattttagtatttatacagtgaggaaggattgtatgagttgttatgcatagtgaaagactgaattaccttgcattaagactgtagttattatttgttttgctttttagtgtgatttaatttcgattttttttaaataataaattattgttatatgt

SEQ ID NO: 12014 - DNA, 585 bp, Diabrotica virgifera
  SmartBlast Evalue=3E-20; Info=PirB n=3 Tax=Photorhabdus RepID= Q1PA45_PHOLU
ggatcggcttgagatggaatacaaaacatgttatgcagaactattgtatgacggtcttgtaactgttcgaggttactgtatccttagcggattgcagttcttcccgctctggaaatcaattgtagattatccaaatagcacagaggagccctacaatgatgtcatcatttactcgacgtactggggtagagcaacacctagacttcacaggcaaatggtcacagaagaccatgttccaccagtgaaaccagctttggtgaacggtaaacgtaaccaaccaacatctattgttgtttacactttgaaagataaagtgtctggtgatccagtcatttctggtcttactgttcagtatgaaaacggcgaaaaaagtgttactggcaaagtgtctcccgacttccaaataattgagtttgatggaaatcatgtaacttctgttagtgcttatggttggggacaaattgacggtctcaaattttcattctgcaacggtcactccgtaactgttggaactacatcgagcgacaagcatgaataccatcttcaaaaccaccacattgttggcttcttccttgctaatgattt

SEQ ID NO: 12015 - DNA, 581 bp, Diabrotica virgifera
gttcgttaagaaaaaaatccttagaaaaactcgaaatcctcagattaagatatggttaagttaagtacatgaaagagagtgtatatttcaaaatctgacgatttcagcggggcgtaaggaaatgtttgagtcacaaagttttacaataaaaagctaatatttcgcgaaatgaacgtcagatcaaaaaactaaaaaatacgtgttcaatatttttcaaaaatctatcgaatgatatgaaacacgacccccacgatggggtggggagtaaatttaaaattttatataggaacaccgcgatatttcgcgaaatgaacatcagatcgaaaaactgtaaaatacacttattcaatatttttaaaaaatctatcgaatggcaccaagcacgaccccccacggaggtgggtggggggttactttaaaatcttaaataggagcctcattttttattgcagatttggattccttacaaaaaaataagtaacttttattcgaaacattttttcgaattatgaatagatggcgttataatcggaaaaaacgattgttggaaatggaaaattaaattaaaataatggcaagcg

SEQ ID NO: 12016 - DNA, 584 bp, Diabrotica virgifera
ctacctattcagcttacctcacagaattagcgatcacaatctacacatcaagtcccacagatcccgaaggagatccttcttcttacattggtgaaaacagtgtgtcataaaacaattacattctaattggattgtcagttaaataggagatttacgttgaatgatcttaatgttataatcatttataaagaatttttttctgtgtttataaaaatatttaaaatctgttcaagtccaagaaaaaagactcataaacagttacacgtgaacaggacttgatcttagtctcctacccactctaccgtcactttacgatccctggatcaataaatattccaaattgtataccacagtcaaccagtggttgtctgtggtatacaaccagtctgtggtcaaccaatcgaccacagtcagtgtccatgacatagaaatatattaatgtgttgcacaaaccggatgatagatggtgacgacgtgaagatttatactattcacgagctagacgattcgaaattttgttacaataatattaattcttatatttaccatttatgctggtagtatatgattctgaggctataata

SEQ ID NO: 12017 - DNA, 584 bp, Diabrotica virgifera
cgagaatacgagtatacggcctcccctttaatgataaatagactgttccatcttaggcgagcggtagcaactcctaaaattacgttatatgtacctaccgaccacgaaaatcaactttaatgaatgaccaattttggtgattctttatattttcgataccgctgaatctgaatatgaagtttatttttatctagacttggtggtacatgttaaaaaataaaattttatgcaaaaatgcgaaaaatcaattttaatgatttttcgactttacctcgctgtatctttggtcgctgtaaatatttccttttgaaaattttattgtgtcatctttgaagttttaaataacaatgtgctttattcaaactgtttaaacaaattaaaagaggagtggttaatttttaaacattttgtcgtcagatttcgttagtttcatgtttacttaaaaaagttgagtcacaaactttttagtttaaaattttcaccaacacaggaataaaacataattcatgaagaagtttttggaacattcaagtcaaagtatgcaataagaaaaaagttatgtgattttatagacgagtggcact

SEQ ID NO: 12018 - DNA, 586 bp, Diabrotica virgifera
gctaaaatcaaccttttattatgggttcggcgaatattattgaagatcccgttgaaccgtctggttcaaatttttttttcattaaatttcttgataacgatttgacgccagaggtaatcagattgctaccgaaaaagtttttgctccagttatctgcacgacaattatcaaaaaactggcaatatattcccaaggaattacaagaagataaagaattgctcgaaaacctgccgtgctatgagcattacaatagaccagaaagtattatacatatagatggaccagctccttcaaaagcaaaatgttacacctgcaagatgagaaactcagtaatttgatccagtttcaactatataacccagtgaaagggtaactgattatttctatttgtaagaaaatatattgtaaataagtttttatattttatatataattttttaatacattattataatattatggaagatatatacagtatttattccaatatagataaaagtaggtacctacttctgataacacgtggttttaatttgacattatgtattgtatctgtgatatgtgtttatttatagaagtagattat

SEQ ID NO: 12019 - DNA, 583 bp, Diabrotica virgifera
  SmartBlast Evalue=2E-21; Info=Novel protein similar to vertebrate autoantigen (RCD-8) n=1 Tax=Danio rerio RepID=A5PN03_ DANRE
ggaccaagtttcacaagaatgcaattttattacggaattgtcgtttgctcctgttattaaaaatttccagcactctgaactgggctccaagattttatctataaacatcagggacgaaagaggagtaccatcatgaggtctaaactcaaaaagcgatttttgcttctccgagttataaaaatataattgaataaatttaacatatccatctccagttgctatggctatgtgagtaccatccgaagcaaatgaagcatctagtacttcagcgttgtgattaatttctatgtacccttcaaagctttcatcaggatcgattatattgcttacaagacatttttcacttaacatacttaaattgtatattgaggctctggttccattcagtactacaaacattttatctggatcaactactgtatcaacgtcttcgtcgtcgtcaatagggggcacataaggacaccatataagtctataattacttttcgatatactcgaacgatgatgatgatatacatgtaaaagtaatgtagatgatattgaatttgtttcatcagttattttgtagactaatatatttcct

SEQ ID NO: 12020 - DNA, 581 bp, Diabrotica virgifera
  SmartBlast Evalue=1E-39; Info=Helicase MOV-10 n=1 Tax=Salmo salar RepID=C0HAB8_SALSA
tgttaagcataggagttatccctttataattttggtccaccgggaactggaaaaacagtaacaattgtggaatcagtgtatcaaatttggaaaaattatcccaaatccagaattctaatttgtgccccatccaatgctgcaaccaatgaagttgctgtaaggttaagacaaataattcccaaaaccgaaatatttagacttcttggagctgcctattctcaaaataagcttgagttgcacggaattgaagatattgtgaatgtagaacatggtgaattttacatgccttccatgcaggatttgctgaaatacaggattttgctaacaacaatagtaacaagtgcaaggctcgttaatggcggcgttccacccaaccatttttcgcatgtattcatcgatgaaagtggatatgccacagaaacgcaaactctgattccaatcgcaggaattttatcgaatagtgaacgaaatggtaatgttatggcccaagtggtacttgctggagatccgcaacaactaggtccattggttcattctggatttgctcaacattgtggatacggtcagtcaatgctacaaag

SEQ ID NO: 12021 - DNA, 584 bp, Diabrotica virgifera
gcggacacattgtggagtgtatcacttgagaggggcactttgccgggacagctgtggtagtggcatagttgtaatacattttgtggaagtatggaaggcaaggcttttttcagtgttttattgtgagataaaatgaacttccatcaagtaacagtcgaatccatcaatcaaatatttagattgtggatactttaaccaactaatatgacataaaagtttgtatgcaccgtgggcattaatagatgtgtatatcctcgggcgacttacaaaaactcaggccagaggccctcgtggcaagatagtcgctctcagtcatgaacatctacttaatgcccttggtacacaaataaacattattttctgcaaaatcaaatatggcgcataggtaggatttgatctctaattttataaaatgcaaaaatttaatgataagcattcccagtcccactctttcatatttcagaagcagtagtagtttgtggattagggacggtgcgttggtgaaggggaatcacatgagctctccctggtgttgaaggaacataattaagtaaaatgttccctcactgcatataccaaaagat

SEQ ID NO: 12022 - DNA, 584 bp, Diabrotica virgifera
ctgacatcatggcctccatccgtggatagaaaccaagaattattctagaagccatcgagatagaatagcgccctaattgtgccaataaaagagacaataacgtcacccagaatctagaaaccgactaatagcaacagtagtacagttatcaatacactagtgacgagaccccggaagtactgatgcagatttcagagacttaaaacttagagcggaagataaaagaggaaatttgcaagaaaagttaataaaatatattgaagtttgaggaaatctcacataaagcatgtcctctgatacattttcgttctttttatttcgtatttatttttatatgtaaagtaaaatatactgaaatcttattctcaatttttattaattataaattttgagtttttctaacaaaaaaactaatatgatctgctgtatcaccttcgggtaaaataatacacattctttatgactcaccttgtatagcagattgagattatatacaaaaacaacaaattagcaacaccacttaacattgctacgcgaagattcttcagtcgctgctctaatcgataaaaaaattcccttctctt

SEQ ID NO: 12023 - DNA, 577 bp, Diabrotica virgifera
gaataagtggttctagcataatacaaattttgtctcaccctattgatatcattgttagtaaatgtctctatatttggcttcataagttctttacagatgagcttcattggtttttcgttgagatctttcacggctgctctttttattgaattgcttacggcttttctattgtaaacttctcgtggttatgacctaatattgattcaactatcgtattttcacatccctgtgttttcacaaatgctttgcaggttttttagacatgtccaccgttttactgtacctttggccaacattttgaaaaccgatgtaaaaccatcaattgatagtaaaggtttgcccttttgactgacacttatcgttgattccatggttaaggatggatgttatgacttaaacttgcttaaacacaatttgatcttgaaatcgacgaactgacaagcttcaaatagacaagctgactgatgcaggaactaatttactttcaagtatgtatttatacaacatttagcccattagcacaatgtacaaaatagaatataaacaaacaaaaagattaaagtaaaagtacctattc

SEQ ID NO: 12024 - DNA, 584 bp, Diabrotica virgifera
  SmartBlast Evalue=2E-37; Info="Hemolectin, putative n=1 Tax= Pediculus humanus corporis RepID=E0VW60_PEDHC"
tcagggcattgaagttcgacttgtaagttgttgaaggcaatagcttgacaacaagaacatttggattgcatcattcccaaaattggattgaagctggttgcagattcacaactaccaacacattctgtgaagttcttgatcgggttgatgttggaacattcagagtatttcaatagtccaattgttagtttttcaggaactggaagggccatacattgtgttagtgctgatccactactgttgcagtattgacagcatccctgtacatatatatctttaggttcgcaagaactatccaacggtgggcaagattcctgctgacttgtaatcgagtattggtctcccaatttttcacaactgaatgttgtacagttatcgtctgatttccaggtttgaccttctagccagacttcgtcctcaatgacacatgatacttggacacattcaccgcagcattttgtttcagatggtttatattcccaaccctttgcacattcagtcttgcagaactggacggattcttgaaggacaagttcttgttctcctttttcgttacatttgtagctcttgcatttcccaacaca

SEQ ID NO: 12025 - DNA, 585 bp, Diabrotica virgifera
  SmartBlast Evalue=2E-36; Info=Endonuclease-reverse transcriptase n=1 Tax=Bombyx mori RepID=D7F159_BOMMO
gcgccgacaaatgactgaaggatcgaaaaatatttgtaaacttgtaaataaaaaaggagaaataacaacaaataaggaagatattttaaaaattgctcaagattttactcagaattgtataagcgagaagaacttccagatcctgatcaaagtcaaataccaaaagttcaaaatgtaggctcagaagacatcccagatatcacaacagaggaaataaaatcagctctctcggagatgaaaaacaataaatcacctggagaagatgggatagtcattgaacacatcaaagaaggaggagaaacgttaataaatgtgttgaaaaagatgttcaatgtttgtttgacaagaggggtaaccccctctcagtggcataatgcaataataaccataatgcataaaaaaggtgacatttcagatctgaagaactacagacctattagtttgctctcccatacatacaaactattcatgaagataataacaaaacggcttgtgaacaaactggatagttaccaaccttgtgaacaggttgggttccgctccagatacggaacaaacgatcatctacaagttataaaaacgcta

SEQ ID NO: 12026 - DNA, 580 bp, Diabrotica virgifera
gcaaatttgcaccgtattcctaaatagatcagtagccaaaaagttaaggaacagtatttttagagctgcagagtgaattccgtatttaccaacatcatgggagcagcacaaatatcttaaaaatctttaaacccgtttatctcaaaactactaatttcgagttatcaagttatagtattaaggcggcgatatgacgtagatatcttaatattgtatgacatgacagaggcttgaaacaaatgactgtaaatgaaaagccctattaaggggcgtttgattgaaaccgaaccgttttagatatccaatagatatgcaggttactggaaagttacatctttaactttttctctcttaaaataaccaagtaaatatgttccaccaaattttaaccactaccgacttgataccaaaacattttagagggtaggttcattatttgaatgtgctgttatgagtatcacctgcctaaaaaaattgtaactaccattcctagacatttggatagaccacaaacaccaggtgagtccgtcatccatatttgcatcatcttaaaccattttaaacgttaaaatcgagacag

SEQ ID NO: 12027 - DNA, 585 bp, Diabrotica virgifera
  SmartBlast Evalue=1E-56; Info=DnaJ-like protein subfamily C member 21 (Fragment) n=1 Tax=Camponotus floridanus RepID=E2A853_ 9HYME
aaagaatacatgcggcttataaatgataaaaatatcgttgtaattctttttatattaaaaaatctttgtaagcaacaataatgaagtgtcattatgaagttttaagtgtatccagagatgccgaagacggtgagattaaaacagcatacagaaagttggctctaaaatggcatcccgacaaaaatttggataatgcagagtttgctaaagaacagtttcaaatagttcaacaagcttatgatgtattgagtgacagacaagaacgagcctggtatgacaaccaccgtgagcagatacttaggggctcaagctcagattttcaagacaactccctggatgtgttccaatatttcacaacgacgtgctttaatggatatggagacgacgagaatggtttttacacgatatacagaaatgtttttgagaagttatccaaagaagacatggatttcatggaagacaaagaagagttttgtagtgtcccaagtttcggaaattctacaagtgactttgaggtagtttcagaattttatgcttattggcttaattatgcaacaaaaaaatctttcgtttggctagatcctt

SEQ ID NO: 12028 - DNA, 585 bp, Diabrotica virgifera
  SmartBlast Evalue=4E-43; Info=ATP-dependent RNA helicase abstrakt n=3 Tax=Aculeata RepID=E2BNJ7_9HYME
ttaaatgaaacattaaatcacgatgactgatagtggaccttctgtaaagagatatcgacgagaagagaatagtaactctgattctgatgataattacgtcccctatgtaccagttaaagaaaggaaaaacaacaattgttaaaattgggtcgacttggacagttaaaagaaacagagcagaataagccaaagtcttcaagtgaaaatgaaacaaacgaggatgaagaagaagatgaaatttggggaagaaagaataacattccattacttgaccaacatactgaattgcgaaagttagctgaagctaagaaggtaagtgctgtagagaagcaattaaaaaaggaagaagagattttagaaatagttgctgaaaagaaagctcttatgggtgtatctgaattggctaaaggtatacagtatagagatcctataaaaacaagttggcatcctcccagatacattttacagaaacctccccaagcgcacgaaaagttaagaatgagtcttcgtattttagttgaaggagatgaaataccacctcccttgaaaacattcaaagaaatgaagttgcatgaaggtattatt

SEQ ID NO: 12029 - DNA, 585 bp, Diabrotica virgifera
tgttggactatttgaaaaaatagattattattaattgtgagttttgtagggtagtatattttacgtaaaaatatttcgaattataatacgagtatataaagttttaggaggattttttatgctagaaatatcatcagttaaccaaaatacgcgttgatactgtaaaattttaaagagtttttgttgccattttctatataatatttaagaaaggtgacatgagaataatgcatagggtagactagtttcgccaataaaatattaaaaaacgatattttgagtccttcaatttactaaacggtaaaaggaccaaccatgcatttaagcgataattccaaatcacggttttacaaagatgacatcttataatctacccttttcaaaatgatatgtagtgatggtaaaaatggtaactacataatatgcaaaacaaatgttttgcttgcataaataataagtgatcaagtaatcgagccttttgaacttacatcacgttaagaggaaactacatttcaattatatacgattattattgggaaacaagatctcaacataaagggatatattttatgtagttgtacgtat

SEQ ID NO: 12030 - DNA, 583 bp, Diabrotica virgifera
  misc_feature (22)..(22): n is a, c, g, or t
ctagattaagattccaatcaangtttttggcctaggtgaactgtagttttatagaaaaatctcaaacgcatttagttgcgtttataaatgtctactacctaattgtatagaacgcacaggttatattttacagatttctcgactttttgacttctatctgtgatgatttgacgtgagaggcgtccaaagtctcttttgaaaatttgtaaatgtgttaaggtgctttgagttcgaaagttagctgtcttttcgaagcattaatttgtcaaaaacatagttatagtataaaccaataagcgcttacctcaggaatatttgtcttgtagaggtaaaatgaagagttatatttttattgttcgtcagagataaaagattttgttttgtgagaatatcgctaaatattatatttttgatacattaataaatatacagattgggcaagctggtttttgaataacatattgacatttatttatcggattcactgtgttcagaagagcctttggaaatttagattagggtgcaagtatattaaagatgataagagattgatacatatcatactatacatatcatattaact

SEQ ID NO: 12031 - DNA, 585 bp, Diabrotica virgifera
  SmartBlast Evalue=2E-31; Info=Sorting nexin-2 n=2 Tax= Formicidae RepID=E2AJW8_9HYME
cagttggataaacaactcctgcctttgcgataataacttaattaattgctttgaaagaaataatggcggaacctgtagagcctccccctttattcgaaaatatcgatatactggctcaaagtaaagacgacgacgatctttttgtatccgctcatcaagattccgttcaagatgaactcgagccgactgtaccgcccaggttagctgtttctgatctgaaagaggaactggaaaatattcctattaacaaccactcgatcttgtcaccaagtatggagcaggtaagcccacaagaagagatggagaaggaagatgaatttttggatatcagcattactgaaccacagaaaataggtgatggtatgggagcttatatggcttacagagtaacaacaaaaacaaatatgccaatgttaagaaaaaagaatttgctgtctccagaagatttagtgattttcttggtctgcatgataaattaactgagaagtatttgaaagttggtaggattattcctcctgcaccagaaaagagtgttattggtatgaccaaaatcaagatgtcaagtcaagatggtcctacaactaa

SEQ ID NO: 12032 - DNA, 582 bp, Diabrotica virgifera
gttatattttagtatatttattttggtaagagaatatttttctacagtgaagctgaagaatttcgatttaaagccagtcagttgtttttttggtaagtggagactgttttcaagatttaacaggttatagatcaagacctcgatttttgacccttcacttcgttatcgaacgtattcgcttcgtatctatttagtgtacagatagcgaatgatcgataacgaagcgaagggtcaaaaattgaggtccaggcagtttgttttgaattgggtaaatcgtatattttttttggtttaatcattagaactattattagcaatgataattttattatgcggagacttcaaaagattagattaggttaaatagtccatcttttgaagtgtccggcatagtgaaattaacattttgaataatatttagaagcgattaaatggatgaaattaatggtaaaatggaactactgcaaaattaaaactggatcaaggatatctgagggatctaaggtcacgaaaggattcaagcagagtggctgtatttcgcctaccctgttcaaaatttatctggaacaagcactcaagctg

SEQ ID NO: 12033 - DNA, 575 bp, Diabrotica virgifera
  SmartBlast Evalue=9E-51; Info=Troponin C 25D n=3 Tax= Bombycoidea RepID=B1ABS9_BOMMA
cagaaattccggaagaaccagtcaccccgaaaagtcgaaaatgacggaatcacttgatgacgaacaagtcaaattgctaaaaagggctttctccatgttcgactctagcaaaaagggcaacatcgacctagaaaaagtaagaacaatcttgacaaccctgggacatcattatgacgattctgaactagatgctttgttatcaggggaagatccagaaaatacaggaactgtcaatttcgattcattctgcagggtggctggacattttttggaaaatgaagacgacgaaactttacaaaaagaattaaaagacgcttttagattatacgataaagaaggtaacggatatattccaacatcgagtctgagagagatcctggcagcgctcgacgatcagctcaccaacgatcagttgaacgaaatgatctcagaaatcgataccgactcctcgggcaccgttgatttcgaagaatttatggaaatgatgactggagactaaaatggagacgtagccaaattgtgtaaaactatagtttatattttttatcatatagtttaattgttataccaatttt

SEQ ID NO: 12034 - DNA, 584 bp, Diabrotica virgifera
  SmartBlast Evalue=1E-41; Info=Zinc finger protein 569 (Fragment) n=1 Tax=Camponotus floridanus RepID=E1ZWQ7_9HYME
ttccagtctgactagagtatttagtaaaagtctaatataattgaagtttctagtttccacgatggcgagtttaaagatttgttaaagttagactcaaccagttcagaagggacaatgaaaatgtcaacatctagtagcttagagaaaaaccaatcatcttaagaaagaagctatccagctaccctatagaaaccgtcttcgaagaagaaaagagtattactgctcctatttcattaccagttgtacttaaggacggtaacatttacacttgtgttttatgtcaaggagacgagacagtcgcaggagactcaaaagcgatagtagctcacgttaaagaagaacatggctttcgactgtacatttgcgacgtttgtgggcaggatttttgtaaacgaaatcaattgtctgctcatttagatgaacatgttttggctgaagaaggggattttcagtgtgaggtttgcaatagaattttcagcaatttgaggttatttcgcatccataaacgcatgcacaatccacaaacgaaggcatgggtgtgtgatacctgtggtaaaaagtataacagcaagaatctactagat

SEQ ID NO: 12035 - DNA, 582 bp, Diabrotica virgifera
gttaaatagttggttcattttggttaaatagtgtaggaaaaatagaggacgtttaggctaagttaactgatatgtatactttaaatcgatagccatagggtgatacaagtaatataaccgtggatgtatgaataaaatcaataaaaccctacataagtaaaaaaataacagtcatggttaagtgatcttcttagttaatttatttttgttaccagctttttctgtcatggctgggtcatcaagcgatctaacatcatgttacctattctgtcaatatagcagcaaggcactaccaactattagtgaagtagatcatcaatgtaaattaaagttgtgctgatattgttgcacattcgatggcggtccgataagaacttaacctcaccgcccgatggagccactatcgtaatttactatggtgaagtagattccagtaggcgtctaatgtcaagatttcagtagagtccgcgaattttagaaaaatgaataaagagcaacatcggtcggtgattcgattcttgttttttggaagggaaccgggaattcgggcaccgaactcaaagagcgcttggatgttgtgta

SEQ ID NO: 12036 - DNA, 584 bp, Diabrotica virgifera
cttccgttaattatgatttctttccttttagataataatgcttcttcaataatgggttcactatatacattgaagagtaatggagacataatacatccctgcctaaatcttctcctgactttatttctgaactgggttcattgtctattaaaatttaaaattaaaccccatagaatttgcaaaaggtccagtaacatttaaacgaataaaaaagaagagacaataaaattttaaaactgacaagtaaatataaaacattatgccacccgacctttaacagttccgacaatgatgttttaaaggtgattttcagtgacgctacattgtaaaagaataatttcttagttagtcaaaagaggtaggaactaaaattcgaattgttatcctctgatgccttttaagacgtaaatctaaagcaaaacagagtgatgaagtcgacaagcggatatataattgcacccacgacctgtcgttcactgtgataacaatcttgagcgaactagtccattttattcccacaaaagtgaaagtaaagatgattccgatttaattacagaataaggcgtctactatgtgcttatacg

SEQ ID NO: 12037 - DNA, 583 bp, Diabrotica virgifera
  SmartBlast Evalue=8E-55; Info=Mitochondrial ribosomal protein L28 n=1 Tax=Simulium vittatum RepID=B5M0T0_SIMVI
agaactaaaaaatttaaggttaatattttaaaacctatttttctaagtttttctaatatttctcaaaaaataaaaatatagatagttgatttctttatggcatcaaaggctgtcaaaactcttggtttatttcaaaaacctactctgttggataaaggtgtagctgctttacttccagaagcttacaaaaaattttacaaggaatggagatttgctcaacctactgctgttcattatgtaccagaatctggaaattggaaaagaaatgatgtaacaggtgaagtatttcctgttcaaaatattccaattcctgtacattttccaaaagaatcaagttcacatatatggggtggagagggtgtagtgcaaggctttgaaaagcgaaataaatttaagagaagagttcctcatttttgggttccacatttaaagagatcagtagtttattcggaagttttaaataaacacatctcagttataatcacagatagagcaatttctttgatcaatgcacactatggatttgatcactacttattgaagtcaccagcttgcgatcttcaatcattattagcactgagta

SEQ ID NO: 12038 - DNA, 580 bp, Diabrotica virgifera
cctttcctttttttttaaatcttttctctaatttatttgtcattaattgaagatctatagaaattacacttactattttggctattattaccacaattaaatacttacgcaacaataaataattatttaccatttttgatcaaatttgttgtacaagcaataatgacaatgacattacaaagatacctccaatattgtcatattttgctgctactaacgctggcatcatttcagggtacccccaccatggtcacgcacagagcgaatacaaacataccactaaatactatctacaatttcaagactcaaagaaagcaaaacaataaaaatattgatagagagctatcatgttttgaaatattgctagacaatatggttttgaaactagtttcctgtggcaatttttatattaatggggataaaccacaacttaaaacatttaatttcctttttctcatttaatttaattttaataatccaaataattttaatatttcgtattttgataatgatctttaaagtgaaaacatcatattatataataattttgaataaaattgtggtttattccaattaaata

SEQ ID NO: 12039 - DNA, 584 bp, Diabrotica virgifera
tgaagtagcttaataaattcttttattatcattgaaaaataaacaatttataaaaaaattcgataagatattttctttttgttattctatttactttggcggaacattacccacaagcattccttaactgcatcaacaatgaggttatttgtacgttgtcaaaatttatcgtaaaataacacaaacttatcataaaatttctaactccaatataaaattagttgtgaaaacaactgtttgtaaattataaaaaacatcaaaatgcaaaaattcgacaaaataacagcaaaaactttaacaaactgacagccacaaaagtaaacaaaccaaaacgtcagaaattgtacttagaatatgtgaaaacatccccaatcgtctttctttgtacctatctcttttcaatgcactgagtctagatcgttcataaaaataacatgtgtttttacttaataacagacggcagctggtttgtcattaatttcatgcgtggaagagaatgatgctagataaaaagtatgtgttttatctcgccaggtattaatgacgcacgggtaaagactcgcggactcaactgtataattatt

SEQ ID NO: 12040 - DNA, 584 bp, Diabrotica virgifera
  SmartBlast Evalue=7E-20; Info=Strumpellin n=1 Tax=Harpegnathos saltator RepID=E2BBX7_9HYME
attgtgttgggggaaatgaagcagtcagaagaatttgtcaatcctttgaaaatataccaaacgtacgttaatcgttgtactaaaatttggggtgattttctagaaaacattttgttggtcggccagttacaattgctcagaaacctcatagctttctatttgaacacttcgtgtaaattcaacgccaaaaacttggaattttcattgcgatcgttggataaggctcttctcatggatatacagaacgataggcaccatcctagtgaaaatcttctcgaatcgctctccacttacttcgattacgctggtttgtatcaaccgttcaacaaaatctatacgacgtcagctaacaacctggatcattctgtcacgatgttcatattcgtaatatcacatttgcacaagttgtttttaccacaaaacgcaggaaatgttaataaaagagcccaagatcaaatagacggaatagccttttcagttggtgtccatacgactctgaggcagtttcattcttacttgaacagagaatttataaggcatttgagcaactatactttacagttgactaaacataacagcagcct

SEQ ID NO: 12041 - DNA, 572 bp, Diabrotica virgifera
  SmartBlast Evalue=8E-45; Info="C-terminal-binding protein, putative n=1 Tax=Pediculus humanus corporis RepID=E0W0A8_PEDHC"
atgaacttatttaaatgatgtgattcgacatgcattccacacattcctagcagtactttgcccttcaagaaactcttatctgggttgttgagacaccgttagtggacttccgacggttccggtttgggtgcgtggtgattcgctggatctggagtactcatgggaatagcgtggggcggtactggtactggtcccacgggtggcgctggttgaggggtaggtggcgctgccgcacttggtgtaactgtgtgaggtgcttcatgaggtgttgttgaatgtgcctgttgaactggtagggcgccaccctggtaataaccaccatttactccagctggcgaaactgtaccttcagggtatgctcccggtcccataaaatattctttgttgacacaattcctcagacactctggtatcctgcccatgattgcccttctgatttctgacgctgccatctctctgagttctgtagccgagcatcactgtagaaagctgcgtgaggtgtgcacagtaaattcggacattcttttagtggacctgtatacacattgtatggctcattttcgtgtacgtct

SEQ ID NO: 12042 - DNA, 583 bp, Diabrotica virgifera
  SmartBlast Evalue=8E-50; Info=Alcohol dehydrogenase n=1 Tax= Aedes aegypti RepID=Q16M07_AEDAE
agaagagcaagatcgggaactttggggtctgtttcattatatcccgaaattcctccacatacagctgtatgtccatagcggttcatgtgcttcagtactgagaatgttatttgacctccaacgttgtcaaagtagcaatcgattccttccggtgcaacttctttgagagcatcatccaagttacgcgttttatagtttatataaacatcaaaacctagatcattaactaaccatctacccttttcttgtgatcccgtaattccaactactttacaacccattaacttgcacagctgacctgcaatgctgcccacagcaccagctgctccagatattgctacagtgtctccttgtttgggtttcagtatttcggttacaccaaaataagccgtattccccggcattcctaatactccaagtcctgtagatacaggtaaagttcctatatctggtaaaagatatggatcctgggtaaatatatggccttcaggagcttttccatttgatactgtgtgagttttccaatcaaagttaccaaccacatatcttccgacggggaattcttcattgttgctttcgatta

SEQ ID NO: 12043 - DNA, 579 bp, Diabrotica virgifera
gacacgcaaaggtacttgttttagtactaatagttttatgttctggccacggcagtgtctaaccttataaaagcctaatgcgacaagtcaggcagtgtgtccgttacggtttgtcgatatgtaaacattgaatgacgtttaataaacgtcattttagtttgttatatcttttttatacagaatgactgaaccgaattagctaatatcgattttaaaacgtttgtagaagtccaaggaaggtttaaaaggtgagaaaatgtgatgaaattgtaaaaaaaatacaaaaaacaacaatattattgtcatatacaaacagttatggtaggggagcccaagcggggatttttgcagttactcgagcgcgtcagattattaaatgggaagaaaccttgtaccctgaaaatgtacctttacagttgtagagcatgtagctcttaatgcaggggagttcgttaagggggggggggcaaaaaaagctattcttagaaaaactcgaaattgtcagataaaggtaaggtaagttaagtacatgcaaaacagtgtatatttcaaaaatctgacgatttgagcggagcgtaa

SEQ ID NO: 12044 - DNA, 580 bp, Diabrotica virgifera
agaagcatcagtatctacaacacagacgggagataatactagaaccgatccagaaattaaaacttctattactacagaagcatcagtttctacaacacagatgcaagataatacgagaactgatccagaaattaaaacctctattactacagaagcatcagtatttacaacacagatggaagataatacgagaattgatccagaaattacaacctctattgctacagaagcaccaggagtgtgtgagattaaccaaatacaatacagaaatacagtacccattcttttatatcccaatacaaacaatgttatttatccacaaggaaaagcaactacggcctttgtgaataaggaagaagtagaattttcatgtcctcaagcagaagtacgagcaaatggagtcaacttaggttctagtattacggttgtttgtaagtccaacgaaacatttatatataatggaacaaatatagagtggagaaacgttttatgttcaaaatccttagtaccaacaattaatgaggtaccagttcaaaatttaagttcagacgatcctaacaaatcgtgtgatattggcggc

SEQ ID NO: 12045 - DNA, 581 bp, Diabrotica virgifera
  SmartBlast Evalue=8E-23; Info="CG9134, isoform A n=2 Tax= Sophophora RepID=Q9W0I2_DROME"
tagtgcgattgctcaagtgattaatttagatgaaggactgattgaagatgaaggcaatactgcaggatctctaccctctctaaatttcgttgaaaacggaaacaaacgatattacataggagacgtatttcagggcaacttttttagatcagaacaattctgcagacaaaatggaatgaatttagtttcaataagctcttcacaagaaaatgacttcctacaacgtaccattatacaacggagtaatagttctgctggcttgggcgacgaattttggacatctggtactaaaataccggattcccgtaactggatttggtttaccaccggtaggaagatatcttattataattggttaaagggacaaccagaatcaaataaaaattatcaatgtatagaagcccaagttactaataatcaattgaaatggagtaataaagattgctgggaggaatactattttatatgcgaatccaagaaatcttctgatatagggccacgtgtggaatacagttagtctcaaaatgggtgaagtactacacacgtcaaacaggacgctgaagatcgagtactacagaacg

SEQ ID NO: 12046 - DNA, 579 bp, Diabrotica virgifera
gggtggattttaaacgatctttaaactttcacatatataaggcagtttggtttcgttttgcttcacgaggcatgcatgcaggtccactgatgacgccgtaagacataaacagctgtctagagatagtgcatcgcctctcaatcgaaaggaaacataaacagtcttcttcacaatgatattattgtttatattactgaatacagagttgaacgccctttcaaatgagctaccagacgacccctattattcccatttaaaaaatcatcgattgcgtcattacgcccagatggatgacgtcactagtatgaaatatatcattattattatgccagttatttatagcgttcttcgccttccggttcccagtttccagcttcgtaggtcgttccattcgccagggtgaagattccttttcgacattgccttctgaatgccgcctagccagaattgtttcagccttcctctcttccttctttcccttggcgtccattttagaatttgttttggcagtctgtcgtcgttcattctttctacatggccataccaaatcagttgtcttctttgaatttcgtctatgtc

SEQ ID NO: 12047 - DNA, 581 bp, Diabrotica virgifera
  SmartBlast Evalue=1E-25; Info="SGT1, suppressor of G2 allele of SKP1 n=2 Tax=Xenopus (Silurana) tropicalis RepID=Q5BL62_XENTR"
cgctactctccataaaactcttgttcatcgcccttttgacttcatcgctacccttgccgtagatctcttgaaatagtgcattaatagcttcggcaccttctggtttctcttgtgcttcttgttccttaatctctttttcaactttgttccagtcttttcctttcttggaggtggggtaagatggtggaccatcagtggttggttctgcttcttttggaataacttttatagcctcaactttaggagcaccttctaatttttcccacctcagaccttcacatttctttaacttgatttctatctttgctgatgaaagtttataactactctgatcagctattatagaattagataggttcagacacaaattacatggttcaaaatctggatgggatatatctattgtgactttgtcggttccgatatctaatttaaatgttcttctttgatattcctcactaaaacagtgattactactgcagcatcagtctgataccagtcatgtctgactggtaactttggctttccttccatagttgcctgctcttcagtcatgattgatcctatatttcttattttta

SEQ ID NO: 12048 - DNA, 583 bp, Diabrotica virgifera
ttgaatctgccttgtgtcaactgagttatctatatttggtgtacgctaaaacattaaatatgaactccttgtattggattttgccgttaacagtgtgtatattttatggattaaatggaggccaagcactgcagcaatcagtgcaatgttattcatgtgcaggtccaagaaatagtaccaactcttcatgtgccaccaacatcaccagattaggagctagaataactccgaactgtacaggaaccttctgttcgacgtttttgacaaatagtactgtaacaagaggatgcgtttttgtaagaacatgtccttacgggcaaacctgcaacttctgtaatagtaccaacttctgcaacaatatgacttacccaacatatccgaataaaccagggtatccagtttatcctagctacccaggtcatccaacacactcaaaaaaaggaggagcagaagaaattaccgtaagcataacagcattgcttgtttgtgccctattaaacctaataatgccgaagctgaatttataaacacttttaatataaatgttataaataattgtttttcaataaaagttattattctg

SEQ ID NO: 12049 - DNA, 574 bp, Diabrotica virgifera
tttaatctataggagatctttcttccaaacatgttttttttagtatcgtatgactccaataattgtctaaatactatccagaataggctaaaatcggttgggaacagaattgcacgtcctctctattcggcataaagggagacaaacatgggaggcgcaacacagacaggtgagtcggaccgacatcatatttacacaaaaaaaatgatcgggccttagtacgatgggatgcatcgcatacccccctcagtctcacgattctcccttgaacgccttaatatactaatcttaaaatggtatgaaacagtggtgatacaaacaggcggatgatgagatgattccatgataatgattatgagtctctttacaaactgagatacgcaaaacacaaacttatattcataaatatagagtacaacggatacagtccactatgttgccaaaggcgttcaaaaaacttgctcaaaaaataaataaattaaaacattttgaagttttatatcccaagaactaaacacttctaactggatccgagttctggtaaacaacccaaattcgggatttccaaaacttg

SEQ ID NO: 12050 - DNA, 581 bp, Diabrotica virgifera
  SmartBlast Evalue=3E-35; Info=Protein FAM114A2 n=1 Tax= Camponotus floridanus RepID=E2ADP0_9HYME
ggaaaaacattccaagaaaaaaatgaactattgagacgttgtttgatgattatcatgggttagtacatttagaagctttggaaatgctgtcaaaacaatgtgatataaagttagagaccttaagcgaaagttgttctggaacagaattccaagaacttcaagaaactatggaccaaatcaaagagctttgcgaaattcctgatgaagatgacgaagataccccaacatttgacgagatcaaagaaaagatccaagtagcagttaaagatataaatgtcagtataacttatgaaaagttggtttctctatgggaagaaactgaagtgtggttgaataacttaaaattagatttttgtgatgaaaatgaaatccatcaagaggctttgcaggtcttggcccagttgactgcaattgctgtagaacagtttcataaatgtggagaattgttattaatcaaggagcataggagcacagcagacgaagcagatagtttagtacaattgactatgacacttacctctcttattggactagtagcaggaaaattctctgaaaaattaaatatgaaatcttcgcaatct

SEQ ID NO: 12051 - DNA, 577 bp, Diabrotica virgifera
  SmartBlast Evalue=5E-42; Info=Probable cation-transporting ATPase 13A3 n=1 Tax=Camponotus floridanus RepID=E2ADC5_9HYME
gctagaacatgttcgctgttgtaataacgagtctggatgacggttgtgccagagaagagagtatggcgcttgtgctcgtctacatcatacgtttctgttccagaatgtagagctgttttcgtttctggaacactttcacctgttaagacgctttcattaacgatacactcgcctgtaagaaggacggcatcacagggcattgtatactttgaggaacgaagaacaataagatctccaggaacaagatcctcaggatctataatcatatcgtttacacttacatcatttacattatatctacgtaatactgatacttcatggcatttggaagactctaccaaatcacggatggcttcgctttgcctgcgtgtctgtaataaagatgtaacactggagtatatcgttaaagcgacgacacagaaggcatataataaataatcatcgcataaccaaagcaccacagaaaaaacttgaaatatgtaaaatggatttagtacttcttcgataaacagagtcgagtaggattttatttctacttcaattttattttttcctatacaagtctaagctgctcatg

SEQ ID NO: 12052 - DNA, 578 bp, Diabrotica virgifera
ctacagctgtgccacagccgccatattgaataatttttgacatgtcatttgaacatccaatcagaacaaagttataatgcgcatgcgcccggtcgctaggttttaccatataaaaattcaccctctatcgccggtaaagaagtataacttcaataataaacaaaactgttttttttttattttctctaagaccaatagtaatcggctataatttattatatttatgttggctatttttcgtcaaatgctaaatattttagtttcaaagtcaaagaacgggaaaactatgcatttttgagaataactttttcaaactaatttaaatattaaaatatgtatctcaagaaataaaaaaaatctccagctaaaaaaattaagtgatataataaaaaagaaaatttctattttttccagcaagagagtgatggtaaacaaccccctaatcaccaccctaattaaaatttgtcattgacctgatttggttttcttggtattgttagtaggttctagaagtttaatagtttaatcggcttagaatgattagtttttaaaaaattgagtttaaagcgaataacgag

SEQ ID NO: 12053 - DNA, 574 bp, Diabrotica virgifera
  SmartBlast Evalue=7E-16; Info=Ab-hydrolase associated lipase region family protein n=1 Tax=Tetrahymena thermophila SB210 RepID=Q22WB7_TETTH
attaactactgcaggtgtgaaaacttgtactactgaactggaatattattttaatttatttggtcaaactaatggtggcacttgccaaattgatccccgatggaggagccagtcctatggaaattttggggagatggggctgcactgttgaagaaaaaatactaacaactggagacggttatcaagtttcagtcatcagagcatacagtaaaaatttgaatacttcattggcacccattttaatggttcacggtatttatatgaatactagaggctttatgtcttcacaagaaaaaagtcttgcgtatcaatttctggtagcaggcggcggtgataggcaagttttcttcttatccttaagaggtacgatttatagtactggaaatataaatggtcttgatcagagtaactacgcctactggaatttttcatggcacgagatgggcaagtacgatgttgcagctgccctggagtttgtttggaccaccactggacaaaaggcaatagtaattggatattctatgggaacaacggtcacaactgtttaatctctctttagatccagcgacagctc

SEQ ID NO: 12054 - DNA, 576 bp, Diabrotica virgifera
caacagtgtatgtaggcttttccggtaaaacttcttcgggttcctcaagttcttcgacagtaactgttgtttccggttttctaccttcttcctcgacagttacaatttcggtcttttcttgttttccatctttatgctttttaattactctctttttaatgacctttttctttttgtctccttctttagtgactacttcggtcacctgaacttcttctggcaattcttcaacagtgtatgttggcttttctggttcttcaagttcttcgacagtaactgttgtttccggtttcttaccttcttcctcaacggtcacaatttcggtcttttcttgttttccgtcttttgtttcttaattactctcttcttaatgacctttctcttcttgtcaccttctttggttactacttctgtcacttgtacttcttctggcaattcttcaacagtgtatgaaggcttttccggtaaaacttcttcggcttcctcaagttcttcgacagtaactgtggtttccggttttttaccttcttcctcaacggtacaatttcggtcttttcttgttttccatctttgtgc

SEQ ID NO: 12055 - DNA, 576 bp, Diabrotica virgifera
ttattatttgcagataatgtatttatttatagaggaataaaatgacttaaaaggccctttcgaaaatttgtagaagaacgacttaatatttttgtacaaaacgagtattaaggatgataatgttactgtgaatgtttatatatacaaaaaaggtagatctcggtgttttaaagtagatttagtttacacacttttgatatcatcaatttcttaaggggcttttgatggaaggaaagtgcacaaaattttattttaaccctttcattgcgcatggcacggatccgtgtcatcactgtgcatgacacggagccgtgtcatcactgcacgcggcatggatatgtgtcgtcaatgcgcacggcactgatccgtgtcaggatgcgttttcagacaatgcgtgtgacgcggatccgtgacactgttgcacaggcacattgtcattttaattgagagtagatactgagcgctagttcaaggtagagtgcgttgacgagcgtgtagcttacatatcgggactaaagtttgttcgttcggatttttttttttcgtaggtagattaatatggatgatagtaaggca

SEQ ID NO: 12056 - DNA, 583 bp, Diabrotica virgifera
ttcacatgatttatagaaaatacttattttagactaaaatctttcatggctaagtagatattcttataaattaactgtttatatatcattttaatattgttaccagtaactatgtctgatttgagtgtatcattctgtatattactgaaaaacaaaaattcattcaaattcctaaacatcacatttaattatgcaaaagataacataaaaatggtccccggtggggaaaagtagaatccctagtaagtttatcatccgaatgatgtttaagatacacggattatctttgattatatgtaatgaagtattcaagtggtacaagaagaatagaggttttaaagaaggaaaagtaagacaagtcgctaagatagtcaagtgaggcaagcgaccgactcacattcgcttcactgtcgaaatgctttagtggacgaggctaacgtagtagttaaaattttaaaataagaccatctaaaaattgaaaatttaaactttactgtttgaaaaatagcaataatttgcaaaaaaaacaaaaaaatgcagttttttattttttcgaccccttaagaatagcttacagccttca

SEQ ID NO: 12057 - DNA, 583 bp, Diabrotica virgifera
acaaaatttgcttaatcttcagtacgtttcagtcattctcaagatagtttttgacgacatagtatttctttatattcatacaaaactattgatcactagataaaaaaaatgggtctaaaatcgctactttttataatttgtttgggaatctgcattggtttaagtgttgctgagaagctgaactcatcagaccaacaatatttggatgatctctttaaagatatacccgatggagatagaaaacgtgtcctttaccaccatctgtttttgggatacctgaagaagaatccacagctaaatccaactgattacaatttggatgataaggatgcagaaaagctgtacgacatatttataacaaaattcaaaacaaattctctaatgtcggatccaatctgcttctctaatggagaatgtatagatccttctgattccggcttgtatcccagctaaacgtcagatatatttgtatagttagatataggtatagataattcgttagatattagatttaaaaactgtattcatttatatacatattatgttatattagctttaaataaatccatggtgtattgttaaa

SEQ ID NO: 12058 - DNA, 579 bp, Diabrotica virgifera
cctccttcgtattatggtttacaattggtagagtcaacggtatactagatctatcaacggcatcttatgtgcgtgtctggaaaattaacaacttttctaaattttaaatgctgatttctttgcgcctttctcagtttattagatcttttcttccatcttaaatgcattcaaaaatattgctccagtgcaaaagtgaaaattttgcaacggtttgttgccgtagtatatgttgttgcctttcgttgtcaaactagtgctatataaatatcgcatgataacaaaaaaatgaaacgattttatctcattaagtctacacatgcgtaaaaagggtattaggcattgctaagctattgtcgtaatatgtgtatattataagacgaggaactaatattggtttccaatattaccaaataaatacaataatataccatgaagtacaaaaccaagtttaataactatttttctacatttcgcaagtgcaacagttctcttaaaatgttacttgacaaaacaaatattacataaataattttcatgatgcaaataattcgctataataaattgattgaatacgacaaa

SEQ ID NO: 12059 - DNA, 585 bp, Diabrotica virgifera
  SmartBlast Evalue=1E-112; Info=Pre-mRNA-processing-splicing factor 8 n=1 Tax=Culex quinquefasciatus RepID=B0XAY2_CULQU
ttagctttccaacatctccaggcttctgataaatgttgaagtatagttcttgccttgttctgctttataccttcaggcatcatgtcgacaatatcgtgcataaccgaagctctaagttcaagatcaaagtgagactcaaccctttgttttgtgacagtttttgcaactcctttcgagtgtcttccttcgaattgacgtgacagaaggtttcccaaccatctttccaaaagaggtgtaatgcctctcataaagaacaaccagactctccatccaggcgcccaaaaaccgcaacccggtcctttgcccaccggtccagtgttaaatctgtaatagatgagatgcttcaagtccttgcacatcctaatttgtctcataagtttgtatttgtatctgtacattccagtcaactgtccaacgtgggcaaatatatactgcaaaccatctgccaattgaaaagcatcaacattgttcaaacgatattgaacgtgggagtcaataatcagttttgttaatcttaatatctctctgcacaaatggaaagcatttccaaaacgagacttctttctttccttcgttgtcaaggtc

SEQ ID NO: 12060 - DNA, 578 bp, Diabrotica virgifera
cttccattgcgaatgattaatatttatttatgaagtaatgattttagcaatttgtttgttcagttttaatcgaatagatacctgctgtagaagctgtgtcgccagaaaataaatacaggcaataggttgttaacattttattaataaattcaaatgttcaaggttttgattgactgattaaattttgtaaacaccaaatgtattatttatatttaattctgggtttatacatttgaacaggaatttacccctttttctgtataaaattagatttttttctcccatgagtcaaatatcggatgattttcttacattagcacattcctgggcggcataatgacgtttgcttaacatttaatttttcaatcattaagatgatcttaaatgatcattatttttgtcttcttacaatttagttttaggccgtatttgttacatgtttctacaaaattattcatcatcctttggagcccctgcgcactatctgccagcacgttttcttaggctattgttttctttgtcttcatttcaccactaggttcctcagttcttcgtcttgtttttgttttctatgcatc

SEQ ID NO: 12061 - DNA, 581 bp, Diabrotica virgifera
atgagctagcataaacgcacttttgccatttcctcttcttaatactaaaaaaatattgacaaaaatctaacttttagctattcttgttgtcgaaataacagctattctttttagatattcttgttgttgttcgccttcgtgaacaaggaactggttgaaccacaaaacatcacagcgctatccatattcatctgtgtattcatctttgtgtaaagcaaactaacacacttataaccaaactttttaatttacgactacaactgaaccagaatacgaatagacgtgaacatactgtgcgtactagcaggtgcagtgcagtgtaaccagtggacaccattcactatagtacgacccggcgtaacatttcaaaaatagtaaggaacttgttttgatcacaattactattagatggcgaagtttaatactacagctaatatttgaattatttatagatatcttaacccttaaccagagacgtgtcgtctgagagactgtagtatgaacatattctaaagattattgtgaaccactccactcatcggcttcacgcttcgtatattcctaatactattggttagtta

SEQ ID NO: 12062 - DNA, 569 bp, Diabrotica virgifera
gaaaattatcattttcaagatttagtatcggttaaaaattattattatgaaagtcagaaagtgaccaaatcaaagtttaaatccgttcctacaagatccttaagaagttgtcataattttattactaagctattattttcaattaccaacaatgagcgccaagagcgcattgagacggccgtcaatgtgaatgcgagtgagatcaccattgaaaggccagaatggtgcatctctttcgcactcaccattgacgtccgcccaacacgcgcctagcactcattggcaataattaaaaataatcgcttagtgagacgataatcatacaaatagcgtcaagatcttgtaggggggactttaaaccttgatttgcttcctgactttcacaataatttttagcttggttatcaagccttgaaaattgactattttcgcgtttttcaaattttaactcgcacaaaactcgacaacaaccaattttagagaaaaatcacgagaaatccctcttgcttagactgactgactcaaatgatataaaaaaattcgaactaaaaaaattatctttgtgaatt

SEQ ID NO: 12063 - DNA, 581 bp, Diabrotica virgifera
  SmartBlast Evalue=9E-52; Info="Mitochondrial ribosomal protein, L23 n=2 Tax=Culicini RepID=B0WZV6_CULQU"
aataaatttaacaggatttaagaaaaaattttaatatagtgttattaatgaattaaaaacataataaataacaaaaatgtctactagatggtatcccatatatcaaaaaggagggccccaattgagggtgttccttccaaacttctggatgaaattggttcggcctcctcatgcgcaacctgccaacatcgttaccttttcttgttctatggaaatgactaaacacgatataaaaaattatttagaaaaaatatatgaggttaagtgtgctgatgtacatactaggatacacatgccgaaaaccagaagagagaagacacacggatatgttgtaaaagatgacgatataaaatacgcatatgtgtcattgcccaaaggacaggagttcaagtttccagatttgtttgaaggtggtgctgataaagaaatggaagatcataagaaagctctaaagcaagccaaggaggggtatcaagattttgtagataaaaacaaagagaagaacatgcctgggtggtttactttataagtagttagtgtcgttgtatgttgtgattataattgatatagtttttcttaac

SEQ ID NO: 12064 - DNA, 583 bp, Diabrotica virgifera
gggtacaaatgtaaataaattaaaacaagtattgtatgtactgtgttataatttaaaacgcttaattatgttagtcctaaaaagattaagcccaaaagagatatacttgtttacagtgcaaattaatggcaatagggatttacgatttcatttgcaggaaaaacatgggcaacctacccagttggtaaaatttcaattcaaaaactctttagattttactgtgtggatggcacaggaagagaaacaaaataatattcagtactgcagtcacaggagtacaaaaacatgaagcatcttattatgtatgtatgccattctcaaacaataattattgtacaaaacaagataaagatagagacacagctttaaaatcccgaggatcctgcgaaaagaaaagtgaaaatgtctcaattaatgtagtatagatagacatttttctttattttagtattaaataattatttagaatattaatatgtattagttttaatagtattaatatgtattagttttaatagtattaatatgtattgtatgaataattcccatcatgtatctgctaactaaagcaacaaaataaatc

SEQ ID NO: 12065 - DNA, 583 bp, Diabrotica virgifera
  SmartBlast Evalue=5E-45; Info=Phosphatidylinositol-4-phosphate 5-kinase type-1 alpha n=1 Tax=Camponotus floridanus RepID= E2A2X3_9HYME
gtggagtgtaaacggattttacactgtttaatgttctcttcgtgaaataattagtccgttctaaatgttgtattagtgaagtgttttaatgaaatcagctttcgatttctaaattggattagtcccagctagcaaaatggcttctggagacacaatcgaaactattcaaactatggatacttttcaaatgacaaatatgaatagctccaaggatattccaggatttcgtgaatcatcagatacggaagaaattgatgataaagacgataactcggtggcgttcaaaagcgtacaagacattaaccaaaaaactcttccaagtgataataaacctaaaaatgaaagagaaagaaaaatcggacatcggcgggttggcgtgggtggtgagatcacgtacaagaaaattcagtcaacgcagattatgggttcgattcaattgggcattcagcatgctgtgggcggattggcatcgaaacctgaaagagacctcttgatgcaagattttatgacggtggaaacgacaaattttcctagcgaaggatcaaatcacacgccagctcatcattattcggagtttaagttc

SEQ ID NO: 12066 - DNA, 584 bp, Diabrotica virgifera
agggtggagggtggcctggaagtgatataaaaaaatatcctgtagataaaaaaataacatccatagctatcgtaggtgataataaaaatgtaaataaatcaatatcatgtaggccaagtataatcagtggcgtaaccctcactagtcagtctcagaataacacacaaacagaaaatatgataaaagataaagcgtatctagtagtctatgattttacctacagcaaagatttggaagaacaggaaattcagacagtaaaatccccacccgaaaatccatttgtgctggattccaattccatagatgatttagataagaaagaaagttatacagactttataggtaacatagatcccgtggtgttttccttttataaaaccttgatacccagtgaatctgatgaactgtacataagtccttcagtatcgatgactaagaagagtcacacaggacctaaggtgttagtatttgatagtttcaatgcagcgaacgtttaattttaattctatatcgaacgactcaaaccttatgaccaatggtcctttggaagttagcaatgtggagagtgaacctagtatatcaga

SEQ ID NO: 12067 - DNA, 579 bp, Diabrotica virgifera
cgccagatgtagtaatttattgccttttctagccatattgtagaaacacaaacatattagcgtttgtggttttttttttcagccacagtcagtcgatatataactaagggtcgattcacagtctaccgtggagagacacaacccagcggtcgtaggaataggtcaacaacataccctttcgagatataagcaaaacacgctttttattaccaaaaataaataagtatattattgacagttgtttgcgttttaattaatattattttatataactgtttccgtcaacacacacaccatcggaatacatataatattaattttattgattatgcactacgataatattgttgttaattaatatattttagcaagtaatgaaaaccgattgatatcactaattagaataacgaattatagatattatttgtacagtaaacaaaaacaaagaaaatatatctgacatgtaatgatgcctagcttctcactgtacaaaaaacatggccatgatgaaaagtcgtattccaatgttctggcaatgctctggcgtcagacatcttgaatgacgcaatgaatcttgaa

SEQ ID NO: 12068 - DNA, 580 bp, Diabrotica virgifera
gtagatttttaaaagaatatggatatgcgtccccaataaaacagctttcgtcctatcagctttttaggactacatatatgactctagttaaaagaaaatatctaaattaaattaaattctatctgtgtaattaggttaattttggatttttggtttagtaaataacaatatagaattaagattagttagacaaacgaatagttacgaatttgttacgtcgccttgtatagttaagaactaaacaatttttcgactgtttcaatctagtctattgaattattttaaaagtagaatagtcgttaccggaattagtcgtccagggaagtaagatttttctcaggacttcgaatattccaggtatctgacaacttttttagttattaaaacattgaaattaaaaacattaatggggaaaaatattagttggccaaagctgtgccatacctatatttttaccttaaatatacttacgttttaaatattaaattttggtgtttgtttacatttaaatataattaatctattaatctaagcgccatctacacgataattgtcaatgtatcagaagtggaacagaagg

SEQ ID NO: 12069 - DNA, 581 bp, Diabrotica virgifera
cacttcaacagttcaacagtatgattattttaaattttaaaataattgtgcattgtaacgtctttgcagcttttaagtgtacacttcaacagtatgattattcttacggttgcatttttttctgtctagctttaatgaaagtagcggataaaaatgcttttacctccaaatattggtataaaagtgtataaaattaataattgtaaacagtattattgtattttgaaaacaacttttgaacggaaacaaaataagacaaatgaattgctatagacataatgttttgttatcgtaccaataagataaaaactgataaacatatttgtacgaaaaatcatcaataacgaaaaaaataaatgaaacatattcaatatttgatgaaaaatggatagaaaaacaatacatccgcttttccaataagtattatttttggttactaaatatttcagcttgttctaattggaagcagcttccttatccaacctttggtcaaacatgtacacgccgagaccctctccaaccctcttcagattcgtaatgtggtctcctatttccttgatagcatccacttgctcctgcaa

SEQ ID NO: 12070 - DNA, 582 bp, Diabrotica virgifera
aaataataattgttattaagaagtatcaggtttgtcgttacctgcaactatcgaatgattaatagaaataactgacgtcagtgaaggcactgggaagaatgaatatcaaatagttattgagtgaatcccccaaaagaagaaccagccaaacgagaaagcaagacatatgtcaacgcctgaaaacaaaacgatacacaaaactatactgtcatttttaagaaaaaattcaatacgatcgctataattacattttaaaaacgtttagtcactttagaatggactgcctcaaatactggtatcgaaatgtacctaccgattatataataaattagtaaaaacttattttactaagttgtacgattaaaaatgttaaatattagacagccaagttaaaatatttcgggtgagatgtgtatccaaacattaacaatattaacaacatgctataacaacaatatatgatttgagtcacatttatctttgtatagattataatattttatataattagttatgataaagatctatgagaagtatgtaacgttagaagtgaagtagatgactaattttctaatgactatg

SEQ ID NO: 12071 - DNA, 582 bp, Diabrotica virgifera
  SmartBlast Evalue=8E-11; Info=Reverse transcriptase-like protein n=1 Tax=Glyptapanteles indiensis RepID=B7S927_9HYME
ggctagtctggcagttcttgatatgaagttgttaaatccatagttagtgcgatgtattataggatcatgaaaactagctatagatctggtaggtctaggtggaacaggtatattaattttattgagcaaaaaagaagcagcagctctaccatgcagaatattgtaaaaagtaataagcttcctcatcttatggcggatagaaattggtggcatatttaatatagcaagtaaatcttcatcattgtagttctccaagatgtttaatttgaaagcaacctgttttagaaatttatgttcaacatgacacaaggtctcaatatgcacaccataaaaaggtgaccatacacaagacgcatactcaagatggggacggacaagagagcaataaagaggtttttaaggcagtaagcccagtaaatcctgtgtgcttcttctcataaagccaagcatctaaaatgccttgttgactacattatttaagtgatcggaaagttgtagagttagcatccaaagtgacacctagatccgtgatgaaaggtacattatcaaggcaatgctggccaatctcgtattcaaatttga

SEQ ID NO: 12072 - DNA, 581 bp, Diabrotica virgifera
  SmartBlast Evalue=3E-25; Info=Endonuclease-reverse transcriptase n=1 Tax=Bombyx mori RepID=D7F164_BOMMO
tcatcggattttatttgacaagtaacattgtatattagatatctacttagtttttaactacacttgtttaaagagaacaagtggagtgtacttttaaatcaactttacctttcctcgctagaagggggattgaaaataaatacatctaaaacccagatgatgacaaatcttgcagtcggctaagataaccgtaggatcaagatctatagaccaggtaatggcttataaatacctagctcatgagattcgcataggaaaagataaccaaactgttgagcttctccgtcgtacaagactgacttgggcagccttcggcaagctgaaccatattttcaaatcgtgtgacataccaatatgtcttaaaagaaaaaattttaatcagtgtgttttaccagtgttgtcttacggaggggaaaccttgaccatgacaatgagagcagtgcaaatatccgtgtgtctcaaagggcgatggagcgtgctatcataggcatttcaccatgagacaagattctaaaccgccagctacgacaaagatcagctgtggctgatgcagtagagagaatagcaacactgaaatggaa

SEQ ID NO: 12073 - DNA, 574 bp, Diabrotica virgifera
aagtaatctgcgacgcattattggagagttctcctagcggcgccgcttggtactagtgtacctcggttaacagattacttgaccgtggtcgaaattatttttcactcatttcatcattccccgttagaggacagtctaaccatactccggtgcaaatattttaatatctgcagttccttcttcgtttgttatggttcaattcagtcttcttgtaaaccctctttggcaaggaatatattccgaaacatcagatgtcagaggatggcaaaagactcgaattgaatcaaaacgaaacgattattttctttttgaaatataatgaactgtataaagagattgagttggtctccaaccattgttttcgattatattctatttcggttaataaaaatgatatatttcactgcttaacggtaactgttgatattttcacatgtgaaggccgaagattagatattaaatgtatgaattacattccgacatgtaaaggtgatactagtaatctagtcaccatagctaagacgaagatgacatttataaatgcagttgaaaaattagataaggaagcgaagag

SEQ ID NO: 12074 - DNA, 576 bp, Diabrotica virgifera
attcttgtcccacccccaataacatctgtcagggctagaggtatttaagtgtgtcttttgaccctaatttcagataaagaggcgtaatgtttttattagcttttatttagcatatgttgcaaccgcaaaaagcttgtagatacacttattttgatagtagatatttttaaagggctatgaccctattttaggtattaatgagatgtaaaaagtagcatcttattgcttgtttatatttcacaagtagtttgactcgtgaatataaattttcgatgtttagttagcagataatgcaaatattttttgtttcgagtaaaagaattcgagtaattattgttagttctgtcgatagttgggtgaattaggataatgtcttggcaattttgtgtcggctaataaagggtgaaatttttttgttaaatacaggcacgtactaggcccagatgtatttacagaatcaattttattcttgcggctttcataaaatagtatttcgataaaatgtcgtatctatttaggacctaagtccctattaaattgtaacacttccctacctgtgagctacctgtgatttaa

SEQ ID NO: 12075 - DNA, 582 bp, Diabrotica virgifera
ccagctgaacgatttacgtaggttaaatcgactaatatagtaaacgacaattataatacgttttgtcgacaattataatacgttttgtcgttcatattttaaaagactcacattttaatgactgacgttaaatatacacacttctccatcaattcgataccatgatgttgaaatacgatatcaaaatgtaaaagaggcacaaactgaatgcagacattcagtgacgtcgtatcaggctggttgctgttcatgggtaatcaactttgtatttatacgccccctgtcacgcataataatgataaaataacgaatggcaattattaactgtgtaaaaagattaatagggtgcgtaacgttaagtttttatagatatcgagctaagatagaaacggcagctgttacgagatagtagacaatttatagtaatgttgtaacattccaaaagacatttaatgagagagcagagtaagaaaagataagtatttttaaatttggcctatattattgttgtttgaataacttgtacaattttattgaaaaattgtttaagaattaccttttggtctttttaatctaacacct

SEQ ID NO: 12076 - DNA, 585 bp, Diabrotica virgifera
tccattgtgttggggtgtttaagtcaagtcttgactgaaatttaaatattggcagcttacgcttctcacacttttttacgaaaatgcgaactgcctggttattgctgctggttgtgtgcttggttgtcttcgttgaagacatcagttgtggcacaactattattaatcaaccacgaaaaacagaacttagcgaagtaaaacatccaagtcacttgatccaagaacgatcggcatgggaccaaatgtacgctctggctcgtttaccaggagaaattatgagatacgattttatatcttttgccatggatgtaataattctctcacgtttcctgccacttaattggtttatagcaaaaactcttgaatttgtatacatagctttgaaatatttccaaccaatttactggaaagcttttccgtcaactgctccagcaaataggggataatacatcaagagtcaaagaagactaagggatgaagacgttgttattgagattgctaatattttttaaatattagtcatatctgaatatccagaaattataattaaatctgatttaaactgtaaataaactctgataaacc

SEQ ID NO: 12077 - DNA, 583 bp, Diabrotica virgifera
ccgttttattaataacaatttttttttttatttattttacactttctaatactcatattaatgtgtttaacaatatttcaaaatttcgcatacttcttgaggcgttttccagtcggtgagtcggtagtagatttcgtcgacttttgaaatcaatttattttcgcaaaaatttctcactttcatatcgtagaaacgttgacataaatcctctgagtctttttcaacttcctccaatggacgttgattgagtacgtagttcttgaccatggacgaaaaacctacacaggcattacagtggtcactagtttggggcgcactaacggttaaacctacgacgcaaaccaaaacagccaaaactaaggtagccttcatttttgagaattttgctttagaataatatgccctgatagttcagctgtatataatataagatagtacaatacaatatagtacaagagtacttacaacttaggaacacttgatttaaaaatgttgcattagtgatagtcccccctatctcctcacactcatatttaaaaatattacttatgtgataacattgaacaacttattgtaatacaat

SEQ ID NO: 12078 - DNA, 578 bp, Diabrotica virgifera
ttggcgtcattttgtggacactcttttgtaacatctcaaacatgatctcattaattccaggatttaatttaatcttattcaataaatttgtcaacgttcttttagatggcaaagaaaaaatttttgacagcagtttgtacccttttccacttcctttaaatagtgttagagccaggaccttctcatctatggtaaattttcttcccttcagtttttgttgttgggtacgaatttgagacaaaataaatgtatatgttaatggattaacctgctcagccaattttctaaatggtactgtttctgataaacgtttagcagcctgtaatttttcttggtaacttgataatctatatgccaacttatgaattctattacttgatgcaacaatttttgtatacattttccttttctttggtgttaagtactgcttccttgaaatttgtatactttttaaaatgcctctccttgccttcctgccttgctgtttgccaccagcatttctgtcttgctccatattgtcagataagtcttgctgggaagtagaaggcctggcatttctgtcttgctccatattatca

SEQ ID NO: 12079 - DNA, 576 bp, Diabrotica virgifera
agtaacaaccaaacaaactgattcgtcaacttccccaacagagactgaagaaaccactacacattctaccacttcaagtcctgaaactttcaccaaaactatgaaaagttcaactccaacagtggaaataacaactatcacagtgacaacacaacaaaatgacattaaaacttcaccagaaaaggaagaaacttcgtcagtttctgatactccaagtactgaaacgtcttcggatacttcggaaatacaaacttctttgacagtgataacaactaccacaaccacacaggaacctgatcttaaaacgacgtcagaaaaagtacattctacatattctaatactgtaagtagcgaaattgctactgaaaagtccgaaacgcaaacttcgtcgataactcctacagcaacacagcaacctagtcttacaacatcagaaaaagaagataactctacagattctaatactgaaacgactactcaaaatttggaaacaaacagtgcttcaacgaaaataacagagcaaacttcttctaaagatttggaaacagattcgtcaacagtcggcagtacagatag

SEQ ID NO: 12080 - DNA, 582 bp, Diabrotica virgifera
  SmartBlast Evalue=0.000000001; Info="Galactose-specific C-type lectin, putative n=1 Tax=Aedes aegypti RepID=Q16Q05_AEDAE"
tgactactaaagtttcagtaattttgctcttgtgcttagctatattgaagcaaaatgccgctgaaggaaggaaggctaaaactgatgatctgatattttttgctaatagtgagtaccatattgatgatacttctctgcgtacttgggaggacgcaaggaaactgtgtcaatctcttgacatggatctcgtcagtattgaaacaccggaagaaaataactttcttttcgaatcgctaaagaaacgctatggtgatggagctgaatattcgttttggactgcaggagtcaaagaggggaatggatggacatggacaaatacagggcatccaatcaagtacttcaactgggcacccggtcaaccagaagatgctggagcccgtatagaaatgatatataattattcagctggacttcgctggtacgggaagcctaaagattatggtactgaaggcctacatgcagtttgtgaactagattgtgattttcattgttaaacgggttgctgaaaacgtcggtgtagcttgtaatgttaataactatatcccttcattgtaacacttagataataaattagatatctgc

SEQ ID NO: 12081 - DNA, 577 bp, Diabrotica virgifera
  SmartBlast Evalue=4E-28; Info="Dehydrogenase, putative (Fragment) n=1 Tax=Ixodes scapularis RepID=B7PYL2_IXOSC"
ttgtgttgtgcctgtttgtcttcagtaaattgacatgtggaagatgctatagcaaaacatgcttagtaggaaaaactgctattattactggcggaaactcaggtgtcggctatgaaacagctctagcccttgcgtcacgtggttgcagagtgataatcgctgataaagacgattcttcagtatcaaggcagaaaatagtcgatgaaaccacgaacaaaaacgtcacatcaacaatattagatcaaggatctctagcctcagtaaggaaattcgctgagaatgtggtacgaacagaaccaaggctggatatattgataatgaatgcaggaataggttctaataaattgatccatacgaatgatggcatacagattacaatgcaagttaactatttgggacattttcttcttacatttctactgttagatctcatgaaaaaatcttcgcccagccgcataatattcacttcttcaactggagcgtacttcaccaaattttctctcgaagacctcaatccaacaaaagattatccaaggcaacatcgcatatacttgaattcaaaactgtgcttgatact

SEQ ID NO: 12082 - DNA, 582 bp, Diabrotica virgifera
attgtgttgggcgcacttatttgggaattttaaattgataaaaaagtaaggcagatatatacacactagactcgtgagtcagtaccaaataaataccctctgagctatagaaatcgaacattgagacgatgattaatatagtttatcattcgataaggacttccttttttccagtaactctcgtattccttctcctcaattggtttttcaacgcaccaacagcccaagatccatattgttcggccataatttattatttgttaaatcgtaatcaaaaacaccatatacaaacttcacgaattgtcaaaacgttgacctccaactacactagcgccgctaagcgggatcaaatgcgtacatagctgccattaggtacccttgggtagacttttcagtgcatctgatgcaaatctgatgatcagttgagtgaggttcatggtacccaatgtataattattattagtacattaagggccggttgttcgaacgctaataaaaaataatcattatcaaatatttaattactgtcacaactgtcaatgtctgttatgtagatgaaatgtagaataaaagaatgtgttg

SEQ ID NO: 12083 - DNA, 582 bp, Diabrotica virgifera
gagcaaatatgtttgtacatcttgtacaaacaaacatgtctttttttgtaaagttgaaggtaaattgaaggctgtattagattagagctaagacattaaaaaatcctgtaaacaattttcaatactagaaaggaataatttggtgttgcttagttgtaaatttaacaagtatatattatcttaaataatatttatttaaataatttaagaattcatcttctgctttgtagttattatataacttgtgtatctgttaccacaacttttatattatatttggaacagtacgtatgtctctttgactttgttctataaaatgttggcctatttgaacctcggctttgcacgttagttcctttattcgtactcgacattgagaattggtttttagttctctaatatttgaatatatgattttaatcaaatacaataaaattcaacttattatttcgtagactaacatgttaagaatgttgaggaaaatgttggaaataacgaatatagccgtaggtacacaaattcaaattgtaaagtgattcagataagaatgtgtcaaaataataatttttattattatatttt

SEQ ID NO: 12084 - DNA, 581 bp, Diabrotica virgifera
  SmartBlast Evalue=0.000000003; Info=Endonuclease-reverse transcriptase n=1 Tax=Bombyx mori RepID=D5LB38_BOMMO
ccctgctgatggtaacgggaggatgattagaaatcaaatagattacattctggttaaccacagatttagaaattctatactatcaacaaagacctacccaggtgcggacatttactctgaccacaatccggttgtatctgtgttaaacataaaattaaagaaactaaaaaagaaaaaacgactcggatagatttcaatagactaaaagatacaagaacaagagaagacataaaagaaaaattaataaaaacttgaagaaattaatagcgtgaactccgaagaagttgaaaataattggaaacagataaaggcagcactaacaacagctgttaaagagacgttgactcctaaacgaactgagagaactaaaagaaaggcatggatgacagaagaaattcttaatttaatggatgagagacgtgcctataagaacaaaaacaaacaacaatatgatgcaataaatcgaaccataaagagaatgatcaaagaggaaaaagaaaagtggctgtcagaacaatgcaaggatattgaggaatgtgagagaaagtacgatagtttcggcatgcataagaagatcagag

SEQ ID NO: 12085 - DNA, 581 bp, Diabrotica virgifera
  SmartBlast Evalue=2E-15; Info="Synembryn-A, putative n=1 Tax= Pediculus humanus corporis RepID=E0VBF7_PEDHC"
agaaagttgtattgttaataatagtgcatactggaattattaaaatggctaacaacatttcggacattgatgctatcatattagctgaaaaagatacttgggctacagtaattgatagctttgtaaaaaagtcactacaagtattcagttttcctgagttggccaatgacgaaaaaaggaaaaatgtatggactgttgtatacaatattgccaaagattctgatgatccaattgttacaaaaaattgttttatagcagtgagaatcttaagccgtgaaaaggaacatctgagtgaagttattagtgatgattggatcaatttaatcaaacaccattccggattggacaatgaacactttgaatacaatgataacaaatctttaatttgtgtagaggtgttgaagagtctgtcaaatatattgtttaattctaagaaaattgctgagaagtctttagaaaatggaatattggagggattgaccaagagaataaaacataagaacaaaaaaatatcagacgatatcagatttatggatatacggctggtatttttaattacggccttgtgcccagaagctaga

SEQ ID NO: 12086 - DNA, 579 bp, Diabrotica virgifera
  SmartBlast Evalue=3E-16; Info=Pol-like protein n=1 Tax= Biomphalaria glabrata RepID=A3FMR3_BIOGL
ttgtcactatacacatcaaaaatccaaccaatattttcagaacgtccacatattctgttttctaaacaaatcaagacatttcagatcgacaaacacgaccactttctcgaaacggttaatcaacgatggcccgactacaaccagatttacaccgatggatcaaaacaaattcgtacaggcgccactttttacgatcacaccacaaaatatcacgaagagatcagattaccagatgaggcaacgatatatacagcagaaatgtttgcaataagtgaagctctaaagtatatacttaggactgatagatcgaaaagtattatatttacagatagcaaaagtgtcgtggagagactaaagaatataggtgcgtcgaagaacttaaatcatctagaagtagaaatattacagaccaattacgaaatacgtagctcacaacgaaaggtgataatagtttggataaaaggacattcgggtattcaaggaaatgaaattgccgataagtttgcaaaggctgcgtcagacttagacagagagtgtattaatcagcgtattccttataccgatttgaattccatactt

SEQ ID NO: 12087 - DNA, 581 bp, Diabrotica virgifera
tttcgatttgactttttgacatttgcataaagtgtaaattgaaaattgaccggaattatcaaataataattctaaactattataaatgtaaatattaaaagtagaatcatttattgtcagtgtttaaatatattttatttagttgatgaagaatttaagtagatagcagaaagctgtttataagaatttttcaacattaaaattgtggacaaatcctcatatctggtgaacgaaatcggaacaaaagtgatgagctcaacatctaaatgtatagttaagatcaccaatgatggactagaggaaatcttggatgaatcggtgagcttaaacttagatctaattgaggagtcaacaaatccagtgcctgatgaggtcttgccagtagtcttgaatctcgcagaactacctgatgaagacagcctcgacaataatcttgtaaataaggtatcgatatctgatgtgccctctgaggaattaaataagccagctagcaataaggataaacgaacagaggcggcagataaaggtagacctgtagtccttaataaggtttcccagcagccgaacaagaagaacggggc

SEQ ID NO: 12088 - DNA, 578 bp, Diabrotica virgifera
  SmartBlast Evalue=1E-12; Info=Pol-like protein n=1 Tax= Biomphalaria glabrata RepID=A3FMR3_BIOGL
atcagacttaatataccaagaagtctcaattccaactacaatcaactttgagcatacttgtatctcggtaaattttccatatatacataaaaaaatttactttgtttcagtataccttaaaccgagaactagaatatcattacaacagtggattaactttttggaacaaattccaaaaccattcataattgggggcgactttaacgcacatagtttggcatggaacgatggatatgacgatatctatggcaagattcttttggaagctatcgaacaatgcaacctagtaattataaacgacggatcacctacattagcaaacaataagaagtcagctgtagacttgaccctctgtacacaggatctgacacaactaattacgtggtgtactttagaagaaccttatggctctaatcacttaccaatacacatacaatttggaaggaatatcccacctgcgcaaattaaacagacaaaacataatatatggagactcaagtctgctaattgggatgtatacaccgctacccttgaagcaaccgaaccaaaatcatcactaatgggcattatcgacaata

SEQ ID NO: 12089 - DNA, 569 bp, Diabrotica virgifera
gtaaattccacggcttcgcgcaatcgtacttacgactgcgtaggtgtttggttgttgattctgtttgaatattgcgtactgatattctgtggtgtgaattattaaaaattttaagtgtggtttttgacagttgtgggaaattatttatttagttttgtgtttataatttaaactcttgttttatttttcaaagtttttttgctgtacttaagtagaaaatgaataataatattttgtattatacttaaataaaaaatacagtattttctgaaatgctattttccaaatagcttataaaatggcttagtcaaaattataaaggctcagtaaataataacaaacaattacttgtattaataacaaaatattttgtaatgatgttacctattttaaaaaaatctccatgaaaagaaaaatagaattaatttcatcattttcgtgtctcatgtggtgtagctacttttgctactacccaacgcttagctactctacatccaatttgtattattttattaaaaaaaaatcaataagcatttactctgcaaatagtatatattttgctttgcatt

SEQ ID NO: 12090 - DNA, 576 bp, Diabrotica virgifera
tagtaatgtatcgaatgtgttttcgatagctgttggtgatggtgtgcacaaaggcaggatttctaaattaatgtttccagcaaggcttgtgaatttgtgtaaaggttcgggcatacattgaagtgtttagttatcatagaaaatgtatatcttgttttttctgctgtttctgccttctttttttttaagtaattagtgttaatcggttttattctcagttttatatataataatccaaaagttcaagaaagaatccaggtttttaaatatagcaaaagagagtaagtcaattaataatagtcaagggtacctttgattcgcgctgttaagtcacaatgacgacctctcgtggatttcgtccgaactagctatttagctagtaggtttttagttgaggtttttaatgtcaaattctgagcgcgtgcatttgaaacaatattcattgtttatttttacatgttttaaattaattgttgaataatataaaattattaacatggaatcttcacgtttcaataaaagttaacgtcgatgttgtataaaaatttgtaaaagaaatctgccgattgagtacaa

SEQ ID NO: 12091 - DNA, 579 bp, Diabrotica virgifera
gaaatgtcttatgtcacttagtatgttactagtttttgtgcaattctgtagcgccgtttcaaaatggtgacaattgtaaaaattatattaaattggccctctctttaagggataacttatttctacgaatatattgcataacacatcaactttcaagtgtgttatcaaccatatattgcaatttaggaaaaatgttggtgacggcatacttttttttctcatttttcatatgtgtttttactgacgtcagtaaatatacacatcaattctattagtatgaggaaaactgtaaaaataatcgacctgcttttgccattttgaaacggtgcaacagaatcgttaaataaaaatcgaggaacactctgcgaatgacaaaagagctttcaaatatgattccgtttaaaattttcttagaaaatagccccaattcgccatttttaatgacttcactgcaaaacttaaaacaattaagttgtacctatggtccagaaaatattgggaaatgtgggcattaaacgctcattttatatagttataatagtagaatgacaaaagtattccatcgcatttataaattct

SEQ ID NO: 12092 - DNA, 578 bp, Diabrotica virgifera
  SmartBlast Evalue=3E-47; Info=Protein FAM38A n=1 Tax=Camponotus floridanus RepID=E2AY04_9HYME
tcaagtctaacctttagaggttttgtggaattaatttcagcaagcatacgttgtctatctggcggtgatatactccagatattagcagaatcagtattcaatttaatcgcagcaatatcaacagcctcatatttaaatataaagttctcggatacttgataggcgttgtaaatttttttcaattctactaactggttttcgttaaattggaagattgaattagcttgcaccgtcatcttgtaaattggttcgtatggtccaatacgaacttctaaagcaacatcagacggtatattggggtctcccacagcatcacccaaggagaaaaacacgagtgggaaccaaattatgcctataattactgctaataaagctccacccataaaatatttgactgttcggctcttttcctgggctctaggttgagggaattcatcttcaacgtttctggaacattttaataaaaatatatgttggaaaatatcctccaatttaatccaatcgaaaattgccatggaagtttctgtccacatccaatccatgcaagtccttaattcaaacaaaaatggtactaacat

SEQ ID NO: 12093 - DNA, 577 bp, Diabrotica virgifera
  SmartBlast Evalue=1E-13; Info=AP-like endonuclease/reverse transcriptase n=8 Tax=Adineta vaga RepID=D2K2T4_ADIVA
ggcaactaagggactacctcaaggttctcccttaagtaccattttgtttaatatttatatagcagaattgttttgtattagcaataatgaagttaaaatatgtggatatgcagacgacttggttttgtatattaagggatatgatatccaaagcatggtaagtaaaataaacaaagaattggaaaacacattacactggcttgcagaacatgacttgtccttatccaaagacaaatgtgaagctgtatggttcacaaagggtaagcgaagagataatccaatagaaatcaaaatcaacaacacagccattcctctaaaaaatgaagtgaaatttctaggcataatttttcataagcatctatcatgggacttacatgttgacaatattatactcaaggcaaagaaaaatattaacatcctacgtgcaatatgtagagtctggtggggagctgacccacgaacactcctaatggtttttaatgccttgatcagatctcacctcgattatggttccttctattcaacccaatatcacaaaaatgcaacaacaaactcaatgcagtattttttgagggac

SEQ ID NO: 12094 - DNA, 579 bp, Diabrotica virgifera
caatgaaacagactgacataagaaacatgttttttaagtcacaaagtagccagtgacttcattgtgccatcaactcaagtaatcgcagagtctatccaaactaccaatacagaagacaaaaaatttcggagagccagaactgttcagggaactctctgactttttatcaatccaacaggataactccagaaaatgtacgctctgtcccagccagttaaactgcggggacaataaatataagacacccagcaagtcttcttttgcatggatagaactggatccttcagtgttcacaaatatcactgcagaagacctaaaagcttttgaaaaaagcttacatcctgttgccgatgccagttttcagtttgatgagagcatacattttaaaataccagagacacctgtaacacaaacgacgcaaaaagaaactaaagtcatggagctggaagatttaatagatacaagcattttggcagacttttccgatacagcagcaactacagcaaccaatactacagcaacttttatgccacctaagtcactaaataacttattaaataaatacagcacttccttaat

SEQ ID NO: 12095 - DNA, 581 bp, Diabrotica virgifera
  SmartBlast Evalue=7E-26; Info=Gap-Pol polyprotein n=1 Tax= Schistosoma japonicum RepID=C7C1Y9_SCHJA
ggtttcttaaaaagactgactaatggtttgtgatctgtttcaacttgtacttttctaccatatatatattgtttaaatctagtacatccgaactggattgcatacaactctttctctatttgtgcgtaatttgactgagactgtgacaaagatttagatgcatatgctataggttttttgtttgtaaaattactgcaccaactgcaaactttgaactatcaactgataatgttaaaggtagattgttatcaaaatatgctagtacaggcgtttgactaatagtttctttaagcgactcaaattctcttccatgctcttctgtccaatgaaaactaatatttttttcaataacaaccttaaattctttgtacgctctgctaaattatctatgtactcacctaaataattaatcattcccaaaaatcttctaatatcagctacacagttaggaatagccatttgacaaattgcactcaccttactagaatctggatatatgccttctgcattaaaaatgtgacccaaatatttaatatctgacaatagaatttacatttatccatattgaatcttaaattgaa

SEQ ID NO: 12096 - DNA, 580 bp, Diabrotica virgifera
ggtatacatttttattttttaaatatatagttcatagcaactatctaaagatttacaaaactgagtgtccgaacgaatgccaaacgtaatgaataattatatcgcggacttcaaatattataatgatatgacgtcacgaccaatgagggcgcgttttgggctggctgctataatttgaattttcttttgattttaatcttctttaggggccaaacgaaagaaaaaaaaacttttttgatatatattttaaattatgttgtgatttatagcattttttcgaatttattattttatgcaagttctctgttattatgattaaaaatattttaaatttgacgtttcgattttcaactcgagatctagttttttacagattctgttgtgtaatattttcaaaaaggtttttaatacatgcgtcattaggacaacagaataattcgataatatctactttattggattctaaaccataacatttatagtatataatttatattgctctctagtttattgggatcgggatctatcatacatcatactgtataaacaatacacagtataaggagaagtgtcagttaca

SEQ ID NO: 12097 - DNA, 580 bp, Diabrotica virgifera
  SmartBlast Evalue=8E-26; Info="Nuclear lim interactor- interacting factor, putative n=1 Tax=Pediculus humanus corporis RepID=E0VJR2_PEDHC"
tttaagacatacacttgatgtaatgtgccatctatttctactggtacgacgaagtctgcattgctgataggtttaaagctgctatgtaccaatgtttcatccagatctataaccatacacttcttgtgtatatcctcttgtcgtggcggactgagaagataactgcatctgctatggtcaacgcactgggtcccgtcaagacattgatccgaaatgggggtttttgatttcttcgggcgcaggcaacatagtagtgaacggaagaagctcttggtagagcttttcttcgaggtggtgatagttgtgggctgaagttgtgtgagttggtcaatggtgccatcttgtgttgagatagaacctttttcagtagcataattattcagatgttcctcgtctcttgacacctgggtgatgatggaggatgcttccatttaaacatttgcttgtcaccaccagttttcttatttaccagcacattcaccacattttctcaattatttccgcactaactagatgtgcaataacggctcttttactattttttcttatacttcgcacaactaaactcaacaacaatcaa

SEQ ID NO: 12098 - DNA, 582 bp, Diabrotica virgifera
  SmartBlast Evalue=2E-26; Info="Cutile protein, putative n=1 Tax= Pediculus humanus corporis RepID=E0VWY9_PEDHC"
aaaataaaggaacaaacatggtttttaaggaagtctgtgtcatcgtcttctcgattgcaatctgtacagctaccaacccactaaattatgcatcctaccaacaacatccgagctccgcagtgataacgcaagtagtacagcccgcagctttagttcaacgtacagcagcagtagtccaaccagcgctagtacaaccggccatagtccaacccgcagtagcttcagtaaacgttccagtagttcaaacacgagtagaaccctatgatgccaatccacaatacagttatgcctattccgtaaatgatcaaaacacaggagactccaagagccaacacgaaacaagaagcggtgacgtagtacggggccagtacagcctaacggatccggatggcagccgtagaaccgtcgactatgctgccgatcctcacaacggattcaacgctatagtccaaagaactatcgctctccgaccacactaaatttgcagtcagtaccactttcttacgagtctaaaaatgatttggtctttctagctttctgtgtttgtaatatcgatgaataaaaaataaagttattgtttac

SEQ ID NO: 12099 - DNA, 573 bp, Diabrotica virgifera
ttcgtttgtcaaaatgttagtatatgaagattctatgtaaacggcaggaacatcgttattactttcgttttcctccaaagctatatcgagatcgtctttcaaagaaattcctctaaaaataagaacaataaaaaagaatagtgacaacagcatatccagcaaaccgcctagcggttccatttgggaacacccatatttttggcctaattacgaaaaaaccaaaagatgaaatattacgaaaatacgtacaagttgtttattaaagtttttagaaaataacaaaatgtcgaaacccaaaagactccattttcaaacaaataaatgtttaaaaataataaaatctttggatttcttagttcggaaacagattctctcttatacctattcccatccttctaaaaattgcaaggaaaagggtgatgaatgtagagacatggggagtctacatagttgcactccacaacatatcaattcaccgaggtaaagatcaacaaatctgcttcctagtactcgatacgtgagtaaaaccgtgggtagataaaaggcattgtgtttgtatttcgattcggagat

SEQ ID NO: 12100 - DNA, 575 bp, Diabrotica virgifera
tggaaaacatattcagttgtgagatagtacgagacaaatcgtatagcgtcgaaagacattctttaatttcccatgttataaaaaaagttcaactatttttaattgaaggtgtttcattggcaacatcgcacttacgccagtcaccaatagttctcttgtcaactttgcagtggcgtaccaaaataatattttaattacttattatttatataaacaggtaagtaataacgtaaaagttaaatctaagatctatgtaattattaaattatcatgtgtgttttgacagatattttcaaattttctaacaaaataaagtaaatattcttctgaatttatttctttgtggcatcttatgcaattacgtacagtatgatgcatgtttggaatacataaattcgttatttcgcaagccaccgactttaagaaaaagtcctaaaacaggtcgacttttacttttaaactatgatttctgagacatacatcgtactagcgacgtcatccatttgggcgtgatgacacgatcgatcattttttttaaatgacaataggggtcgtgtgatagttactttaaaggt

SEQ ID NO: 12101 - DNA, 578 bp, Diabrotica virgifera
  SmartBlast Evalue=2E-33; Info=Reverse transcriptase n=1 Tax= Anopheles gambiae RepID=Q868T0_ANOGA
ttcagataggtagtcctttattatgttggacacatactctggagccccaaattcgactattcggtctactatgtgaccccagtttgctgaattaaaagcattttttatgtccaacagaacaaggaccacccatctttttttacttgctttagccgcgtcccttatccaggtcgcggcatcgactgtcgatttaccttttcgaaatccatattgttgatttgatagcactctttgatcttccaacacgccctccagcctcttcttgataagcccttcgtagaacttaccaaggcagtccagaaggcatattggccgataagaggctgctgaatcggggggtttcccaggctttaggagtagaactaagttcgcttcctttaagtccctgggaaactcttgcttctgcagtaggtcgttgtatattcttctgatcaaacctggtttctctgttgctattatcttgattgcctctggaggcagcccgtcggggccgggagctttccccgtcttcatctcctgaccagcggttttaatttcatcttccgtgaactcctctaccattgttggaaaaatcttaa

SEQ ID NO: 12102 - DNA, 579 bp, Diabrotica virgifera
  SmartBlast Evalue=1E-23; Info=CG4884 n=5 Tax=melanogaster subgroup RepID=Q9VAX9_DROME
ggcatctcttccttcatagttttcaacagtcaatgatttatggcgtctgagtttaatttttattatatcttcttccgctttaatacctaggagtagtaatcttgaaatagtcaaaaaatcggaatttgtctgctttccctttataacatctagttcatcattttctcggacagatacactctttttaggaatttttgtaccatttactcttattctaccttcataaaatatagtttctaatttatttcttgaaataccaagtccaacttttagtattgaatcagctcttaaggatgcaacccttacttctatagttttggcacttttatcattaacatcgaatatatcatcgtcttttgtctctgattctgtttccgattcagaaactttgttaataagtttgcctttgcttctactgctttacttttatacctgttagtagcaaattttggatgtgctgtaggtaccaaaaaaacacttctttgaaaatgataagccttcaacgaattttcaacgatactgtgaacaactgctttcttgaataaattattaaataagcacgacatctttgactacaca

SEQ ID NO: 12103 - DNA, 581 bp, Diabrotica virgifera
  SmartBlast Evalue=1E-22; Info=cAMP-responsive element-binding protein-like 2 n=10 Tax=Eutheria RepID=CRBL2_HUMAN
gtttgtaaataacatagacacgttgagctgtttttgtgttgattgagtgctttatttgcaagtttcagaagttgtctttagaagctaattaccacaatgaattttgaagaaatggcagtcattgaagaacacagtgtttgcgaagggcctgcccgtaaggaatcagggaagcggggacgaaagccaggcaggaaatcggctgaaaaagtggacatgaaagccaaattggaacgtagtagacaaagtgctagagaatgccgagctcgtaagaagttgcgctatcaatatttagaggaacttgtagccgatagagagaaggcagttatcgcactaagaaaagaatatgagcagtacattttttgggcaaaggaaattgatgccggcagaattccagaaggtattcacgaagcacttgaggaactcagcttaaatcaagaacaaaagtgaagtgaatatcggattgtgataattgggaaactttttagtttggaaagcgttttctttattggaaagccatgtataagttttgtatttattgtttttattggattacgtgaaaaatatattttacttgtattttt

SEQ ID NO: 12104 - DNA, 579 bp, Diabrotica virgifera
ggtataaagtgagctttaattaatattattacaacactgatctaaaaagtgcaaaaattaaaaatatcagataacctcttaatttggataataaaagcaagcaggaagagtccagattggtattgttttaaaaaaagtgcagtggatattagtttaaaaaaatgatgtccaaggtttttatttttgtcatttgcttaagcgtaacattggcaaatgaatctgagacagtcagccaatgtcctacgtttcatggtctagagttaaaagctggagaatctaaacctgtcccgggatcatgtaacctagcagtttgcaacaacgatggaagcgtttacatgaaaatttgcgcaaccatccaggccttaccaccttgtaaattagtagatggagataatacaaagctttatccggcctgttgtccaaaagcttggtgtccacaaagcttttgggatgatattaaaaaattaacaaatccataatttattcccaaagagatccacatttttataaatcaccttgaaaatgtcttttaagattttacatatttttatgaaacaattgtataaagcaaacacaaat

SEQ ID NO: 12105 - DNA, 580 bp, Diabrotica virgifera
  SmartBlast Evalue=7E-46; Info=Retinol dehydrogenase 11 n=1 Tax= Camponotus floridanus RepID=E2ADL5_9HYME
ttgattttagcgttaatacgaaagtatcgtgaatcaaaatggggtaaatgtataaataacattcaattagatggaaaaacggtcattgttaccggtgcaaattccggcattggttttgaaatcgccaaggaatgtgcctctagaaaagcacaagtcattctagcatgcagaactttgaaaaaagccaaagatagttgtttatcaattcaacagaaaattaataacgttattgtcgtgccaatggaattagatttatcttcattagaatcaattaagaactttacaaatgaagtaaagaaaaacttcaacgaaattcacattctcataaacaatgctggagtacatcatcctaacacaacaagagtagaaactaatgaccattttgaaattcattttggagtgaattacttaggccatttctatttaaccaatcttctactggaacaactatctctcccctctggaaaaagtagagttgtagtcatagcttcttctttacacgaaagaggtgaaattattctggatgatttgaacagtgaaaaaaatactagaagagcaaatctttatgccaattctaaat

SEQ ID NO: 12106 - DNA, 580 bp, Diabrotica virgifera
cagatattgtggataagaggcttgaccagattgcagacccagctaagagtaataagagctttcaagtcaactttggaggatctggaggaaaggcgttccatacatagtttacacagcttacacagtttgcgcagctcaaggagccataccggaggcccctggccaccgcgccccctgtcagacatcacatacattgacgaagatcctgctaccaagctgtctccacaacaagccaacaagacaaatgaacgtgacgatcaacgtcttttgtctcccaacaccttgagaataccttcccaccatcagcattttgcccaccactctcccagctcccctgcagaagttgttgctgcctcaaccgcattaaataattcggacttgcctaagcccgtgcatgaaactcgtatatagtgttgtcagtcctggccgcagaggtcaaaatcgcatttgtaccgccgcaacatggtcattctttcgcataataggatgcaatacagattgcaatccaatattcatttttagatttaatttatcgtaatcttaaatacactaatcaaataaatgtttcgcatggtttttg

SEQ ID NO: 12107 - DNA, 580 bp, Diabrotica virgifera
cgacagtcgtgtaactagggttctcttgtcatttttttatttacttatttccgtctttgtgattcagtttggtgacgatattaaaaatggaacagcaaatccctctaaatatacaagaaattattcaggcaactgttgacagagcaattgctactcttttagaatctggccttttaaaagaaaagaaaggaagaaaacaccattcccgatcaagatccccacacaagggaaagaaagataaaaagaaacataagaagagaagcagcagctcgtccagttgtagctctgcctcaggcgaagacgaagggaagaagaaaaaagaaaaaaaggaaaaaagatgcgctgaaagacagtcgagtagatcacattcgagaggaagacattctagatctcgatcaaggtctaaacatcatcataagatgcaccaccattcgaagtctccagctacccatcatcattttcattattctccttgttggttggcggaaaattcttctgaaggaccctgtcacaaaagccatgatggtaaaaggaaaaagcattcccgtagactgcgctgcatgaaattttactacaaaca

SEQ ID NO: 12108 - DNA, 578 bp, Diabrotica virgifera
  SmartBlast Evalue=9E-33; Info=Cathepsin L-like proteinase n=1 Tax=Diabrotica virgifera virgifera RepID=Q70EW8_DIAVI
ggttaacgtttacatttccaaattaaattgaagtgttcaatgatgaaattgttaatatttctggtttgtattgttgcggtgaattgtctcaatgatactaaacactggaatgattttaaggtaaaatttgaaaaatcgtacggcgaccaaaatgaagaaagtcagcgatttgaaatattccaaggaaaattacgcgaaattgaggaacataatgctcgattcaacaacggagaggagacctatacaaagggaattaaccaatttagcgatatgacccacgaagaatacatagaaatgttaagttatagtaaagaattgcgtccagctcgttctcaacatgttacgttgagaacgtttcctcgagaagctttagcagatcttccagactttgttgattggcgagaaaagaatgtggttacagaagttaaaatcaagaagcttgcggatcttgttgggcctttagtacgactggtggattggaaggacagtatgctctgaaatataacaaactagtatctttaagtgaacaaatcttctagattgttcaggtccctatgggaatggaaattgcagcgtag

SEQ ID NO: 12109 - DNA, 580 bp, Diabrotica virgifera
  SmartBlast Evalue=9E-54; Info=Rho GTPase-activating protein 26 n=2 Tax=Formicidae RepID=E2BT36_9HYME
gtgtaaatgtgcaatctccgtgtcagtgcttatctcgtactacatttttgacggctcccagcaaactttttacgtctccaactgattatatgaatgttgagtgtatttaaaaaacaatatgggggtcgtactgcctcctttagaatttactgaatgtttgagtgacagtccgcatttcagggaaaatttacataagcatgaacgggagctggaaaagaccaatcaacatatcaagaggattatcaaagaagttaaagaccttttgactgcagctaaacagttgggtcgtgctcaacgatcttttgcagaatgtctcaagagttttacattcgagtgcgtgggagggacacaaaccgatgacgagcaagtcatttgtgcctcattaagtaatttcgctgacttaattaaccagattgaagatgagagggacaggatgttggagaacgccaattgcagcgtcgtcaaaccgctggaggacttcagaaaaaagtacattggaggcgccaagaacgagaagaagaaattcgagaaacagaccgccaagttctgccaaaaccaagagaggtacttgaacttgacg

SEQ ID NO: 12110 - DNA, 579 bp, Diabrotica virgifera
  SmartBlast Evalue=3E-20; Info="Nucleotide exchange factor SIL1, putative n=1 Tax=Pediculus humanus corporis RepID=E0VU57_PEDHC"
tttggatctctggttcagaacaatgctagggtacaaatccatgcactagaaacaggcagtattccaattctcttgagatttttaagctctgatcagacagagcttactaaaagcaatgctttgtttgccttgagttgtcttgtaagaagattccctttggcacagaagagatttttagaaaatggtggagtatttgtgattttacagatcttaaagaaagattccataaaactacaactaaaaatagtcactgtaatgactgatttgttccttgaaaagagacaatcactagatagttcaaacagtttagttttgagccaatacagtaacattgatttggagaatgaattgttaaatcaagactggtgcctcaatttaaacaccttactagttaatgtagtaagtagtcaccataacgatcatgattcaattgaaaaatgtctaatagctatggaattagttagtagcaaatgtaaaaagttcaacagaaatattttggctaaattaatggatacttatgaacaactacatcaaacagaaggaagtgaagatgagtatttcaaatatttgatgacttta

SEQ ID NO: 12111 - DNA, 579 bp, Diabrotica virgifera
  SmartBlast Evalue=1E-65; Info=Xanthine dehydrogenase n=1 Tax= Harpegnathos saltator RepID=E2BWN6_9HYME
atggtgatacacgttgacgaaggacgctccagttctttggtgttttttgttaatggaaagcgagtacaagatgatcatgtcgatccagaatggacacttttacattacttaagaagcaatttaaaattatgtggcaccaaacttggatgtggagaaggaggatgtggagcctgcacagtgatggtttccaaattaaatcgacagacaaagaaagttatacacttccccgtaaacgcttgcttagctccagtatgttccatgcatggtttggcagtaacaacagtcgaaggaatagggtcaacaaaaaccagactacacccggtacaagaaagaatcgccaaagctcacggttcacaatgtggattttgcacacccggtatagtcatgtcgatgtacactttacttagaaattctccaagaccgtctatgaaagacatggatgtggcatttcaaggaaacctctgcagatgcactggctacagaccaataatagaaggttataaaacatttactgaagaatgggaactaatccagaatggcaacaaaatatcggcaacaaacggcaatggcgtctgtgga

SEQ ID NO: 12112 - DNA, 579 bp, Diabrotica virgifera
  SmartBlast Evalue=1E-29; Info=Neuroguidin n=1 Tax=Harpegnathos saltator RepID=E2C2S2_9HYME
gtgagtttgtgtttgtgtggtggtcatagagaaataacaacgtggtggtaaactatttcaacttttcttttgatatgaggttttaacataaaggattgttaaaaaatggtgcagacttcaggtgtgaatatgaaataccgagatttacctcaagttttaatactcttaaatgaaatgaatgttagtgctcaacatgtagctgctttagtagacagtatgattcaaaaatacttagaaagtgttgtggagaaaaaatagaaggagatccatgtatagatagattaatagaaataagaaccgttttagaaaaaattaaacctattgaccagagacttaaatatcaaattgacaaattggtaaaaactgccactacaggaaaaactgctgacgatccgacacactataaggcaaaccctgacaatttgcttggaaattctgacgattctgaaagtgttgttagtgaagttgaaaaggaaagtagagacagaaaaagtgtttatgttcctccaaagttaactgccttatattacacaggtgatgaaacttctcaacaaagagcaaagactcttcaagagagat

SEQ ID NO: 12113 - DNA, 576 bp, Diabrotica virgifera
gtagaactaactggctcaattgaagcttgcaatgggataagacaggggttccctgagtcctctatttttcaacttttttttttgaggtgggaatcttagcaagaccgtctgggaaggtgtcccaggtgtgtcggattcggtccttcctatctgtatcacgggccgcctaccgattaaacccaccccctcttttctccagccgacgggtctgagaccgcccttagcgagcatatctgacccgtcgaccttactcatagctcgcctccggcactcctaagcgtgcattccacggattagttggcccccggatcaaccctccgcccacgccccgcaccaggccggtcagcgaagcgaccgtctggcgcaacccgtgcgcagctagggcgaccgggatgcccccaatcccggatgaaaacaaccagaagatgtcagttggcagttacgagcagctccagtcgttcatacttccatctatgcactctttctcgtccgccccttcatactttctctcatttaattccactcattcatactttcatctatgaacgcttatattgtttaacctgatcatggatg

SEQ ID NO: 12114 - DNA, 579 bp, Diabrotica virgifera
gaattcacgttacattcctctattttactattttatctcgaatatcgtggaaagcactatatatgtgaaaaatagattgaattaaagtttttcgcacatatccaggataaccggttgacagataggtcagtaacttcgattcttttgcgctaaaatttttcctaaattcctaaacagtttcaactggaattcaactcaaatttcaattataaagaatcttttggagccatttttacaaaaatttaatgtctcactcacaacaatcaacatacagctcgcgactggagacataaaaatttaaaagtagtagtttaaaatacatatctgcaactttggactgggatggccataatggatgagcagtaccgtaagaaatgggaacttacggcacggtgtcactcattgacccggaatataccgaacaccgggatacagatagatattgtttcatactacgataagctgaaaagtaggtataatgagtttagaaaaagaagaatcagtattatcttattttttgtgctgggaatgaaaaatcacaaaaaatgcacaaataatgtgggcaaatttacaatgtgg

SEQ ID NO: 12115 - DNA, 570 bp, Diabrotica virgifera
  SmartBlast Evalue=1E-22; Info=Dual specificity protein phosphatase CDC14A n=1 Tax=Harpegnathos saltator RepID=E2BNA0_ 9HYME
atccctgaatttaatgaattcttttgaggaatttttcataagagtttcaaatgattgttcaggtgtataagaaaggtatattatggaataagcacccatcaacaacgctgaattcaccctgttctgcttagcatctttggtacaatcatagacatagtgaataatctttttattcttaagtccagtgttggttaatttcttcttcagcttcgtacaaaagcggtatatcttagcaagatttaggggcccaaagtcttcatagaaactgtcataatatatactgttattcagtgtgaaataatggtgtgtaggtgtaggttttagatccactgtacattccacacaagtaaaatacagtctgtctttgataaattctgaggcgtttaataaggtactgtctgtattattcgtcatttttggatactactcttgatactaggattgggaacacacttttacatcacacactatttttgacttggtatttacattgtttcacggataaatttttactaagataaaacaataataaaccatcggatttaaaatatatatcaacaataatgtaaa

SEQ ID NO: 12116 - DNA, 570 bp, Diabrotica virgifera
  SmartBlast Evalue=7E-49; Info=Speckle-type poz protein n=1 Tax= Aedes aegypti RepID=Q179U2_AEDAE
agttgggcgagtgggctctagcagatttttctgtggtgatttataaaattgttttttaaatattaataaactgattttaagtgatttttttgcaaataacgtgacatatatttatatttttgaatcggactgttaggacatgcttgaatatgccatttactgtaccagagcagtctacttatgcaatatttgatcatcatgcattcgactagaggcaataactactgccgggggtgagtgactgctcggccgggcaaacggcccgggtaacctccaatctgcacccgacgagtactatggccgtgagccgagtcccgagcccaccgccacaggaggtcaacacgcccgtagccgaaaattggtgttatacacaggttaaagtagttaaatttagttatatgtggaccataaacaactttagtttttgtcgagaagaaatgggtgaagttctcaagtcttctacattttccgctggcgcgaatgataaattaaaatggtgtttgagagtgatccgaaggtctggatgaagaagcaaagactatttatcattatatttgttactagtgtcgt

SEQ ID NO: 12117 - DNA, 580 bp, Diabrotica virgifera
tagttcagtaaaacgatataatcttggtaaaagaagaataatgtagttggtcgaactttgaatcaatttttttacgcgtataatgttgtacggtgaaataaaagtataatacaatagatttgagtgcaaaaagtagactgatgtttctttacgcactggaacaagtgccgaatcttttaaaatataagttaggatatttttataccaataggtagcaaacagcagttgtagactgttatgaatattaaagttgtgaaaagaaggtaaatatggcggcaaacttagaggtagcttaaatttgttgggcatatcacaataaaatagatctttttattatcttgaaagataaacaataagctttaagtacttaagaaggtgatttctatgttggtgactagaattatcgtttagcgtaaattttttggtagatgagtcctagttttcttctattctataaaacagatttccaaaatgttctacagcatcttaatcagaaattaccggttttgatctaaaagagagatatgtttagctttatttgtacttaatacttcggcgatctgatcaaattatcttattg

SEQ ID NO: 12118 - DNA, 575 bp, Diabrotica virgifera
tactatttttacaggaatatgtataaaagtagaaagtataaattgtctttctcactatcaggccaacaaattttttagactactacgtacttttaacaaacaaaccacgtgctttgtaaaagtagttgttttttaggtatcttaataatttttcacgtagatacgaggttttgcaccgaaaacgacgataatataatttcacttatgcaaaatatttaaaaatatctggcgttaagaatactttagcgaattttgagactataataaagcgcggttcacacacatccatttattacttcgactgtaaaaacacattaatttaagttgagctgtccggtcgagtcaaggatataggataccattattgtcgacttggcggccttgtaagctatttgtagtttttagcgggattacaatctgaatagttcttgtggataatcaagtttgatttcttccgcaattggttaaaatacaacttttactaattcattcttgtccaaacgcgattagtttttccaattcttctcaaataccgttcgataatgaaagttaaaaaattagagaggacttcatta

SEQ ID NO: 12119 - DNA, 579 bp, Diabrotica virgifera
  SmartBlast Evalue=6E-26; Info="Protein phosphatase inhibitor, putative n=1 Tax=Pediculus humanus corporis RepID=E0VRE1_PEDHC"
ttttagtaataataatttattacttattacgatgaagaaggttgattatcagagctattatgatgcgttccttcatcttcgtcatcttcctcctcttccattaacttttttgccagttgaagtgcatggaactcgttatagtgcttttttcttttcaattcaaagtctttctttttctttttctgatcgtctgttaattcctcttctgaatcatcatcagaatcgtcttgttgcatcaccttggggggctgctcagttgctatccttatcctttcagctaattcactggcatctagttcttctatattatcctgttccatataattgaagggtgttttgggctcttgaattttcatgtgcccataatccttgtctgcagggtggagcgtagctattatattcatttcatcccatttcgtttccttttgtttttttgcattaaactgcggatcttgtttgtcgaaactactagaattttttaaaatccctttcctgggtcgtctttttagattttctgccattctaacaacgaattaaaaagggtgtcaggggagactggggagagtctcaaactcagcc

SEQ ID NO: 12120 - DNA, 580 bp, Diabrotica virgifera
gtcgtcttacaactggccacttactgtaatggtacatggttttcgtggtttatagaccaccatggtgtggaattagttctttgatgttttgtctgtcactggcaacggacgtaacctcccgtcagttgtatcgcttacagtgagctacacggggagagagtatatctatcgcagttgcttatgaaacgtcagggaaaattaatacagaccaaaacttagaaactaatgtatctaccattaaaaacaccgacctgacttacacctcttcaccattaatttgtcaaaagttatgtcagccacagataacctgcatgcagttgagtacatggttctctacccgtgcgtcattaatacatggggagataaaacacatactttttatctagcatcattgttttccacgcatgaaactaaagacaaaccagctaccgcctgttattaagtaaagacatgttatttttatgaacgctctagacccagtacatcgaaaagagataggtacaaaaaagacgtattggagacgtcttcagattttaggtgtaatttatggcgtttcttttttgtttacttgtggctgtca

SEQ ID NO: 12121 - DNA, 580 bp, Diabrotica virgifera
ctcacatccaagcgaacaccatcaaaaatgaaatacatctacatctacttcattttcgcttacctgtacttctatgttgatgctgatcaggttcatttagcaacctcacaatgtgactgtccagacagcataaccgccatccaatcagcattggaccagagctgcgcccaggtgagatccatcagagcaacaattaaaagaatcaggtcagaacttgccgaaattgacaccaatctcaacgtcaatgacaacaaaatcgacaggctcaactccaacgttaccactttggaatctctcctcaacgataactatgaaaaagtaaccaaagagtcattgataatcggcgacatcgacattagagctaaagaaatcctcagcgaacttctagaagttaatgttcttattacagagaacgatgtcgaaatcaaggaaatcaatagtactcttgtagacttaaaaacgtgtgcttgtactcctagaactacaccaactccacaaacaactactccttactatttcaaacattaaagatatgttaacaacacctttctgtgaataaattttgtttagtgacttaaaa

SEQ ID NO: 12122 - DNA, 577 bp, Diabrotica virgifera
ggtgccttctactggaggtcgctactggaggtcactattagtatatacatactggtatattatgttaaacagaaatgtctaattaaacagaaatgcaaccgtctctctgtctcattactaccttctctatgtatggagtattgggggctcttgcgtttcttagctggctggatcagcgcaaattcaaccctctatatattcaagtaatgaaacttacgaaacagctgacgtcacatatctagaatggggactaaataagaaattgatcattccggcctcagaaagaccttatgtaatatgcttctgaatattaatattagaacagaagtcctgatattttatgtattttccattcttttatatagagtggaaacctgaatcttgacagaggcataactaaaagtttagaagccttcgaattgtggcgctctcaacaaagtcatatggaccaacaatattgccaacacaggataggaacctataggagaaagtgtttgtaaaatttaatatactgccacaaatgttcttatgtcatctacaaacctaacaagacaattgtcaaatatacaatcaaaat

SEQ ID NO: 12123 - DNA, 576 bp, Diabrotica virgifera
accccaataaatattataagtcgaatctgtagaacctccactatctttcagaaggcagctaattagtcataaatttatggctaaagccatatccaaagaagccagctatcttcgtaacattcacgacctcactgtcctagtactcacccatccatattggcactcaaaagctactccactcctagtaaacagctataccacaatggcacaaatctctaactccctgtctatcaacaaaactatacctatctacaccgaacctccccatgttttcttttcaaaacatataaaaacatactacctggacccaaaagaaaactttctagaaaccattaatggaagatggcctgaacaccaatacatatatactgacggatccaagttgaatggaaaagtaggctgtgctttttatgacgcaaactcttcccaatattacaagttcaagctaccagatgagtgttccatatataccgccgaaacaattgccatagcaaatgcatttagatacgtccagtcgagaaacacacagaatcatgttatattcactgacagtaaaagtgcagttgaccgaataac

SEQ ID NO: 12124 - DNA, 577 bp, Diabrotica virgifera
  SmartBlast Evalue=1E-18; Info=Fatty-acid amide hydrolase 2 n=1 Tax=Camponotus floridanus RepID=E2AN17_9HYME
cctacacggctgtggtaaacgtacttggtctgccagccactcactgccccatgggtttggacaagcagggcttgcccattggagtccaggtcgtagccgccgacggaaacgacagattatgcctggcggtggcgagagagatcgagaaagctttcggaggatgggttcctcctgctattaaggcttgaagaacttagtcgaagctgaagaaacgccgccagggtggtggtactaacaaaattgttcggtgaaagtttcacttattcagaaaaacatattatacacacatcttatagaaaatatgtcactcaaacgcaacggaatttacatgaatggattcaactcgaaattgcaatcatttcatatcattgcaccaactctgaattgtgattaatatcattgtatattataataaagtttatgaaatcacatttttaagcccataaaactatcattcatagatactattagtctagtggttattgaaaacagcttaacccagcgtgagttaagacgattagaggaactatacagtcaccgtcacgctactagacatacgggtacattgagctaatac

SEQ ID NO: 12125 - DNA, 577 bp, Diabrotica virgifera
  SmartBlast Evalue=2E-66; Info=Probable ATP-dependent RNA helicase DDX49 n=1 Tax=Camponotus floridanus RepID=E2AZ53_9HYME
aattctttaaatatagttttgatctgctcgtcaaactggccactaagaagcctgtctgcttcatccaaaacaaggaacttgattttagaaagcgaaaatgttttgcaactttctaaatgatctgctaaacggcctggtgtagccacaactatgtggggatgtttagacagttgtataccttggtctaccatatcaattcctccgacaactacacagtgtcttaaattcataggttttccaataacggcaaactgctctgctatttgataagccaactctctagttggtgtcagaactaaggcatacacaccatagggatcttcacatagtttctgtataatgggtaaagcaaaagccaaagttttaccactaccagtctttgcagcgcccacacaatcacgagcttctaaaatttgtggaatacagtttgactgaatgggagtaggggattttacacctattgttgcgcattgctaattatccaattattaagcttaaggtcggaaaatgaaggtttctgtgccattgtttcactagtttcgctttattcaacaattaggtagatttattaacaaca

SEQ ID NO: 12126 - DNA, 579 bp, Diabrotica virgifera
agtaacaacactttcggaagtacattaatacatttatacaatatatcaagattttgaatactgtgctgttgtctctttttctaagcacaagctttctgctctaatcctgccattctgtcttatattctacattcaaatcagtgtacttccgataccagcatattgtttctactaatccataaagagaccaaacttaaaattacatcttcagcagaaaaacttttgtgataagcagaaaaccaaacttcataatgcctgcaattcttaataaccaagaatccatatatacgagttcagacattgtgatttgcgcacggcttctgcttttaacattcatcattgttgtcaacagttagatgtggacgtggtcaaatatagattcaaaagtttgagcacagaatcatcttttcgagagaatgtgcttgcagttgtaaagtttattcttctgcatgtggatatcaactcaaaaacaacatattttatcttcaatcaccagctaattattacacttttcctttttattcaaatgactgttggcttttttacatattgagcgtccctcccttaccttccctaatg

SEQ ID NO: 12127 - DNA, 578 bp, Diabrotica virgifera
  SmartBlast Evalue=6E-61; Info=PHD finger-like domain-containing protein 5A n=33 Tax=Eukaryota RepID=PHF5A_HUMAN
tccattgtgttgggaacaaactgttaaaaagtttaattgtaatcatcttttaaaattgtagtgtgtgtatgctaaaactataaaatggccaagcatcatccagatttaattttctgtcgaaaacagccaggagtagccatcggaagactttgtgaaaaagacgatggtaaatgtgttatatgtgattcctatgttagaccctgcaccctagtaagaatttgtgatgaatgcaactatggttcatatcaaggacgatgcgtaatctgtggaggaccaggagtgtctgatgcctattattgcagagaatgcacaatgcaggaaaaggatcgagatggttgccccaaaatcgtcaacttaggtagttcaaagactgatctgttctacgagaggaagaagtatggttttaagaagcgttaaatatgttttaattgatatacttaaataattaatgattaaatagctgtacataattaggggtgtcactgattaatacattcattatctcaaaatgtattttatttgtatgacaatgactatgtttattaattttctaaaataaaatttaacttacttttgag

SEQ ID NO: 12128 - DNA, 576 bp, Diabrotica virgifera
tatttatttacataatataataaaaaactaatattgtcacctccagccttttaaaaatatgtatccagaaatgtaactataatcatccacaaataacaaaaacctataaagtgtatattacctaacataaatacgtttaaatatacaaaacaatatataccacaatttaaaacgacttcattctttgagcagctataaaaatatacttctttgaatattactgcataattttggtgtagctgaaataatataagattaccttcagtgactattccatgccataataaaacaatcagaaattactgactcaattcatccttttgatacttattcttagtcgtatgcattaaaaaattgttgtttttaaaatgttagactgagaagataagtaataccaagtcttcgaattttctaaaatttgggtaaaaaataagctaaggtccaaaagacctatggtctaagagctaaagaaaattaggcctcagaaatgctgttactaaattttttgctttggtaattggctgaacttgtttgtctattcacctgatgatacacttacaataaattcaactacag

SEQ ID NO: 12129 - DNA, 579 bp, Diabrotica virgifera
  SmartBlast Evalue=4E-27; Info=Phosphohistidine phosphatase n=1 Tax=Bombyx mori RepID=Q2F5N5_BOMMO
atctttgacagctggtccggtataaaaaatacgataaacttaaacaagtaattaagcaaaattgcgaagttaattagagttatcacacctctaagaagaatggcttcagcagtaattccacaagtcaaagatgtagatatcgatgcttcaggtgtattcaagtacatccttataaaactgagcagcgctgcctccgatggaaaactcgttgataagctgattgttcgtggttatgctgagtgccctttccatgccgatattaacgatcaagtgacgtctgatctgcagaaactgaaatcgagtaaggtaatacaagattggagaaccaaggtgttgggcggaggacgtattcagcacgatcctgaggataagaagatattggtttacgggtattctcaaggttatggaaaagctgatcatcagttaactgtggatattttgaaaactgcttatcctgattatagtattacttactccgatgaaggatattaggatttatgtttaatttagcagtcatttgaattatgattaatatttaatttttattttgatgtggcattgaactgaattatataagtt

SEQ ID NO: 12130 - DNA, 573 bp, Diabrotica virgifera
  SmartBlast Evalue=2E-16; Info="CG9395, isoform C n=1 Tax= Drosophila melanogaster RepID=Q9VJZ9_DROME"
ctttagccggaacggtaatagagacatgtgccgacgcgttgaactctccagccttgtaccacaatcggcaaaatactctttccgcgccccgggtcttcgtagcagcaatgattcgcactaccctctgaccttttctttcgtcgtagtaggccgagaagacgaagaatttgtatttggtattattaacattttgccaggatccttcgttaagcgtagcattttctggaaacggtggaagctgaacttcattgaatacctcctcatagtcagttgacttttcttgcttgtgcgagtagctgagcgatccaggtctgaccaccactcccgaagctcggctcctgtcgtcgataaaaaagatttctgtaaagactatgataccgaacacaccgaagaacataacgactataaaaaaactaaggcttgcgcgttgtcggcttcgaaaattcacgtacttcttctttcctccgctgcttgaacccatcttggatagtatttttcctgtcactaaattacaaataatcctttaacgcttctgctatttgtttaggatcgataattttaccataaataaag

SEQ ID NO: 12131 - DNA, 579 bp, Diabrotica virgifera
gttcagtttagatattctgcaaaaatgagcaaaattgtaattctccttctggctacacttcttgtagtgcagtcacttgcatcaccttacatatacggagaggatggtggtagacatagagatggcgactacggaagaaatgaaaacgttcacattgggggtgagaggggaagacagggttcggcatacgattcttcaaatctaggaaatcgaggctttcctggaaatcaacataatgtatatcctaataacttccaaaggggacaaccaacaggaaattatcaacacgttgggggatatcagactcatggatattagtatctttaagacgtatattggataaatacagcgaatatatttttcttgtaataataaaaataattgtttagcactaaagtatttatattcaataacaaactgatttttatagctgcaactgattgtttttaatacattctctgggataactggacagtctgtataatatggcgtgagtacttatgtgtcattggttatgatttctaacaaaacttcattaaaataaataaacgagcatttgcaataaaaatatttaaaata

SEQ ID NO: 12132 - DNA, 579 bp, Diabrotica virgifera
tgctgtgttgctgttcacttgtatcacttttgcttcctcagctggtattttctgagacgttaaaataccatataatcgacacagtaaatcaaccgattcatatgctgcgtatgtatgatttctaagatctagaagagctgtatctaggtgctcagaagattcactttcactaacttctaaacgagttaaaatagtttgagatttttcgtaaattatcgatatattatctaaagctgacatcaaagtattttgcagcttattcgatatgattggcttgtcatttttggccgttctgatttgttgtaatgtatgaacagaactacgcaaactagcaaacgattttctcgttacttcgtagtgattttttaaaaacgcaacaaagaatctagtgttacatcaaataaggtatttacagctgctgcatcaagcttgttatttggaccaagagatacggtactaatatagctaagtaactttgatattatccaaatatgaagatcctgtacttgaattatgaattttaatccatcttctatattttcaagttgtactttgtctaaaggtttgaagtctttaaat

SEQ ID NO: 12133 - DNA, 575 bp, Diabrotica virgifera
  SmartBlast Evalue=7E-56; Info="Transcription initiation factor IIE subunit beta, putative n=1 Tax=Pediculus humanus corporis RepID=E0VXJ2_PEDHC"
ccaaaccatcagtcagtagtactagtgctcctaaacttgatattaatacatacaagacctctactggaagtactcaatatcgctttggagtgctagcaaaaattgttaagcatatgaaaactagacatcaagacggagaaacttatccattgacactagaggaaattctcgatgaaacaaatcaactcgatgttggcaacaaagttaaacaatggctgcaaactgaagcacttttaaacaatgtgaaaatagaagccacaccagaaggcaagtttctttttaagtcacaatataagctaaaggatagaaaaagtttattgaaactattaaagcaacaggacttaaagggtttaggaggagttctgatggatgatgttcaagagtcacttccacacagtgaaaaggctttgaggatattgcaaaaccaaaatgaaataatttttataactcggcctatggacaaacgaaaagtattattttataatgatagaactgcatcactacctattgatgaagaatttcaaaaaattatggaggtcagttgctgtagatgcaatggatgatgccaaaataga

SEQ ID NO: 12134 - DNA, 579 bp, Diabrotica virgifera
  SmartBlast Evalue=1E-61; Info=AP-3 complex subunit mu-1 n=3 Tax= Aculeata RepID=E2A3P5_9HYME
ccacatcagcagtcagagcgtggttgcaattcccgtctatgtgagacacaatctctccattaaaaccggcgaacaagccaggctggatttgactgtgggtcccaaacagactatgggaagaactattgaaagtgtcaaactcgaagtattgatgcccaaatgtatactcaactgtgtactaacagcaaaccaaggcaaatataatttcgatcccgtgtctaagattttacattgggacatcggaaaaattgatgtgacgaaattgccaaatatcagaggatctgtgtccatagccagtggttcaaacactgctgagataaacccttccataaatgtgcattttacgatcagtcaattggcagttagcggtctgaaagtcaacaggctagacatgtacggagaaaaatacaaaccattcaagggtgttaagtatattacgaaggcagggcggtttttggtgcgcatgtgatcctaactcaacagctttaaatgtgtataggtcatttaagtttataaaacgctgtaaaacttttttagttaaatatttacgaattggacaaaataaaaggttcaattgtg

SEQ ID NO: 12135 - DNA, 579 bp, Diabrotica virgifera
  SmartBlast Evalue=2E-37; Info=CG7510 n=4 Tax=melanogaster subgroup RepID=Q9VVJ0_DROME
gtcacaaactgatcacagatatgtttcgtttctgaactaagttcatgccaagctggcagatttaaagtattagcgccgtaccatatcttcctccaatacttcaacagtggtaacattatttctttggtgttcaagccgaatattgcaaatactatgatactttgaccaaaattaagagtggcatccaagaatgacagttcgatgtatattcccgacatttgttccatgactagtgtccaaattgaaagagcaagacccacgaacattgaacacaataacaaaatcaacaaaaccgtatgtcttaagatctgtggttcatgagattcgggttcctcttcgataagttcgagatcgtcgtctatttgctgctgatactgtcttacaacaccctggcacatttcccgtgttggccctgcacaaccatacctcgtaggacataagccgtccgcatttggactcattccttcttcactcaatacagaaagatatcctttaatttcagtactattagatttcttatcgaagtctcctaaaagatcttcaatatctactactgggctctcctgactctcacagcaa

SEQ ID NO: 12136 - DNA, 578 bp, Diabrotica virgifera
ttgagtcttcgtgttttgtgctagggtttctgcagttaccatatggacagttattaatgaaacactgtatagctgtattttataattattaaaaaaaccagtagtatttatggatgtgttatacgcacgaccgaatcacagactttttagcagtaacttcttattcttcttcaagttcaaacttctattttgccctctcatcgcatgtcctaagtactaaagtttccttcttttgatagttaatattatttctgcttcatttcctatcctagttacatccgtgtttgacattctttgaatccatgatatagtcgtaggattcttcggataatcgtaggtaatcgaaggacataccaaggcggctgagttatttatatcaacttgttttagtgtccacgcttttaagccatagagaagagtagagaacacgtaacatcgaagcactcttaggcatattcctaaccttatatccctacaacaaagagatttttaagtttagttaatgatgcacctgctatttcaatacatggtttaatttttttggtgtggtctgtatttggtgttatccatgtttctaa

SEQ ID NO: 12137 - DNA, 576 bp, Diabrotica virgifera
  SmartBlast Evalue=5E-57; Info=CG1718 n=1 Tax=Drosophila melanogaster RepID=Q9VRG4_DROME
tagttttaccagcaccgttgtgtcctagaagtactgttatttggtcttcgtacatgtttagagagagatttctaacagctactttttggttaaaaacttttttgagatttcggatttgaattcctggttttaggttttctggttcagtttcgaaaaattctccttttatagcaccattatcaaaatcttcgacacctctgtatatagggtgtccacaccaatattgtgcagtgaatggaaaataccaaggttgtggaactccgaattctccagggaaaagagcctcaatgtataatgcaattaataagtacataattgagtcaaccgttaacataattagaattaaccctaaagttaaggaatcatcaggggtgtttggtgtaaaaatgttgttccactgaattccttcgccagttccctcgtacatcagaattacttgaaaaccaaatgccatggcagtatttgatccaatacttgctactaatttcgaagttaacgttaaggtgtcatatacattcgccataaataaatatggtgagtatgataaaaccagaccatacctgctatagtagctgc

SEQ ID NO: 12138 - DNA, 579 bp, Diabrotica virgifera
  SmartBlast Evalue=6E-20; Info=Pre-mRNA splicing factor ATP- dependent RNA helicase PRP16 n=1 Tax=Culex quinquefasciatus RepID=B0W7R4_CULQU
gtcaataatataaataaataatcaagtggaagtaactaattatccttataacaactggttctagcaaaatatgtcatggatcctgaagaaaatttacatcgattagaaggtagttcttcaacaaaaggtggtttaatagttaagaaaaaacctcatgtatttaaagtaccccaagtatctctctttggtttagataaacttgcagcccaaaaaaggagagaaagagaagcagcaagtaaaatatcctttgatatcaacgaaccagaattaaatgaaattgaagaaagtcacaagtcagagaaaagtggaaataaaagaaagttagagaaccacaagaagaaacaccaacatatactgggggaattagcaaagaagctagagaaagactaagggaaagaataagtcataacttatcaaaaggggtgtatgctacaactaaaaaagatttgaataattatgagaaatcacaacaagaagataaatataaaggaaaatcagaaagaggaaaatggagcgaacattctgataagggaaagtcgcctagatttaaagatgaaccaaagactcctaatttatatt

SEQ ID NO: 12139 - DNA, 577 bp, Diabrotica virgifera
atttgtaaataatataattagtcgtaagcagtgtttcgtggtaaagaggaaaagtgtagtgataaagattctacgaacggacttaacaattcaaaacaatggaactaaattacatcagtttttagaaagtggatgtattcgtggttggagtgaacaatagcacgtttctaaatggtttcctcgaaagcaacgacggtaaacagatttgtttagttttagaatagagggtttttctaggatataagaaagaagttaattttaatatctcctggaaatttaacaagacagaaaatttgtatacaacactatttgttcttaagaaatgaaagtagggaagtaatgttgagagaatgcttgtgattggcgaaagagaccgatggagggagaatagaatggccgagtctgagtttgatgagggaaaatgattgactgtgtaattaagatctgaagaagccagtccagtttggaaagtagtgattttgtgtaaagtggttaatttggtggccgtgtaagcagatttctgttgagacgaaatcgtgatcgagtcgagaagtaaaatctcctcgtgtccgaatag

SEQ ID NO: 12140 - DNA, 578 bp, Diabrotica virgifera
  SmartBlast Evalue=3E-21; Info=Retinoblastoma-family protein n=1 Tax=Culex quinquefasciatus RepID=B0XDW3_CULQU
tgttccgttgaagtttcaagatattatgaaattctacagggaacaaccccaatgcaatagtaatgtttataggaatgtgttaattacgagagaatgtattgatgatgaaagtggaaggcgatgtcctgaagaacgaagtgatttgataatattttacaactctgtatatgtaggtgtcatgcaaaaatttgctgtcaaatttaggagttccgtacagactagtaatttactgctaagcccacttcctgcagtgaaaagtaaaagtttaatttcctctagtgtccaagttgttggaaacgtatttctgcgaccgtttgagattcctgtggctagctccagtacgaattttaattactttttcagtagaagcccttccaaggatctaaaagatatcaacaaattggttagcaatagtaaagtgacaggaaaacgccttttagcagatgatttagaagcagaatcaccccaaaaagattatcagatcgtaagttccatactttggtcgaagaacgtaggaaccaaaacagcgaatagttatatttatgtaataaattattttattatcaagtaaacacgcg

SEQ ID NO: 12141 - DNA, 576 bp, Diabrotica virgifera
ggatggcgcatggatcgtttgattttcaatatttttttgtgagaattgttttacatgtatacttctttttatggtgggtgctcatgcaaatttacaatttatacagtactttttattttagaaactcccaaaaaaagtatatgaatttcgtacttttacactaggatatcccttaaattatctttcaaatagtatatccctttttttgattcaattagtttcagtaatatagttcaagtcaaaactttaaagtgggccgatttttatgcacgtaagtttattatttttgaagaactttttcaaacttagtaaagtcaatatattgagtgttatggtaaatttgtaactttttttgcattgtgagaagtctagtaaaacggttgatgttaaataaattaacctattttcaaatgcactcttaaaatattggacaatgtttttcttaatttaatttaagccatgaaaatgtatttctagtcgcagttattttgaataagactgtatattgtatttatttaggtagcgttatactgttcccgtgataacttagtgtaatttgtatatacataataaaag

SEQ ID NO: 12142 - DNA, 577 bp, Diabrotica virgifera
  SmartBlast Evalue=4E-78; Info=Heat shock protein 68a n=3 Tax= Tenebrionidae RepID=D6WU59_TRICA
caacgacgagtaaacaagagtgatatcaaagtagtcaagcgaattatttgacgaagtttttgaaagttttgtgaagtaaaagtattattgtgtgaaataacatcaagaaaatggttaaagttccagcaattggtattgatttgggcaccacgtattcctgcgtgggggtctggcagcatggaaaagtggaaataatcgccaacgaccaaggcaacagaacaacacccagctatgttgcttttacagatacagagcgtctcttaggagacgctgcgaagaatcaagtggcgatgaatcccagcaacacagtctttgatgccaaacgtctcatcggcagaaagtttgacgatccaaaaatccagcaagacatccaacactggtcatttaaagtaattaaccactgtggcaagccaaagattcaagttgactgtaaaggtgaacaaaaagtattttctccagaagaaatcagttccatggttcttacgaaaatgaaagaaactgcagaagcttatttgggaaccactgttagagatgcagttattacggttccagcctattttaacgattcccaaagaca

SEQ ID NO: 12143 - DNA, 577 bp, Diabrotica virgifera
ctaggcgttgaaacatcattggagttgagaaagtgtaaaaatggttgtaaacccttcaaaaaatgcttaagatagtaggaaaatcgtcgataaaatgttaagaagtgttaaaacatcatcaatagcgtcagaactacttcgaaaacattgtaaaaccattgggaaacttcagagatcgatatagtcattgtcaaaaagggtcgagtacatatcaaaaccactgaaatgtcgacgaaaaataatcataaatttcccaaaaggtcgagagatatatcctacatcgaaatatataaaacaaatatgtctgtaaataatttacagaaaaagcgtgaggaccgttgaaaaatcgttaaaagtatcgtaaaagcgttcgaagattgtggaaaaaagctcaaaatgtgttaaatgcttcctagtatgtattaaaaatcgtcgattagacgattagttagaaagcgccaaaggtatgagaaacagtctacagatatatcctaaatcgaaatataaatcataaacccgtgtgcacagaatttacagaaaaaggttcaggatcgttgaagcattgtgaaaggtgacg

SEQ ID NO: 12144 - DNA, 577 bp, Diabrotica virgifera
acataaatatttcggcgatattataaataaatgaagttgtattcctcaagatttcgacaatttctggagaaatggccggggaaaaagtatcttggcatgtatagatttctaccaatattttttgtattgggagcagctttagaattctctatgatcaactggcacgttggtgaagtgaatttttatagaacttttaaaagaagacaagccaaaaatatagtcgaacaggagatttactctgaacagcctcatagtgtttaaaatagtaaaatcagcataggaacatgcctgctggtgttagctggggaaggtatggaatgtttactctagcagctttgctgtctatgatggcgggttcccaagcagtccatatttattacaaacctttgtcagatatgaataagtatatagaagaagagaaatctaaattaaaagtagtagatagatgacaaattctttgatatatatttttttgaattgtgttggaagtgattattgtaatattgttttttatatgtacagtatatacccattaccctaatattgttaatgtaacctacaggtttattaaagttat

SEQ ID NO: 12145 - DNA, 570 bp, Diabrotica virgifera
  SmartBlast Evalue=7E-67; Info=Endoglucanase n=1 Tax=Phaedon cochleariae RepID=GUN_PHACE
gagcgaaagacattcttctcttgatgaaattcctccatattgctgtccccagccagtccatggagcattccattggtcgtgacatccttgattgaatgctccaacgccaccgggaagggcgatgtcaaattggtttgaaccaaggtctccaccagtgtttgtaaactgcagaaccagctttttgttattaatttgattttggaatgtaagcaaataacaagagcaacacaagtcattgtcaacaccaccggagaaagagactgcagcaaaaccatatccaagggtttcattcacaacgaagggctgttgattattgcacatataagacgttccgccgatacatcctgattgaacagatgcattgacaacggttacaccatctgtagcgcaagtagcaattggctccatgtctggtgttttgatgttttctttccaagcacatgacggtttgcagcaatcccagtaacgggtggtagtaccataaccgcttttacctcctacgatcttcttgatctctgggctgtatgccagagtaactgcaagaacaactgaaaaaatgaaacaattaaa

SEQ ID NO: 12146 - DNA, 578 bp, Diabrotica virgifera
attattaacatatcaacgtaaaattattagagcagatatgtgtaaaatatgaagctatctgtcttattactctagtgtgaaccttcttataacaaaacgcacacatataacgatttgtcttcagcttttacatgtttttaagtcctaatttaggtaaatcttttactgcatctgttctttaattactagctgtaacaaacaaaagttccttatattatcggaaaaacagaaggtttgacagcgcaaataccatataaagaccgatagtattacacaacccctaaaaataaattccataattatcatattaccgcttctgaaataactgaagcattacatttggcctattgccattatatgacagttttactttcttaaaatgtacaggatcagtgattaattatgttttacgttactgtatatcatcacaaaaccgtgaagtgtggaaacaattgggggagacctatatccagcagtgaacgtaaagtggttggatgatgatgataacattattaatttcgattataggttcttcgctgactttgagccataaatgcaatgtatttataattacaaat

SEQ ID NO: 12147 - DNA, 578 bp, Diabrotica virgifera
taataatttatttatattatttagtacagtctttttttgattgttgtgaattaaggtctagcattaaaatttaaatatactcctgcttcaggttttgtattcccaaatggtccaccgtggtgttgacttagttgtcctgtcaaatcaatgttaagttttttatcttgaacaaagttgtatttaactccagcattgacatcagtaccgtacccaggcgtcctgtctgcgcctacaaaggcagtagtttttgttggcttattagtgtattctaaacgacctccaaaagaatctggtttcagtccatgtgaatcccaagctttcgagccagtgtaagcaccgtcaaatttgtgggcaccattttcccagagatttcctttttgaccaagagtgtatccattttggttggcaccccaggttaagtctctcctttctctgtgtactggaactacaagatattcctgtccactctcatcttcaatgacatccaatggaagggatacagccacggcaatgcaaaagacaaagataactagacctttcattgtgaaatataactttcttggttactttaaagctgc

SEQ ID NO: 12148 - DNA, 579 bp, Diabrotica virgifera
  SmartBlast Evalue=9E-14; Info=Lysozyme i-1 n=1 Tax=Culex quinquefasciatus RepID=B0WQ70_CULQU
accgtgtataaaagtaaattaaaaaaagctacaatgcgattcgcaatgttagcaatttgtttagcacttgtggctgtaacggcagtagaaagcgtacaaaccaactggctcaatgacccactttactcctgcgtcagatgcttgtgtcatgctagaagtggatgctggatcagacaaaattgtgccaagtactcaattaaccaggattactggataaaagcaggttctctcactgcttcaccagatgaaagttcaacaagtccatcagcatatcaaaattgtatgagggatgaaaactgtattgtcggtactatcattaattatactggacgcttaggagatatggattgcaactgcgacggagtcttcgattgtaaagacagggcagccattcatcttatgggggccggttgcgcaaatccttactttggtgatacttttgccaggcgattcaacgaatgttccaatatggttggttctacgaacatgttagctagtgaaggaaataatatgtgtactacataatatgtgtgctctaaatattacttgtgtaaatatattattatttttcacttcaaa

SEQ ID NO: 12149 - DNA, 574 bp, Diabrotica virgifera
gtacagtagtttcggttagttaaactggtaataaattagataccatgtaacaaaacaacatacaagatcagttaattgtgaaaatagtttatacccacttacaacttagtgtaattaattctgtagtatcagaaatacatcaagaaccatgaatcctaacctaacaccaccatcttttacacacaaagatttattgctcaaaaaactgtattactcagtgatttgcagtgtactttctcagctggttttactgcagttgtacgtgttcgtgtcaacttttaatctctttcatcccatacaatggattttggagtctacaacaacctttacatcaattcagaacctggttgttcacagtgccattcctaggtattatattcgctcaaagcgttatatgtgccaaagactatgtgtttaaatcaacctactgctccacaagatttcaaaagttgatttccgcgttctcactacataatttagtgcttctatttttacatattttagcagggccagcgctaatatggttatttttgtcactgggaggaggacaattccagaaccttacaacaagtat

SEQ ID NO: 12150 - DNA, 576 bp, Diabrotica virgifera
aaaattgtcaggcgactacgctaggtgtcgcgtcagtcatgcacggagcgaataagtaccagataatcagccctgtgatgaatcactcacgttaaatataacgtaaagttatcctgtagttaagttataatcctcgaattggtgtgatgtatcatatttaacttaactacttgcgttatttcttgacagttcgtgagttatctgatatatcacctgtcactttataacgcaacgttaaacctcaagttatgagataactttgtagttatggaaggatgtgtaaggtaaggttcatctttgacttgtttttagataaaaatcaagtgaatcttcaacgaagaacgctgcttcaggttgtattatatcaaatataaagcagcacaaaattaaaagtatcaaaaacatacacctcaaataacaattaaaagcacgtaggtaataataaaatgaaaacaataattaaaaatgaaaagtaaagctaataatttaagaatagaaggtaatacaattttaaaaatcatacaaaaatcaaatcgagatataattattgttgaatgattaatatacagggtgtcc

SEQ ID NO: 12151 - DNA, 576 bp, Diabrotica virgifera
taataacatacattactatcagaagaactttatctttgttaaaaatccaagttttctcactccattctggcggtacgaccagggaagtacaatcaaacggcgaaactgtagattcgttttttcgtagcaaacaaagaatatatctttgactgaagcttaatctttgtaaattaacgacttctttgatattatattcacagcccctttcatcgtgttgatccacgttaaaccaaatcatgtactcattgtctactgagttgtgtaaagttatttcatagtttggagtaccttctagttcgtaaaagtcatatgtaatggatccatttcttacagatagtgtgtggctgtatatcctattaatggtggagcttttatacatttttctggtgcagtcatcacaagttatgctaatatattctgtaggatcaaccggttgtgcttgtgtagtagtagttttgtctgtagtggggttgctaaatgtaactgatatggtactggtagacttcgaaggcaatgatgttaatttttcagtggttatttcgttcgaagttttagtggaagtcaatcgtgtcggct

SEQ ID NO: 12152 - DNA, 578 bp, Diabrotica virgifera
  SmartBlast Evalue=1E-52; Info=G protein beta subunit n=1 Tax= Culex quinquefasciatus RepID=B0WCW4_CULQU
agagaccaaattcgcaggttccagttgcaatgatcttgttacggtggatagtgcaggttcaataattataagtggccattttgataagagtataaggttttgggatagcagatcggaatctagtgccaataacgtagttttaaacggtaaagttacttcgttagatttaacaagagatgccaagtatctcgtttgctgcgtcagggatgatacccttaaacttctcgatctacggatgaaccaagtagtgacgctgtttagctgcgatggttttaaggtgggatgcgactattcgagagcgactttcagtcccgatgggcagtacgtcgctgttgggtcggccgatgggtcagtatacatttggggcgtgaatagcgctaaagtggagacgatactcaaggaacacggagctgcagttaccgcgacatcttggaaccccttcgggaactttcttactagtgtagatcgttctaagaaagcaatagtgtggagcgatatgtaaatcgatgcttttatgtaaatattgttgatctaaaccaacttcgaactcgtttttcctgatttgtattctacggggc

SEQ ID NO: 12153 - DNA, 577 bp, Diabrotica virgifera
  SmartBlast Evalue=1E-62; Info=Arginyl-tRNA--protein transferase 1 n=1 Tax=Camponotus floridanus RepID=E2ATX8_9HYME
aaaataaattaaggatcaccgtggagcggatgtcaacgaccaatgatacatttaacttcagtgccaatttgtatagaaaatatcaaatcaaaattcaccaagatactcctgaggaatgcgatgaagagcagttttttcatttcctggtcgaatcacctctacagcctaaaagcttcccgaacaatgaagaaggtcccggatatggatcatttcaccaacagtattggttgaatgaaaagttaattgcagttggagttatagatatattacccaaaggagttagttccgtttattttttctacgatcctgattacgcttgcttaacgttaggaacatatggctctctaagagaagtagaattaacccggaaaattcagaaaagtctacccgagttctcctactactacatgggtttttacattcattcttgtccgaagatgaggtacaaaggaaaattgacgccatcttatttaggctgccctgaaacctacacttggatacctatagagaaatgtttaaatttattagaagctaacaaatattctaggttaaatgaagacattgatgcattagatac

SEQ ID NO: 12154 - DNA, 578 bp, Diabrotica virgifera
  SmartBlast Evalue=2E-49; Info="Nitrilase, putative n=2 Tax= Aedes aegypti RepID=Q16KC3_AEDAE"
attgccctctgcactttaatcactgtttggaataaatcagcaatttcttcttgagttaagtctaacaaccttggagcacaccttaaagttgccacaagcacatgacctggtacaacgcatctaatatttgtaaacgcataacaataattggatttgtagaaaactgtagaagcgggtataattttatctgcaaaactgtatgagtttctttcgtcatttttgttgttatttggcagcaaattaagattataaatatcagtcctacgatgtttctgtacaggcatttcttgtctgatttttttaatatactctgtatttatttcagctacagcaatactctcatttgttggattattttcattatattttgggcattctgctacaacaacaccccaaggatccactatcattgaatgtccataagaggttctttttgaattatgttttccatattgagctgcagcaataacatagcattgattttcaactgctctagctcgtaatagaatttcccaatgagcaggacctgttgttgctgtaaatgctgaagggtacgtcaaaatattggccccgaattt

SEQ ID NO: 12155 - DNA, 575 bp, Diabrotica virgifera
ctacagactgacgtgtagaagtgaaaattaaaattgataaagtttaatcacttttaaaacaaaaatttgtagtgtattttcaacaaaataaggaaaaatgacgtatgttactggtgggcaggtacaacaaaatccacctatatttacaaggatttctaagttttttgatggagtaatacattttgtcatgaacttcttcttaacattgattccaattgaatataatgcccagagcagctcaagtggttctagttcctctaggggcagtactcttggtcgtggaggaggtggaggtggagggggtggatggggcggaagacctggacctggaggtggtggaaatggtggcgccagatttagaacaatgagggacatcaatcctccaactgtaggtggttgtgcaggtggatcatgtgggatgtaaaatgtatcctaaagtcaaatggggtttccctaatattataaattctagttttatgtgaatcgcaattatattatatgtataaaggtctatttttatgttagatttactatggttctgatttattatagttaataaaagtaatttatatgtg

SEQ ID NO: 12156 - DNA, 576 bp, Diabrotica virgifera
  SmartBlast Evalue=3E-30; Info=Novel protein similar to DNA polymerases n=1 Tax=Danio rerio RepID=Q7ZYY7_DANRE
ggccctccagaaacgaactctgaaatataccccccacccaactcatcagttaagtcacctatacactcacctattgggagatcaggtaagccagccttggaaaggtaaatagacgaatctgtgtcgtaatattttgcccgagacccaataatctccagataagagtacaatttgagacgagccagagccgtaacgtatgatgccagaacaacattaactgttgacgacattgagtacgcctcctccacatactcccacgtaacaaccagtgtgtcctcatttacagggatcaccgtattaacctgaatggatggattaatcaacatagcaaaaaattctccaggcttgtttattatggatgttttagggaggttctctcgctgagcgaacttaccccagaaagaattgagcataagcttagccaacgacctcagaccagggttctccgttatgtcggaaaactccagcctgacatcctccctctgaagaaactcctcgatgtaccggctcttttcctcatccgatacacatcctcgcggccaccctgaagcttgttgtttcactttgataaatttg

SEQ ID NO: 12157 - DNA, 575 bp, Diabrotica virgifera
  SmartBlast Evalue=4E-15; Info=Reverse transcriptase (Fragment) n=2 Tax=Maculinea teleius RepID=Q0MWX5_9NEOP
gatcgataagtttaggctcgctcgagtaaaggagttaaaaaagtcacaaaccagactctcaaatactttgggtatcacaccaaggacgctaataggacgataattattaacaagagatttatccccgtctttaaatataggcttacggaaaccttctttccagtaatttggaaaaacaccagtttgtagggaacaattaaatatgtgatacaatggcctggaaaggttaaaactgcatttctttaagaacaaaggaggtataccgtcagtgccagtgcccttattaatatcaagagaagagagcttggtgtatatttctggtattaaaattttatgttgtgatatgagtactggatgaggatagttcatgatcgggcacattgatattattcagagaataaactgtggaaaaataatcagcaaacaaatttgtaatatctttgcctgaactacaagatttgtcaagatatttaagtacattaggaaaagcactatttttgaagttatacttctttaggcgcgattgagagtaaaatttcataatactgcgcgcatgcgcacacagacagtatgac

SEQ ID NO: 12158 - DNA, 575 bp, Diabrotica virgifera
  SmartBlast Evalue=1E-12; Info=Galactose-specific C-type lectin n=1 Tax=Culex quinquefasciatus RepID=B0XAZ9_CULQU
ttttattgctaataatctcttgcgttttaataaccgaggcaacaagtgacacatgttgtgcagctaatccaaaaaatatttattatttaggagacaaacaggtaaattgggctaacgctgtgctagcatgccaactcgttggaatgagattagtaagtatccagagtcaagctaagaatgaggaaatctctgcatttgtgcgaacctcaggagtgaagaatataggaatcgataacgccatatggacttcaggaaatagacgccaggacaaagttcattggctttggttagctcaagaagctcttgtgtacactagttgggacctggtctttcatgaaccaaacaatgctactggggacgaagaatgcgtgagcataattactaataatggaacagctactacttggaacgatatcgcttgtaatcgcttattttatcctttatgcgagaaacagatttgttgttctggttgcaattgtggctgttcttaatttgattaacggccatataaagtaatttttgctatttacttaataataatggtattaatattataataaaaagaataatacata

SEQ ID NO: 12159 - DNA, 577 bp, Diabrotica virgifera
  SmartBlast Evalue=4E-20; Info=Aminoacylase-1 n=1 Tax= Harpegnathos saltator RepID=E2BIK0_9HYME
cagacacaaactgtaaatacccgataacgctcagcccaaaaacatttctaatcaattccgagtaatacatcgaaagccacaagaaatatctacgggaaacatgttttctttttgttttagttacctatttattaaaatgacaacatagtggtgaaacacgatagaataatggtctagttttagattaagtaatcacttatttccttgataagccccaataaaagtatataaatacgaagtggggatacaagaaattgttaagttcaattttaaatacgcaacttgtggtttctattccatacaatttcagcaaaaactcaaaagatgtctacaataacagctgatcaaaagcaagcgttagatcagcaagctgtcaacaattttcgtgaatatcttcaaattccctcggttcatcctgatgtagattatgaaccatgtgttacgttcttggaaaaacaagcaaaaagtttgggtcttcctgcaaaggttatatctgtggtagctggcaaaccaattgtgataataacatggcttggaaaggaaccaagtttaccagccattctattaaacagccata

SEQ ID NO: 12160 - DNA, 577 bp, Diabrotica virgifera
  SmartBlast Evalue=1E-30; Info="CG6454, isoform D n=1 Tax= Drosophila melanogaster RepID=Q9VC89_DROME"
aattcaaacttctagcatgtgaacgtatttccattcttatttccgaccaccaggtgtctctggactcgggctcttcaatgtttcgtatggtttccagtctcttcacagatcgtgcacttacagcacctcctatgtgagaaataaaatcagctggaaatttcaaaatggtcagaaagggatactctaacatatcaaaattttcctggtgtatttgggatctgagtaccatattatttctaataaaagaactacttgggtgtcctcctgatttttcactacttgtaagactgtttccctttggtgtggtacttagatcggaatccgaagatcttctctgagccaaaatattgagtctcgaaggcgattggtcgcttttcctctgctctaggttctgctgataagtacttccaatttgatctgcttgtggtgatatgttatgctcatctttattttctcctggtaatatgggaccattactacttgtatttgataccgtcaaagttatagcagtaccaatacctctagctacgattcccgactctccctctaaatcatagctctgtttataacctataac

SEQ ID NO: 12161 - DNA, 575 bp, Diabrotica virgifera
  SmartBlast Evalue=4E-42; Info=Cytochrome c oxidase subunit Vb/COX4 n=1 Tax=Simulium nigrimanum RepID=D1FQ49_9DIPT
gctcattgggagttggagaaaaactccagatttaatgacaccaaagtatttacataaaataatatgggcataaaagaaggaaatcaatttattattataacgcactattttactcaaagttctatgacaaaattaaatttatactggggccttgtgtactaagttaaaccagtgtccacattcacatctcttaggctcccccttgtgcagccacatccaatttatacttgtagactcctcttcacaaacacagcctaccagacgggcatcgaaggctgatggaatttcgttaggttgggcttttgagccaggacctcttttgattactttgatgtcaaagggattatcgtttcctgctacttttgctaacagttcgcgtttttctaagccagtagcatgttctagagggtctcccattgtaactttagaggccattctatagcttgttgatagaacatgatttcttgctgtagatgtaacgattcttctacacaatgaagccatttttggctagtaataacaggaataatactctccaaagtaacttttcgtttcgatactagcttcgaggtgtt

SEQ ID NO: 12162 - DNA, 577 bp, Diabrotica virgifera
cccggactaaacatagccacaacactcgaaactaagtaaagagttcactactatacccacccgtcttcgtctatcgtttatccatatctaaagctgggttccaacggaatgtggcgtggcatgccaaaagaaatagaaaatatgtaatagaaaaagattaaaactaaagatgggaatcaacgaaacgtgaaagagcgttatttcgctttatttatggtcggcctggatcggcgtgaagtctcccatagtttggcggtaaatgaacaaggctcaaaggaagtcagaagctgatacagacccttccaactcaagtagggactagtacggtcagtgtacttttgtataattttgtggactgtaatttttatcattgtatgaattacccatttttgtctattgctgcacgattcatcaaaattgtcattattacaaagtacagtattaataaaagcatttaaattatgttgccaattggtttaatataatactggaaaggatattttttcaaaaaatttgaagtcattattcaaactaaccatggttgttagattctctctgaagtaagtgagttgggaac

SEQ ID NO: 12163 - DNA, 570 bp, Diabrotica virgifera
ggggtaaatgctttacgcataccagatattattcacaccgataacagaaacactgttactggtactatggctctatgtattttactgagaaggcttgcacatcctagtcggcttaaagatcttcaaccaatgttcaatctttctccacagtcattgtctcaaattattaattatatgattacatttattattgaaaatcatgtacatcttctgacagatctaagaaatgttccatggttaaatgaagagagaatgaaaacatatgccgaggctgtaggtataagaggtggtgctgttaaaaattgttggggatttataggcggaacagaaagaggaatatgcaagccatcacaaaatcaagaagattactattcagggcacaaaaaacagcactgcataaaatatcaatctgttttgtgtcccgatgggattatcataaatctaaaaggagcatatataggtcgaaaacattattctgcaatttttagggaatctaatctttataatgaattagaagctgtgacaactttaaagaatagaaattatgttttatatggggaccaaacttat

SEQ ID NO: 12164 - DNA, 576 bp, Diabrotica virgifera
  SmartBlast Evalue=5E-57; Info=E3 ubiquitin-protein ligase KCMF1 n=19 Tax=Tetrapoda RepID=KCMF1_HUMAN
gaatagtggagaagtggagtgactgtggcatttcatttatattttgttcggatgaagttttgttagaaattccaaattacgaagttaccaaaaatcaaaatctttagtacaactaatatgttcttatttgcaatagtattctgaaatgatttttcattgttattaaattaaagtgttcggtaaattgttgacaataaccatgagccgtcatgaaggtgtaagctgcgattcctgtctaaaaggaaactttagaggacgcagatataaatgtctagtttgttatgattatgatctttgtgcaacatgttatgaaggaggagccactaataccagacatactactgatcatcctatgcagtgtatattaacaagatctgattatgagctgtactatggtggtgaagctcttacgagtttggaattaccccaatcttacacgtgtccatattgctctcgtatgggatttactgatgttacattgcaagagcatgtaactgctgaccatcaagacattaattttgaagtggtctgcccactttgcgctgcaatgccaggcggtgacccaaacttaatgac

SEQ ID NO: 12165 - DNA, 577 bp, Diabrotica virgifera
ggtatttaggcctcaggcaatggaaactatttcacccgtcgttgaaacaccaccaacgacacctagactttttgcattgccttcaactacgcctatgcctatggaagtagatcgcataatgagtttggcggtgcgggaaacgaccccttcagtaacggatgtcggaactccgagtcccacagaaacgcccgctttaccaccaccggatacgagaccggttttactcgccggcaacgaagttggcagaactgtcagaaaaactaccaaaactcccggcgcctctggttccagtagtagaactggtacagaattggttcctacgacttcccaaggacacaggaagtcgcgatcgaatacacctctaagggtaacaagtaatttcccacctgtagttaaagttaacgaaagtttaatatctttgttgttgaggttacattctcaacttagcggtgtacctgatagttataacccggatgacgaagaaggttcttcgtcttcagttgactcggcagacatttctgtcggtgatggaatattctacattgcaaggctgttaaagaaatctcatcgttagatg

SEQ ID NO: 12166 - DNA, 573 bp, Diabrotica virgifera
  SmartBlast Evalue=3E-40; Info=Endonuclease-reverse transcriptase n=1 Tax=Bombyx mori RepID=D5LB38_BOMMO
gaggtcatgattcttggacatatagttcatagtcaagaatgcacttttagcctttctttagacatctaatctcttgagtattgtcccacgactcattgattatagttcccaaatagttgtattgtgagacacgttcaattctcatttggttcacatacagatttgctccagttatgttttgcttgctgatgatcattagcttggttttgctggtgtttatatctagtccatatgttctactggtttcagtgattttattcattaagttttgcagcccttctatggtattggcaaacgctattgtatcatctgcatatcgcaggttactgagcttgactccatttattgagatgccttcatcaatatcttttagaacctcttcaaaaatgtgctctgagtacagattgaatatcagcggtgaaattatgcatccctgtctcactccccttaagattttgacctgatctgtatattctccatctattcggagcactgctgattgattccaatacaggttagctattattttcaggtctcttccgtcaatccctgtccttttcagcacttccatca

SEQ ID NO: 12167 - DNA, 574 bp, Diabrotica virgifera
ttttaatatactttcaatatttttccagtgtaattaagaaataaagtccttttcatgagcgtttttcagtgcgtcacaaatgatagaaaataaggtaaatccgtgataatacacatttatgacatttattttaacatgacattttagttaaatctgacagttgtcacattttatttgcaatgtggcataaaaacaaatcaattgtgtttattgcagttataaaatggtattttctttgatttgtatagtcttataaattgtacagattataatcgtagatatattatataattcgtaaataaaacgccatctattgacaactagaataactagaataaatgttataaatatctgtaatcaccgacgtgcgtttttttctgtcacatacaatttaatgcgttagaaagaaatcgaaaaactctgacgcacttaaaaatgctcatgaaaaggactctacacctcactgtaagggggccagtgtaacactaagatatctcaggaactctttagaacactacaatagttcacacatttaattgaattaacgtgaaagaaaaaggagaaatatgtaaaa

SEQ ID NO: 12168 - DNA, 575 bp, Diabrotica virgifera
  SmartBlast Evalue=2E-44; Info=U2-associated protein SR140 n=1 Tax=Camponotus floridanus RepID=E2B1D1_9HYME
ttggattcagatttccgagatacagatttgtagtgttcggatcgccagtatcaaaggaacctatatctccatttctcattaacaaatccaactcattttcaagtggggtcttcactgcacccttgtatttatggcgttcctctctttcttcttgtatttgcctcagttcttccataaacgattcaaggttacttttggctgtttgctttttcttgcccaatcgttctggctttttatctgatgttagaagccttgcatatgcttgagctctatctgcagagctcatttgatcttgagctgttgctaacctggatgtaggtttatacaacttccccttttctctagtgtcttcctttctcgcccctgcatcatatgttccagctttcacccaaacttttgaacttccattaataggagcctcttgaaaagtttctacaaattcttggaatacatgcgctgcagcttcctcctcttccctttttctttgttcctccagttcccgtttacttaaagttcttttccccattgttccaatggaaaatgcttttagtttttgttctgcaatagagctttta

SEQ ID NO: 12169 - DNA, 575 bp, Diabrotica virgifera
  misc_feature (548)..(548): n is a, c, g, or t
gagagcaagaacaggatattacctccgagttctatcctactgcgtgttctcaccccttctcgggggtggaaaattttttggtcgaaataaccaaggaagtaactagtcagtgttgccgatgtcacgatatgaaattatgttaagcggttgctaaaattatcagattttgccaaaaattacgttaaaattttttatcgccaacccctgccgcaagccacagaacttggacaaaatttcagtagaatttctcctaatttttcggtagaaatcgtcaaattacggttgattttattttttacttcttttgctatcacattgcaaaaaaatgatactttattatacttctattagaggtacaattattcaaaaataaactaccttcgtcataatatgatgatcaataattatcattcatcataaaaatcactcaaagttcaaaatcggtttacgttaaaaatgtattttctcggcttttataaagcaattgtcttcatttttttaatcgataagttacttagtttgatattaatgataattttatatgaaanaacaatctcaaaagtattcactattca

SEQ ID NO: 12170 - DNA, 577 bp, Diabrotica virgifera
  SmartBlast Evalue=3E-55; Info=Cuticular protein Ld-CP3 n=1 Tax= Leptinotarsa decemlineata RepID=A8W7B2_LEPDE
tgtgttgggctgaggcttacaatgatttctttggtggtattcttagcgatatttggtgtaactctaggacaatacaggccaaatcctggtccaatttcacctggccaggttattcgtatcataagtcaaacccaagaaggtcccaatccagatggatcatacgcatggagttatgatgcagaaaatggtatctctgcccgtgaacaaggtcgaccaaaatctgcagaaattctaggagtccaaggtgacttcaaatacaccggaacagatggcgtaccaatccagctaacatacactgccgatgaaaatggattcgtcccccaaggagctcatttacctactcctccaccaatcccagaagctatcctaagatctcttgagtacaacgctgcccatcccgaagaagatgagagcggaagacaacctggaggatttagaagaccataactggatttaggagtattttaactatacgaaatgacgtttctgtggtatttaatttatacgaatgtgatgtttatatgttgtaatatatttttgtgaataattatacgtgcaaataaaatgaatgaattgt

SEQ ID NO: 12171 - DNA, 577 bp, Diabrotica virgifera
  SmartBlast Evalue=4E-41; Info="Cell adhesion molecule, putative (Fragment) n=1 Tax=Ixodes scapularis RepID=B7PVV1_IXOSC"
ggcaagttgataaggctctacggggaaaatgaaatttgaaaagtcgatgttggttttggtgctgatcgtggtgtttggattagtagaggccagaagggggagagcgaggagtaggactaaatcaaagtttcaaattggcttaccgataacaggaaaatacagagatccagaatctgaccagtactacaacaataacaatggagcaaaaattacactagcctcacactttgactatgaatacgtcctgggccacaagatagcgtttttgtgtgtagccagaggaaatccacgaccacacatcacttggtataaagacggcagcgagatctttactcaccaatatttacatatccacgaatggcagatgggaagagataaaatcaaaagcaagttagaaatagatcctgctactcaaatggacgccggagtatacgaatgcacagccgacaacatgtactccattgatcggagatcattcaaaactgatttcagcattgccttcgattagtgtactatatttatgacaaatcaataactttatttaattttttatataccaacaattacactttaccct

SEQ ID NO: 12172 - DNA, 575 bp, Diabrotica virgifera
tcagcacgagacgtagaaatattaactttggaagatgaatcaacgactcaagcaagaaatcgaaaaatataagacgttagtggaaattcaaacgcttacaaagaatgctgtaatagatttttcttctcctgtagaatcgccgagtatagaagaaaagttttccgaaaaatttgtgaaacttaataaggaagttattaaaaaggacatttcagttcagacagaagaaatagatgatttaaagaaacctagcaccgtgtcaagatcaacttcttgtgatgagtcatttacaaacaatttgacacaaatttcaatacagtcacaatgcaacaaaccacatttgctcactgaaagttcgtctataccagccccctcctcccatgccagctcccgtatcatcagatagctcaattcaatcgggttcacctcagtcgcaaagtgtaacaacatcatcgttaccaacagccaatataccacccccctcctcctcccccaccgcccttaccgatggcaggaataccaccacccccaccaccacctatgccagctatgcagtcaccatcaggagcgcctcctcc

SEQ ID NO: 12173 - DNA, 576 bp, Diabrotica virgifera
  SmartBlast Evalue=5E-17; Info=PP2C-like domain-containing protein CG9801 n=5 Tax=melanogaster subgroup RepID=Y9801_DROME
ctctactacattactcgttagctctctattatactctttattagctgcttctgcttctggtacatttgaactactaacgctggaatgttctactaccgtattattcttgctctgtatcgaaatgttctctacagaaggggaggaagacttatcagaaactgtgttactgtttatactagatttctctgccgagtttacatctctagtcttagatttcctagggggcttcacggggggcttctgtccgctgctttctaaatttctaacaggtttaactacgggagccttaatttctactggcatttgaggctgtacaggtctttgtctcgtacttgctttccttgcgggaggttgatcgtttttggtattcacagtaaatttgcagacattggggtcgaagttgtcggtgagaccgtcgctggccaccatcacgatatcgcctttctgcaacgtcgttatggagagcgtgaggttgctgagttctgggttgatgccgtctacaggacctagagctcctagtgcgtcgcgcatgtctctgttagattgatatcgtgggaacctttagtaagttctctg

SEQ ID NO: 12174 - DNA, 576 bp, Diabrotica virgifera
cggcgtgatttttcctttttatggttttttcctttcttgcttttcttgtcagaacgcgcttttgatgctttgctctttttcgaggctctcgaactctttgttctggtacttttagttttatgtgttatttttgctttcttttttgatttagggacttttggtttcttcatctttttcggcatcggtcgtttatgttcgcctttaaacctttttggcacattccatttggaattaagttcttgcgtgattaaatagtgagtatatctgaaggctacttttaaaacacaaaactggaaactgtcaagaaagaattcgttaacaatttgcttaattgccatcagtacacaagtgtttacaaactgatttctctgcatgtcttttatctcttttttcgtctccaataaaaatccagttaactgttccttcgcttcttcgcctgtcggtttctttaaaatcattttgcttgatgtggcagccagatcagaagcagctaaccatccagtgttaggatcgttcatatttgcgattctgagctgccacaaatgatactcataccagctctttagtatttcatct

SEQ ID NO: 12175 - DNA, 576 bp, Diabrotica virgifera
tcgacagcgctctgtattcaacgtttctcccaaatctagtatgttcagttatccatggcttacggtttgcgaaaactgatgtcgtatggtcttttgcagtctggactattttgtctttgagatagatctaagtgtgttcagaatcactatcaactttatttataggaaggctttcttcttctcagtctttttggaattcgttgattgattcgattcggcttcatagaaggataaaaattccaacaccatttcgttcgaccactccattgtgaaagtaccacgatactgaccatatcagcccctagtcgtgtcagcggcgtgtgaactagcaaatttggcgcgaggattccaagcgctggcgggcgtttactgtgacagtgaggcttgtcgaatagaacgcgacgttgccgtgccgtctaaaaatccctatatctacaaaaaccgaacaaataacgttagcaaaaaaacacttcgtagaacaaactcactacttactatctatatcttaaaatcttgatgttattcgatgctgtaagtcgcatttcgtagaatatattttgcactaacagttctaat

SEQ ID NO: 12176 - DNA, 574 bp, Diabrotica virgifera
aattctattaaaaacatctaacaattaaaaaatactattaaaattaatgataaaactaaataaatatttaaaacatttttactcctcttctaaatttaaataatctatatatattttttaatcaatttcataggttttcaatattttttaacacactggcatatactaaatgtaaggtgatatctctaagacttcagctaaaataaatggttttaaaattaaaataatttgttaaatatttataaaattttcttgacacattaactgcattacaaatcaatgaagaatatattacaatgtagtttacctaccaaaaaattatatatttagttataagatgtgataatatgagatttttactagaagtacccctagatcctgtaaaaaccctcgaataactcttggaaaacctgatttttctcataaataatacaattattatattatttgcttctttgaggactcaaaactattctttttcatatttttttaataccaattggagacgtattgatacagtttatattgattgaatcaaagattttgattaaccccacaaaccacaacacaaaat

SEQ ID NO: 12177 - DNA, 576 bp, Diabrotica virgifera
  SmartBlast Evalue=4E-65; Info="Coatomer subunit zeta-1, putative n=1 Tax=Pediculus humanus corporis RepID=E0VA85_PEDHC"
gtagacgtgtaatttttgtaaatttattctaagccattattaattaaagtaatactaaaatggaaggaatactactggaaccaacattatataccataaaaggtattgctatattggactacgacggtaatagagtgctggctaaatactacgataaagatatatttcctacagcaaaagagcagaaagcttttgagaaaaatttgttcaataaaactcatagggcagacgcagaaattatcatgttggatggtttaacttgtgtgtatagaagtaatgtagatttattcttttatgttatgggcagttcacatgaaaatgagctaattttaatgagtgttttaaattgcttgtatgactcagtaagtcaaatattgaagaaaaatatgcaaaaacgagctgtcttggaatcactagatattgttatgctggctatggatgaaattgttgatggaggaataattatagattctgattcaagttcagtagtatctagaatagcattaaggactgatgatattccattaggagaacaaactgtagctcaggtattccaaacggccaaagaacagctga

SEQ ID NO: 12178 - DNA, 573 bp, Diabrotica virgifera
ataccatgtgatgataagagattaaacgacagtgagtgcatttgtaattaatttgaacgcgaaggtatgccgcaggccattttgccaaggccgcttgagaatccttgctttgaagatgacaacaagaggcagttgaagagttaccacgaaaatgaggcggacactatcgacatttctgcagtcaacccagacgatgatgaaacggaagaagaggaagaagaaatagtcgactacgacaatgcaatcgtagtcaacgaccaacctcatctaccacactttggcagtgtctccgtagtcaactcaaatgatgttcattttggtaacaaaacagtgtacaaaggtcctgtgactataaaacaatttgtgtatcccaaaagtgatgtaactagtgaggtatttagtaatttaagtgaagtgaacggatttaacgaactaaacttaataaatggtggtaataaggtgctacatactgaaggtgtagataatgcgagttttgtcaaagaagacctcgaaattggtcgtgacaaaccagaggagagggaacaagagactgattcagtaactgatagaata

SEQ ID NO: 12179 - DNA, 572 bp, Diabrotica virgifera
acggcagtagcgccgactgccatgaacgcagcgaccgcacctcctgggccaccgcaggcagtaccgccacaggtggcggtcgttccgccacaagtggcagtcgccaaagtgacgttgcctccacctcacatagagagggaaaagatgttgccgccttcacagcaaagagggcctagccccattagagaaaatcgggagagggaaagctacagtaatgtcggaagcctgagtcgaaccagcatcgcgacgacaacgcttagctgtcccccgcccaccaccacagtgtcttctagtctagcaccaagcaatttaagcaagccatggacggcgagtgccccttccgtcgccccaacggcagtatcagccgctgtgcctccaacccaactaagtccagcccctccgagaccaacgccacctttgcattccagttttcctgctgctccgatgttcgctactccattaccgcctcctgtgtcgagagctagtcccatgacggtaccatcgtcgatgcctccctcgaatcccaatcccttttcggccgaaagtttgttccagcccaataagtatccaac

SEQ ID NO: 12180 - DNA, 575 bp, Diabrotica virgifera
  SmartBlast Evalue=2E-61; Info=Polo n=1 Tax=Tribolium castaneum RepID=D6WJH0_TRICA
ttccgttcgctaacataatcaatttggtggtatcattaaacatgacccctacacaatcatcagataactgatagccaaatccatatttgtccgagtaatctacccacttcgaaacccaaaccatcggttgggcagaagggtctgtcatctcatcagaaaatgctctttgtctacctggtttcgtctttaacaccgcaactagcattcctttcaatgccatgaaattttctttagcttcgaaattggtatatgcttttgttggatttcctgatggtactaatcctgcagtaatggagttgtgtttcttatgtggggaaacattcatcggttctccattatttatttccatcagtgccctacgaggagccacatcacaattttcaaatctaggagccattgtgagtgcactaacaggcaaactgggaggacaataaccattttgtataaaatcgtgtcttattagcgcgtctacttttggacggttcttcggatctgattgtagcattaatattatcatttgctgtgccgatgaagaaatgtttggagataatttatattcacatttcttaatctta

SEQ ID NO: 12181 - DNA, 577 bp, Diabrotica virgifera
  SmartBlast Evalue=4E-16; Info=Zinc finger MYM-type protein 1 n= 1 Tax=Culex quinquefasciatus RepID=B0W189_CULQU
aacttgtagggcagggctatgatggatgctcaacaatggctggtgaaattcacggggttcagaagatagtacaagataagtataaaaaagcattatattttcattgtgcctcccataggttaaatttagtcataaacgacattagtaaaatagttgaaattcgaaataccataggtactgttaaagacgtaatagtattttttagggagagtactctaagaagaaacctaattcccaatatacctttgttttgtgaaactcgttggtcagctaaatataaatctttgcggatttttgctgaaaattttaaaataatatttaaaacactttttgatataaaaactgggcaaattttaatgaactcttctactacaaaaagagcagctcagttatgggctgccttaaattcctttacgtttgttatttgtctagttgtggcaagtaaatattcaaatattttagagcccattgcaaatacgctacaaggtatttcaattaattttgtagatgttcatcaccacataaattaattaccaggacttgtgaaaaacagcgctcagaggttgattcaaatttt

SEQ ID NO: 12182 - DNA, 574 bp, Diabrotica virgifera
tgtacttatagttgtaattttgtattcttacaacattatgtagggaaaaatggcttaacaacctaataaaggctaagaaaaaaagaaagcatatcggaagaaggttggaatagagccataatttaaagcaaaaaccgtagcagtgatacagtgacaaatgaacttcatgatgcgaccgttattatcgatatagtagattcactatttacctgcatgcgagatatggctaaaatttgaaaagaagtggctgtatagtttgcccgttatgccatacaaaagttgctgctacagcatttatctaatacaactagtgacatttttcacaagagttgttctcttttggttaatctaatgttttctactcacatttagaataatgttccgttttctttctaaaccagtcttctttattgtaaggtccttttttaaaattcttatcttatccatacattatcattgttagtaaaagaagttccaaataaattctgtcgattatatcccaactgatcttgactattaacaccaatgctacgtttttgttagtacgtgtaagatatagcctttaactacatac

SEQ ID NO: 12183 - DNA, 575 bp, Diabrotica virgifera
acttgtctgtcctccgttgcacttatatgatatttttctcgatccagttgggcttcttcaaatggagctttacgcataatatattctttaatgtccgtcaataaatcttcggatacttttaagatatatttaggcagttcaatatcgttgtcttcagtccatttttcacgaataatgtcttcctcttcccatgtaaacattttgcgatatccataattttgaggattagtatgagcatttttataaaattggcccggatcagtaatgaatatgcccactttcgagtacagtttgcatgttttccattttgatgattcattggaaacttcttttccttcttttctgaatactccatttcttttggacttcccataaataatacctttagttaattctgctttagtaatatttttgtcttgctctgttgtgagaaagtaatcaaaaattctatcagaagcatctctagctaatttttgcattgctctcgttggccctccattacacgttagcttcataaattggagttcaaaattactaaaaacttctacagcggcttcaatcagagtatatctgaa

SEQ ID NO: 12184 - DNA, 576 bp, Diabrotica virgifera
  SmartBlast Evalue=3E-66; Info=F-box/LRR-repeat protein 2 n=3 Tax=Aculeata RepID=E2CA99_9HYME
gttctgtgcaagaacttgacatcactgctacagatttatcgaccgaagccttgcaagatatgttgacgaggataccaggactgagattcttaagtgctggacagttaaatggttttaatgattcagtattgaagtcttggatggaatctggaacgtcaagaaacctgatagcattggatttggatagctctgataatctaacagaagaagcaatttacaaatttctgtgtaaacatggacaacagttgctcggattaggtctatctggaatgacccacatcacagattctttatggcaatcagtattaccaattctcaccaacgccaagatattggtgatgggaacacaggaaaggctgggagtgaacatcctcgctgaccaactcatggatagtatagccagaaattgcttgaacctggagaggctagagctgagatgggaccctgacaatctaagattttcagacaagagtcaaaaggctatcgataccttgcgcgtgaaatgcttgaagcttaggtgcctatgtttaagtgacggcagatactacgaagtggtcaaagccaacttcgagagag

SEQ ID NO: 12185 - DNA, 576 bp, Diabrotica virgifera
gaccgacggctttacgtaccctccgaagcacggtgaatggcttgtatcatttttagaaatgaaaatgttgttgatgccgagattcgaactcctgcgctcttgccgctaagctacggccgttcactctttggtagtgaatacacatattattactaccacatttcacaaatatttcgcgtattgatcgtgtgcctattagtattgaatccgttgttactcttgagaagtttgtcattctccttgttttgtttagttgttttcctccctagtattatctctgaaacttaccgtttctgcttcgtcgcgttttaggtattaatttctcttatttaatacatatattttttacttccttaatgaacttaatgtgttcatacttcctctatatctcgccgtacgccgcatacagcgttaccccatacatcgtgtctgtatgctttatataataaataaaggttcggtttttattccacgctgaactcagcgtgcaactaatgtataaacatacagaagtgacgtaccgcgttacgctatacgcgacgtttattggggaccagcgccttactgtgatttagc

SEQ ID NO: 12186 - DNA, 571 bp, Diabrotica virgifera
aattgtgtttatttgatttcatctgttaaattaaaatttctcataccgacttaaaatatttgtttgaaaaattcattttatattttcgtttaatttacttagggtttttggtcagaattttgaagaaacgcttggtctgacatacaatttgggacacgtacctatagctaatatgttaaagaaaaaaagtgatattgtgccgacatgtgcttttgatctggaggtgagtttcgtcggttatagggtatgaaaacaaatacgttcaaataagtccggaattggacaaactgactaattccaagcaacttctattttatagcgtttttcactaagtcaatacttttagagatatttgcgagtgaatatgttcatttttcaacaaaaaaaaaaaacgtttttatacggtctttcgcaaacagctcaaaaagtaggtactctattgaaaaaaaattagcaaatagtaaatatagcttataaaaaagtgaaaaaatggtatatgtgtcaggtctgtagacccagtagaagcagagttattgctaagctttgttttaaaaccaagaggagtaggtaa

SEQ ID NO: 12187 - DNA, 575 bp, Diabrotica virgifera
gattaatgtttgatcataatttagtgccgaagaaaataattaaaaatgtcaaaatacatggagatactaaattttttatttccaaatcaaaacaatggcatatttaagattattctcatgcttcatttcactctctccattttgggtgcaatgggaagttctgcatcaaatatttatgtattttataattttctaattattataatgattttgtggagcacccgtgaaaaggaaacatggaactgctgcgtttagtagttgctctcgaaatatgtgcgtgtcttatagacttgttttatcttattacactgattcatgaagtgcatcagtatgtttcatttagaggtataatatctgcaattacttcattacttaattggataagtaggcctataatagtatcgtatataataagaataaacaatactcaagaaaatgaaagcctatctgaagattttgagaattcacgattccagtctgcgaagaaaagctcactaagatttgaatctgagaagagagattcaatacaaaataatccatttgagagtcaatactttgctgtttcatcacaggac

SEQ ID NO: 12188 - DNA, 574 bp, Diabrotica virgifera
cgtgtagaaacgcgtgccattggtgacactaagaagaacattgtttctttataaatagcaagtgataaacctaaaattacgtcaaaaaatgatcaaatggtctgtgttggcacatgtcaccaagacctggactctagaggctaatatgatcaatagcctagaggcgtttgagatgtggttgcacagaagaatgatccatgctcctaacaccctggacagcggatctgtgttaaatacagcaaatgttcgtggtgatgaacaaatacggctgatgtttattggttctaaggtttgttctaagtaaggtgggatgaaaatttcgtagactgacaaatagatggcactactggtattaaatccatatgatttttagtcaaccctaaccttcaaaagatgcgtctataaatttgacagctgccgaactattagtttgtgagatttagcattttgagtaaagcaaattgtgttagtttaaaaatggataaaaaagagttgggtgtctttttgcattgctttttggccaaaaaaaatattgaaatgatgctgttacccacaaaacatcaaaaaagtccac

SEQ ID NO: 12189 - DNA, 576 bp, Diabrotica virgifera
  SmartBlast Evalue=2E-12; Info=Probable RNA-directed DNA polymerase from transposon X-element n=1 Tax=Drosophila melanogaster RepID=RTXE_DROME
tttgttgataaatgattatgacatgtacaggatgctccattaagcaccctgttttataatgtagctattgctaactttgtggcattacctctaatatttacaatatgttattatttacaaagatatgtacattactaattacttaaacctattaattaagtctcttggtttgaatttttttaattcttctttcttcatgttcatgtaagtcttcaaacaaccgcttggctaactcgttaggatgttcagacactctttcgcgatatgttgcactatattcacttatcacttcttgcactgttggaactgcttaagtctcgttggatcacgtagttgggtacgtagtatggagcatcaagaatcagccttatcgtcttgtttggaacctctgtattatatttaggttgctattagaagctgctccccagagctggataccgtaggtccaaattggctttataatggctttgtagaccagtagtttgttttctagagacaacttcgagtttctgccgataatccaatatagacggcttagttttagtcctaactgtttgcgttgaagatgccatagtc

SEQ ID NO: 12190 - DNA, 574 bp, Diabrotica virgifera
tctcgccctttaataccagaccatctcgcatataattttattttagtattaaatgctttttccaaggaacatgtcttgtttgttttatttgtttagtttttaaccgttgtgatagtggcacttgattgggagatatcgagttaaatcattcagactcacacaacgatttttttgactagaccaatctatatcattagcccatggttcaagatgtcattgctcctgtcaaaaaaccatgtaggcacacaaaatatattttcataaatcgataatttcggttacatttttagctgttgtatcttatacttagagcaattgacccaaaacatcagatagataacttctaaatttattatcggtgacaatgaatatgtcactgtgcttagtgaatccttttttggcataaaccaaattctccacaaacgtctaattcctgataaaaatggtaaacagtaaacacgatacagtttttgcatttatttctttatcttttaaagctgcctatcttctagtgatgttggcgaccacattgacatatcttattctattcgcttcagctcgcaatagattagct

SEQ ID NO: 12191 - DNA, 576 bp, Diabrotica virgifera
cattgtgttgggagtttgtattctgtggtatagttaaggggaaaggtgcaaaatgtcggttgtcaaaattttcaatgtgttttgaatgtattagttcttttcgaatcctgagaaaactaacaggtatttttaaaaaatttaaaacgcagaatgaaagattacgttattaccgagggcagaaactctcttagaataaataaaaagtttcttttgaatgaaatatttgcaattaaaaatcactctaaattttctctttcattttcactcctgtaacttattaaaataaacattataaaagttttcagggactttcgaccctcagtaataatgtagtatttcattaaacgtttgaaattttaaaaatatttattagttttctcaggattcgaaaaagatgaatacatttaggaagcattgaacatttgacacacggaattttgcgcccatgcccctaataatatttgctctattatccattcccatattaccgacattttattaataattatgtttgaagtttattcaaaaacataatctatcaataattttgtcaatttatttagttaaatatttctt

SEQ ID NO: 12192 - DNA, 571 bp, Diabrotica virgifera
  SmartBlast Evalue=1E-19; Info="Cutilin-1, putative n=1 Tax= Pediculus humanus corporis RepID=E0VID3_PEDHC"
cgtcgagttgttaaggtggctgtggagtggaattcagttgtttaagctgtcaaaaaaaagccaaaaaggcgatgttaccgttcgatatcgctggtgtacaataaaaaacgaagacaaccgcgtacacggtggatttaaataatttgcgtgctgtaggttctcgtcgcagtggtactttaaattattcatgtgatttaattggttagaagattagacctgctagttttttttttttatcataatgaggaaattaacaacctaactgcgatgtcactgcacttaaattgtctggctttactactctgtgttactgcctccacagccattgctaccatcatcccttcgtcaacgattgcacctgaagttgcgtcggatgttcgagttcagtgcaataacgatcaaatcgttataaacatcggcaccatctcaggacgatttaatggtatggtttatcccagaggactgtccaaaaatagttcttgtttgggcgaatggatcgaaactaaaacacccattgaatacacgctacctcttcgaggctgtaacacaatgagcactgatttggatgacg

SEQ ID NO: 12193 - DNA, 575 bp, Diabrotica virgifera
  SmartBlast Evalue=2E-37; Info=Acid phosphatase-1 n=1 Tax=Aedes aegypti RepID=Q17E64_AEDAE
ggccacggcaccaaaaatatttcaactgaagatcgtggaacattggtagcagttgttgttatgtacaggcatggggacagagcgccccttatttcatttccacgtgacgaatattacaatttgacatactggcccatgggttttggacaactgacaaagtatggtgttacaagactttacaatcttggcaaatggtttcgtgaacggtacaagaatttcctcagtgaaacgtactctccaaacgagatttacattcattcttccaacatagaccggtgtttgatgtcggcaagtgcagctctggcaggtctttatccaccaacaggttttcaattttggaatcctcagttatcttggcaaccgattcctgttcacactgacaacaaaaatcacgatgagatcattactgaaaggcgaaaatgcaaaaagtacgaagatattgttctaactctccaggaagcaacatatccgtcttacgaacgtaattatacagaactcttccaatttgtttctaataaaacagggtggacagtctcactttatgaaataaagacactttatagcgttttaaattc

SEQ ID NO: 12194 - DNA, 574 bp, Diabrotica virgifera
  SmartBlast Evalue=4E-56; Info=Retinal rod PDE6 delta subunit n= 1 Tax=Rana pipiens RepID=Q8UUY4_RANPI
ataaatgtaatttttattaaaattgtaaatgctggtatgaaaacagtctgaacacttaaacaactaaaaataacattgtatggctcatattgaagccgtgttatacactacattattgtatactgtatctacacataaaatacacgaactctcgatgtggtaatcaaaagatcatcgtcgtaaaatttggtctcaatcactatgttgccattaagtaccgaggcgggcatcatctgtgattctggtgcggcctccataatggattgccatgtatttgtcgactctgacataacaaaaccaaattcaaagtaccattcttcaagacatctccctttaaatagaactttttgttccaaccggaatttttccatttgctctttggagctaaagttaaactctctagatactgcacgacatttgaggattgtcttaggtactcgagcttcatgttctacttctgggaagcttaagtcttcggaaccttgccagaatattttaccaccgtctgcgtcccgcagacagatccaatttatttgaaaacctttcaaaatgtcttcagaatttttagcagctg

SEQ ID NO: 12195 - DNA, 575 bp, Diabrotica virgifera
  SmartBlast Evalue=0.000000003; Info=Laccase-1 n=1 Tax= Harpegnathos saltator RepID=E2B9K7_9HYME
gttctacttgcacgtgtcacgtgtatatcaatctaaatcatcgtgttcttgtggttattttaaattaaaatatttttaaattttgtggttaaacagttttaacaaatatcaattaaaatgagcagtgcacgaggtaaatggagttctcaggatactataagttttcttgaaatgtacgaacaacataggtgtttgtgggatgttcattctgagggttacaaagacaggaatacacgaataaatgcatatgaagctatggcaacagcaatggaaattgatggattcctggtagaggatgttaaagctaaaatacgttcactgaggaatgcttacaccttggaattagccaagattttaagaagcaaaaagttagcagcaggtcctgatgacgtatataagccgaaattaccatggttcccagttgctgatagaattttgaatggagtggttcaattaagagagatacaaccaacagagattggcgttgcagattcagaaacacaatcaagcgttaacgatgtcgtagagactgttatggttgatcctactccaccaactgctgttcccggcgttag

SEQ ID NO: 12196 - DNA, 573 bp, Diabrotica virgifera
  SmartBlast Evalue=4E-46; Info=Sid-1-related C n=2 Tax=Tribolium castaneum RepID=A7YFW2_TRICA
ctagcagttgctgtcgtcttagctatgattggactactcgaaggaaatgtctatttttggacaatattcgtgattatgcacatcctgatgtgcttctacttaagcgttaaggtctactacatgggatgctggagtgtgcgagatatatcgatgcagaagttccgtcaagtttggatctacgatttttggtctggaccagtaaatgtcataaaaccgtgccataaagctagattcgtgcttctcttcttgggcaacttgtgcaattggggcttggctatcttcgccatctataaacttcctaagaactttccagtcttccttttggctatatttatggccaatactctcctctatttcgtcttctatatcgtcatgaagtacattaacaaagaacatgtaagaattttaacgtggaatcttcctttttatgtcaacgttgtgtgcagtatctgccatgtggttcttcttacataaagcaatatcttggaagaaaacggcggcacaatcgagacaattcaacgtagaatgcaagctgttccatttctacgactcccatgacatttggcactttct

SEQ ID NO: 12197 - DNA, 571 bp, Diabrotica virgifera
taatcaaagtaacgaatactgtaaatgattactttatacaaaagtaacgatatgtaacgaatactcgaaagtaactataatcaacatcactagtgtgttcctgtaagttttccgttgtatcgtcaaattgtttagttttctacttatcattgatatttatgttgatatgtgatctgaaggaaccactacactgtaaagataccctagtaagagtggaatcagttcagtgagtcaaattcagttcagcgcagaagtcgattaacaaatttaagctcaaatgttttcactttggaaacaaagtttggtgtatttgatttacgctagtcatttgatggaaaacaggatttttttagtcactgttatcgttgaattcagaattcacattacagattttagaatctacgctgcaacaataatcgacgtacctttttgcgcatttaatcgttagttttagcttggaatgtattataggaatcgtttctgagctgagaatcaatgtcacgtaatcggatcacacaaaggaacataaaagttggatccaactctatacaaatgtttttttagtaggagc

SEQ ID NO: 12198 - DNA, 574 bp, Diabrotica virgifera
  SmartBlast Evalue=5E-28; Info=5'-nucleotidase domain-containing protein 1 n=1 Tax=Harpegnathos saltator RepID=E2BZJ5_9HYME
ggatgaatggttgttttacatagactgtgtgtgcaaaaagaaaaagtgaaactgtagtgcacaaactgtatctccaattgttttaagtcttccagaatgtatagcaaaaacgtgttaaagttagtgaggccagtgatcaaccggacgttttcttatactgcgacccagcggaagctaaacagtgatcgtgcatttaacattaaccattatgattgtataggtttcgacctggacaatactctagccaggtacagaataggtaatatgttagagctagaatatagaatcctgtcaaaccatttagtaaaggaaaggaattacccaggagatcttcttctgcaacctgtcgatcccaacttttttataaaaggtttaattgtagacgatgaacatgggaatgtgattcgaataggtccagatggaacaatcttacaagctacacacggcaccaagtggctgactccagacgagattttacagtattatcctacaaggcattggagagcaactgacttgtttgtccaggatcctctacaaacctggaatggcccatactcagaaaaaatgaggacac

SEQ ID NO: 12199 - DNA, 552 bp, Diabrotica virgifera
  SmartBlast Evalue=9E-10; Info="Juvenile hormone-inducible protein, putative n=1 Tax=Aedes aegypti RepID=Q17DF4_AEDAE"
gcttttggaccatatcacgataatggcaacgacatactaattgcaggtatgcaatatgatggaccttacaaagtttatcttcatgctgactgttggagtaataatattatgtttaaatataacgattacttagaaatagatgatctcagaataatagattttcaaatgtgcttcgtgggcacacccgtacgacttaacctacagtttattttccggcgcaggcaaagaagcacttagaactgacgaacttttagtttattaccaaagtctaagtgaagcgcttaagagtatggcctggacccagaaaaaacatatcctcagactgctttcaaagaggaatggaagaagtggaataagttcgggttctttataagtattttagttctaagtgctaaagagaacgctaaagcaaggatgaaggatttggtgcaatatatgtacgacaaacaacttttgtaatattttggatatttatttaacagaaagaataatataaatgtagaatagatgtaaaaaactggacttggaattttatcatgagataggaacatg

SEQ ID NO: 12200 - DNA, 573 bp, Diabrotica virgifera
  SmartBlast Evalue=1E-38; Info="Phosphopantothenoylcysteine synthetase, isoform A n=12 Tax=Drosophila RepID=Q7KN99_DROME"
agtctaacaatttttggaacaaatgctatgttgtatttagctgctgcagtttcagacttttttattcctcctaaccagatgagtactcataagatttcatcagatgctgctccaagtatacacctgcaattagtaccaaaactactaacacctattgtgagtgactggcttccacatgcatttgtagtctcatttaagttagaaacagatcaaaatattttaatcagcaaagccaggggggctatagacaagtacaaacataagttggtaattgggaatatgctacataccagaagaacgggagtgatctttgtgaaacctgatacgagcgaagaagtgaaaatcaccccagaacaggcggcaagcggaatcgatttagaagatagtatagtaaccaaagtgatagctgagcacagtttatttattgaacaagaaggctgaattatgacagttttaaagcataacagatatactagtatttttaaacaatttaaaattttactatgacaatttttgtagatttgttttgtaattttatatttcaattatttttctgtgggtacctattttact

SEQ ID NO: 12201 - DNA, 574 bp, Diabrotica virgifera
ctctttctcgtcttatctcatttatgtctagagcggggtgtttattttcatttgtttttgtaaattcgtaacacttccatttttgtaagaataaatgtttttacaaaatatatttcgctttttcattggaaatactctcgaaatgtaaccaaacattttttgcactctttttttgaaaatccattatgaaattagataattttaaaaataagtcgaaacaaattacagaagatatagttaaatgaaaaaatgcatccactcgaggcaaacaataattattattatttcaaactaacaaagtaaaatattagattctttttctggtttctggaccatcattctgcctattttttttatttttatattatatttgatttctttttattaccgttgtagtaataaagcgataaataatagtgtaatagttatttatgtaccaagtcagtaaagtgactctttatcgaacgagtctttatgttacgagaagagcgagcgtagctagcgaggcgagtaacagacgagttcgataaagggtctttactgacgtggtgcatataaaattttttcgccaaca

SEQ ID NO: 12202 - DNA, 573 bp, Diabrotica virgifera
  SmartBlast Evalue=1E-23; Info=Protein split ends n=1 Tax= Camponotus floridanus RepID=E2A976_9HYME
cgacgttttctaaccgtttaaggtcctcgtcaaaaactgaccgttttgccatcacagatttgactatttcagaaggctggacttctttcaggtccagatctagaattttgtgcctctggcggaatttttccaaattggcgtctatgagagcgagagcatcaccaccagctgcgctcagagctctcgatccggaccatttctcgtacttttcgtccagcgactttattctctcctctagggaaggactaggtggggtaatgtcgctgtcgctcgagttggaactgagactaggaggccttgggggtggtgaagcaggcggaggcacgtggactgggctaggaggcctcggattggatattctcgggcttgtcacagctggaggtggactagaaaggatgttgtctttttggcccttaattccggctactgatacactccccctgttcatgatttgcgcagcaaaccttggcaacggtagtgtaagaggaccctccctctccctcggcactcttctaggttcagtgggcgggaaattttctggtctctcatcacacagtggagtacctggcctag

SEQ ID NO: 12203 - DNA, 575 bp, Diabrotica virgifera
  SmartBlast Evalue=7E-33; Info=Proteasome activator complex subunit 4 n=1 Tax=Camponotus floridanus RepID=E2AKX9_9HYME
actgtagatcatctctagttagaaggtatttcttcttcaagagttgaatcaatgtcgtagcacatttattgatcctagttggttctaaatctggaatgatggtcaattcatagaacaattttatcaaggctatatgatcctccttggaaaacttcattccatatatctttatatacttcatcagcctggacgtccacaaagcacagctaggtctcatttctctagccaaaacagattttatcaaattggtcttaatgtccaggaacagctgtgctgattccacctccaactcgtcagcataaggaagtagcttattgtagacgttttctttctgaaatttcggatttttctgagaattctctgtagaatctacatccatagcttcttccattgtgaaaagattattttttcgatatttctcgataccgcacactacattagagtctgtcacaacacgagtttataattacgcgagctgttttgttcaccttcacaattaaaaaagtaatgttaattaaaagacgtctatttttgttacaaagatgaaattatttgttcaagtcatcaccgttaac

SEQ ID NO: 12204 - DNA, 571 bp, Diabrotica virgifera
atttcgattgtattgttgttcttgctaattttcataaatttggtctttttgttgttaagactaagactctccatctcatggttaggtccaggacttattgaccgaggtattatacatcaaaaattcgttaaaatatgtcaagtcacctaaattttttctgggtaggatccttaaatttgtaatcccgtgaaaaatggccattaccaatattttagcaattaataattttgtggtcgagttgaattttcgtgggtaataatactttataaaaaattttcttaatacaagtaaatccccaccaattatgtagctatgactgttgataatgaaaatattttcccaagtgacgtacatataatttcaaaaatacttgccgattggaatcgaggtaaaaatgatttccttatttaaaggaaagggatcgaaagttctcgtagaggtgtgcaatggttgttttgttttggtattgtaatagtgtgggaagggaaataggtcttgggcccaccatttaaaaataatattactttccttgtgagactttttttattcagttattcatgtcgagtcgggc

SEQ ID NO: 12205 - DNA, 572 bp, Diabrotica virgifera
ccaataaaatgacagcaatgttagttaaataatgcttttcgtacaaattttatttagtatgtttaacccagtaatccaaataaataaattactatgaattaacaatgtgtcaattttaagataatttaagataaaatttatatatctattattcaatctagataaaattactatcgttatattactttttaataaatgaaataaaataatattatcattgtcccaaaaaacactattgatgagttgatgaacgatttttgtacattacatttcacccttaattaaaattaacatactgacatactgaaattaatcatgaaatttataaatattatgttaaacattgttacgaaaataaaataaacctttaaatggtatacccatacccgtataggatgattcaaaccacatcgttatgaaaattttactcaatatttaagtacacttagagctaaaaacaactaatgaaaatattctaacattcacctctactgtgcgaagttaagcaaaccgcagatcaacatttcatccccaaataaaatttataataataaaatattttgtgaaactaa

SEQ ID NO: 12206 - DNA, 575 bp, Diabrotica virgifera
  SmartBlast Evalue=2E-32; Info=Apolipophorins n=1 Tax= Harpegnathos saltator RepID=E2C0B0_9HYME
attggcataaaacattggcaagtatagaaccagcgttcttgaaattcatccattatctagaatctatcgcttggagtacaggaagtgaatttttagatttcctatatatgagaaaaaatgagatcatagaatctccgtatttcctacgattcaccaaattctctcaagacatcgataagttctataaagatataactggtcccaacacgtttgccagtatatacaaatatgcccaagtaggttggaacttcttaaaggagaaatacttaacagtaattccatttggaaaggagacgatggatgttataaatgaaatcttggaagagttacaacaaatagctgaaataccgtctgttaaattccttattgcgaaaggttgggaagcctacgattattttaaatattattacgaatattttgatatggagacgaaactgcatggtcttattcgtactgtttatttcaagatttccgatttatccacaacagctttggaaaatggaaaatagacaacgagtaccaaagactaaatttattttcgaaccaaatgatggaattatgctactgcaacagaa

SEQ ID NO: 12207 - DNA, 574 bp, Diabrotica virgifera
  SmartBlast Evalue=1E-35; Info=Peripheral-type benzodiazepine receptor n=1 Tax=Bombyx mori RepID=Q1HQB8_BOMMO
gaccagccttcaactaagtaatttgaagaacatactaagtagataaactagtaaataataagcatatacagttaataaactaagtatataaacacaaaacattaaatacttaaaagtttctagacgaaatgcaagaaattaattggttcgcagtggctttcatagttctgccacacactggaggacttgcagggggcattataacgaagaagaatatattttggtacaatggcctaaaaaagccctttggcacaccaccaagctggtcatttagtccaatttggacgattttatatagtagtatgggatatgcgtcatatatggtttacagagatgggcatggttttgatggtcctgctgggttaccacttattatatacggaattaaccttttggccaattggacctggacacctatgtttttcgcaaggaagaatatgaaattagccctctacaacatgcaacttatcaacgctacagctctttgtatggcttaccttttctacaaaataaatactacagctggtcttcttattataccatatctcacatggttggtcatatcaacgtatct

SEQ ID NO: 12208 - DNA, 574 bp, Diabrotica virgifera
ttctgtggcctcgagatagttgtttcgcatcgatggcgccgatggcgcgaagtcttttgtggagagaccattgccgttggagtccatgctttccctggatttctcagaaattcgaataaattcagtctcagtttcagttactcttgattttatatatctgtagttttctagatctttcgtataatcgttaacactgcctgtagtttgatattgggactgcaagtgcgaatatctgtagtcgaagtgttgttgttgggtgactccagaagatgatggtatataagatgcaggaattggaggaggagggtacgaaggaactggaggataactgtagacgttcgtagatgtctgttgcgattgagaccactgcgtataagagtggctagattggggtggaatgtggggattgtattgagcttgtgtaggtggaggatagtttaagttgtcatagtaccactggtggtcgcccataatttatgtatggcgatgaaaaaccatcgttcttttacttaatcacattattcacttcttacatgttctgtttattacattaaaatactcaaaaatataaatt

SEQ ID NO: 12209 - DNA, 571 bp, Diabrotica virgifera
  misc_feature (535)..(535): n is a, c, g, or t
cgggacatcttgtgtagtatttaaaattaattgtttgttcattctagtagaacaaatacactttttcggtgactatagacgttactatagacgttactattcacgttaagaatagaacattgcggagataaccccatgtatttcttatgaatgatagaagcgccgatgcgacgccgtactgattagaatgaatcgtatgtcggcagtcgagtagccacccgtgcccgagaggtttggcaacactgatctccataagcgtaacgttctattcttaacgtgaaacaaagtatagattgtcaaacgtgtctagaagcttatggcatccgttacccttcgttttgattcaccattcacctagtcactcattcccactttgcttaacaagtctctggttagtgtctattggcagattgtgaaaacctatgaattcgcagtaatgaatcatcagaagtgatttgaaaatcaatttgcttgaagagatagtttgaagtagcggcattgggtgtaaaacatgggtagcacaagagtcaaatgngtcaactaagatagaaacgccataatatctataaac

SEQ ID NO: 12210 - DNA, 570 bp, Diabrotica virgifera
  SmartBlast Evalue=4E-17; Info="Solute carrier family 2, facilitated glucose transporter member 8 n=1 Tax=Harpegnathos saltator RepID=E2BLV7_9HYME"
gtatggatgatataaaagagcattctatatactttaagtagaaatataaacctaaaacgaagtgagtaatgccaataccgatcgatgaaattaataacatcggctttcttccagttctttcaataatacaggttgttagaagaaaactggacagttctattgatcctactatgatcgacatatgattgctatcatatttggaaccagctgcaatgaaaagaggggccagaaattgtaaggtcactagtactcctgataggggttgcatggcgactggaaccagagctagcattagagcatatcttctttcttttgtagaaaatacagatgccatactatttgccgaagtacctgaatctttgcccgtatcgtttcttctattttatacatatctaccataatttctttttcagtcttgttgcttcttagtttcattaaagtttgtaaacattcgtttcttcttcctttcgataatgagtacactggagattctggagcaagaaagaagaacgccaagaatagtattagaggtccagaaagtagtaaagtataaattctaacactaaaaaa

SEQ ID NO: 12211 - DNA, 574 bp, Diabrotica virgifera
  SmartBlast Evalue=6E-53; Info=Mesoderm development candidate 2 n=1 Tax=Culex quinquefasciatus RepID=B0WUH0_CULQU
cttgttctaatagataatctttcgctacccaagcttgagatccatctttaaacaaaaatatggctcgattatcatccacaaggtatctttcagcttgtatatgattgttccacaggctcgtctgccacagtttagtcagttcttcagtctcatctctacttggattcccggctacttgaataaatgtcattaatgttctacctttctttgtcgcttgcaacatgtcttcaggattatttggatccatttggttgaggtttatctgaggcattggacgaaggtgttctggtagttcatctggttctaagggttcttcatcttcctcccactgatctaatagtctttccatatcagcttcagtgtaatctcttatgtccttttttgcccattctggcttctcaccatctttagatttctttcccattacatggaagcccagcaagagaacacaaaatattactaatttgaccattttctgaatgatgtggtcactgcactaattggaagttttatcttaaattcactaagtattagaaaaatgatgactgaatttttttaagaatgagaaataaac

SEQ ID NO: 12212 - DNA, 574 bp, Diabrotica virgifera
  SmartBlast Evalue=1E-31; Info=C-type lysozyme n=1 Tax=Glossina morsitans morsitans RepID=Q2PQQ7_GLOMM
attatcttgtctcaaaacatttaaaataactatatcttccgtaagagtgtaatagtcgaataaaatcgttgttaatatgaaaatgattttagttgttctgcttcgttgtttcctgtttaataatgttgtttaccaagtagatgccaaagtgtataccaaatgtggactggcacaagatttggttaagatcggattcgatcggtcaatggttggaaactgggtttgcatggtagaaagtgaaagtggtagagatacatcgaaacagaaagctaaagctaatggagggaaagcattaggattatttcaaataaatagtaaggactggtgtacatttggaaaagctggaggaaaatgtaatgctaaatgcgaagacttccttgatgatgaaattaccaaggatgcaacatgtgctaagaaaatccaagctgagttaggtttccggtattgggatggctggactcaaagctgttacggtagatcatacccgtccaccatagttccattgtgctttccaacagcaggatagatgggattagtaaacaacatcatgtatatatcatataatttgcgtata

SEQ ID NO: 12213 - DNA, 573 bp, Diabrotica virgifera
  SmartBlast Evalue=4E-54; Info=Mediator of RNA polymerase II transcription subunit 25 n=1 Tax=Camponotus floridanus RepID= E2A8W0_9HYME
agaaccggaagcgcatatggtggagagttgcatattaaaatgcaatgtttctgcactagtgtggtcacgtctcgtttctgctgcagttcttcgaaacaatgtaaggctgtagctaatccttctgcgatatttgaatgagattctcctttgcctccagccaaatctaatttatcaactgcactcaatagttttgtagggcttataaatggaccaaatgtatcagtactgagatgaggcaagcaatctgcagcatggaacacaacgatgccatacatggaattagcattttcagatacataatttgcatcatctatcttagcctgattgaaatattccaaagaaggtattatgtagctggttttaatatcatttatgtatgctccatttacagcagttccttctataagaaatattacatccgcttggacaccatgctcaactgaacaaactaccatttttgtgtttgctaatattcaagttacaagttatttacatatcttgattctctaaacaaatatttatttaaaatgttcttatttatcaaaattttttttattgtgatttattttttag

SEQ ID NO: 12214 - DNA, 574 bp, Diabrotica virgifera
tatcttgttattcggtcttattttgaccatttaggcattgtgtaaatataatacaaaagcggcacatcagtatcacccccttttcctctcctttatctttcttaatgatgcagatccttccctttggttgattatttgtgttcgctcacatctctcttgtgtatgttgttttgtgtccaggaagggtaatcagtgtgtgctttatttattaatttttttttagaactacatacattgccttcaactgtcattcttgttatatttcccttattctgccttgtccagtagtctggttgatagtgccgtagtctgtttgataattattgtgatgaatctagtgtcgatgttaaattttactagtattgagttatttgtgcgatgtgttgtccatggtatgcatcattttgtaatagaaccacatttgaaatatttctacataattcatcttcacgtcatccactgttggtgacggacccaagtaattgaattgtctaaccatttcacaccctcccacggttttcacttggttcttgatacatcgttcaaagctttctcttacacaagagctgtaaat

SEQ ID NO: 12215 - DNA, 573 bp, Diabrotica virgifera
tatatgacgtaagcatgaactgccacaaagacacaagcacaaattagccggggaagtactccactatactacaggtagaagtttttcatcttgagatcaatcatgttattatctcaatggcggcaattaatggacgtaaatagagaagcatataacaatctttcttgtacaagagttagcaatacatctgataagtttaagtccgataagtatttatccccctccatccgatggcgccactatcgcaagagaaatctactatcgtgtaatacattcttgtaaacggcctaagtcaaaatttcagccgaatcgggtttcaacctggttgcctgttggtttttgataagtcacgctaagatgtcccgaaaacggctaccacggaggatgacgtcaaagaaatccgtgatatcatattggcagaacgccgaccgaaggtgcacgagacagtaggcatctcaaaatatcgcgtgagtcatatcctgcatgaaattttgggcataagaacgcttgtcggtgtgatgggtgcctcgtttgctcactccggacagtaagcgcaaccctgagaccacttaa

SEQ ID NO: 12216 - DNA, 570 bp, Diabrotica virgifera
  SmartBlast Evalue=5E-12; Info=Basement membrane-specific heparan sulfate proteoglycan core protein n=1 Tax=Camponotus floridanus RepID=E2AWE3_9HYME
tattaattaaaatggttgcaaaaagaataaacctaattgtgctgtctatatttttaattttacaatcttcatatggtgatgattataccaaagaataccctaatgataccgaagatgtccaaggccctccagaagtcaccttgactacgcctaggcgggtactagtccatctaggccagaatctgaatatcaactgcagcgccactggcgctcaacctatggaaatcggatggaaagcttggaaacgtgacatgcctagttcagtttacaccaataaaggatacattaagttcaacaatatccaatccgaacatgccggtatatattggtgcatggctaccaatccagctggtaccggaggtgctatagctgaggtcatcatagaaaataactaattgtcctcaaaaagtaaatgtgtataatatacaataaaatataaatttacctacatctgtatctataaaagaccgaccgaaaatgcaatattttattcgttacctatgtatgtatattttaaaaatgcctttttaataacagaagataataaaaaatagtatgagtatatgaact

SEQ ID NO: 12217 - DNA, 573 bp, Diabrotica virgifera
ggcgtctgtgtacagtgttagtgcgttgttgtcaattttaatttcaatatttggattaaaaagcaatctttaaagttttcatctaaaaaattgtattattgtgtatctgctctcttgaaattttgataaattacgttttagaacgtaagggactttttgattaagggttacacacttcgcattttctgggaaaattatgaccttgaaacgtcgtgtcaacgtaatataagttacagtggcggctcgtttaaaaacacaaatctaagttcaaagaaaataatattttgtttatgaacattttaagaatggaaagcaagtctagagaaacattggagaacattgttattagtggagatggaacaacaccccaatatatgattcaaagagtcccagagaatgcccaacttttaagtcaagaacttttacaacaacaacatggattagtggtagatttaggtggaaacgactttataccagttagttatgcttctgaagatttactttcacaagatcttacagaggaagatagaaacttagccgctgctttagtagctgtacaacttagccaacaac

SEQ ID NO: 12218 - DNA, 575 bp, Diabrotica virgifera
catctaaacatttatattaatttctttaaatgcaccatatcataccgatttcgatttttttgatcgttttagcagcctattcggtaaaatgcagtcatacaaaacattgacacacaatttctagtccagttttcagtatattattgtcgaagttataacactgaccgggttttttttacaccatgcttggggtttaagggactcactgtagttggagtactagaacgatatttggtacgtcacaaacaacaattgactcgtttttaggcaatattcgcataggaaatgcacatttccagtttccgtaagactattccagttttttggtgtacaggtctattctgtaactacaaatagaatagaaatgagtcaaatcgaatagaggtcagcaagtcggatcggaatttgaagaaatactatgggaacgtttgccttgggtagaagttgatttcgactagacaagccttgtcgagatcacatttcgacatcgtagttggtcttgacgcttgcgcattagcactactattgttgttttgacgtttatttgttaaattagtgagcgattttagtctgtg

SEQ ID NO: 12219 - DNA, 573 bp, Diabrotica virgifera
aaatctccgaagtggggtatccggtttaacacgacgaaaaaaagagttcaaagttgcttctactcaggataatcaaaattgttgtcagtgcacatgctaccatcgcacgggctctaatgaaaacaattcgattgttggacagaatatggtaggagctcaggaaaatgctgatgacagggaacgagaaaatgcacctagtccatccgactctcctgtcaacattttcgatggtggggttcccagagaagaagaagcagcgatgtgtgcttcaagggttacggaggtgaatggtgtaagagggatatatggtacagctcctgccacaagttcaattcccaatataataattagtgcgccgtttattgatcaatggatgagatctcaacatgaagattgcgaagaggcagcacgactgcaaagggcccgagaaatcgaggaaggtgtaatagcacctgcaaatttccgtttaattcgaagagtccaattattgtgttcagataatgaagagtctcaagcacccaggaggttacaattagtctgtccccctgatctcagcgttgaatcactcagagc

SEQ ID NO: 12220 - DNA, 573 bp, Diabrotica virgifera
ctaagaaactttaaaatgcaatataccagtggaaaaagaagatatctgagtaaactaaacatcatttacaagattgagacttatgcttcaagatgattataacagtttttgggaaaaaatgatattacgatacaacataacctcaaaatctgctgtgtttgctcttttaggttaggacctcttaaaaaccataacaaattctgtatattctgatctttgggtccgaatattggtcaaattttatcggcatgtttctacatacttcgcaaaaagtatatgcaccttctgtagcatgtactttaaacgagatctaataattttgttagttacgttatgaggaagatttattttataagctcgatatgtcacataaggtgataagtgtaaaaagtatagatatactctggaaaacgctattggacttatactcttactacttatcaccttagatatgtttgaatagaaagtattaaaagaaatgtaatttgtgttcatactctacagaagctcgaaacaaatgacagtcgatgaaaagccctagtcaagggacaacccattcgcacacaatccggg

SEQ ID NO: 12221 - DNA, 574 bp, Diabrotica virgifera
tatcattctatccgccttggtataagcacgtataagagaatcattctggacctggttcaaatagtgtgctgtgatttcattttagcttctaatagcaagctgaagaagtcgtagtggtatagacctagcattcgtaggttagctcagttataattttaactctagtgaattagactatacaaaatcatgaagcttcttggaaaagtcctggtaattttattgatagggtacagtaacatggagaatattgattctaataaatttgatccacagaatatcgattttgacagatttgacaggcataaatttgatattgacagatttgacatgccgaatattgattttggggaaatacataaaagaatcaatgatatacaagagaacaaactaaacataccggaatttaattttaagccatatgatattaatcaatttgatattaaccaatataagccaataagtttagatggtagcaatttttgggaggacgtaccgaaagatccgaatgcatatttggaataccttcaagaggaatgtagcaatgctggacatcctgatatattaaatatgaata

SEQ ID NO: 12222 - DNA, 572 bp, Diabrotica virgifera
  SmartBlast Evalue=2E-14; Info="Galactose-specific C-type lectin, putative n=1 Tax=Aedes aegypti RepID=Q16PK9_AEDAE"
atattaaatattttattggtaacagtttgttacgttttcataaccgaggcaagaagtagtgatacttggaccacacagaccagtcccaagacagtctttcacttcattaaagaaaagtacaaatggagccaggcgattaaagcatgtcaagatcagggtgcgacattggccagtattcaaacaaaagaaaaaagtgatgccatatacaacttcattgtttctgaaggtattagtgcagcagacgtatatcatgctatttggacatctggaaataagctaaaggacaaagttaactggttctggccagcccaggagccagttgtttttactaactggggaagaggcgaacctaatggtccgacaacagatcactgtatttctttttataataacggatcagctgctgtatggaatgatgtaacttgtgaaagctacgaattttaccccctttgtgaaaagcccgtttgcagcgcctttaatccacctccacctccacctccacctaaagaaatcacagaagtacattgtcattgtcactgtggaaataactgccaagctgatggattgggaat

SEQ ID NO: 12223 - DNA, 570 bp, Diabrotica virgifera
aaacaagaaagcgtacatgatcaataaaactacaaactaatgttattactatttttctttttttttaaatctattttattttttttttattaaaaatggtggtaatacattagtttttttttcaaaaataaaaacatgcaaaaactttggtagatacttgttatcgaacagtttgttccctacatttgaaaaaataaagtgtatgtacaatttttttatttatatataaagaacacctctaaaaatgtataagtagataaattgaaagtactacatattttcgtaagttcggttaactaatcatagcgaatattttaaccgataaaaagtttataattaccgaatatataaatagaaatgtgtttgcgtggcaatatactgcacactttgtcttaatgagtctttgttttgataaattttgctgtggttattaaaggcgacacaagataaacgcagctcaatattacttcttaattctgtatcatcatttaaacaaacgcaatgaaaatgctagtgcaattttatcataaactattttttacgacttttgatcaaataaagaatacttaa

SEQ ID NO: 12224 - DNA, 566 bp, Diabrotica virgifera
gattatacaggcatctgtcatttgtcaacccctttcattccggttcagaccctttaaattttaaataaggaatgttttttctttccatattaaaaatatatcaccccttaaaaaatttaaaagcaacgcctacgtttcgctaaaatggcatttttttttctgtcttatcgaaaaatgcatttgtaataaaatatttgcaactttatataagaaacgatcgaaatctgtctaaagacatttttacatattattaaaggtttaaaatgttataatgctccacctctcgtgtaacgccagaattgattagttcattttctttatgttgtgctaaaaattgtttcgcacgctttagctaatagtcgtaattaaaatatacttttgagaagaaaactgtttatgtcaacgctttttagacatttattttaaataattctagtcactgatcctctaatgtcctatttccgctatttgtattataatcaaaaatattctgtataaatattatatgtatagtattaatctaaaaaatgttggcaatattcttcactaagaatggagaatacttc

SEQ ID NO: 12225 - DNA, 571 bp, Diabrotica virgifera
  SmartBlast Evalue=2E-39; Info=Exocyst complex component 1 n=5 Tax=melanogaster group RepID=EXOC1_DROME
aacttgtttattcattttggaaatcataaaggagaagctgaaaagagtgcagatagtttagttttacctcaacatagtggagttcataaagaactgtatccgtatactgaattgattcattggattaaggtaatggataaacagatgtatgaatctttaaaagaaatttatactagttctttaggaaaactttatgacagagatttgaaaaatctatttagtgtaggaagggaaaaaattgcagtgtatggaaatgtagtttcacctaccacaattattggcgttgacagagatcagtggacactggaaaccagtactaaagatagagaaagatatgatttagttttagagcaagtactcactcagctagaacctgtgtttatgcaagaacaacagttttgctttaagttcttccagttggatgtaatcagtagtcccaaagccttggattatagcatagaaagtgatgctgtaacagctagaaaaattgaagaacagattgatgaagacattaagaatatgatgagcagtctatttgcatgttttaaaacccgaacttgatatgttgatt

SEQ ID NO: 12226 - DNA, 573 bp, Diabrotica virgifera
  SmartBlast Evalue=3E-19; Info=Transcriptional regulator protein HCNGP n=1 Tax=Culex quinquefasciatus RepID=B0VZB6_CULQU
gtttcaaacgcatttcaaacgttgtgttgatgtattgaagcagtaatttaataatctggtgtttttctgtaaatttaaaacaatacaatctaattatcttgatacaattatttacaacaacatgacggcactagcttctttaaccgctacatatacagattcagaaggtgaagaagatcatgatgaccaagaaaattccactgaaagagaagtcacaatggcctcaccaaacacaccagaaggctaccgatctagtaattcttcaccacagcctatcagtcctgcccctataaaaataacatcaaaagtcgctaagttggtgtcttatcaagatgatacaattgtttctgatgaagaaggtgatgttgaagatataccacacgaagttattataatgactgataacacgcgagaaagtagtagttctaaggaagcagatagcatgattcctcctgaacctcctggccgttgttccgctgagttgcaggacaaaataactaaattgtttgagacaatgcaaactcaacaaatggatatgaatgcccatattcaaaaaaagaaagaatttaggaa

SEQ ID NO: 12227 - DNA, 573 bp, Diabrotica virgifera
cccacggtctccaatttataagaattttgttccatcggtcttctttttatctcatattgtgtcaggcaaatctccatttcaattttgcaacttactgtctagattttaggttagagggttagaaaacattgttagttctaatagtgaaaatactattattataccaaatcttatttgtttaacctgacgcttttttatttttcttcttctttgtgtgccgtgtttgttttcaagcgttggctaccgtcgtatagtcgtattaacaagctgatgaaatgtttctcggtcggtagctatattaaacaattcctcggccgttcgacctgtccattgtctaatgttaagcagccaagacaattgttttcttcaaacccagcgttttctttcgattttgccctgaatgatctgaaagaagaggggcaattaaacagatttgtgtaatgtataagctgcatcgtcaccttcataagacacccgattcgttggtaaagtagtgtcctaaatctagaaagaaaaatcaccaaccaaatcaatttcagttcttgtaaatactgttaaaaaatctgttgactg

SEQ ID NO: 12228 - DNA, 575 bp, Diabrotica virgifera
aataccgaccataatgaccaatgaccacagacagcgcaggatttgtcaaaagtcatgttccaccaatcacgatgccgaaatcagcgcctcgcacaccctctgaaaaattggaagtaaactaaatacgattacattttatttactagagtgcgcggggcatgaaagcaatgtttacttgcccctcagcgatgctgttaaagtcacgtgacctggaatggtctatatagtttgacaagaagtgacttaacttaaaaatctaaattcttctcttgtctacgctctcgagtgaaggacaaacctttaatattgcattaggtagttcaggagattacgctgatacctactagtggcataacacaagtctattcgtattttgatagttttttttttacaaatttcgaataaataaggcaattatgatataatttaagattttgtatgacataatggcccgagactaacattttagaactaccgtatgtttgcagcctgaaatcacttcaattataggactaaacgctatatttctagatagcagatattttattacgtaattttttagtttgttgacggga

SEQ ID NO: 12229 - DNA, 572 bp, Diabrotica virgifera
  SmartBlast Evalue=2E-78; Info=Neuroglian n=2 Tax=Tribolium castaneum RepID=D7EJQ9_TRICA
taaccaaagctgatgtcactgataattttatgtacgcttgtgctgctacatcacctacaaagtatgaatacaaatacggcaatagggtattgctaaatgtggtctcttctgggggtctccgcttcacagaacaaacatgaacctgtactccaatacgtcacaaggaagaacgaagtcgcttacagaggaaaacgtgctgaactattctgtatatttggtggaacacctctaccgcagacggtgtggaagaaaggtgggaaactggtacaaagttcggatcgaataacacaaggcaactatggaaaatctcttataataaaggttgttgattttgatgatgagggaagttatacatgtgaagtgagtaatggtgttggcgaagcaaaatcgtattctatcagcttgaaagttttagctgttccttatttcataaaggaacctgaaagagtaaatgctgctgaagatgaaacgatcgaattcagctgtgtcgctggtggtgttccagaaccacaaattaaatggatacacaatggaaagcctatcgaagaagcattacataaccccagacgaaa

SEQ ID NO: 12230 - DNA, 573 bp, Diabrotica virgifera
  SmartBlast Evalue=9E-73; Info=COP9 signalosome complex subunit 2 n=12 Tax=Schizophora RepID=CSN2_DROME
accacagtctatcatttttggcatcttttagcgcttctaaagttgtctcatagaaattttgtaggagttccatacttacattgcgagaggttgaaatgtaatctaaaatagaattaatagatttttcactatgatttctggttacagcacttttaatgtatgtaagcaactgtttgtatcttgtcatcatctcttcaaagttacccaatttaaagttaattttgatcatctgttttaaggccttaaaaccccactctcctttttccccactctctaaatctagtactttttgaaaagatgctaaagctgctgacggttcatcttctttgagggctttgctgttgtagtattgattttctaaatccacatctggttctgaattgctatcttcagaatattccaaaccataatcttcttcatcatcacacataaaatcatcttcattatccgacatttttaacaaatatacagtgaatctttcacaacctaagttaaaatccgacttttttaacaccttattatttatttttgaattaagttgtaccagttttattggtttgtcgtttgtccccg

SEQ ID NO: 12231 - DNA, 572 bp, Diabrotica virgifera
acctttaatttgggaataccagttattgtaaaattgagtcaagatgttcttttttgtaacacaaaagatatctgtgctgatgttttttacatcatatggtactcttaattctctcccaatattggccaagctatctgccacctcgttgcctttaatcccctgatgtcccggtacccattctaatcctattgaaaatcccatattatttgcatctaccagtagttttttggtcattatagttacataatccatttggtcccatttgtgactagatattttggataaggcactttttgaatctacaaagatcactgctttcatgatttccttttcaatacataccgacatggctttgtataccgctattatttcagttgtgcagatttgtgtgtagttatggagtcgtgacgaatatttataattgatgcttgggatgtaaattccaaatcccgattgatttgtttgtgggtctattgatccatctgtatatacgtgggtatgattattatatattccaccatatttagctatgaacctttcgttcgattcaatttcatattttcaaattctag

SEQ ID NO: 12232 - DNA, 572 bp, Diabrotica virgifera
  SmartBlast Evalue=1E-62; Info=DNA-directed RNA polymerase III subunit RPC1 n=1 Tax=Harpegnathos saltator RepID=E2C1V2_9HYME
atctggagatatgacagttctggaagagaagtcgactctttttccagaaaggttgcccctgaatcgtccttgtttgcctttgagcctttgaactaagcctctgcctggtttcttaggcatcatagccagtggcactccagataactcactattgatatacaacgctgactgtagctgaagaaagtcccaaccttcttggtacatattcacagaagccccagattgtttatgcttcttaataacatcgttaatgaatattatctcggattgcttcatcgtcaagtcgtcttcatttgttccggcctttaaatccgagacaactgatggtcgaatagtgacaggaggcactagtaatctggtgaagattagatcttttggctgagacctccttggatccatagctaacagcaatatatcattttcaggaatcctttcgaagagtttgagtacatctatcggagtcaaaatctcaccaagtggacttccagtcaaggcagatttaatgtcagggttgctttcaatcgctacagaaaactcgttcagttgatcctctaataacacttgcttatctt

SEQ ID NO: 12233 - DNA, 573 bp, Diabrotica virgifera
  SmartBlast Evalue=4E-60; Info=Nipped-B-like protein n=2 Tax= Formicidae RepID=E2C5U8_9HYME
gaagttatagacagggtagtactttacattaaataccaacttcacaatacgatatttccttcattcgattcaacatatagattagacaacaaaaagaaggatggccgccgaaagaaaaacacccaggtttcggaaaagggcatcctagtgttgtatacaaagatttcagaactggtaaatctattagcagaactattaaatatacaaattttgaccgatacttctgtgcttcatgcttcctccatgggtgtttcaccattttttgctgaaaatgttagtgagcttcaattagcttgtctgaaacttgtcacaacgatctttacaaaatatgaaacacatcgaaggctgttattagatgacatattagcttctattgcccgtcttcctagtacaaaacgtagcttaagaacttataggttaaatagtgaagaacacatacagatgttaactgctctagttctacaacttatacaatgcgtagtggcattaccagataattttctacaaaaggaaggtagagacaaaagtaatgacaaagtaccatcaaaagtcgatacagatatccttatttgc

SEQ ID NO: 12234 - DNA, 571 bp, Diabrotica virgifera
  SmartBlast Evalue=1E-16; Info=General transcription factor II-I repeat domain-containing protein 2B (Fragment) n=1 Tax= Camponotus floridanus RepID=E2A2M7_9HYME
gggagagtgattacttgattgctaacaataatggaaagttgcagtgcttagtgtgcatgaatgtcgtttcagtgcctaaagaatttaatgtgagaagacgttacacaacagtgcatgaaaataagtatgctacgtacacaagtgaaagtcggcgtgccctagttgcagatttgaagaaaaagcttaaacagcaaactggtatgttcagtatcaacaaatacgtttcatctgacacaactgaactggaagagaagtttaaggattcagaattcttaagacagttagcttttataacagatctggctaatcatcttaacatgttaaacttgagtcttcaaggaagaaaccagacggtttcagatttgatcggaatgataaacggattccggaataagctgaacgtgtttaaacgtgctttggaaaagaacaacctgacacacttccctagctgtctgcaaatagcagaagaattcaacggtgaggaaaatattgagttttcatcctgcatttcacaaattgaacaagttattgatgaattcaatacaagatttgaagaaattgaaagtctcaa

SEQ ID NO: 12235 - DNA, 570 bp, Diabrotica virgifera
  SmartBlast Evalue=4E-30; Info=Circadian clock-controlled protein n=1 Tax=Camponotus floridanus RepID=E2AH15_9HYME
tttatacacgtgtgtcagaaaagcgacccaaatttgatacaatggttaatggcagccgtagaagacgtgagaccgttttttgtagatggggttcccgaatacaatattcctaagttagagccacttattatgaaagatttcttctctgaagaagcagcagggatgaaaatcacggtttcggatgtcagtgcttggggatgttctgactatttagttaggtcaatggaagttgatatggataatcatcatttcatagtaaatattgaaattcctaaattaagaatcgaggctcattacaacgtcgatggcaagctggttgtaatgcctataaagggagatggacacatagagataaacatcactgacgtcactgctagatcagaacttatgggagtacaatttgaaaaagacggccaaaatcatttaagatttgataaatttgatatagaggttaaggtagggggaggaatggctagagtagaaaatttgtttaatggagataaagtgttattggggatggtaaatgacgtagtcaacaaaaatttcgatatgtttttaagggagctctta

SEQ ID NO: 12236 - DNA, 572 bp, Diabrotica virgifera
aaacaaagttagaggcatgggatacgatcctttcttagcaccagactacaacaccactgctggtatctttgagatcaatcttagtaacacctgggtgtatggtttggcgtcgttccatagaaccaaggacatcaagttcgagatgaagaacaggtctattaatgctttgctggaggtcggtactgggaagctgttggggaccagtaactgggatgttaatgtggtagcgggaattttatctaaggatggatcagtggaattttctgtggactattttaaggtccacataaacatcagccagaacatggacacttcgatcccaccatcgttagaagacattcagttagaactcggcaacatacaaattagattcgatgggttaggtactgtggattatctcatcgaattcggggtcaatgttattccgaacctcttaaggtatcaaataatggatgccgtggagaaacccataaagtttaaaatccaggaagccttaaatcaaatcacgatcgagaagttgataaagcagaatgccgaacagctggatactgggagattcgacaatatgcaaa

SEQ ID NO: 12237 - DNA, 569 bp, Diabrotica virgifera
  SmartBlast Evalue=2E-37; Info="N-acetylglucosaminyl- phosphatidylinositol de-N-acetylase, putative n=1 Tax=Pediculus humanus corporis RepID=E0W3R1_PEDHC"
tatgctacagtgattgttatgaagagatactccatatctatcaaatgttacaagtgttgtaatattaaaagtctctacataatttaagacaatatctgatatcacatctgttggccatcgcacatccattgtatcaggaagaagagtatgattatgaataaatatatgctcagaaggaacacctaattcatggcaagaattatatagttcctgtttccttattaatcccatcccatagtttctaccagtagataagcacaatatgtacacaagacaatctttttttctggtaaaatttagaatggtagggccaaaaaacatgcattcatcatcagggtgggcgaccacaaataaaattctttttgaattctttggtcctcgattgaaattcactaaaccccaggcttttatacacaaatataaaaatatacatgttactatgtaaaataaacttgctaatattaaatgctccactgtgtctttaagatattccaagatacttgtaaataaatctgaacagaagtctattaaatcttgcttcaaccaaacgtaaaacgacaacgaagttc

SEQ ID NO: 12238 - DNA, 568 bp, Diabrotica virgifera
  SmartBlast Evalue=2E-59; Info="CG5758, isoform A n=6 Tax= melanogaster subgroup RepID=Q0E8P5_DROME"
gaagtactattcgtcacggaatctatagtgtctaaactccatcaacaacacaaagataaagaaactcccccactcctagcatttccttggttcggagctcaattcctttcccatgccttcctagcattggaacgagacaagagattcacgcatatcacacggttcctgaaccttgctgacctagcaccgcatgtatcaggaacgggatattcgttctttgttcccactgatacagcgttcgagaagattggactggacaaaatgccggacaattatttgtcgactggggacggattgcagattttacttaaccactttgttaaaggaaggttgtacgatagagacctgagggatggaatccgactggagtctttgggaaataggaccattgaagtgaaaagaatgaaagatgacgtatatatcaacgatgcaaaaatagtagaaagtgaagttttcgtatacaacttaggcacaatgttctatatagacaaagtacttttcacggctaaaaacactctcttcaacactagtgtagttacagaagcaacgcggtctctaacaccagctt

SEQ ID NO: 12239 - DNA, 569 bp, Diabrotica virgifera
ctccttgcttgaatacttctgccggtattttatctattcccggcgctttatggctttttgtatttgaattgccgttagaacctcctctagcgttagaggtctagttaatttattctcttctccatctttcctaagttcttgttgttgtacttcctgttgtgcctgctgctgccgttgttgttgtagtggtggttgtatcctttcgtttaataattccttaaaatacatcatcctataatgatgatagatactttacttagctcaaaaactgaggtaggcaatacctaccaaaaagcccctggcactgaatgggctaagcaatttagactaattttaaaaaagtaaatcttaattgagtttaacaaaaaattattaacaaaaatgtgattcagtattacgtgctttatacaattgtgctccctaaaagtttttgttttgtgatatttagaagataacgtcagtcaggtagttaaatattgtatgtacttaagagcacttgtcaacattgacaatagcattactgcagaatttgtatggctcacaggtgctattttgggcacaattccttt

SEQ ID NO: 12240 - DNA, 572 bp, Diabrotica virgifera
atatgcgattgctttattcaaaacaatctgcgaatgtgcccaagaaaagtaactcctttatttttctttttgcagtattttttatttaattttgttacttatatattataaatcattaaaatttagttagattgttagatcattaaaaagtataactctattaaccagataataaaaatattatacagggtgtcccaaaaagattggtcataggttgtaccacggattctggggtgaaaagtaggttgattgaacctcacttacctatataccaggggtggccaagctcctcgatagtcagagccatttgtcaaaatttgaaattgttcgcgagccgcaattaaacaattacctgtgtaccagttttttacaccaaaaagtgtaaaaaatgtattacatttatctctcactgtttggatttcacgatttttaaagtgaaataaaatggttcacgtcgttatttcaaatatgcaaataattctacaagcagcctttactaattcaggatacttcgattcttcatcatccttccatctttttctgggacggcctactgatcttctatcgtctct

SEQ ID NO: 12241 - DNA, 569 bp, Diabrotica virgifera
ttataaatgatggttttttgagcagctccaagtcaaagacgtttattagttttagtataacagggtttcgtttgattggctgagtagtttctttataaacgttgtttgagtcttcattagtatagtttagctgactagtttccaatttggtcaattcttccggatgttcaactgttttcttttggatgggtctcattaagaaacatccaacataggatagaagagataagccgaataacactaaaactgtatactttcttcctacattactaactaaaatatcacataatttgggagaaacgatagaaaaatactagcaccagtagttgatatgctaacggctagagtcagtctttctttgaagtacgagtttgtggccaggtatgtggacggcattaggattccttgtccaatacctgttaacactgatatcgtgagatgaaggcagtataagaattaccaaaactggttaaaaggattcctgtgcaccatattgtggtacctatgaaggccaccgtccgaaattcatatgttttaataaaggacttccaaaaacccagttatacagt

SEQ ID NO: 12242 - DNA, 571 bp, Diabrotica virgifera
aattcttctcagtactctcatcactgccgtttctaatagtattgtttctgatgcatactcatatgcatcattattggtatggatgcatacatcattattggtaaggtgaagcagtacaatcctacgtatttctctatggcttccaatcttccaacatacagttaagtttatacagaggcaacaagaactatcgaggtcaagataagaaagacattgaattacaatttattttggtgattttatctcagaaaatcactttaataacggtttttgttgctgatttgctgcgaaaaaatgtgatgtatacagtgattgacaagaaagttcgaaaattatgagtaaaaatactagaatagtatttttatccagtagagtgagtaaaaatactagaatacttattttttttcacgaatttatgtatttagaatttggtgcattttactacatcggaatttgagtaattcctttagaacataaatataccacgtggataagaaattctcaaattaaaaatgcggttttcaccagttttctataaaaatcccctcatataataaacgtttggcggtct

SEQ ID NO: 12243 - DNA, 570 bp, Diabrotica virgifera
ctggctctctaggctattcctagaattttccgagatcgttctttcgttttcactgttgtggtttgagtccctgttttcaggtttgtggcccaagaagcgctccttgtcggctatcttgttgtcgtgaccgggttggtagatttctggtttaccctgtatgttgatgaaggctggttgttgtttgttggcgacgttgtagaccgaacattgggctgatgttctcagggatgaaggccgagctgggatttctggtttcacactcaggtcttttcgtctaatttgaacttcttcaatgtcatctggtttattatcgggtatcacagttgggttcaccttatgatagatgctagaagtaaacttcggatcaacaacattagcttgtttattgttcaccacgccttcagtcatcgtacccctatccgatttctgtatcgtctgacttaccccgtctctcgtactggccagtttcttatgtgagtcgctcggcctgggcaaggtactggggtgtattattattttggttggtggcacttccttggtttgtactgacggccgatgaggaatttcttc

SEQ ID NO: 12244 - DNA, 568 bp, Diabrotica virgifera
gaaaatagtttgaccgattaataacattcatataattagcttcaattttaaatacacagaaacttttgtttaacgttgaaaatttgttgtatgaatgttaaattcgtcatacacatatgaatttttatctgaagttttgaactagcttaaaatgatttttgtgtacattgtgttattaaaattataaaaacataattgattgaccaaaatgtcggttggtacaaaaatacgttttttgcaaaatgataataaattatatcaaatacttctgtagttttagttttaatcttgctacttaaaaacatgacataaaggagatttatcgcacttttagcaaatatgttgcaaaaagacaaaaatacgttgaaatgtatgtgattatatgtttgttaatgtgatcgttacttgtatattatttgttaataacacaagaagctatacactggtacttataactgaaacagtaaaaattttgttataaaattgttttgttttaattaattattatttgcaaaattggtgccaaattggtccagtaattgagggctttcatttgacacatgtgttc

SEQ ID NO: 12245 - DNA, 568 bp, Diabrotica virgifera
  SmartBlast Evalue=2E-79; Info=Suppressor of cytokine signaling 5 n=2 Tax=Formicidae RepID=E2AVU5_9HYME
gttactttaagatccggtccaatagatactatcacaggttgtcacacacaagttgattttatacattgcttagtgcccgatttgcttaaaattacgaactgtagcttttattggggtaaaatggatcgatacgaagccgaacggttgttggatggaaaaccagaaggcactttcctcctacgagattccgcccaagaagaatttttatttagcgtatcttttagaaggtacggtaggtccttacatgccagaatcgagcagtggaatcacaagttcagcttcgattcacacgacccgggcgtatatacctccaaaacagtgtatggcctaatcgaacactacaaagatcctactagttgtatgtttttcgaacctctattgacttttccattacacaggaaattcaccttttctttacagcatctagcacgggccgttatagtatcgtcgaaactgacatacgacgatattaatcaccttcaactgccgaagagccttaaaacttacctaaaagagtatcattacagacagaaggtgagagtagaaagattcgatgatgatatgcaat

SEQ ID NO: 12246 - DNA, 565 bp, Diabrotica virgifera
aattcagcatttaaagaaatatttagcagtaaacatttatttcatttcttaatataattttaaaattcttagtagcatatgaaagccaagacgtgaggaaaatgtgtatcggtagagttgacaaggtagtttcaaaggttatggcaacgagagaggaaaggaggtaaaaactagtacagcaacattttgatgacagacaataatcagtagctgatgggaatacagctgtgaatattatatgtgttacatcatgctaatgataatgatcaaagttccgagcaacaatttatttatcattccaaaatcactcaagttctgtaagtataactaagcaaatgcgagtagaaccgcaagcagtagcttctatttgtgacaggactggtgtctctgacagtagcagcagtagtcaccagtgctgtaatgtaaagtaatgtaattgacagaatgaaaatacgtcgagcacggttgaaaaatcgtacaaaagccacagaaattatcttcattcaaattggaaaaatcgcggggttattctttgatggaaggcaagacaagacaattaagcaag

SEQ ID NO: 12247 - DNA, 572 bp, Diabrotica virgifera
ttataataaccgggactataattgtttcgaaaaatatgagttgtttaatggtctgaaaaatagcgaacggatcgaaataaaggtacagtgttagcgtgttacgtttaaaatcggaaatagtcacatgggcttaaatctgccaaacacggtggatggtgcattaattcttatcctaaattatatattgtctatacaagaggatcacaattctagtgacaactaacatgctgatggcattagtgacttttactttaatacaaacgcttctgtccaataacacgattcgctcgctgtttatcagatttccaattattgagagtaacatagttccctaaatgtgtatttagacgtatacgatttataaaaaataaaaaaatatagcgaaagtaaaattattaaaacaattcatgaagacccactcctaaccacctttttattcaacttttttagcatctagcccgaaaattatccagagttagattatgtggatattttgaaactttataagatgcgacaccagttatttagtgtaaaagactttttgaaattcgaaaaatgaagtttctagctgt

SEQ ID NO: 12248 - DNA, 572 bp, Diabrotica virgifera
cacgaattacagtaaacacggtaaccaaaacaatatttcatgaagatgggtcaattaatcaatcagaaagattagataactgcatcctggtgccttacatgattacttcggttatgatatgctatcaattctttaaaaaatgtgattatatttcattgtatactctacgactgtctaacaaaataaatatctaagaaagtttacaataagtaaacaaaaaaatacaaaatcatacacaatagcatagaaaaatactaataattacaaaactattagtttaatagagcgttttatttccaacgacattatcacgaatttttttataaaatcttaacttacgttcacagacaccaaatatgtcctcattttatataaggtctcgcatgttcatttattttaaataaatcatctatttctgcttgatattataaagtaaaaatggcaacaccgcacttaggcgacaggttggtctcaccaacgaatatatagtttttactacaaaaacacgcttacgtcattcatgatttctgacgccagggcattgccaaaacattagaatgtgacttttcatc

SEQ ID NO: 12249 - DNA, 571 bp, Diabrotica virgifera
cattaatcagaataaactgaaggaaagttaagttcttctgatacaaaacgaaagaaaaggaagataaataatgatcaagatcagatcaaaatggatttaagatcagttgaagtgtttgataatgttcaaaatcggcatttttctgttctgctaccagctgatgatctccaagtactaaagttacaaagtgatgatcctgaagaaattgaagatgatgaggcagtccctatccaagtagatcatccaacagatttaggagaaaaccaaaggacttggagccaaaatgaaacattggctctcattaatattttctctttgcacaaagacaaatttaaacactttaaaatgaaaaaagaccgctggaaactgatatccaaagaacttgctaaaattggaatagataagttaccgataaaatgtgaaatcaaatggagaaatctcctaagatcatatcggtcttacaaagccacggatagagcccaaggaaaatttgaattttataacgaaatcgatgatatagtgtcaaacgatccacagtttaggaatatgttcgacaatttccaaacgccgg

SEQ ID NO: 12250 - DNA, 567 bp, Diabrotica virgifera
  SmartBlast Evalue=3E-34; Info=Sorbin and SH3 domain-containing protein 1 n=1 Tax=Harpegnathos saltator RepID=E2B2Y5_9HYME
acataaactataattttaggaaaaagtattgggcaacgtccatacgtttattgttaacgttaacagttagtagaaagaaataatatcttgtatatcggtgtgaacctaaaatcaaaatagacgttatttacgatataataatttttttgtgaatgtgcgggtatattgtgattagttcattgtgatggatgtgaaactgaggattagatctccggagcagattaaaaggcaaaaacaaaatgggcacacgcgacatacgatcgctaatcctatggtttacgggcctcttccgtacaaatcaccaaggaagtatctggaaaacgaagtaaccatccactacaagaccccagtgcgacaagaaataaaagaatacctaagcgaagacgaattggcccatcgacaagcagaggctatgaagaaaatatatcaagaagagagacggaagaaatatctgcaggaacttcaagacatgaattccagaaggcacacaggacaagttttcattccctcccaaaaatctccaatatcccttaatcgatatgatgactttgacgatctagcaccatc

SEQ ID NO: 12251 - DNA, 564 bp, Diabrotica virgifera
  SmartBlast Evalue=1E-16; Info=P97Bcnt (Fragment) n=1 Tax= Tragulus napu RepID=Q4R2S8_TRANA
aaaatagaactattctatgatgagatacagaaacttattgatgagatacaagaggaaagcaaaaacatcattttactaggagactggaatgcacgaataggaaatgatgaaaatatggcattaggctgcttgggaaggtatggagaagagacgataaatagaaatggaagaagaatgataagtttctgccaaataaatgacttgttaataggtaattctttctggtatcaaccgagaaacgaaaaatatacatacgtcgcagaagaaagaaatgcgagaagcataattgactacatagtatatcctcgagacgcagaactaacgatacaaaatataaaaacagagaacgaagccgaactcagtacccaacacagactagtgacagcagagataaacatgaaactaatggaaataatagagagtcctcaatatacaagaatagcaatacataagatgaaaaattaagagacacgttacggaacactgcaaaacaagtattggaataagaaagaatggtaagaataataaaagaactggatggaataaggaaataaagcaagctgc

SEQ ID NO: 12252 - DNA, 574 bp, Diabrotica virgifera
attgtgttgggctcggttgaccctcttcttcaaaatctaccctatgctgaaccgggtgaaaacaaccgcatctaggggatggttcaatggagatggctatggatgtcgatggattgaccagttctgagtcagttttgctctataatttttttttgcaaggttaatactttccaagttattagcgattgactacgcgtttttcattcaggggactcacgttttatggccgtttttcgtgaatatcttaactgaaattttaattttatggaaaaaatcattgggaacagggttgtggatcataagggaataaagagattcgcgtcgaggggacctatgtaatcttaataacggctgggttattgctctttaaagtatggctattttcgaagagcctcgaaatggagagccttcgatctcaggtggcttgagtgtggtgcagttttttgagaaaacttaacgtattttaaaagctcattaaccttccgcaactaacataggtattctgaacattaaagctaacatcgggtctcagagaccgaacataaaaaaatgtctccattgacacactttttaa

SEQ ID NO: 12253 - DNA, 563 bp, Diabrotica virgifera
taatattgacaatgaagacaactaatttttgtaggttatcttttgttttcattttagattattttgtcattatcaccttacttcttttccgtttttttacgtatttatactgttatataattttatggggaaaatttagaaaattcattttatatccaagaccacaagatcataaattttcatcgccctgtatatagccaaaatttgtaaataatataattagtcgtaagcagtgtttcgtggtaaagaggaaaagtgtaattaggttgatttggtggccgtgtaagcagatttctgttgagacgaaatcgtgatcgagtcgagaaacaaaagctcctcgtgtccgaatagattccagtcttctgtctggaacgagtagccagtttgtatcaattttgcacaagagatcgagctgagaggaattataaagcttgatattgtttgtatcgagtcagatactaaattgaggagagatttcaagcgagtgctgttttgtttgggaaacagtttggacaaggagaacagttacagcatccgaggagcacgtgtgggagaaacgagga

SEQ ID NO: 12254 - DNA, 571 bp, Diabrotica virgifera
  SmartBlast Evalue=4E-25; Info=U2-associated SR140 protein n=1 Tax=Nasonia vitripennis RepID=UPI0001A46D6D
gtcagttctttataataatgttcatcatcggagctgtctccactattaagctttctaacgctcttttcatagtcgcgtttatgcttttcacttttcgacgacttttcgcttttatccttcttttccttttccgatttcctaagcaactttctcctataatgctccacttgttgaggtaacgtccatccacttttcaattgcctgtgtccagattctaattcgtcctgatattgtacagcttttacttctatttctcgtaacttctgtctcttttcttccgataaatctcgctcctgatactcagtatattcttgaacttcatttataccgctctcctgactatcatcttggctattgtccaacatatcccatttgctggtggtcattgcttgcgcctcaacttgttctggatctacagtttcccacttggacgccacaaatccactaaaggcatctggttttgtttcttcttgaatctcctccccatctatatcgaagtcttctccatcactctcgtataacatcatggcggattttaagagtgttccatcgacaggattgtcctcttcag

SEQ ID NO: 12255 - DNA, 570 bp, Diabrotica virgifera
gataatcttgtcaaaatccattatctataatatttttgttagtaatgtctattaaagagttttctgctttcgtgtctgttgttatgctctaggatttcgtgtacttgttttttcaaaacctccctttttttcttctgcatattctctatcctatggctctgcagcccaaatcgggccctagtctccctcagcatccatctccaagtatctctgtccctggctgtgatcctccaccctcgatatttctttagcatcagttctcacttcttttattcgccttttcattgatcttcctatttctattctacttggtctgcatattatagtcgcttgtattctcttccctactatttcttgattaagccagaaaattctataaaataatgaaagaaagcacagtcatttataccaaaattgatatgcaaagagaaggaccgacaactactaacagagaagcaaaacattataaatagatggaaacgatacttagaaaaaaaccttaacgcagataatgaacatgaacaaaatgaaatatatacaccggagcaacaacatcgagttaggaagaag

SEQ ID NO: 12256 - DNA, 570 bp, Diabrotica virgifera
  SmartBlast Evalue=9E-17; Info=Juvenile hormone acid O- methyltransferase n=1 Tax=Tribolium castaneum RepID=B2DCQ0_TRICA
atttggaagaatatgttgcaactgatgtatcccaccagatgatacatcacgctaaagccacttttgcaataccgagaatgtactttaaacaactggatattgcagctgagaactttcctccgatatatgaacaaaggtttaatttcatttttagttttttcgcaaatcatttggtgagaaatcctaagcaaatgtacaaaaatatttataagatgttaaaaccaggtggacacacattccaaataaccctggatcctagtcctctggacgtggttttcgataatttatctatccatcccagttggggtatttatggacataaagatgtcatatctccatattattatatgaaaaatactgaaaaggacatacaacataatttgatacaagcaggttttaagagctcttttgtaagaagagaagtattcgattatatatttgaaaatgaacaggaatggaaagggctatatctttcctgtaatcccatatttccaaaaattcccgaggaaaaaaaggaagaatatattcgagacttctacgacgaaataaaaaaacatgtagtaacttatg

SEQ ID NO: 12257 - DNA, 568 bp, Diabrotica virgifera
aaccaactcaaaaaaacctaaaggaaaaataacgacgaccaaaggcaaaaggacaatgacgacgcattaattagtaaaattgagaatagggaagaacagtcgcaagacggcacaatagatgaagatgagctgagaaagtttgaaagggaattgctacaacggcacgatcaacagcctaaactaaacaggtcgggtgccataaagcactcgacacttgtaggggaagaaattaatacaagagaagaagaagaaaaagaggaggaagagaaagaagaggaagatccctcggtgaaaatcctggaagcgaaagccttcacagaaagtcacgatgaaaaaacggaagaagaaaggggaggaacttgggaagatatagaggagagtgttttaacagccttcttgttcgacgaagaggacagaagagaaatgcagcaaatgaaaaaaagaaaaggggacagccttgagataaatgaaaaattcaaaaaagaaaaacttgaagaaagacaaaaaatatccagaagaaaccgacagggaaaaggtccaacggaaaatagaaacaaatactcgatat

SEQ ID NO: 12258 - DNA, 571 bp, Diabrotica virgifera
  SmartBlast Evalue=3E-40; Info=Mitochondrial ribosomal protein S10 n=1 Tax=Bombyx mori RepID=Q1HQ85_BOMMO
ggttaagtttcaaatgtttaaaattttacaaaatttaacatgaattctttacggcaacttctatcaaaaaaccacataacatctaccctgtgtcggactttttctgctgttacctctgcaggttcagatgtttctgcaaatgttcctgataaattatataaagtagtagagttagaacttagaggcaatgatcccgctgtcttgaaaagcttttctaagtttgcagtaactacaggaaaccacttagatatcgacaccaagtcgtggacactacgaaaacccaaccatgaaaggtatacagtcttaaaatctgtacatatttataagaaacacagagtgcaatatgaatataggacatattactccttcgtgcaattcaaacatttgacgggttcaacagcagacactgttttggaatatatagagaggaatttgcctgaaggggttgccttaaaagctactaaggttgaaattcaacaaatacctgaatatttagtgccaccagaggaagcaaaagggaagaatcaggatgccatataaatttatttaataatttagaattagttttagt

SEQ ID NO: 12259 - DNA, 571 bp, Diabrotica virgifera
  SmartBlast Evalue=3E-30; Info=Mariner transposase n=1 Tax= Bombyx mori RepID=Q1HPJ3_BOMMO
agaaagggagacgaatcatttaaataaacactctacaccttgccttgcgagagttgtctttttagttttgcatatagccataaagagacaaaaaatacatagacttaaagtacctacttgctttgtaaaaatatatagactattgcttttcaaaaaatgtcccatcaagatcgatacacgtttgcatacgttcaaaccaattggtaaaacagttattccagtcttcagttgacacctgcaaaatcgcttttttattggcatggattgcttcttctggggacaggaatcgctacccacgcattgaattcttgatctttgggaacctgaagaagtcgttgggacgttgggggtcggggatgcacgatggatgaatggttcaacaattcgatgttttgaagctccaaaaaaactataattcgccgttgtgtgttacgttgtcggaatttcgtgataacttctggtaagaaaacagatatatagtaaccagaagtaaattttgacagaaaatgtgcgaccattttctttggcacgcttcgagaacggatcacttttcttggtttcttctcatcgt

SEQ ID NO: 12260 - DNA, 569 bp, Diabrotica virgifera
ttctttcccgtaaaactgtacccctgagaacccaacagatctccgaacacgtcgtcgcttttcaccttttctttaggctcgttttgtggctgctgctgctgctgttggttcttgttcaaagtgtcgaagtgtgcacggttgtaatctgctccacctaacggtgaccgagcctggtgtttgggggtggccgtattcgagctcggcatgtgctggggcgtcgttggtggcactttgttaggggtttgagacccgctggttggagttgtcgatggtgggatcgtggatccgaagtttaggcctccacccaaattaccgaaatctgcaaacggatcagttgacttttgttccttggcgtgattctgaggcgtcgcgttttgagctggagtaggtgtcggagctgtaaagttgctccatccacctaaagattattgccatcgccagcgccacctagcgacgcgaacggatcgaacatattgctaccgttgccgttcgtgttgggtttattgattggagccgaattaaaactagcgaaatcttcgtttccggagtcaccgcccagctggctcaat

SEQ ID NO: 12261 - DNA, 570 bp, Diabrotica virgifera
caaaatatttaaaaatgtaaaattacgaaatcgtcatatcaaaagaatacataaaatagatgtatcaattaagaaaattgatcatattgtttgtccgttatgtgagcaagaaactagtttacaaacccatgagaacttaagaaaacatattaaggagaatcaccaggtgagtattgaactaataactttggaattttctagcaaacaagaatatgagacatggaaagatatgcagaaaattgagaccagttatgcaacatctcgaacagttaatgcaaaggaacacaagatcttatactatgagtgtaacagaagtgacacatatggatataagccccactctaaaattaggacagagaaatctggtggatcaattagaattaaaggggtgtgtccctccagactaatttgtaaactgacaaatcaaggacaagtttcggtcagttattggaaaacacatgctggacataaagaagaattaagagccatacatctgtcaaaagcagaagaaaaaacgattgaagaaaaattaatggctggggtgccacccagtagaattttacaagattc

SEQ ID NO: 12262 - DNA, 570 bp, Diabrotica virgifera
gtgatatttcttctttgcattgcaagatcgatagactacgaataatttataaatatagatgatacaatataacgggtaattttgttatttatctttaagatatacagatatgtatattctgaggcatcagggttcgatgtttttgaaaaaattaggttataaaaaattttctttttaatgcttttaggttaagtttcagcgaacatgggtactttaaattaaattgacgaatattttcgatttttgtgaaataatgagacagggctcgacaatgttttagctggtacgtgaaagaacgtaaaactattgacacaaaatcctttttcactttcgttcaccataaatcaaagacattgatgcatttttcatgaaaatcttgatgtggaaatcataaactatcaggatttgagtgttataccgtataatttcaaacatgatcttaaattttcgctattattactgtatcatcgacatatctgacttcgcaaacttctccttattccagtgagctcacaggttgaattaattggttgaaaaattcatgaaaaaatgcattaattgtctcggtag

SEQ ID NO: 12263 - DNA, 552 bp, Diabrotica virgifera
gagtttgaaataaaataaacataatgttatagtagtcactgtatgtcaactttaaaaaaaaatgagttaaaatgatttatattcgcatatttaagttagatcttaagttatttagatcaacgattaagttaatttgcctttcagttcattactgtaaactagatgttttataacacagcttatatatatatttgaaattataaaaagaactataatgaaccataatgaaggtcccgtaatgaaaacacggaaaattattattttactacaagcgaaagttttacttcaacaaaattaaaaacaatattaaactaaaactcccactgagaccaactccctggcaacgccttcgcggtctctataatttgcaaaccatacgaatgctaaggcaaggaaggctaggggagatctaagaattgcatctcacttcctgcctgctctgcttggcaaaaattccaacaaaaacttgatcccacttggaaactttgaatttttgcaggaagtgagatgtaattcatagatctcctctagacttctccgcctcagcaatca

SEQ ID NO: 12264 - DNA, 572 bp, Diabrotica virgifera
agagttttgatttctttatcaaagtcaaagtaaaaacacttgatcttgccttgcgctataacccaggacactgtaagtgataatttttcgtaaccattatatttgctttcatcgaatactttattcacacaaaatactgtcaccccttaccatacatataatgtaccctaggtcttctctacacattaaccaatttctccgtattttcctgtttatttaagacgtctatattaatttgtcacttcacccattcacgatgtctctacaatccttttgtaaaaccaacaatgaacttgtaattcttgcccaatacagtgatagggagatcatttctactattgttcacagtaatcattttctgcatttgaaactccaggttccaacttttaaattagtttcaatcaatttaagccacaaaatgtgtcaaaagagggtagaaaatgaaatcaagtccaggtcttggaatgaggagaagactttagcgcaaaacagaacttgatggtgcgtttttactgatagtcctgtcgccaggggggggggtacaacggcctccccaattcagatggacttac

SEQ ID NO: 12265 - DNA, 566 bp, Diabrotica virgifera
gtgacacatgacaaaagctcgaaacaaacgacaatcgatgaaaagccctattctttcatttttccgactcccatatcactggtaaataccgattaaggggaaggagcaaaatgcaaaattttgacgcacgtcaaaattttcaatgtgtttaaaacgtttaaaatgtattcattttttcgaatcctgagagaaccaataaatacgagtatttttgaaaaatccaaacgcagaatgaaagaccacattattacctaggcgcgaaagtccctgaaaacttctataatgtttatttaataaattaccgggctgaaaataaagagaagtgtgatttttaattgcgaatatttcactcaaaagaatcattttattattctaagggactttcggctctcggtaataacgtaatctttccttctgcgttcaaatttttccaaatacttattagtcttctctaggattcgaaaaaatcatattacgattcaaatgacagtaactcgtgacgtaatcgcacccttaatgttcattggttagtcgatctgggcaaccgtagtaatgtctaagaaccg

SEQ ID NO: 12266 - DNA, 571 bp, Diabrotica virgifera
  SmartBlast Evalue=1E-20; Info=Odorant binding protein C20 n=1 Tax=Tribolium castaneum RepID=D6WDX0_TRICA
tgcatttaaaacaaatatgaatgccactattgtgatattatgtgtcttgattgccagttttgtttgcctacaggcagctccaccagcaagaaaaacctcggccgaaaagcgtgaagatatgaaacaacgtacggtaataggactttcgtgtttaaaggaaaccaaactggatagatcagttgttgagaaagccatggcccaattaggtcattcagaagatccaaagtacaaggatttcctatcatgcagttataaaaagcaaggttaccaagacgaaaacggtaatattttatacgaaaatattagcaattttttgagcaactattacaaagctgatagtcttaaaatagttgagaaatgcaagggaacaactggttctaaccatagtgaaatggcgtataacgcaatgaggtgtgttatatcaacgctcaacgacattccagacgaagagttgatataacattcacatactagcaaatttttaaattattttctaccattacttgctattaaaaaataatttgtgtaatttaatttattattatttatgtttaataaactcttttaaatt

SEQ ID NO: 12267 - DNA, 569 bp, Diabrotica virgifera
atgggaaactgattacaaaaagaattgcaagtaaatctacaaaccattatttcagaattcaccctacacttccaaaaaacattcctcatttcacctttaattataatagagcacacatgtcagtattgactcgtttaaaattgaaccatgctcgctttccatctcacttatgtaaaattggaatacttaactctcctgtctgtagttgtgacaatatatccattggtgatctaaatcatatatttctagaatgttctctgaactctcaatcttcttcaattctgtatcaagaactaattcatcacgagtgtccattgccactaaatattacagctctcctttcttcctcagataaagcggtactagattccatcattaattttatcagaaattcaaaaatagcggtatagtttagaaatagacaatatgaaatcatttaatgtaattaagaatttacatgttttgtggcaaatagattttgtctgatgccaggatctctcacacacacacacacaatttcctgtaacagcctcagtaagatatttgcggcccatatcttatatgtacac

SEQ ID NO: 12268 - DNA, 571 bp, Diabrotica virgifera
gtagaataattactgagaagagaccaattccacattaaaaatgaagatttattttattttactgattgttgcaattacattttttgaagtacaagcttgggtaggaacactaaggtctgatcctggtacagagcatcttggtgactgctattcatcctctgaaggtgtaggtgctatgaaatttggcgaagagaaacgattagaaggagaatgtgttcaattagtctgttcaaaaaatagagatatacaagaaataggatgtggttctgtaggaatagcacctccgtgcaagataatgccaggagatttgtctaagccttatccagactgctgttatgaaatatcctgtcctgaaacaattcctcttcctaaaggaaaggcttaaaaagtccttacttaccgaatatgaactacttgttaactaattgtaaatataagttttctgttgtaaaaatttccaaagtttactgttttgtagttttaagcaatgtgtcactaacggctgtgttctcaactccctattcagcatttcatgttaagaaacggaaagttgcctagataggccaacgtt

SEQ ID NO: 12269 - DNA, 569 bp, Diabrotica virgifera
tttccatagttttcactgtactatttcactcaaccgttctcttcagttctttctgtttttcaagtccccttccttcagatttcttttctattgcttcgtccattttatctctgaaagatcttcgggatctgcctctcttccttcttcctatcgggctccaatctgttattctgtttaacgattttggtctgctcttctgccatgtccgtaccaggttaagcccttttgtctatgtagtctattatctcttgaattcattaccattattttcttaatctctttgttttttattctatgtcttctacagcttctccttaggtattccatctctgttgctcttattttgcatttggttttcgtattctttattcaattttcacaccgattattcagaatacttcttgtcatggtgttatatattcttcttgttgtttttatactgatgttcttatcccacagtaccgggtttaattttagtatgcagcatattgtttgtcctagtaactcgatacctaaaaccatagcttggttctataggtatcgagtcatagagataataaaaagctcat

SEQ ID NO: 12270 - DNA, 570 bp, Diabrotica virgifera
  SmartBlast Evalue=8E-28; Info=PET191 polypeptide n=2 Tax= Culicini RepID=B0WTG8_CULQU
acagatttgaaaatatttatgtattatatttttttttaaattaagatattttcaagatgatgcgatatgaggaagagaacgaaaaacttgcagatacatctccttgtgcaggagttagagccgatttgaagatgtgtttattggaaagcgattgttgcaaaatacaaaagaggactcccagagaatgtttaaaagcaaatgatggttctgttcccacacaatgtcaagtactgagaaatactttctttgaatgcaaaaggtcactgttggacgccaggcaacgcttcagaggcagaaaaggatattgaatacagtttttagttagttccaaagcatagattgcagtgcaagaggtaatggtgaggtatatacaacatgcttcaatggaacaacccaaataccagaaatcgactaccataaattgtgtttaggtgaaataaatcacttctagtctatatgttagtttatgaaattaggaacttacttttttaaggatataggtagatttattgataatacaaatataactgaagatatattcttataacaatccaactgacaccttgcatt

SEQ ID NO: 12271 - DNA, 571 bp, Diabrotica virgifera
ggaaaacctcaatattttcgcagcgcagctactgacgtacaaaacagtgtaattatacttgctattgctctagcagcacacttcttctttacggagtcgtgacagtataacaaatttgtatgaatcataggatttaattgttataatagtattatactaagattgaaaggaagcagctgagctcatggttgattaagtccacttatcggttccatgacagatcgtaacgcaacagttcataaccccacacatggttatggacaattcgtcgcgccgacgattcgtaacggtataattcgtaacgccaacatttaatttttttagcaaattagtattactgaatttatacaaaaatttattttgcatacattcctatactagaagtaatggtacttttttaagaccacttctttttaaatatagtttacacatatttttgtatatatttgtggcgacacgctttaattactacatatttttgctaattttattttttaataacttttctcaaaacggtcacataaaattcacatttaatatacaaaccagatgctaagaagttttacgaaac

SEQ ID NO: 12272 - DNA, 568 bp, Diabrotica virgifera
gcgttactatcctgccttggcctagaaataatcccgatctaaactcaatagaaaatgtatagtcacggttgaaagtgttagtatcacgcccaagaaagggagaactggaggaacccattattcaaaactggtttagagttattccaccggaatatttggctcctctcgtaaactatttgcctcgcagaatctcgaatctgtgttaaaaacaaaggctatcctgccaaatactaagtttcttcataatatatttttttcagtttccactttttctttactaatagctgacggttattatttgatttatttttaaatttttcaagagttagtccttaaatattaagtagaaacataaaacgatgcaataaatttatagattatagcttatagaaaattaaccaacatacaaaaggatattctctttacctcgtccttcaagtaaattctttctgacgagctaaaaatagctaaacacgtttctcagaatcgcaggttagacgaggatgcatattcctttttatatacatattgtattttgtatacattatttacatattatttttataga

SEQ ID NO: 12273 - DNA, 565 bp, Diabrotica virgifera
taatattgattttcaaacctatttgattggcttcggtggagagtgtttccagttggtcagccacatcttggaacctttgtctaaaaggcaggtattatcggcgtattctagattgcttaggcgtgtgtttaacgttcattgtatacctcttgtgtcggagtctagtttggagagaacatagtctacagctatgttaaaaaaaaaagagaaagcaagcatccctgtctgactccagtatgttaaatttgccactgttgatcccattgtgtgccacgctgcatctcatcttcataaattcacccgttaatcgctatttcttcattgcttatgctatttagtccaataaatttaagattgtttccaacacaatgttttcttacgtgatggaaccgtcatatgcattttttaaataaaactgaatcttaaactattattgtcaatactaggaataactttgaaaatcctacaatcggcgcatccacttaatgcgcagtaaaattatcttagtaggagaagtcaactcgacatgtaaactatttttaaaaatcacgtaatcgactccggg

SEQ ID NO: 12274 - DNA, 568 bp, Diabrotica virgifera
  SmartBlast Evalue=2E-26; Info="Kif-3, putative n=1 Tax= Schistosoma mansoni RepID=C4Q231_SCHMA"
tacatgtctatataggtctatttgctgactattctcgtcaaatactttgcaaaacgtaaacgttttcaacaatccatttttattttaaagatattgtgttattgtctgaatgaagagtcttttggatttctaaagatttttctttgtcctttagtggacgtatcctgataaacacacgaacatttttgcgcaaataactctagcgaatcatgaatattcctatgctgtcactgttacttatttagaaatatataatgaagagattcgagatcttttatctgaccaaccaaagaagcttacattaaaagaaaaacctggaattggtgtctatgtcaaagatttgcttggatttacagtagattccttagaaggtgttacagaaattcttaaaaaaggcaacaaaaatcgagctaccagtttcacccaactaaacgatgtaagttcaagatctcatgcagtttttacagtattaattgaaactaaaaaccatactaccaataaaacaacatttggaaaacttaatttagtagatctggcaggttctgaaagagtacacaaaagtttagct

SEQ ID NO: 12275 - DNA, 567 bp, Diabrotica virgifera
acgagtttttgtacagtcaacgagctcttatcaaaatgtttttctttgcctataggtacaatcaatattcaaaattcactgaaaaagcttgtaaaaaatttaacaatttgtgaaccttacgaaggtaaaactagagtagtagatacaaccagcaaaatttttctagaagaagacgattcaaccaaacagaattggttaatattcatgttaacaattataggactatttgttttagcaatacttgtcacttttattattctaattgttaggggtagcagatggctcaaagaaaaaggatattttagaaatgtacactataacaataacgatttaagtatagaagaagaaggtacagtagtaacagtggacgagaatgaaaaactagaaattccagaagaactaacgctggaattccttcaagttttagcgaaaagattggacgatccgaacactcaccaagacgcttcagaaatgatcgaacgtctctatgaaatgtttataatagatgacggatatgaaaacaataaccgacaagaggaagaagcgcacctctacgaagaactaggc

SEQ ID NO: 12276 - DNA, 562 bp, Diabrotica virgifera
  SmartBlast Evalue=3E-20; Info=Probable RNA-directed DNA polymerase from transposon X-element n=1 Tax=Drosophila melanogaster RepID=RTXE_DROME
tgatggggccgaaattcaaactggtggtctggaattagtatttttgatccagggttcgtaattttttactaatagtttttcgaaagctttagacgtgattggcaagaggctgattggcctgtacgatgtagtttcttcttgaggtttcccggttttaggatggttattatctgagacactttccattgatcaggaaagtaacctaagtttaatatggcattgaatataaacgttataagttttatgcatttgataggtaattcttacaacacttttccactgatcaagtcgtaccctggagattttctatcgtttaaattattaatagctaagatgacttcggacgatttaaatttcggaataagcaaactcatttgatatggactttgaagaaatgagaatacgtctacttccacaggtgaattcatttgattgggagtaaatacttcggagaaatactctgcaaaacaacgtactttctcttctgcactacgagcccattctctgtccgattttctgattggaggtgacggtttctgggtttgtttcagttttctcgtgg

SEQ ID NO: 12277 - DNA, 564 bp, Diabrotica virgifera
atatataatatatataaatctaataatcaataatactctaataatactcaaaaaaatttacataatgaaaatgtcttttattttaatattaaaaataaaaaacaagtgacctgcatatatgtaaaagtcactattacaaactcagcgaaaactttaagtcattgaacttattccacgaaaaacacaaaaacgtctttgccctggacaagcgaaaggcatctctactaccttcttcagtaagtaaagtttgagtaacttacttaaaacagatgtcagagggtagcccgtgcctcatgccaggctaggccatatacccagcggcaaagtagaaataataggagcgacaacaaatagatttggaccacagcgtaacgtggactaaatatattagcagtaggcggttatctgggactgggaccagccctatgaactaaaataattattcacagcgagtgttctatgaagtaaatagttttttaaagacttaccagacgaatccaggctggtcttaagatcacaaaatactagagttcactacatgactgagaaaactcaactcactgt

SEQ ID NO: 12278 - DNA, 569 bp, Diabrotica virgifera
attaggatgcactaatgtccaaaatgtccaaaatttgtactatactgagtagttaatgtttgaagcatgaaataaccgtacatcagtcttgtgaactgtttagagaatgagttgttacggctaagaagcggcaatttatagggaattgtagtaactaggataacgatattttttattaccttctagtgtatacattcaaacgtttcttttattcgactattaagaaaccttctatccttcgtttcacggtcacctttcagtacagattcttacgaagaacagtgttgccaagagatatattttaaacaattgatattttctgctatgttatcattaataccgtataaaaatatttcatagtacctatctatgaattggctaaaaataacaaaacccacagattttcaaatcaagatgttttggacttctcgaatattctatatagacggactttaagttcgtcttcttaaaacctgtaacactgatctgcaaggttccgttagatttatatggggatatgctgctcgcactgcaaagtgactgcgaaacgcacaatagtaaaaatagaa

SEQ ID NO: 12279 - DNA, 570 bp, Diabrotica virgifera
  SmartBlast Evalue=2E-49; Info=Synapse-associated protein n=2 Tax=Aedes aegypti RepID=Q173T6_AEDAE
ggtgtaggtttccgtagcagattgactatctccttctctcgacataaaagataattcattggcttgacaaattaggcttacacgataaaaataattcctccagaaatcttcttctaaaattactttaggcacaagttcgtaacgcattttttccaggttggggtcttgttccattatcgccatagcaattgggtacgacacttggtagtcgaactggaagtctacaccagctggtggactacgaacgaaatttctacggtccatggacaaactgaggcattcatccttgagagcctcttcattagcacaacctacccatgggggcaatggtgaggcagagttttcattctgagatttcatgaatgcttcttgttctctgttgaactctcctaatatgctatttttctcgactgattctttgatcttagcacttgcctcgctcacggttttaccagctttatttacagcagaataaagaaaactaccaaaggatttagcgcctgctaaagctttagtttgtacgtttacgaattgactatcttatcttcagtgggagattcagctgcagac

SEQ ID NO: 12280 - DNA, 569 bp, Diabrotica virgifera
  SmartBlast Evalue=4E-48; Info=H/ACA ribonucleoprotein complex subunit 2-like protein n=4 Tax=melanogaster subgroup RepID=NHP2_ DROME
tttatacaaatatacattaccctacaagagttgtattacatcttacaatatcttaaactagatatcaacattaataaaaaaaattactcaaaaattaacactaatactaaagagcaacacccaaatgtttaacttcttctgataattcatcaaaggaatctttatattcattgtgtggcttaattaaaactgttaaacaccctcgttttacacccatagcggctcctagatcttttctacttggaacaaacacataaggaatgtttttgtcctcacacactataggtaagtggcacattatttccaagggccatacatcaccagcaaagagaacgattcctgtttcgccttttcttagcctcttctgaacgtctttcaatccacatcttatgtatgttttttgtttcattgcttttttaactaatttgtagcatcgtttagcaagcttcttggatgccataggttttgaaatagcattgcagtttgctatcttttcatcgtaagataattcgtcttggggctcttcctttacactaacatcggcttcttccttaattttacccattttt

SEQ ID NO: 12281 - DNA, 568 bp, Diabrotica virgifera
tttttttacatctaaaggtgcgtattgatttgagcaattttctcagaacaaaccgaacgagcaaaattctaccaaattgaatgagctggttattttcagaggtaaccattgaaagatcaaaagccctcagtgggtgcaggcattcaatctatgtgttgtgttcgcagcaaatatttaatggaaaaagctttgattagctctgcatttaatacaaatggaatggaatagagaaaaatgtttgaccctttcagctccactctaatattccaacctctgctcctgtgccggcagaaataatttcgtttgaatataatatacacaaagcgtgcttacatgtccaacggcactagtctatagtcatctttggatgcacattgcacatacgcatccctggagctgaaagggttaagtctgattgattcatatgatctctttcctgtgttatgttatggaatccaaaacatgggaatattaaaataaaataaaacaaatgatgcatgcatactgatagctgaagaagtagtatgtatctctgaagaaacaatgaataaggttgatagtttgcttg

SEQ ID NO: 12282 - DNA, 568 bp, Diabrotica virgifera
cgcattttaagtattaggtacctcaaatttcaaaatatgctcagtatagactcaaccaatgactcattttatattactccttatgatcccaaatattagtagtgctgaagctggttgtataagctgcatttattaatccaattgtaggagaaattgcatcaataaattccatagttgttttaaagcagaaaaaaatattttgcaacaagaaagttgttccatccatgcatggtgttacgaagggagaactctttaaaatgttcttcatttgatagtataaaataatcagaaaacaaaatattaatttttttgaaagtttcgtccttatttagttttaataaaaaactctacaataaaatctattatccattttccttttagtaaaatatagatttaataataacagcaaatatacaaaattaaacaacggaaattaatattatttacgtcttaattctttggatatttacttatttttatggtttgaaacaacacagacagaaattttgtacgaaatatttactaggtaacactattttccaaatataaagagacatattattattat

SEQ ID NO: 12283 - DNA, 568 bp, Diabrotica virgifera
  SmartBlast Evalue=6E-71; Info=TBC1 domain family member 22B n=1 Tax=Culex quinquefasciatus RepID=B0WL49_CULQU
tgaatatagaaagaagaaatgaagtattagaaagaaagagacacgattattggtctctagtagaaaaatattattatacagaacatgatgaaacaaatcgtgatattcaacaccaaattaatatcgatgtgccaagaatgaacccttcaataccattatttcaacaaaagacagttcagataatgtttgaaaggatattatttatttggtcaatacgtcatccagcctctggatatgttcagggtataaatgatttagttacgccgttttatatagtgttcttgcaagaatatttaaaagaagatcaaccatttgagaagtgtttcgttgatgaattgactgaggatcaacgcagggttgtggaagcagattcattctggtgtttatccaaatttctggatagtatacaagacaattacgtttttgcacaaataggtattcaaaaaaaggtgcttcagcttgaagaactaataaaacgagttgatgaaacattacacaaacatttaaaagaacacaacgtgagctatcttcagttttcctttagatggttaaataatttattgactag

SEQ ID NO: 12284 - DNA, 569 bp, Diabrotica virgifera
ccgaattgtaaaatccaatcgacagacttaaactaaattaataacaatgtacactaaaattctagttctacttgcgctattagcattatttgccctagcaaatggaacagcaacgtactgtgagcgatggaagtttggctctgagtttcgttgtgctaaagatgactatcctgcagacatcatttcagtccgcaacagagccggaagtaatatctctttcaaagtgggcaaatggttgtcccgatctgatgttcttttcgtggttaaactactgaactactcagatcagctatatagtctaaaatcaggtgaaagcatcaacattgactttagcgaagtcgattctggatactaccaccagctgtacatttatgaatgtagaatcaacaaccgatatgcaaattgtcctgatacagttattcctacacccagtcttgcatctggagcggtcaataattgtcctaaatcagttactgatatgcctattgctcatctataaaggtatcgttaatcatattaactgaatgtactaacttttttatttaaatagaataaaatcatacatattc

SEQ ID NO: 12285 - DNA, 569 bp, Diabrotica virgifera
aattgccccaatacttcatctgacaatgtgttatcacaaaattctactctttctcatgacccaactcccactaccgaatcaacgccacagcaacagcatacacaacttgtgacagacaatgtgttatctcaaaactctactatctcatatgacctaaccaccaccaccgaatctacgccacagcaacagaacacacaacttttctcccatactgaatcacatcaagctgaagacggtgatccaaacaacataaatattcaaaaaccttcttcaatttcttctactcctcaaaccctactgccaacttctgaagcgagcaaaataattcccaccgaagagaacattcccactaaaaatccatgtgaaaaaacctctgaagtaatggatcaacaagcttcactcggaatcataggagaatcatccagtacatctgtgaaaagaagtattgacgaaacgttatcccctcccatcgaaaatctgaatactaataatccaacgtttgctctccctcaaacaccacgtcaaaccaacatccaaaagcccaaaaaacctaaacgcacagcacctac

SEQ ID NO: 12286 - DNA, 567 bp, Diabrotica virgifera
  SmartBlast Evalue=1E-65; Info=Protein fat-free n=2 Tax=Danio rerio RepID=FFR_DANRE
taaatttttttgttagaattcaaggtcttaactgctcacaaatgttaagaaagagtgtagaaacaagagattggcttaacactatagagccaagaactgttagagctgttatgaaaagagtagtagaagatatttcagctatagactcaactgtaacacaattatatgatgatcatggaaacaatggtactgaacatagtagtgattctagtcgtaaagcgcatagtatttctctaccaaggcaccagtacagatctaattggtctaactatacatctaatcctttggattctgcactagtttctaatatgcacagattgtttagtgaaagaatagatattttctcatcagtacaatttaataaagtgtctatattaacagggattattaaaataagcttaaaaacttttatggaatgcgtaaggctcaaaacatttagcaaatatggattacaacaaatccaagtggacacacattatttgcaattgtatctttggaggtttattgcagatgaaaatttggtacattttttattggatgaaatattagggtcagctgcccatagat

SEQ ID NO: 12287 - DNA, 562 bp, Diabrotica virgifera
  SmartBlast Evalue=4E-53; Info=Tectonin beta-propeller repeat- containing protein n=9 Tax=Sophophora RepID=TECPR_DROME
atgtacatccgatgggtgattcgcaagactatagagtatacgaaaaccagcggaatcccgttacgggttatacttccgcaggcttaccgactgacaggcatatgtggagtgacgccagcggcaaaaagaaacgtacaagagatcaagtaaaattgctttcggttcactggcagtgggtttcggattggatgactgattttcatgtaccaggaggcgttgataaagaagggtggcagtatgctgtagattttccatctacatatcacgccaataaacaatttactgattatgtccgacgtcgaaggtggtacaggagatgtgctgttgccacgacggggccttggcaggaactcggacacactaaaatattagacgtgtcccttgaacccgtaggcgattttgtggactccgtcatggcagcatgggctcttgctacaggtggacaagcggtgattagagtggagtatccaaatccaatcctgcgggtcacgtatgggaacatgttaatacagatcaacctctaaccagtattagctgcggtccgttcaaacaagtttgggcc

SEQ ID NO: 12288 - DNA, 570 bp, Diabrotica virgifera
  SmartBlast Evalue=4E-12; Info="Polyprotein, putative n=1 Tax= Solanum demissum RepID=Q6L4B3_SOLDE"
gtacggaactgaatgttgggcagtgaaaaagaaagattaacagcgaatgcatgtagcgaatgcatgagaatgcttaggtggatgagtggagtgacaaaaaaggataaaattaaaaaatgagtatattaggggatgtctaggtgtggcacccattgatgtcaagatgagagagcacaggtaagatggtttggtcatgttcaatgtcgagacgttaatcacccaatacaaagaatttctgaagtgcagattcatggaaggagtagacgaggaagtccaaagaagacctggggggagacgattaggcaggatatgttggtaaaggggattattattgatatgacccaagatagaattgtgtggagaaatgcaattagggaagccgaccccgcatagggatgaggcaaagagaatgatgatgatgttttaaggttgtaaaagttataaaatacatgacctaaatgacatgacggtcacatgacatgatagacataagagtcacatgtaagaatgggccggattagcccataatcctaggaattacatagttacccgtgtgtctactagcgtggc

SEQ ID NO: 12289 - DNA, 566 bp, Diabrotica virgifera
  SmartBlast Evalue=2E-51; Info=WD repeat-containing protein 61 n= 2 Tax=Formicidae RepID=E2AE03_9HYME
atgccgatttattataagaaaaacttaatttaagttagtaaccccgtttaaaataatatataaatatgtattcggttttacacaaaaatgaaaatgctcatgaagaatgtatttggagttgtttttggggccgatatgcccccgaaaagaagaaaaaatccgaggacgacaatcaaggagacgatgagaaatccagagattcaattctatcagatgagcctccgactgactatattgttactggtggagtagatgatttagttaaagtttgggaattgcaggatgatcgtctagttcttaagcataacctagaaggccattctcttggagttgtgtcagtagctgtcagtcataatggcaaattatgtgcatcaagctccctagattcaagtatgaggatttgggatttggagaagggtgaaaagattgcaaatgttgatgtgggccctgtagatctttggactgttgcttttagtccagatgataaatacattatttctggatctggaaaaattacagcctatagtgttgaaacagccaaagctgaacaaacttttgaaactcga

SEQ ID NO: 12290 - DNA, 568 bp, Diabrotica virgifera
tttgcgttatttgccggttattagtgcactcatgactgtatatcaattgagcctgtacatcgtaatagctctaaagtaagactgggaaccagtttcattggatgagtttatacacgttcggaagatttcatataaagttttttattcctgagttaacggacttcgttggaacaaaccatgaaggattgctcatcagtcgcaatatcttggactgaaagcgttttgaaatctttatgttggatatagagttgttcttcacaacagaactccatctggattttaaatattgatgtgttttctccatgggatgtctgtcgacatacctccctaggtattttgcttcattttggttgatagatggactttacgagttgtaataattttgttgttaccttaacaactaatgttacatcacttattaatccaatgtgctattgtatgctctttcggtatttgtgaagcgatgtgtttatcctcgtgggatgcggcatataaaaattacaacaacgaaaaacgcaattatataaactactattagtgacagcactgcagtgcttgtcaaagtatg

SEQ ID NO: 12291 - DNA, 569 bp, Diabrotica virgifera
aaccgaaggggtaatcgcaaatagaaaagaatatatttagaaatttatatttcatttaatttacaacaaaaaagtgtcagtagatttcttctgagtatattttgttaacaaaaacgtttcagtagagcatgtaacagttgttgaagcatgaacatgtcacaattggcatatggatgtgacatatgatataggtacatcaaatgtaataaataaggcgtcaatttccatctgtctctgtgtatctgagccatcatattcaatagtttctatttaaaataccaaggaaaagattttgtactttttgaatgatagtcaaactatttgttgaactttatctaatatttagaatatcccggatacataatgagaaacggcactaaatacagattactgaaaataatccttcaaggcaaattattcggaaagcgaggtataaggaaaagaagaatatcatggttaaagaacctgagaaaattgttctccaaaacaacaactaatctatttaaagcatcagtaaataaaataattatagccagaattatcgtcaatattcgaaactaattggcacc

SEQ ID NO: 12292 - DNA, 568 bp, Diabrotica virgifera
  SmartBlast Evalue=3E-62; Info="Protein farnesyltransferase subunit beta, putative n=1 Tax=Pediculus humanus corporis RepID= E0VV79_PEDHC"
ttaggaatactgcagagtggatagtaagttgtcaaacatacgagggtggattctctggatgtcctggtatggaagctcatggcggatacgcattttgtggtttagcagccttggtaatactcaataaaggacatttagtagatgaacgagctctactgagatggttagtacagaagcaaatgaaagtagagggtggatttcaaggcaggactaataaactagttgacgcctgttattctttttggcagggaggcgcttttcctttaatatattctctattatacgatgctgagaatccaccaaaacaccatctgtttgacaacggttgcctacaggaatatttgctagcctgctgccaaaatcctaacggtggcctcatagacaaaccaggaaaaaacagagatctgtatcacacttgttatgctataagcggccttttcgatagctcaacatttcatggatactacaccaatactaggtcccaaacgtaatgaagtgctgtgcacccatcctttgtacaacattaggccagattttgttcggaaagctttgttatatttcaacgggt

SEQ ID NO: 12293 - DNA, 568 bp, Diabrotica virgifera
gtcaaaaatgtggtgtcataaatatattacaagagaaacattcaatttagatataaaactcacacaatagcacaatagtttttagtagtagaatatggtacaattttgtctattttggagtaaaatattggttgttgaagaaaatataaagggacaatttaagttcatgtttaatcctggttctgtggttttcccattaaccaaattaatgtccatttggaatttttataatattaagatttgtcagaatccagaactttcttcatagtgagaggtggaggagtctgtcaagatatagtacttcccttatttatctttaatttgagagacttagtagttgggttttaaatatgaataaacttcttaaaagtgtacgtttaacaaataataaggatgacctcataaaaaagtcaataaccagacaactgtcagatagctgcaaagaaatacattatgctggagttgaagaaaacaaatctcctaacttttcagagttttccactacagaagcagcaaccacattgtgtacagcaattgaagccatcttcctacatgggttaagagatac

SEQ ID NO: 12294 - DNA, 568 bp, Diabrotica virgifera
cttaaaaatatttattaattaaataaattactgaataaaaatgataagttgtatttcactctggcatatttggtgtagtccacacgtatcttgctctaggagtgacagctagcttgaagccgtcgattgtttccaacacatacgccattgcagtgatgtatccaatgattcctgcaactatatattccttggacaattcagagagcgtaattgatgcacctagtgcataaacgacagcgactgccagactgttggcgcattctatccagtcccacggaaaagtcgattttgtaaacaacgctttgtaatgtacaataaggaagaataaggtggtacataaagcatatatagcgttgaagttgagaaggatcgttttaaataaaaatccacaaattgatcctgctatgattacgctgatgttcaacacctgttcacagactttaagtaagccgggataacttctcaagtattccgttccgtatttctgcacactcatttttcacgaagtttgtctttcatattagtttaggttcgctagtggacaaataataaaatacgagtaaaacag

SEQ ID NO: 12295 - DNA, 569 bp, Diabrotica virgifera
  SmartBlast Evalue=3E-53; Info=Leucine-rich repeat protein SHOC- 2 n=1 Tax=Camponotus floridanus RepID=E2AHX9_9HYME
ggccctgaaaaaattcgtaattgaaatcaaacctggttttcgctaaattagctgcaaaattcaataactaaacagtctcgcctagtcctttttcgttaacagtcgtcttaaaatcacaaagagtcttctcgacaaagaagaaaattaaagcaacactaattgcatcatcacatagctctgtaaggtccttgcattttcaaatactgtatcaccaaagaaggccctccacctactatctccgccggtatctgtgacaaaggacaattctctatactcataattcctaaattagagcaaagagccagctcgaatggaagattatgtagagtcgggttgtcgttgatatatagcgattctagattttcgagggttccgatttcttctggaagatacgccagattgttctcgcctgcactgagaaagacaaggttggtgagatgaccgattgctctgggtagagaagtcagttggttggactggatgatgagcctttggagctcctttaaatagccttacttccctgggggtagctggctccaggcggttttctctaagtctaggacacggag

SEQ ID NO: 12296 - DNA, 567 bp, Diabrotica virgifera
cagtcatactcatcacggcactctttgctggcgctttggttaatggagagaagactcctgatccttcaaaagccaggcttgtaattgcatgttctaaggcgtttatttgggcaggaagtattgacaaaagccaaccaattatcagagaacttatagacgcttatcataatagcgacgatgacgataaaaaagcaatagaagattataaaaagatattggataaacataaaaagcaaataggagattccggcaaaaatatgtataaatgtatgaatgatttggccatagccggtagatttgacgtgcaggattttggagagtgtaggaaaatttttaccaatgaagatataacgaaactcctaactccaatagtattgaaagatctaaaaacatctagtgaaatcaagtacgatatcaaaaatgctataatcgcaaaatataaatgtaacgatcctgagaataagcataaacccgaatgcggtctaccagaaaaatatgaaacatgtagaaaaaacattgttgcagcttaataatctggtggtaatcctaattaaataattacaatcc

SEQ ID NO: 12297 - DNA, 567 bp, Diabrotica virgifera
ttagtagcaataccaactgaatctacaatattttatgctaggcaggattgaaagttgaaatcaggtttcgataatgtgtaatagtgagaggatagtataagaattgtaaataaaatgataatcatttagcatgtgaggttgtattgaagcaatagacgcaatacgatttcattttaataggtatacaatactaaataatattgtaatactagtattatacgttgtatattcctcgtaaggtagacaaaaatgattccgataatgaaaatcaaaattttcactattattagaaattaaaaaaaaacctaagaaataagttgcaagtatttttaactagtactttagaaatatgggttttctagggagtttaaatatttcgaattcttgaaagtagaaaaaaaaaagatctggagccgctacagtactgttacaagtgcatgtaaagagctaaaaatgacacttactcagtgttaacagatcatcaatggtgttggaaagtcatgacggcaggtaagatgaacggagttttaaacttttcaaactgaatcaaggaacagttctttgttc

SEQ ID NO: 12298 - DNA, 566 bp, Diabrotica virgifera
ccataaccttttaagtgtcatggtaactatgtttaccactgttgttaaaggttattttttaacctattgcaatgcgtactagaccttaagtacaaatagtactattgcaaaagatttgtggtaaaattagacaccacaatactcgcgtatgcctgcaccaagccgaagatcatcgaccggtaaacatagctaccagtgagaatttctgtggggtactttgacataataacttgacaattattttacatgaatacaaaaacaaattaaggaattgaatattgtaagaatgttagtgtacattctagtctttcatattatggaaatgtgatattttgtgagtttttaagaaaagatgttctgggtgaatattcagagaaacgttttttccagttagcgaaaatacgaaaagatgatggcaactgcttctcattgtagaacaactgaaaaagtttgtaaataaagacatggatgatacctatgaagataattattgtctgtagaactaagaggtgattctgatgtatcagacaatattccacttcttgtactctctttggctaaatgca

SEQ ID NO: 12299 - DNA, 569 bp, Diabrotica virgifera
  SmartBlast Evalue=9E-11; Info=Putative transposase n=1 Tax= Glossina morsitans morsitans RepID=D3TQX7_GLOMM
ggaaactttccccccatatgaacgaaggagtaagaataactgctgttcctaagcatatcaaaattttgtcagttcttaatttttttggacagggaagttatcaacgaggaattgggcatggctatagcttctgtctaagtcaaccagtaattagtagaagcattactgaggtcactaatgtcattgtgcaacaccttcttcaggatgaagtcaaatttccggtaacaaatgaagaaaaaatcaagatcaagaagggttttaaaaatatagatcaacgatttaaaagttgcattggagttgtggatgggacgtatatcagaattattgctcctccagctgatcatcctattcatcctgcacgtgcgtactactgtcgtaaaaattattatgctgtgaatacaatgatcatttgcgattcaaataaaaaaataatagccataaatgcacgatttcctggatctgtacatgatgctgccatatggatgacttccaatattaaaagaaacatgcaaaacaattttattgcaacttctgctccagattatttaattggagataatggttacccc

SEQ ID NO: 12300 - DNA, 567 bp, Diabrotica virgifera
ggcatacagccaacccagggaactaccccttttagtctaatgatagaaatagattctgaatctgaggccttatctttttcagattagcttaccacatccagtatttgctgttaagaaaatttcatttttttttgtcaaataaattttgttttctgttgtttcgtctcataattttgtatataatttaatgatttttaataccctatttcatctttaacaatatccataagctcgtcaaaggttcattctcagaaaattctctatatcgagaatattctcgggaatattctccgatttttcattctcgagaattctccaacactacaagagacaaatcaccaaatggatgaaaatcattgggactactgaggatttgtttataacaaattaccctcacttcctacgcaaaagcaagtttgaaattcgaatacactatgaaatatactctgaaatttagtggactttaatctagcacagaacagacctggcccctggactataagctttcattccataaaccacttaatagcaatccatactgttcacatctacattgtcatattcttt

SEQ ID NO: 12301 - DNA, 568 bp, Diabrotica virgifera
  SmartBlast Evalue=1E-49; Info=Mitochondrial ATP synthase F chain n=4 Tax=Culicini RepID=B0WDF3_CULQU
ttgatatctgcgttttatttgtaaaattattaaaacaaaattttgtagaagtgacacttgttttaatcaacagatttacattacaatatggattattggaaatacaataattataacatacaattcagtgatactaccaaaaatttagattgtaagtttagtggtatttgtagtttctgtggtggctgagtttagtgtaattaattgtatagaagaaaatcatcgatccaactactacatgtaagaatggtgcgatgccagactttttgggttgaacatacttgtgttgccatctccaataagccctgctgaaagcaccggcgagagctgatggagacttgttacggcgagccaaccaggagccaatttcaccaacttttacttgtccaaaaggagtatcaggctttccgtaaaaacgtgcagggtcatagggtccgtggactttaggattatattcggcaggataatcaccgaaagccattttggaaaatatttagttaaatgaaaattggaaagacttcgtaacctctagagcactgaacgagaaacagaaagccccttccctttt

SEQ ID NO: 12302 - DNA, 568 bp, Diabrotica virgifera
tatattgtaacatttacttagaaagttgcagatttacagagatacttaaaattacaaaataaatttttatcttctatggttatgaaaatatgaagtaatagctttatttaattttagtacctatctatttacaaaaaatgtatctatagatatacatagtcatatataaaatatttatgtacaatatgctatcaaaaatgaaacgtaacaaagtttggaaattatagttccttctgcattgtccatgtaaatgtatcttcctctttaatagtagacgtaagcctatagcccagtttacccaatgccgccatgattaccaggggacgtcctggcatatagataaaatttcctttgtcgtgaaaataatcacatatatcttcgggtgtataaaattgatacaccaaaactgtttcatccttctcatttaagcatataatagaagcagatgatccatacatttttccttgaacaaccgcaaattcataagttcttgcagccatgactacggtagtgtgtcaatttatctaaattcaaatctcttcaaaaaagagcctactaactgacttgc

SEQ ID NO: 12303 - DNA, 568 bp, Diabrotica virgifera
  SmartBlast Evalue=1E-47; Info="Cyclin G-associated kinase, putative n=1 Tax=Pediculus humanus corporis RepID=E0VB01_PEDHC"
ctgctacaactgaagtgtacaggcctgacatatcatggactgccaatcaacatgctggacttgaagaaaatatggccaaattcacaacaccaatgtatagggctccagaaatggttgatacttggaacaattactttgttggtactcctgttgatacatgggcactgggatgtatcttgtataccttatgttttatgagacatccatttgaagacagtgcaaagttaaggataatgaatgcaaattacaatattcccccagatcctaagttctcttgctttcatgaaattattagaggatgtctgcaagccaacccacaagaaagaattacagtatcagatattcttgaaagacttgctgccatagctgaatctaatgggtacgaccttaaggcacctcttatcttatcgactccacagcacaaaagctcagaacctcaatcacagtcaaccttttacgatggaccttctaacaacgctacgaaggtgccaccctctagacctgcccctccaactgttgatgccccaagaccacctccacaacaggctcctcccagaccaactccacc

SEQ ID NO: 12304 - DNA, 565 bp, Diabrotica virgifera
tagtttatcctgggccaaactggtttatcctgatataaatacacgcacttcaggccaaactagtttggcctaggccacactgttttatcctgatataaagacgcacagtttaggccaaactagtttatcctgaagtgtatgttttatatcacgataaactagttttgcctggtctaaaccaatttaatctagtcgaaagtaattgattacagattggttgctgatttaaacgtaagtttagaagacacttttaagagttgtaagactttagggtaaatgataaaccgagatggcacttgtattgacagatataaaaatgaaaatagtactggaaaacaagccacgaaagcactccatggagtgatatggaagaacactctaactaaagaaaacaaaaaaggatttttcagggcatagtgctgaacattaccctacaagagcggacgaatggccagtgacaataataataatacgaaataaaatacgaagagttgaattggagtttatgataaggtgtctacaaattaccaggtaggatagaataaaaacagaggaaatatgaaac

SEQ ID NO: 12305 - DNA, 567 bp, Diabrotica virgifera
  SmartBlast Evalue=2E-71; Info="STIP1 homology and u box- containing protein, putative n=1 Tax=Pediculus humanus corporis RepID=E0VIW9_PEDHC"
tccctcttctgcttttatttcttgaatccttgattctctatctttttctattaatttatttaaatatgactgtagttctatttcttgtgctatgcgcttttcctcttgtaacgaaaatcttttctttctagctgctcttaactgagaagcaatatcatcaccaaagtttaatttttgttctctagctaagtcatttgctcgttgtaaatgtttaattgcttcatcataattatcagtttctagtaatgcttgtccaaggaaaaagtgagcttttaccaaattcgagtccatgtccagcgcccttcggcaatccatgcaggcttgatcccattctaataatttaagataacaaagagctctgttggtgaaataatgggcaacactcggattttttattatcgctttcgtgtaacagttaacagcttcttcatactttcttagattgaaaagtcgatttccttgctctttaagttccttatcggacagattcgctgttgaatacatgtgtttactcattttttgacctaaaaaatatcaaaattaatttactgtatctgtatcattttg

SEQ ID NO: 12306 - DNA, 556 bp, Diabrotica virgifera
ctagaggattttggttcagagaaaagatgttaaaagatatgacacattatattatttttgaagttcctcccacaaacataaaactgacaaaatggtccactgaaagccgtgtagacagtgaatattatttctctctttctgatttttcaaaaactttaatttttttaaaatattctaaacctgcttttaagttttcagttgacttgcttaaagttgacattggctttctgtttggattactatcactacaatatttgctgttaagaccatacaaaaatattactttattaattttctaaaaattcggcagtaagagaagccgttttggtgtgtaactgccctacagacattgctgttgatattgctgaggcaattgagttggaaaaaatttgtgctgctaattttacacgcattttttgaaaattattagggtttatatgaacgtttgtcattttcaccatgcatcgtgctctcacactggttctatcgatgttgtatgtgtattcaatatcttgccacgatatttgtttagaatcggccaaaaacgtcaactttt

SEQ ID NO: 12307 - DNA, 569 bp, Diabrotica virgifera
agaactgcaacaagctgctttaaatagaaattgtttattggccttaaacgctatttttgtacagcttatatcaaagcacaataatactgaaatattattaaatttgtgcctggactggatgatgaacattaaaattaatgaatcaacagaaccaaagatacctctaatttggtgcggatttctaatgctagttttgcaacacgcagagaaggatgaaccgacatctggcactattttgtataaatttacacagattctcttacaaatctgtgacgaaaagggtcctagcaaatggggccgcggtttactcaacgtcataggcctttctaaacaaggaaatggttccctggatttcaaattcttatgtcgcgctttagcaggatatatcttagctcaactgccagaaatgaagggggaaccacaagtgataaggacatttgccaatgctccctccaaagttggacagtctggaggaaacaccgagtgtgtcaaggttttgttaacaatggattttggtcaatcacaaggaaaaataaaagagtgtgcaggattagcactaaaacagatcc

SEQ ID NO: 12308 - DNA, 567 bp, Diabrotica virgifera
  SmartBlast Evalue=8E-34; Info=Titin n=1 Tax=Harpegnathos saltator RepID=E2BM23_9HYME
tggttgaagagcatcagaatttgaagatataactttactcatatgagaagtctgtgattgagttactacttccctagttatcctataagatgattcagtgtgttgtgacttctcagtggtgagaggcaaagagggttgaatttgcatctgattttcttcgttgatcacgtaactggctggttgcacgtgtaggtttgctacacaagttgctttacctacttcgttttccgcaatacatgttattgtgccggaatgttctttcttggcgttggggattgataacacttgtctgtctcctgaggtagaaatcaggaagtctttacctgaaatattttccccgttaaataaccatctgacttttggtgttggtcttccaataacgatgcattcgaatttggatgctgtgtcttcgtagacggtcttatctccaaagccttctttaaaatcaggagcttgtttctgttcttcatgttggacagtttccgacggtttaaacgatttgacaattagttgagcgaaacatttcgcttctccaactgagttcgtagctttgacggtgtagacgcc

SEQ ID NO: 12309 - DNA, 568 bp, Diabrotica virgifera
  SmartBlast Evalue=4E-41; Info=TAR DNA-binding protein 43 n=3 Tax=Apocrita RepID=E2BW55_9HYME
acgtaatccgggccatgatctgttatgttatgacggttatgatagtgactgatctgaaataaacaatcatattaattgaaaatcaacaataaatatatcattaaataatagttctaccatcttatattattatctggcgatatggctatagattatgtgctagtagtggacgaggagagcgaatatccaatagaactacctactgaggagaatggaaacttgctgctaagcactgttacagcacaatttccaggagcatctggtttgaaatacaaagtatctgttcagagtaggacatttcgaggtgtaaggctttctgatggtgttcttcatccaccagccgatgagggatgggataacatagttttttgttgtgtatatcctaaagagaataaacgtaagcatgatgatgctttagaagctcctgcttctaaagtcaagcgtctggagtctaaattgaactgtactgatctgattgtgctgggtttgccctataaaagtaccgaaaaagaattaaaacgatattttgagaagtatggtgagctgttggtggtgcaattgaaaactg

SEQ ID NO: 12310 - DNA, 568 bp, Diabrotica virgifera
  SmartBlast Evalue=3E-58; Info="SCF ubiquitin ligase, Rbx1 component, putative n=1 Tax=Ixodes scapularis RepID=B7PN13_ IXOSC"
tgtgttggggccgcaccgattttttttttttttttttgaattactaagaaactgtttaattcgaaagaaaatgaaatattgacaaaatattgtattattaattgttcataccattaaattataaataggtcttctttgatgcaaaatcaaaactaaagcactaatgtccatacttctggaactcccattctctattatctaagggacatacttgtctagtttttaaccatctagatatgcagtggaagtgaaaggcatgattacaaacaccccaagctacagtacattcttcactggtggctgacgcctggtttgcctggcattcaatacatagatccataatatgatttcggcaaatggcacagttatccacaacaatgtcccaggcccacaaagctacagcattccacttttttacttcaaaccgtttcttttctccttttgagctactggaagtgggcaattctacttcttcggcatcaacgtccatagcagaagccatttcttatttctttgtgctaaatttgaattatttaaaaaactaaatcaaatgtgtaaaattttcagt

SEQ ID NO: 12311 - DNA, 563 bp, Diabrotica virgifera
tattctttggttggatgaaccaaggaatttaatcaaatggaaataaaacaagaagttaatgagatgagttgtaaaatagaaatagatgatagtggagccggttctgatcctttgaataccaatacaatcaaaattgaaattaaggaagagccaatgctggaaaataggtatgatacatttttttattccgacctaaagagatatcctataaagacggaaatagaagataaacttcaaccagatgaagaaaaacatacagatataaaaggtttcaaaaagaatatatcaaatttagtggaaacacggaggaaagccaagccaagaaagccaaagtatatagagaaatataagaaaaagttggaaatcatgcaattagagcacgagagtaggatggcacggatgcaactggaacatgaactcaagaagaaactgcataatattaggatggaagcgttgagaacagaaatggaaatgatgcaaagagaagcggacaagagaagacagctgatgcagcttgaatataaaataaatattttaaaaagtaaaattaataaacattaagt

SEQ ID NO: 12312 - DNA, 566 bp, Diabrotica virgifera
  SmartBlast Evalue=9E-18; Info=Pol-like protein (Fragment) n=1 Tax=Triatoma matogrossensis RepID=E2J7G7_9HEMI
tcagaagggctgttatggttcattacacataaatcttggataataggtattgcactgttctggataaatgctaagtcaatttacactatttccagctttgctaatgtgagtaaattgtgccggtgtatcagactcagtcctcccattaagtagacagaaagagttggtgttcatgaagtcaataatatggcgccccttagtatttaaaaccatgtcattgcttagacgatactccgatagatttgtgccctccagcatctctggcggaacttctccaatatctgatattctactgttaaagtcaccgccaattagaagcggaacatcgaaatggttttctagaatttccgacagagatacttgaaaaagttctagaatatacacaatatctaaggacggtttaaaatatactgtgcaaataataatagactcttccgaaggagaaaccagtctgcaaaatagccaccacggtgttttttctaaaattacacagttgtatacatttttataaatatgtagataccaccgcttgctctgcccacggatttctctttcgaagcaggact

SEQ ID NO: 12313 - DNA, 564 bp, Diabrotica virgifera
acaatgtaccccagctgacggtagaaatagacaatacattgaatctaaaacagtccactcatttacaaatagagagcaaacaagacaatttgccgagcaaacgagcaaacgatttcgagaggatactgcgtgtacatattcagcaagaaaatatttttcaaatccaagagcaatctatgaagaaacacatagtaaacaattcgatcaaaacattccaatcggttccgaatcatccagcccaagtgaaaacagatttagacaatatgaatctaaaacagtctactcattcacaaacagtgagcaacgcgcagaggaaacctccacatcagatgccacttgtggacaaagaactgtgtataaagattcagcaacaaaatttttcacaagagcaaagttcacagttaaacagaaagagaaacgagaaatgtggtactccgattgtcttgaaaaaaaaggaaacaaaaacttcaggacatattcccactccagagaaacaatgcgaggtagcggaaaaaaatcagtcaataatggaaagctcacagtcaaaacgaagaaaagcgagat

SEQ ID NO: 12314 - DNA, 567 bp, Diabrotica virgifera
aatacagcttatctatcgccatgtctaatggttcaagcactaaccaatccaatccacgaaaattataaaacaaaaataaattacgaattgttctcactctccctttgcgcgttttcggcctccatttttttgcctggcggccgcagcggctgcagatcgactagcactagaacgtagattcttcttcgcgatcacggattcatgatctatcggtagttcccccgatttacgtttgcctcgtgttcgctttgcgttcttcttcggaggcgtttcggactcctccgaggtttcaggtttggactgatcttccttgtgtgaagtctcagcaggctcagggggaaccttatgcccagtcggttcaggttcaggttcctgttggagatccatagctcgaggctctggtgatttctccacatgctccgctttctgtggactcaccgaagctttcacaaccgttgaaggcgttagaagcgcctcaatgtccactccttcctgatcgtttggtatcgtcggaggaaccggaacgggaacaggaggtggagctatagacgttggtactaccatcgt

SEQ ID NO: 12315 - DNA, 567 bp, Diabrotica virgifera
aaataatatcatccgcaaactaattaatacaaaatggggagcacaactacacactctgcacttctgccttagcattatgtttttctgtcgtggagtttggagcaccagtgtgggtaaactctgttcacgctaaaatcgtcgacttgtctcaaaatgaaacagttcgtataatatcgggttgcttgaaaccgacacctatcgaagaggtctaccccatagttggaatcgctccactacctatcaaaagacaggtcacgtcagctgtagaacgaaagaagcaggacacggatcgaagacaccccttgtatgaccaccagattcagccaagtagactaagatctcggaaaagctttctgaaaaaatcaagatccatcccgaagcgccagagatacctatggcaagcgtcagctacaacacattttgtcccctcaaaggaaacggctgctgtgcaaagtcgcaaaattgagcagaaaagtgtgaatcatgtatcagttctgtcctaaggtacatagtccaattgtccatgttacaaagttgtaacaacaagttaacgaagaaaataactta

SEQ ID NO: 12316 - DNA, 566 bp, Diabrotica virgifera
  SmartBlast Evalue=1E-20; Info=Endonuclease-reverse transcriptase n=1 Tax=Bombyx mori RepID=D5LB38_BOMMO
ttactgcatccatctgattcgtccaagttttctctaaagatgttttcagggtatattttaaatgatgctggtgaaaattcattttcgaatctcactcttgctttttgttggagatataagtttgagatcattcttatatcctttccatcgagtcttgatgtttttaggataccaattattttcctatgcggtactttgtcaaatacgttctcaaaatcaatgaaacatgcatacacatcgcagttgacatccctagctctctgtattagaacttgcaaactgaaaagtgcttccctctttccgagttctgctctgaatccaaattgaacttcacttatgtgctcttctaatggaccgtgatagtctgaaaagtttccaaacaaagcaaaaattcacacgtggtgtttgttttggtttttataatggaatatattgcttgtaagatgtttaattctttaaaaaaatggtaatgtgttgggtacccgtgattgtaatcaatgctcatagtatatttcccaccatatttccatataggactggttaacaacctgaagaaacgcagtaag

SEQ ID NO: 12317 - DNA, 564 bp, Diabrotica virgifera
  SmartBlast Evalue=1E-32; Info="26S proteasome non-ATPase regulatory subunit, putative n=1 Tax=Pediculus humanus corporis RepID=E0VIY5_PEDHC"
caagtgattatatttatatagcaagaaaaatttaatttgaaatattattttgtttaatcatttttatgacgaattgtgtctagaaactgaaaaacaatgtcaagggaagatgtaagagaagaagtgttagaacttatgtccaaaaaggacaaaatagaagcagaaattaaagacttaacatgtatattgacacaaaacggagtaggtatgaatgaacccttagttgatgatcaaggttttccaaaaagttccatagatatttaccaagtgagacatgccagacatagaattatctgcttacagaacgatcacaaaagccttatgaagcaaatagaaaatggtctacatgggtactacagtgcaacttctttgggttccaatttgaacaatgctgtggccatggaaacagatctgtgtgatgcagtagttcatactgaacctttcgctaaggttaccattgttagcgataattctccagcatattttgctgggatagatgttggtgatctgatagttgagtttggttcaataaataaaacaaatttcaaactcatcactgatata

SEQ ID NO: 12318 - DNA, 566 bp, Diabrotica virgifera
aaaaatgcatcaattggataaatttttatcatagttacatatattgataaacacatcttatttatataaattctgtatgtttcattttggctgatagtgtgtctacaaatatggctaaaatagtgactgttttgtttaccattggggctgttgcagttttgtcggctgcaaaaaaagaacctacagaatgttatcactgttcacttattgatggaacccgttgcaatgacccagatctatctaaaattacaaaacaaagttgctcagatatacccacaaacaagaatacaacctcagacgtggtatgctatactgttaccgctacctggttgggtcatccgataaccgaaagaggatgctactacacagagatggaaggagaagatgtttgttcgtatttctatagaacggaagctaatgttccctttacttacgattatacatgtaaattgtgttatgatgatctctgcaatgataagccaagataacttgtgtgatttatctgtctcactgttgtagtacttagatctttatttttatgaataaaatccaagttaataatgaaa

SEQ ID NO: 12319 - DNA, 567 bp, Diabrotica virgifera
tcaaagaatattcttgcaccgaatatactgagtacattcgtgtacgtagtatctcggaatgttcgtaaaagtttattcttagaatataccttaatcgaatattcttagtatatgcgtaagtatatgcaaaagtatatgcttaacacatacttgtatatacttttaaaatatcttaaaaagaatatactgtatgtacctataggaagaagaataatgttaacctatagattatcaacttcgcgttaagaataattaataaaatttaggtattttggtaggtactactgaactatctaattcatcatttttttaaaccgttttaattgtatggtaaaaaagtttaaaacttaattctattgaagaaaaatgagaaattctcgtttcgttttcaattgaaatgaatataccattttgatttgagtttataccatgaagtatttttaaatacctataattttcgggaatccggaaacggctattcatttgtcattctgaccccttgcattgcatattttatacctgcacaagggaagggggtaggtaacaaaaaggcaaaatatgaaaata

SEQ ID NO: 12320 - DNA, 567 bp, Diabrotica virgifera
  SmartBlast Evalue=6E-16; Info=Adenylate cyclase n=1 Tax=Aedes aegypti RepID=Q17KH2_AEDAE
ttcaaatactgccattgtcaaacctcgattttcgtctgtagacacatcattcatgacagatattgctatactaaaaaatgtgagtggcccaccacacagcagagctggtattgctccaaccatcatgtagtatggattgagatcatcaaataatagtacaatcacatatgaagcaaatcctacagaaagacaacagagagtgtatatcagcgcaggtcttcttccatgcttgtctgaccatgcgcctactcctagagaaatgagaatcggtacagatgagggaatcatttctgtgatagtaagaacatatgtggatttggactgtactgtcttttctaaatccagtgttgcgttgtctgtataccgtcctaatcgcgagcaattttcttttgggtagttttccaaagtataacatgttttaaatgaaattaagttggttacaattccagcatatgtcataaaagcaaaatacaccaatagaagagggatttctatagtgggtttaaaatttgaaaatatttttggcgccattttatttttatattattattttagcgcaactattat

SEQ ID NO: 12321 - DNA, 561 bp, Diabrotica virgifera
  SmartBlast Evalue=5E-73; Info=Protein VAC14-like protein n=2 Tax=Formicidae RepID=E2BXH5_9HYME
aaatgatgaattgtctggagaatgggtttttcgtgtagattctttccctgagtaatggaatgaatccttccagatcaaacatagtattttccagaacgatttccttaagcagacgatcgagcaattcggaagcatttttaacattttggtcgggatcggtggccattttacttaacgaattaaatatagaagaaaaatgccttaagacagctcctctagatactttcacaacattatacaacgattcacaagcataataacgtacacgtaaatcttggtctgccatgcatcccaaaataggtttgattagttcgtctgcaaacgcttctgtatctcttcctaaagctatagatatagctgctagtcctattaaacctccttttcttccatggggattttgtgatagtgaaaaatcttgccccaaaacttttaatatcttttttatttgcccagtgttatttacagcagcaaattctttaaccatcttctcaatttccaacgccgctgtttttcttcgttcataaagtttatcgttcaaagcacgaacacatgcagaactaa

SEQ ID NO: 12322 - DNA, 567 bp, Diabrotica virgifera
ctcccgttatgttaaccaccattctcattagtacatgttgcgtttccgtctccgtttaatattgtacatacatattttgttccagtttggtgacattttatcataagtttttgacaggaatacgcgtgttttttttctggcttgataaaatgtgtaatgaagaaaatttaaaacagctattatattgaataaagaaaataatttaattccttggcaacagccgaccaaatattgtctttaaatgtattattactgtattttttattttcaaaatcatataagttattacactagacaagtttatttatttattggatacttgaaagactgataaattttgtacacacttgactgaataaaggaagcgaaaaaattgtatattgaagtgtgtaaaattataatatttcattagctaagcgctttcttgtgcaaccccggaacaggaaaaaaacatgaaaaacatccacttaaacgttacaaacacattaaaactttgtttttcacccaaccattacggctgacgaggaatagttgactcatacggtagaaccatttacaatgaaatac

SEQ ID NO: 12323 - DNA, 567 bp, Diabrotica virgifera
gaaaccagcgaagctactaaaattacagaagctaatataattgaatctgaggctctatatgaaacttctccaaaagaaagttttactgtggaagcttccttaacatcaccacatcaacaagttgaagttacagaatctcaatctttagaaagtgagaaagaactaagtaaattcgaattaccagattctcatcatgtcaaacaagtcccaacaaatcttctaccgacaggaataacagaagaaacaataacagatgatagtatcgacattctgaaggctcttaaaaactgatgaaggccgagcagaatgtattcaagctttacataaagaagttgttatttctgaagcagttgcttctgaagatatagaagccataaaatcagttgatactgattctaagcaagccttacaaactcttttgccaaatgaggctataaatataactgaagtaagagtggaagatagtgaaaaacaatatttgccagaagaactaccagctggtgttcaagcttcacttgatatttctttccaacaagttgctagtcatctgataacggagactcacga

SEQ ID NO: 12324 - DNA, 563 bp, Diabrotica virgifera
  SmartBlast Evalue=1E-67; Info=Protein purity of essence n=2 Tax= Formicidae RepID=E2AZ34_9HYME
aaatacaatgacccgtatgtacaccgcttggcaggacatagaagacaactacaggaaaatatcggcagttgatgaattcgccatgaaacctcggttctacgttttgacaaatttggaagtgaacaatcaagatgctccgaaactggacggtttggcgtgtaattttatcttgggaaccccagataaactacgatatcctttgttgttggatgctctaattgaaattttgaacgtaacacacatcacttcaggtgctaacgcgtcgaaaatgagtttcctgggactttgtgctacacaatactgtttcactatttgctggaggctattacagctactcccgccatcagcgtcatatatggaacgcttggcgacaggcgaaaatttgacggctggccccttattacttcattctctagtctgggggcctagagcgtcccacaagaatttcagtagatggctgaaggactgtctagttaagcaagggatgtacacgcaacacacagacaaattattaaaggaagtgtccgaagcagttaacaatattaaatacaataataacgaat

SEQ ID NO: 12325 - DNA, 566 bp, Diabrotica virgifera
gcagtaacatgaagcatataatattatttacttttttaattttggcggttgcacagattcattgccaagatggattaagagataatacagatcagtgcggcccaaatgcaagatttgtactatgcacaggctgttgtgaggaagaaacctgcgaacatagaaatccatcatcatgtaacaattgtcctgctgtctgtaggggtccaggatgtgaatgtttaccaggatatatcagaaaaacaaaaggcggaccttgcgtgaaaacttgctaaaagtttaatgtaactatactaagattacaataaggatgcactagaggtgaacaatccaagacacgttgaatgttacgaggagcactcccgaatcatgatttgaaatgtataaactttgtaaatcatgatttgggaattacaatgtatatgagtcacagttcaagttgattctcagttagagttgactattccgagttcaagtcaactcaatctaaaacgatcagtaagtctagatttgaggccattatttgcaaaacttgctctttgctcgaaagtcattttttgggaaatcga

SEQ ID NO: 12326 - DNA, 567 bp, Diabrotica virgifera
  SmartBlast Evalue=2E-32; Info=Mitochondrial thioredoxin 2 n=2 Tax=Stegomyia RepID=Q5MIS6_AEDAL
atttttatctatttcacattgtaatcagtccttgctccttcaaaatcctcaattaaaaatgaattcagtccattttccacgtattatcaagtcctgcaatttcatagcaaggaggtttataggagtaacacagtctaggctcaaatccttcaaggtacaagatgaccaagactttttagaaaaggtagagaagagcaaggatccaataattgtggatttcttcgcaaactggtgtggtccatgcaaggcattggaaccaagattgcaaaatgttattgcacaaagaaaaggtcaaatatctcttgcaaaagtggatattgatgatttaggagagttagctgcaaaatacgaggtgagcacaatacccgcattagtcgtatttcaagatggtaaggtaaaggagagactagtagggttacaagatgaagacaaactgaacacatggatagatcatgtattaaagaagtaaatcaataaagctaatgctataataatattgtatattgagtgatatttgttggatgtaagatgattttaaataaaaataaagaatgtgtgcttagcatg

SEQ ID NO: 12327 - DNA, 564 bp, Diabrotica virgifera
gtaaaacataggctgtattttagtgtatagaacccatattatcagactaaatactaatgttcaaatatggtacagttattccaatggatctttgcacaaacgtaatgattgacttgcagacaagttaaatcaaaccattaagtgaaaggtaggtcagtcagtattaggaagtggctattatcccaatggatgtattttataaagttactttattgatgttttgatcttttttcactattgaggaaattgatggactcgacactaaacagcttgaacatcatactgactggtactaatataaagataaatatagaatggtaaaacaaaacaacagtaatctcgaaaataaatgtttctgttcaaaagaactatagccaaactctgagactcatgtagtataatgacaatttgtagtttaaaaatattacttgtctcattagcttaaaaataaataattaccggaagtaaacaaataacagagcaacggttgttctaacacttattgtggtaaataaaaattacaatgaaatgtatgaacaaagactaaaagtttaatacagtaga

SEQ ID NO: 12328 - DNA, 565 bp, Diabrotica virgifera
tccattgtgttgggagttgggttttagtttgggtattttgtaaatgctagaatgttccacagggtgtggtgaattttcagaaaaggatagagtttgattggttcacccggtgtacagtgacagtttgcccgtctggcagcaatattgttgcagcgatgttgttgaagagtggggctataacatattgaaagggtcacttaaatcggacagcagacttaggaagttcgagacatcaaagatgacccgtttttggggtggtgcgttgatttcttggagtagtgtagttttgaagatataaatatgtggtatattttatacagttttgattatctcactaactttgaagtagttcttatggtgcttgcgaccagttttaagagttaatttatgagttttagatagaaatgaatcagtgtcaaatgaaacttccgctttttatgtatttaaaagatatgaatcgacctataagaagaaaaaatataaaaatagagtagattagttcaagttacattcttaaccatgagattatggtgttaaaaaatagatgtttattagtaacatgatt

SEQ ID NO: 12329 - DNA, 567 bp, Diabrotica virgifera
gatcagaagaaaatagagtgtttttgagagaccagacggtagatcagtaggccgtcccagaaaaagatgagaggatgatgttgaagccgatttatctaggattgtggtacaacaaagaagacaatagtatttgtcgcgtaagagaaagcactttattaaaaaaacatacagatacaaatcaatgttttgggaatattacttcatcacagacacacaaatgtaccttagcaaggattagggtagacctgccaacccctagttctgatactagcttcatgatagtatacacatgaagcagagttacctataagtgtctacatacaactatatagtcaatattttcagtttttaacgttttatactaaattaatttgatctgatgaaaaaagttgatgtagcaactgatttaagctacaaagactgtacgtaactatctgctatcaaataaaagagactaaaaaactgtataagtattgtcaggttcacgccataaatggtataaataataccttgaccacttattcttcactaagcaatcgagtttgcctcttgttccttttctttctc

SEQ ID NO: 12330 - DNA, 555 bp, Diabrotica virgifera
tattaaaacataagaacatatattttagattacaaatagattagtttgaatacatcacagtgtgtagaaaatatttatgattacagttagaaattactaaaaattgatatattaataatgtatacataattttacaggttttagttcatatacacatctgatagtaatattggtttcataaacttgttttaagaattattatttatattgaacgattttttatcgcattttttttattccttgtatatgatgcagttcctttgttagctgcaatgttcacaaacaacttatataaactgataacagtcgagtgagtctacagttttctaatctcttatgtatgtcctccatatttcatcatacctaatattattccctctacctatggcttttttatttcgcattgcggtattaattcccacctcgttatttctaaaatttatcttcagattttcagaaacattcttttgtatttttcagtgtttttcttctttatctgcaactggttttgcttttcacttaaatattgtttggtagtagttttctatcattatg

SEQ ID NO: 12331 - DNA, 566 bp, Diabrotica virgifera
caaaaaataaatcaaaattccaattaattaattattcttatttatattagatgttcgaattgtagtccaccttctgaaacacacatttcgaatatccaagacctaaaataaccgcaaaagtttctcaaatattgtgacttaagagatttttttgtgaatttttgttcactcttttggaagataatgttgtatgccctgagaagcccaaatttttaaaagtaaaagatattatttaaaaaaataacaaaaatttaacatagtacaatagaaacatttttctaactgaagtttttccttcaatcgaaacatttttgtgaaaatgtaacaaaccgaaaaatgacatatcaagcacgatttacctgcatatcagaaatcttctgacacgattcgaaaggtgtattgcagcaggtggactataaattcgagcatctaatataaataaaatattaattcgttaattggtagtttgatttatttttttcgtgtaatttttcttatatttatttttattgttgttttattgtttttatattgtatctgtattgtctatttattttatattgagg

SEQ ID NO: 12332 - DNA, 566 bp, Diabrotica virgifera
cgtgctgcggaattgagtaaatgtagttaattaaaataagtgtaaacaacgaacaataatatatttatttattttttggttaaaaggcgtgcttattcatctcgtaaaagggtttgattgtttggcccagtgagggtttgttgaccgcccgatgcctgctgcgagtgtgtgaaacgacccgtggttgtatctcgactctgtggctgaaaaaggccacaaacgctaatatgtttgtgtttctaccatctggccagcaaggtgataaattatttagatctggcgtttaaaagttgaaacatttctgcagttttaagaaacgtcttcgaatgcatttccaaagtctgataaggtaattaatttatggggaattcagtttgttaaactgaacacaccaaaaacatctggttacacttcgtttcgtcaacttaacggatatttcttagcatctggtttgtatattaaatgtgaattatgtatgacccatattatttcgttttgagattagttattaaaaattaaaattagcaaaaatagtaattaaagagtgtcgccacactgtgtttttt

SEQ ID NO: 12333 - DNA, 558 bp, Diabrotica virgifera
  misc_feature (67)..(69): n is a, c, g, or t
  misc_feature (76)..(76): n is a, c, g, or t
  misc_feature (93)..(95): n is a, c, g, or t
  SmartBlast Evalue=2E-29; Info="Class B secretin-like G-protein coupled receptor GPRmth4, putative n=1 Tax=Pediculus humanus corporis RepID=E0VYH0_PEDHC"
ttccattgagccgggaatctcaatgtgccgatttttctgttagcgaaggcccttttgatagtttttnnnaagactnccaagattaggaatatnnntactccttgcgctgcgttgagaacatcagtaataatccatagccatttaggtgcatcattttcgaaaatggttgatataatttcaaagatccaagtaattcccattacaaagaataatttcacgtacaattttagtctgaatttatttacaactgcttttggacagtttttagagcttttccatagttgcactgccgtccaaataaagaattctatattgattataagcaaaaccgcaactggtccattgaaatagatgttactctctcttacagttttaaaccaacatcttgatattccgattcctggatgtatagtggacagtcctgcgggatgtccgtagtgcattattaataaccagcacacggctaaaactggagcaccaattccataaatgtggtacaataatttccatctcttaacatttgccaaccattttggttttacaacttcgttccatata

SEQ ID NO: 12334 - DNA, 565 bp, Diabrotica virgifera
gaattaccgacttaattctcacatcgtgaagtgttaacaagaattcttcggataaaacattttgtgccaccattgggataattgtgcatggtatgataaatgttgactgaataatggcgtctgacaatgttataacgattttatttgttgtaatagtatacgggaacggtttgaatcatccaattgcattatatcaaaaaatagtggatgaatacttgtaaatttcgatatatttctgtatctttggcgtttatcctttcttttttcagttagaagcttttactggtacacctagaagatctattggacaccaaacaattgcaatatttatttattcatttagcattctttaatagggacaaaatatttttgaaattggctagaaaatatcaaattaagtgattacttaattttgaaaggagtcatatcagatgtgttatatgcttgcactattttagaaactaaaaacgttcttggtaaaatacattttagaattcattaaatttttgactgtttttcaaaatattttctaaaagactgcagtaaatgacgaagaaaatatgaa

SEQ ID NO: 12335 - DNA, 552 bp, Diabrotica virgifera
  SmartBlast Evalue=3E-21; Info=Endonuclease-reverse transcriptase n=1 Tax=Bombyx mori RepID=D7F159_BOMMO
aaaaacaaaagtaatgacgaatacatcaaacattacaaaaatgacgttgaatgacatagagttagaaacagtaagcgaatacatctacctgggacaaataatgaaagttaacaaagaaaataaaacttccaaaattaccagaagaataagattagcgtgggcaggatttggaaaactgagttggatgttgaaaaacactaaaatagaacaatgtttgaaaaccagtgtttacgatcagtgtatcctccctatacttacgtatggttcacagacgtggacattcaccaaggccaacatggataaaatagtaacagtctagtaaaataaaattatactacatgtaaatcaaaatgtaaattcgtacaggctgaaacaaatttcatatcaaagtccaggtaggcacaaaagacactttcaagaaagcatccaaaccacacaaggggaccactgtccaaataattaaaaaggggtcatttgtgaaaaaaaattactttttcaaccgctgaggtcattcaattaccaatgaaagtatataggattgttttctgcaaa

SEQ ID NO: 12336 - DNA, 566 bp, Diabrotica virgifera
  SmartBlast Evalue=6E-26; Info=Serine-type protease inhibitor n= 1 Tax=Aedes aegypti RepID=Q16M97_AEDAE
ccttattaccttttacgtagatgactccaccggaaaaccaacccccgcaaacgatgtggttcattatctccgtcaaaagctacgcgtcgacgccagtcttttgggtttttccgtcgaaaaacttcaaaccagcatatgccagaacaactgctccggacacggcgtgtgcgacgagttgacgaggaaatgcaaatgcgaagctttctggatgcaagacatgtttaaagtttatctcaagttcgaaggagattctgactgcagttggagcatattgtacgtagttttaggtgtggtttgtggtattctgttgttcgtcggtacactttggggaactgtgcatctttgttatactttctgtataaaaaggaaccgtaatggcaaacctacaacgtataaacttatcgaagacacggaggatgtaccaccatatacatcgaaaaaagccaacttctcggacagcgataccgattctgacgtagtcttcgagtcccgatcgaagcctccacgattttcggacacgagaaacggccacaagccgagcagaaacgggtttccgaaagggggac

SEQ ID NO: 12337 - DNA, 566 bp, Diabrotica virgifera
  SmartBlast Evalue=1E-32; Info="Myotrophin, putative n=1 Tax= Pediculus humanus corporis RepID=E0VSX3_PEDHC"
gtcatcaatttgtaaaaaaggagtaattttcacagaaaagagattttactgaatcaatcaaaatgagtagtgactttgtatgggccataaaaaacggagatttggaacaagtgaaggacattatcgagaaaaaggctgtaaatgtaaatgaagaagtgcagggacgtcctcttattttgtatgctgcagattatggtcaagcagatgtaatagaataccttatatccgcaggggcagacgtaaatacgaaagacaaatttggcatcacagccattttggcagcaatatgggaaggccacaaggactgcgtcaaattgttgttagacaaaggagccaaaaaagatggagtcgctcctgacggtaagacctatctggaatcaactgagaacacagaaatcaggcaactcttatcggcctaagatacgtccttgttttatccaaaaatgattaagtcgagcaatgttagtttttaatttatttcgtagaagtctagtgactgagttaaaaaatgttttgttatagtttttttatttgcgtaactgattattctcacactaaagactggg

SEQ ID NO: 12338 - DNA, 565 bp, Diabrotica virgifera
ttttaatcgatactggttagatgggtcaactccgaattttgtggttacgcttgcgaatagatgcagtgaatacatcagtcatagaattatatgtctatgttcggaaatactgcctgacagaagagattagttacgttatgttattttgtaattatcctacataatatactatataggaaaatccaaaacacaaaatctgcgaccactttatgactcaaaggtcataattctggtctggattatccatctaagtcatcattggtccgtatttctacaaaaaccaactcggacgaacacttgttgtaaaacgcaagctttttggcccgagattttaaagattacagctcaagaacatggtctcaacaagactaccatttttcatacctctgatttccgaaataaaaacgatttctcctagaaacagcatttgcaggcctctcatgagtcttgatctccgtcatctttactactgtctttcggggatacctgaatagtacggatataccagaacaaaccagtaaataaagcacaatatcagaaattacgacaatctctcgagcaccta

SEQ ID NO: 12339 - DNA, 566 bp, Diabrotica virgifera
  SmartBlast Evalue=1E-20; Info=Focal adhesion kinase 1 n=1 Tax= Camponotus floridanus RepID=E2AKA8_9HYME
cgacttctcgatgagctgtcgatggaaataaagggacgatatcatcgacactggcgagaagcgctctcagttccacgcctactttcttgaccaagtcgagatactggtcagctacagccttttggacattttgagaaagagacatcactgcacggacgacgtctgtcgtacattcgtacactcggtcgttagttctatcgagatagtgcgcagaagttggcgtagtatccctattttcacactctattacagcagatactgtactattacacgaatcttctttaaggtcatcactttgattactttttaacgtattcaatgcagactctacgggggaatgacttttactactggtcaccgaacaggtactactatgcaattcgttatctttggcggtaaaattttcgagtttagacgacatcttcgacaacggctgataagtactgaagcttacgtaactcggactagttggtggggaggttaaagtactttcggtaggctcagattcctgattcagacttagtcgtttcagattcgtttcagattctgccaaccacttcgaatcc

SEQ ID NO: 12340 - DNA, 562 bp, Diabrotica virgifera
  SmartBlast Evalue=2E-35; Info=Craniofacial development protein 2 (Fragment) n=1 Tax=Camponotus floridanus RepID=E2AR66_9HYME
tccgtttgttcttctatttgtatcttttttagttccctttccattgtttctctgtatgtttcttgctctttttttgttgcaaaccgaattggtttatttatatatttcttttcttttattttgtttttgttttcaggtatcagttgcttcattttgatacccaccatgtaatggtcggagtcggcatctggtcctctgtatgttctaatcttctttatacattgctgctcttctttttcgatcagcacgtgatctatttggtttttggtctttctatctggcgatatccatgtttccttgtgtatttcttttctttcgaaatatgtgctcattatgatcatatttttttctcttgcaaaatctatgaggaactgtccgttttcattagtttcattgtgtttactatgttttcctattgtcggtctaaatacttcttctttccctattttggcatttgcgtcgcctaaaataattttcatgtcgtatctgggtatactttcgattgttctatttagttcactgtaaaaagattcatttgacatcattatctttttcttcagat

SEQ ID NO: 12341 - DNA, 566 bp, Diabrotica virgifera
tgttgggattttaaataatttattaacaataatgaattaataacatcaataatttaaatatctttgatttatacatcttatcttcacttatcttttttatttatcagtttatcttcttttttttatatcaattttaattaactttaatttaaaaccatttatcctcttttgagctgtttgcatccagtatttacactaatattttatttacttttcaaaatttgaggatagtatgaagatagtatggaaacattgaggatatggcaacggtgtcatatttcaaatttagatccagtcacaaacaggtcacagaacactaatttcgctggtcaatgcggggtagccaccacctcctgtgtgcgtgaaatagaagttagagatttcgatttactctgattacgatgtgagttacagaatgccaatccaaacacaaaaatgacgcgatagatatcaaacattccgatttcgggtaattacgattcgacttggtcatttttattcgatttgttaaaagttacgaatagggctgattattaagaattttgcatgtctttatttatcaaatg

SEQ ID NO: 12342 - DNA, 563 bp, Diabrotica virgifera
actacggcaacaccatctgtagaagtgacagaacctttacacaaagacattactacggccgaagaagccgaacttatagagccagcagtacccgcagaaactaaagcagatgcagataaacaactaaaagttgaaccaaaatcaagaaagtcaagaaaaagatccaaaacacctaaagaaaaatccgaagaaagtcttgttgacaaaattgaacatgttgaaccaattaaacaagaagaaaagaaaattcatgatgaaccagttaaagaagaagaaaagaagcctgacgtaattgaacacctagaagttgaaaagaaatcgaaaaaatctagaaaaagatcaaggacgcccaagccaatcgatgaaccgaaacaagaaatttcacctgctgaagaaagacctagcaccaagcctgaggttcaagagcctgtagatatttctgcagaacaaattcaccttaaaactagtttccatcacttaacttacgcagatgtcgctaaaactggaagaagtagagaatcctcaccacacccaagagtccctttaactgaaatagatactag

SEQ ID NO: 12343 - DNA, 565 bp, Diabrotica virgifera
aaataactgcaaaatgatttattccatacaagaaaaagtataaattataaaattgtattattctggaactagtacacgggaaataagtgcattatttagtgccaaatattcaaatcgtcccattccaaatcataccacgatcggaaggatagtcaaaaaatttgaagatttcggaactgtggtacactgcaagtgtacaagaaggcaaccccgacagaatgaagatcctgttaatgctgagtatgttacaacaacgttcggaaccggcattaaactgtaggtcccgtctatccgtgtgatcacttgaattatgcacaacatagttagacgcgagaggtcgccaacgcccgatatcgggtacggcatattaagaagaagaagatgttacaactgctgtagttgagaaccctcgaagtagtttgcgtactatagctaataattcgaccatctcgagaattttgcataaacaaagtttaaatcgtatacgttccaatgtcaccaagaactattagaaggagactttgaaaaacgtacggagttctgttttgagatgcaagagcgggcc

SEQ ID NO: 12344 - DNA, 564 bp, Diabrotica virgifera
caaatcattacatgacattttagttaaatctgacactgacagttgtcagaatatttatatttatataaacataaatatttatacaaatatttgccagaatattaatatttaaaatggtttaatgtaaaattaaataaatatgatatcaaatttcactatacaatgcccgaatataccgatgacataaaatatttatatttacgtcattgacaaatttctaacctacagattacaattgtcattttaccatatgatcgattatttttgtgtcaaattatctttactcacctcattgattggttatctatttaaagtattgtaatcgccaaccaattatacatctataagtaaaaatccgttttaatatgcaaatacccgtcaaggaatacataattttataagttcaatctataataaccacagaggtacgttttttctgtcacttttaactgtaatgcgttagagagaattcgataatatgtgacgcactgaaaaaggggtttgggacaattgcccggaaggttatttgaagatttcgtacaatttgtgatttagttttcatat

SEQ ID NO: 12345 - DNA, 566 bp, Diabrotica virgifera
  SmartBlast Evalue=2E-48; Info=Proton-coupled amino acid transporter 1 n=1 Tax=Camponotus floridanus RepID=E1ZXG5_9HYME
gaaactcttatccatctactgaaaggtgccataggaaccggaatcttagccatgccagaagggttcaaattagccggaatgataaacggaatcgtttctacaattgttataggacttctcagtacatattgtttgagagtattagtacaagctcaatatgaattatgtaaaaggaaacgagtgggactcttaacttatccagattctatgagagtggcgtgtgaggtgggtccgaaacctttaagaaggtttgctccgtatgcgccggggatcaccaacttcttccttatcgtctatcaaattggcatctgttgcgtctacgtggtcttcgtcggcgtcaatatcaaggccgtctgtgacgaatacatcaagcctgagattaaccaaaccttgtacatactgatgttcttcatcccttttctgctcataatgatgctcagaaatttaaaactattagttccattctcgtacttagcgaattttatcactctgttgacgtttggcgtttgtgggtactacgttttccagaatttgccatcgttttcaagccttccagcttttggtcc

SEQ ID NO: 12346 - DNA, 560 bp, Diabrotica virgifera
acaaacgttccaaaacgactttagaccaccgttaaagcaccttttaaaatttcttgttcaaacttgatacacatgttaggatacttcaactagtgttaaaagacaattttccgctgcgccagaggcgtgctccagggatatatacttttttttttcgccccccttttccccctcaatccacgccactgtcgtaataataatttagcatgttatttaattcctcgttactttttaagtaaatatcatcctgttgtctcaatgcgatagactaagtagttttcaagtatttcgtccaaatgtaaaggattcaataagattattgtattaaacacataatcttattgaatgtagtttaaagtacataatcttattaaatccattatcttcaaacgcaaatcaacttgaaaactactttatcgcaatgagacaaaaggatatgtatgtaaaaagtaacaaggaatcgaaaacatgctgaaataattattaaaacagtggcgcagattgtgaggggaaaaggggcgaaaaatgaagtatatatccctacagcacgcctctggcaa

SEQ ID NO: 12347 - DNA, 566 bp, Diabrotica virgifera
  SmartBlast Evalue=4E-39; Info=Pcdc2/rp-8 n=1 Tax=Culex quinquefasciatus RepID=B0X7J1_CULQU
gcataatttggaactcaaattgtcttttgcccttacaaagttcacaatctggtatattttctggaacaggttctatggaaatccacaatggatgaccacctctccgatatcttatcacctgatcaggattatgtttcacccttttttggaacttggaaaataccttatcactatcagtaactgcatgtgattctaaatcttcctcaggcacatcagccattgagcctatctttccttgtatctctaacttcttaaatttctccaattcttcttcttctgtaaaacatgtagtatctatctcttcaggttcgatcacaatttcccattgttgaaataacatctttgattgtctccaactattactattaggaagattttcactactgtcattacattcagttttatgaccttctttccaatctaatatttgatgatgtctgctgcagtagtgaaccttcttacacttactacattgtttctcagctaggcaaccacataaattacataatgtaagccaagtgtctaatgagaaacttggttccggattctcatctggtggatcatag

SEQ ID NO: 12348 - DNA, 560 bp, Diabrotica virgifera
  SmartBlast Evalue=7E-46; Info=Endonuclease-reverse transcriptase n=1 Tax=Bombyx mori RepID=D7F170_BOMMO
caggatgcaatacaataactgtagaaatgttaaaatacggaggacatagaatacagagtgaaatatcaaagttaatactagaaatttggaccacagaaataatgccggaacaatggaaaattgcagtgatatgccctatacataagaagggagataagttagattgcaataatcaccggggaatatcactactaaatgttggatacaaaatatttagcaaaatattggaaggaagactaaataatataatggaacaaacaacaggggattatcaaggaggattcaggaaaggcaggtcaactatagaccaaatatttacagtaaggcaaacgctggaaaaattctacgagcggaataccgaactacatcatctatttgtagatttcaaacaagcgtatgactcaataattagaaaggaattatatagcgcaatgcaagagtaaatgtgccaaaaaaaaactaatcagattagtaaaactatgcctaaaccaacaccaaaggtcaaaagtaaggatccgaaatcaactgtccgatgaatttaacattaatgaaggtctaac

SEQ ID NO: 12349 - DNA, 567 bp, Diabrotica virgifera
  SmartBlast Evalue=4E-15; Info=DnaJ-like protein subfamily C member 14 n=1 Tax=Harpegnathos saltator RepID=E2C3T9_9HYME
ttcttctctatttttgttgttcttcttactgtcttttttaggttactatctttagtttcacattttaacggtttactcaaagtctgtggtacagccttggttaaaacatctgagtagcttggcctcataggttttacttcagccaccattcttggtttcctcgagtctctattaaactgaaactgtatatcctccatttgatcagcagtcttatatctggtttcatctttcaaatgtatacttgtactggtgttgagatcagttggtaaatcaaatacatttggtttataattttcggaagtaccaaagggagaataggtaccgctgttattaggtaccatccagttacctactaaatctatcaattgagaaggatttgatacatgtggcatggcatcatgatgagagtgaagcaaaggatgttctggaatattattcatcatctgtggtatgtagggatattcagtctcaaagagtcccatatctgcagtgccattttgcatcgacttgtagaggtcatactctttttgtatccattggcatcaaacatgtgttgagcttgaggaa

SEQ ID NO: 12350 - DNA, 565 bp, Diabrotica virgifera
  SmartBlast Evalue=4E-25; Info=Endonuclease-reverse transcriptase n=1 Tax=Bombyx mori RepID=D5LB38_BOMMO
accatatcatctgcatatcttatgtttttaatagtttttccgttaattattattccttcacttttagataataatgcttcttcaaaatggattcactctatacattgcatagtagtagtggagacagaatatatccctgcgtaactcctctcctgatttcaatttctgaactaggttcgttatacattacaatttgtgttctttgattccagtaaaggtttgttactatttttaagtcccttttgtctatgtttttttttcttaagaatttggactaatgtttcatacctttctttgtcaaatgccttttccaaattaacgtaacaaacatgaacatccacattaatatccatacatctttgagtcattatattaaaagcaaatagtgtctctctggttccttgtctgtttctgaaccaaaactgactctcatctattccttcatccagttttttatttatacaaccatgtattattttgaagaataatttgagaacatgacttattaatgatattgttctattaaagagtgcagtctttggcgtttgtatttttagggataacg

SEQ ID NO: 12351 - DNA, 564 bp, Diabrotica virgifera
caattaacagtaatttatttaactcgtacattccttacattaatttacataatacataagatacgagaagcgtgaatagtattggcattgttgtggaagctcctgacttattacaacctgtcttgtcacaggttttacactgattgttgaacaactccactttggagctaggatacatgttctttaggttcttaaggaagttctcacattcttgaccgttttgtgggatgtggcactgcttgatggagctgtatttttttacgggaccatcttcaataataacggtggcacttaagcaaagtgcaggatcggtacatttagtcagtgattccaatcctttacaggcatcaggcttgtctacagcattcgtcgagttacaattgtaacactccaaagaatgcactgttcccaaaactgaagtcgcaataaccaacaatattatattttgcattttgttaaacacaatcaaaataactgtgtagtgtaataaaaatatcttcttattaaatcaatcaacagaaactcactgtgtgcacttgcttgcaccgctggctgtcagtgctg

SEQ ID NO: 12352 - DNA, 563 bp, Diabrotica virgifera
gccgccttcgttgttcgttgtgtctgtgtcttatattaagtaagtatctcttgttggtgcaagagagagagagggagaccgtgaggagttttaattagacagagaactaccgcaagatatcttgttgtcagcacgcgcggctggtatgctcagtttatgttaatatacgtccataggtagcaaggatgtgcgcaaatgtcaagcagatacaaatcgcgcatcgttcaagaaagagtttgtccagtgaagttatctacaacccaacggatcgtattagcggaaatccgaaaaaattgcgacataggagtttagatttgagctgttgaagccaatatgattccttccgcagcgcttgggacgatatagtatgtatacatatagcggtgatggcagagcggtaggagacaagcagggaaaagatagagggtgaaggtcacccttcaggcggagcaagataatggttagttgttctccaaacaagaaaaaaacatgcaagaatactagcttaaaataaaacccacttaaaccagagagccgtcatataatttgaaaaaggtaaaaaa

SEQ ID NO: 12353 - DNA, 562 bp, Diabrotica virgifera
atgttttgaatatatgacgggaagcattttataagagcttttcaagaatttcaaataaaatcgaagataaaacatcagttcttaggaaacaatggctattaacgaaggaatgaaaaattgaatagcctgagaattgacatgcagagattgatcctaatcaagtgttgctaagaagtgctaaaaagtgatgagctcgacatctaattgtgaagatcaaaccaaccaagatgcagccagtgatttgtccgatgaatcaaaaaggataaatttagatctatgggaggagtccctgtctccggagaatgatgatgtcttgccagaagtgttgaagttctcagaattgtatgaagaagacaatagccgcgacagtcatgtagtaaatgaggtatttatgtctgatgtacctagtgatgaactaagtatcctagcaagcaatgacgataaagacagtttgccaaaaaccaaagaaaatgagcaagatgtagaaaacgttgaagtagacaaatgtgaaaatggtgaggcattcactagtgattatgaacgagatgtagaaaacatagaa

SEQ ID NO: 12354 - DNA, 565 bp, Diabrotica virgifera
attggacgtaatatgagtaaaatcaacattagacttaccacgtacctaaagtaactgaaggcatctattgccccaagcaaagaatacatatctctcacaggaaccgacactgacggcgattcttttgttgttagcatgtacttaattttagtatcgagttggcaagtgtacacgcgagtacactgagaaaagtctcgcacatttctggcgtgtatcaataaaattttagttgcactgagagaaaggttgcatgcacggccggcttttgttgacattcttaatatggtggaattattgttgatttacaaaaggttgcaaatacaacacaaagtaatggtgagaattatattgattaaaaccatggataaaatacctttttatcctgattttagcattgaccaataataaaatatattatagtggcgtgacattcactaattattctttttggcttatattgatacaacgatacaaaatataatttgttgttttcaccaattttgaaaaagtgtgaacaagttggtgagaatttgaacgacttggtgtgagctaataggctgtctgt

SEQ ID NO: 12355 - DNA, 565 bp, Diabrotica virgifera
tgaactaagaaataaagatataaaaactttgtatgcctacaagatttgacgttaaaatcatgaaaaatatattatttttgagtatttgtggcttgttaatctgccatgtattctcagcatcagtagaaaagagagttgaaagaaagaatatagtaaagcgtagccttgaagctatcagcacgattaaacaaacgaccggagagattgtgcagaaagttaaaactggtgtaaaagttgccaaatgtgcactgcatactgtaggtgacaaaatatattcccattcccaccagattgatccctgtactggaagagaaaatgcagaaggaaagtcgagtgatggcggtattgaaactcaaaataaagtacccaatacagatacatctactctaattgatgtaagaatgaaacaagattctaaagaggaagagaaagttgccgctagaacgattattgttagagctaattgtccagaaggcttcttggccgatgccgttggaacatgcagggaggtatattagagcagaaaatttaattttaattatcatataaatacatgttctcattt

SEQ ID NO: 12356 - DNA, 565 bp, Diabrotica virgifera
  SmartBlast Evalue=1E-59; Info=TM2 domain containing 1 n=1 Tax= Culex quinquefasciatus RepID=B0X5T7_CULQU
gttttgatgttgatgtaaataaaaaatattagaaatatttaaaatgtaactaaaatgaacacgcaaatttttatttgtattgtcattcatacattgttcataaaaaatgttttttgtgaaaatccgccgtttgaaatagattgcagcgcagtgcgaatggggcagtacctttgtccagacccttcctatttagatgaaatggttgatccaaaaacacaacaacttaaagggtgtaccaaagaaaataaagccaaagtaagatgtattactgccaatggattaatttgtactgaaagtggtaataatacattttataaggaaatgccgtgcaaatggacgaatgggtattcctttgaaacaactctactgctatccatattcctcggtatgtttggaatagacagattttatttaggatatccagctataggacttgccaaattttgcacgttaggctttatgtttctaggacagttagtagacatcatattgatttcaacccaaaccgtaacacctgcagatggatcctattatgtaatgccatattatggaccaagggttgagg

SEQ ID NO: 12357 - DNA, 559 bp, Diabrotica virgifera
  SmartBlast Evalue=2E-23; Info=Endonuclease-reverse transcriptase n=1 Tax=Schistosoma mansoni RepID=Q4QQE8_SCHMA
gaacagacagcagaggacgaaaaccaaatggaagaaataagtacagaagaattggaagaagcgataagtagaataaaaataggaaaagcgagcggagcagataaaattgatcccgaaatgataaaatggatagggaaagaaggaaagaagtggttgctggaaataatgagagaagcatggagaacaaacaaaatgccgaaagagtgggaagaaaacttactgatcccaattcacaagaaaggagaagaatccaactgtggaaactatagagatatatgcctctcatcagcagtgttcaagctatatacgagaataatagaaagcagattaagaacagaggtagaagaaaaacttgaagacgaacaaacagcattcagagcccaaagacaaacagttgacaacataagcatactacgaaatataatagaaaaaaataatgatcggggaacaaacatatatatatattcatagacctaaagcagcgttcgactcagtagaccggaaagtattgtggaatactctggaggagctgggagtaccgaggaaacttattacagat

SEQ ID NO: 12358 - DNA, 557 bp, Diabrotica virgifera
ggggtaatttttattggactacattttatttgattgacactataccaaaatcacaatgaagatgcactgaaataaacaagccaagacacgttgaatgttgagaggagcattaccaaatcatgatttgcaatggatacagggtgagtcgccactgcgggacggagtattacagcggaacggtggaagatttgaaaagggtttaaattgaatagtttgtaagttgataggagctacattataaaattattttgaaatgtacagggtgtcccaatgagtggcggcgtatcgaagttatattttttcttatggaacaccctatgttttgttgcattttttaactgtccgcaaaaaatgaggtatggtttcatagggcttccctatgcctgtgtacagagtggtctgagttatgttgacttttcttaaagtgtggagttttaaaggaaggcttggttctcaagttatttaggaaacttggaaacactacttttacatctaaatggttggatattggttgaacgtgttccaggattaattattgcacatttgactgcggggtg

SEQ ID NO: 12359 - DNA, 555 bp, Diabrotica virgifera
aatttactgtactatgtattttttacatgactgaaagtgcctgaacgagtcactaatcacgagtgtatgcacaatatgaacagccatatttgaaccaatttttgtcttaacagaaaaacaaaatgaatctatcatatatttataaaagcaaaacctacctactttttactccttgagatttttagtatccctatactttttaagttattttgaaaaagggcattttccaatattttagaaaaacattttttactataaaacaatttttttaaactaagcactcccaaccggtaaaccttacagatcgtataaacaatacacatataaagtaaatggtaaagcggtaacgattaattttatttacggtgctaaatagggggagattttcacgatatcttttataaaaaaagccaactttatttcgagcttaactcgcttaggtttgatgctagaacttataaaaatagaaataaagcttttttaaacacatgagttttccccgaaaagtgcttcattttttggatatttaatgttgaaatattcgatttggaattt

SEQ ID NO: 12360 - DNA, 565 bp, Diabrotica virgifera
  SmartBlast Evalue=5E-55; Info=Trehalose-6-phosphate synthase n= 2 Tax=Acrididae RepID=A8D372_LOCMI
ttgcctctacagccatatgtgcctttgaagatttgaaatttgctgcctctataattttggtagcttctctttccatttcttcccttaagtgtgctggtgcttctctaaaatgaaaagttagactggcacctttgttttctatccaagcaccttctcttaccagttttcttgtaacttggctattagttctttaacttggtcctcgaaattagatggaagttggtggtcgtatttggaaccgtctggatagatgacttccagtccatgatttccagcatatgtaatagagtcaataccaaccaattttttaacattcgttacccctctacccgatataatagcaacaaatatttctgggatttgcgacaatatttcaagaacattttttgcttctgggggaattactgctagatctggatgagccacgataggtgtcaaggtaccatcataatctagcaaaattgcaagtttcgaggagccctgtaagtatctctccaaatattgttcaaaatctgcagttacttgtgacattgtaaaacgccaaatactgcagacgaagtacttt

SEQ ID NO: 12361 - DNA, 563 bp, Diabrotica virgifera
taactataaacacatatgaaatgtccatatagaccagcatgcaggaatactttcacaacatccacagtttttggtattcaaaagaaataatttaaaattaattcaaatcacgatttgaaacaaagcgcgatttgagaggtagactttttctaaatttttcgtcaatgaggacaccttaaaattttaagagatttcatgcttcgtagagtattatctatatcgaatggctgctatttgctttgcataatcattagtctaactttctctgacaacctatatatctacaacttggttgcaaatgtccaaattgcattataagatcgctctgcgacaaagaatacttaaatatattgagattttacttgtactgtattatttagctctagatgagtttaaattcgattgattaaatctttgtatatagctgtatactgctttgtataaagcttcagccgaactagattcgtttataagatggttcagctagtttcgccagaccatcgatgaccatcggtaatttactggagctttaatttatggctgaagcatatgagtgcatgatc

SEQ ID NO: 12362 - DNA, 565 bp, Diabrotica virgifera
ggggcatctatcacacccaaggttaggcctgttattcgtctaacccgactaaaatgataaccacgtcataataagaggtctcagcaaggataactgtgggggagggaagggggaacgttctcagaatgatatttgaccctcaaagagatgaactgacataagagtggagaaggtgccgcaatgctgaattggtgacaccgtatggtactgaaaatatcgtcagatataaaagctaaccggataaggtgggcaggtcatgtggtcagatcagaagaagccgcagtgatgaagagttactacgaatctttaaaagaaaagcatttacgatcatacatggcggagttaatgaacaggatccggtcaaaatcatcaaaataatccgactaagatgggtgggctaccgttatgcgaatggatgaaagtgatcctgctaggggcgacctaaactcagatatctggatgatatgcaggaagatttaagggagattggagcatgaagatggagaagacagacactcgacaggaaaggatgaaagaatgttttgagacaggctaataaaggaaa

SEQ ID NO: 12363 - DNA, 565 bp, Diabrotica virgifera
  SmartBlast Evalue=4E-42; Info=Putative methyltransferase NSUN4 n=1 Tax=Camponotus floridanus RepID=E2AHU0_9HYME
gatgaacagttaaccgaaaaaactgatgaagccgtacaagaagatcctacacctaaaaagtttgaagctaaagatttctcgttaaaaagtagccttgaaaaagctgaaattgatatgagaagaatggtagacacagaaaatgctctatcaatggaggttctacatgaatatattcccacaacaaaaattaaaggaaaggaagattttatactggaatctagtcattataatttgtacgatcaaaatacccaatttggagtacagatagagaaggagtttgattttcagtttccagatcatctagatgtctattgttatgaagaagggaataaaagtgattttgaatcaccaaaaagatcaataactgatgtatataattactatttaatggatggtggttcagttcttccagttctagctttggacataaaaccaggacacaaagtgttagatatgtgttctgctcccggcggcaaaagtttattagctttacaaactctgtacccctcatgtatcgtttcaaacgatgtttctaactctagagttaatagaattgacagcgtat

SEQ ID NO: 12364 - DNA, 565 bp, Diabrotica virgifera
  SmartBlast Evalue=4E-64; Info=Choline transporter-like protein 1 (Fragment) n=1 Tax=Harpegnathos saltator RepID=E2B6Q1_9HYME
atgttgccattgttgtctatattgttttgagaaaattttaaagtacttgtcaagaaatgcttatatagaagttgctatttttggatacccattttgccgagcaggtcaacaagcatttaaacttctttcttctaatgttctacgtgtagctgccattaattcagttggagattttgttctcttccttggaaaggtagtagttgtaatagctactgtcttgattggaatacgaatgcttgagcacaaagatggtcttcaacatatgtgggtaccaattgcgttatctgggctatttgcatactttgtagcacactgttttatgactgtttacgagatggtaatcgacacgatattcttgtgtttctgtgaagactgtgaacaaaacgacggggagtccagaccatactttatgtcaagaggattaatggagttcgtcgaaaactccaaaaaggcgttagatatttatgacaccagagcaaaatcttcagcaactgagttgaaaagtgttccaactatcagcggtgatgttacaagaaatttttcgggctaaaagtatttgcatagt

SEQ ID NO: 12365 - DNA, 563 bp, Diabrotica virgifera
  misc_feature (36)..(36): n is a, c, g, or t
  SmartBlast Evalue=1E-73; Info=Rothmund-thomson syndrome DNA helicase recq4 n=1 Tax=Culex quinquefasciatus RepID=B0XH16_CULQU
tatcgcctctggtgtcactaatggatgatcagattntgggcattgctaaatttatgaaggctgcttgtcttcattccaaccaaacagctgtgcagcggaagaagattttagaagcgatatctttgggagaattaagtattttattggtgtcaccagaagctgttgtttcgggagaaaagcagaaaggatttaattcatttttgcgcaagcttcccccaattgctttcgcttgcattgatgaagctcattgcgtgtcacaatggtctcataatttccgtccaagttacctaatgatttgtagggtattgagagaaagtctcggagtcaaaacgatcctgggtctaacggcaactgctacgaaagctacacagtccagtatcatacaacatctgcaaattccagatggtgaagatggagttataagcgacattcctctgccggataatttacatctttcggtttcgaaggatgttaacagagataatgccttgatggagttgttgttgtctgatagattcaaagactgtaaaagtattattgtgtactgtacgagaaggcaggag

SEQ ID NO: 12366 - DNA, 564 bp, Diabrotica virgifera
atatacatagttgccagatttcaatttgcataccaaaatgatttttggttttttagccaaacggttacgtttaagaaaaaaaatgtttttgttgtagactttttttgctctacatggtgctttctacctatacctttaaggaacgcactattttcgggggacactctgtatacaagtgaggactgaattatgcccctgacgagttttagtaatagttttacactatgtttaccaaaaggaggaattacttttaaaatatattaagagcgttgacttaacactttctttgaattgctgtataaatgggcacatgagacagacatctgatattggcccggagctgaaagtgttaaccctttaaaaaaaccatgaaatcttttataaagggtatatttgttggagtccctatgcagggctgcatcataaaacaaacagaactagttttcaattggttgaaatcggttcaaagtaaaaatgttatggtaaagaccctttaaacttaatccgtcatgggaacatataaaaatgatgtgatttcttcttgttcttgtagtttcatggcct

SEQ ID NO: 12367 - DNA, 563 bp, Diabrotica virgifera
  SmartBlast Evalue=9E-10; Info=Endonuclease-reverse transcriptase n=1 Tax=Bombyx mori RepID=D7F177_BOMMO
gtctgcctcttattctgtttcagttgttgttaactgtacattatctttccaccttttcggcggccttccaacaggtcttctgctatacggcttgttgtttttacagatattcgttaatctatctggtcccattcggtttacttgttcgttccagtttctttttcttgtttttatccacctgttaacattttcaatttggtattgttcgcgtatacttctgttgctttgtctgtctcttaataatatacccgttattgatcttattactttcatttccatattttaaatgctttggtctttctatctaccagtttcacgattgctgtcggattttgatagatgtatttgatcatgtttatatagcgatgatctatacggcactctgttaaggcttttaacattttttaatgactcattgtgtcgaaagcttttttgagtcaacaaatatcaggactaatggcttgttatagtcattcgtgtcatatcctgctctaaaacctgcttggtctcttggctgatagacatccaacttacagtactatacaaactggaaaatatttttg

SEQ ID NO: 12368 - DNA, 562 bp, Diabrotica virgifera
  SmartBlast Evalue=3E-52; Info=Histone demethylase JARID1A n=1 Tax=Camponotus floridanus RepID=E2B0Z0_9HYME
ctcaactagttggttaaaagtcagagttatcttagcgtcattcgaatgtcgtgtgcgcattttattgggatctagttgttcaacgccgttagcatacttctcagcaagttctagagcaccggaaaatttctgaagtagctcagacttgggaaattttttaacagtggcttcatgaagaagttctcggcacaatgttaatgttcgctttggtaaattttggtctaaaacttcgttcacattcataacccaggtttcaaacgattctgctatcaccttcaaattttgcatcatccgtggaagttcttccaaagtgtacctatacctcaatgttctgttttcaggagaacattcacaatgattttggaaatgtcttagacaaaccagtttctcggcagagcacgaacatgtcatagcggataaaaaacaagtagttttgcatatttcacactgcctctcatcatcatgaagtaactcaaatgcttctctctccgcattagttacacccgaatctagtacagcctttcgtaaatttttctccacatctaacatcaccaacatatct

SEQ ID NO: 12369 - DNA, 565 bp, Diabrotica virgifera
acaaaccaagacacgttgaatgttcgaggagcactcccaaatcatgatttgggagtgctcctcgtgcttgtttatttctattgcatctttattgtgagtgtagtgtagacaattgtgtctcagattagcgaatagacatatatattttttctaaatttaagcaattacatatatacgtaaccgatggtcagattgaaccatgttactgatcttttagatgttgtcatccatttttgacgtgttgatgaccatcttgaaatcacttaaaacttaaatagaaaaaacacgttcacgctacagttacaatagtctttatttcaagttcatttcaatcttccagtttcagtacctttaagatttatataacaagtcgttgttttactgtcagacttaccattttttccttcgaaacagagtaaagcaactcgaaaggtgcttctaaatgagccacattgttactgcaatatgtgcctccaacactgacaacaatggcccagccatttatgacagtattgaatgcggcagatggctcggcaatatatatatatatatctcggcagcagta

SEQ ID NO: 12370 - DNA, 560 bp, Diabrotica virgifera
caaaatattaataaccaagtggtaataatctatcattctacgttgacccgcaagattacaagtaaccacaaattaaggatcagggaaagaaggatgatcactacaccaaaactatgaatcggaaagatgactcgaagtcatattaaaatgtcatcgacattttgtctgcaaaccaaaacataagctaaataatgtactaaagttcataatgacaaataaatgtcgaattggcactaagtccaaaattgaactatccatggacatcaaatttaaaaagggtatatccaaggacgaacaaccaggcaaaggtatgagccaattcgcaccataacacaataaatatactaaagtaagacaaaagaaatcaacaactgaaataagtgaagaatcgaacacttcatccaaaattgaactaccaatggacaccagattcataatagcatatccagagaagaacaatccggaatatttttggaacaattctcaccagtgccaaataatacaaatagtaagcatatcaaagttgtccaaaaactcattaatcaaaataaatgtggaat

SEQ ID NO: 12371 - DNA, 559 bp, Diabrotica virgifera
ttaaatcgatatgaattgctattatttttgagtgataatataaatcctgtacaaatggatcagggtgttactgagacaatgagacgcctgtagcaaagaacgtgttggatgaagaaaactcttttctcacaatctttgtttagtaaatctcaaaggatgttgtgtttatgcgaccggtttcacagtttacaattatttcttatttgtattccatcatcaggcctatgaaactagaaaggctaaaataaatgatttttatttaaaagacgcaatttgtatagtggcaaatagatagagtggaaaaaagagaagactttcaatgtcttgaaagagatgataaaaggagatgatgataaagaaactaagacgaaacttacgatgaagaaatgatgggacggaaccaatcagagtaactagtcaggatgctgacgaagctgccaatattctactagactattttgagcaacgagaaccttaggatcattttgatattttgaacttgcgcagaatatgccatacaataaatagtcaaaagacttttaacacataccaaagtgac

SEQ ID NO: 12372 - DNA, 562 bp, Diabrotica virgifera
  SmartBlast Evalue=2E-51; Info=SMEK-like protein 1 n=1 Tax= Harpegnathos saltator RepID=E2BUA4_9HYME
ttttccttgcacttgacatattttttcccagatctcatcacaaccaagcttctcttgaaaacttaacgctaaatcgaaattgtctccttcagaccatactattaatgtgtcctgttgcttctggtaagcagtatctggttgaattttcgattctagtaacaacgaattatcactttctgcacgcactaacaaagatattcccttcaaacgatcaacataggaggaagaaacatgtcctgtacctctatcatcccactgtctatcagcatttaatgcatataatttcactctccttcttgtatccgtcatggttgaaattttcttatttctcagctatatactggcaaatttcccacattccgtctgaatatcactaatttgctaataacgctagcaaaattaaaattttcgaaaagagatttgactaattttctatgagtgcaaacacaattcctttgtgaaaaatgaaatgcaatctaataaaaattattgtatgccagaaagggcaaaagaagctgagatttttaaagtacactgtgtttaattaaataattattttatt

SEQ ID NO: 12373 - DNA, 562 bp, Diabrotica virgifera
ggtggactgtacctattgatgaaattctgaatggatgaatggagactccaaagtaaagacaatcaacatttatacagtcaactaagcggctattagatcaaaagaaatggagagaaacttaagggcaaatttagatgaagaaaataattaagaattttgataaaaaaactactcggtcacatcaataccggagggattaaaaagttaaaatgaaccatgttgcagaaaatgcgaaacggaagaagagactgacatacacatcagatttgtgtaggcagaaattcactgatcaattgaagattgaaccagatccaagagctccacaaactattgagagttctaaaactgttcccccagtgctacagagaagaatgttgtaagcaggggcatctcttctaatcgaccacgtgactttcccactgccgaagattagaaagagatgcataccctgcttacaacattcctctctgccgcactgggagaacaattttagattgcagcgcccagtctaggtattatacgtctatgctcctacatggagagattcgatactaaaacaacc

SEQ ID NO: 12374 - DNA, 551 bp, Diabrotica virgifera
acaaaaaacatttaatatcaataagacaaaacattactacatttatacattagatccagattttgaatgctatttgaatttgtatatttttcgatgtatgccaatccgatatactagcacattatttctacgaatccataaacaagacttaacattgcatcttcagcaggaaagcttttgtggtaaccagcaaaccaaactccatgtctgcattccttaataaccaaaaatccattaacgtattcaaacactgatttgaccatggctgctgcttttaacgttccacttgtccaccatacatttagatgtggtcaaatacaaattaatagagggtttgataataaattcatctatctcttaagagaatatggagatgtaatattttcactttaaaacatcatatttattatcttctctcaccaatactgcagtacttacgcccattacacttaaaatttaacataatgcctgtgttactattcataatgatatttcacatgatttctcattttcacattcaatgttgaagcgttgaagcgttaaagtttgaa

SEQ ID NO: 12375 - DNA, 545 bp, Diabrotica virgifera
attggtcagttgtctactcccggacttatatttgatcgtatgtttttttaccccgagaaggggtgatacccccagggcaaaagcacacatggctcaatagtttttctttgacatgttggctgtgtgtatgccaaatttcatgtcaattcaggcggttctttaaaactcagaggttttgcaatattttaccgtgagtgaatggactattacttttagtagaatttttcgtatgctaaaacgccagagtatgatttgtgtctagagaagtaggtttaaataatataatccgatgtaataagtttacttgcaagccatagtgataactattaacccatgacaaaaaaatctgctcgcaatggtttatcgtcacttcagacagcaattaatttggtatgaccagtttttgtacaaagaaaatgtgtactctatagataaactcgtccagaaatagtaaatactcttactaacatgactttaatattgtttgactggtcgaatttttttagagtaaactcatttgttcatatgtaaatttaagtcattgc

SEQ ID NO: 12376 - DNA, 564 bp, Diabrotica virgifera
  SmartBlast Evalue=5E-51; Info=CREB-binding protein n=1 Tax= Harpegnathos saltator RepID=E2BWI0_9HYME
cagctgcaccaaatgtctctctaccattgagtagtgatccttccaactctgctcaagctcaagggattagtcaaacagctgccagtattcaacaaagtgttaataatgtcatgtttggcttagctagtggagcagaagctgcaaatcaaggattagtaaatcaattacctacaggattacaacctggtcaggtgacagcatctcctgtaacgggtacaaaagaatggcatcaacatgttacccctgatctcagaaaccacttggttcataaacttgtacaggcgatatttccaacacctgatccttcagctttactagacaagagaatgcacaatttggtagcatatgctcgaaaagttgagggtgatatgtatgaaatggcaaattcaagatcggaatattatcatttattggcagaaaaaatctataaaattcaaaaggaattggaagagaaaagactgaaaagaaaagaaatgcagttacaacttcaacattcatctcaacagcagcagcagcaacaaacacaacaacctcaaattagacccaatattcaaggcatggtaa

SEQ ID NO: 12377 - DNA, 558 bp, Diabrotica virgifera
gccatatttttatagaactatttcagtactcaaaaacagtcaagatttaagtgtattttgtcctatatattatattctcttttatttttaatgaagatatacatttgttgatccatttacataagtttagtcttagagaacagtctcactaataaaaataaaaatctcaaaatatccaagaaaccaaactggtttccattggaaaaatcttccacgaataaccatattaaaacaagtcgctgccatttccataaagtagggctaatacagcttacctttacggtgaggagggataacatttaccattgataaggagtgtttaagcatgggagtcactttcactattggaagttgtaacagcaagaagaggaatggcagcttcttcgccgctgggcgtagcaacaattcgtggatttgagtcggattcagctctagtgccgattcctctacggagatgttgaggaattggagttgaagggagctttgttgttttgttctctagagatggaccaggctgtgtcgttaccttctgctcccgtttcagccaatatgttgtca

SEQ ID NO: 12378 - DNA, 563 bp, Diabrotica virgifera
  SmartBlast Evalue=4E-38; Info="Reverse transcriptase, putative n=1 Tax=Pediculus humanus corporis RepID=E0VZE8_PEDHC"
attcaccaaaaaataaacctctttactgcctttattgactacaaaaaggcctttgattcagtaccgcatgaatggcttataaatatattaagaatatacaaagtcgatgataacatagtgacctttttaaggcatataatgacaggttggaagactaaaattcacctccaaatacctggtgaaaacaatatcgaaacggaaaatatcgcaatcaaccggggcctgtttcaaggagactcgctgagtcccttgtggttctgtttggctatgaaccccctatcacagctattaaactccactgactcaggttttagcattaaaaacaacaatactgtagtagcgaagcttagtcatctgttgtatatggatgatttgaaattaatggcttctactcgagacaatctagaacaaattgtaaaaacagtagaaacattctctaatgatattaatatgcactttggactagacaagtgccgcgttttaaatatagtcagagggtatcaatcattattattgtcatttttgtaaacatgtaaattataaataatatagatcgaacgttt

SEQ ID NO: 12379 - DNA, 548 bp, Diabrotica virgifera
tgatcatatattttaaaaactatcgtaaaataaagtttttaaaagacataaactacacaattttaaagaatatgcatcatgttaaaaacgaattcatggttaaaagataatgtacgtacctgtccattcatcaaaattttcggatatttgtacccatgtattgtcctttttcttactatcatgataacttgagtccgatgcatcatacaaaaatgggtattctctgacactctcaatgaaaagttcgtccatattattttatttcaaaagaaacaacgcgctttaaattaaaaaatcaacagtatatctgcgtattaccaataattatgacgcactggcgccgactggccgttcaggccgttcgacttcaacggattttattctcctcggagaattttggccgttccgtttgcgtgctggcctgtgccgggccgagccggccgctcataatgggttacgttgcatttaaaactatacaaatgaatttggactgtcctgtgccgtgccgggctgtaccgtgctggctgttcataatgggtttcttgctt

SEQ ID NO: 12380 - DNA, 564 bp, Diabrotica virgifera
  SmartBlast Evalue=3E-37; Info=CG2909 n=1 Tax=Drosophila melanogaster RepID=Q9W2W5_DROME
ttcgccgattttacgaagaagaatgtttagattatcatgaaatgaacaaaaaagaaacactctggctcgaatggtcggtatgtcaatctgtttggacaggagaacatttttgataacaccttctacgtcaaaagactgacaatttcttttgacaccttgttaggagaggctgatgcaagaggtagtgcagtttcaaagtcagtatatgtgcatatggttggcataggtttgggagtatggaaagtttcgggacatcaagataaactatttatggatacatttggaagaaggatactgactttaggtgataagttacataatataagtgatgtctgtttggcgtatatggctgaatcaaaatgtgctggatattcacatggagacaccattcccatagaagggcatccaaatggaggaataaagatccatatttgtaataggaatccgcatgaaaaattaacgggtgaagacgaaggtaaacttttagtagtaactttcgcttgggatggaaattctttaccgggaaatgaatactggtttggaagtttagcgtcaagttctgat

SEQ ID NO: 12381 - DNA, 559 bp, Diabrotica virgifera
  SmartBlast Evalue=6E-13; Info=CG5360 n=5 Tax=melanogaster subgroup RepID=Q9W1N8_DROME
gaataagaagtatttttggaacaattctactgcagtagcatcaaaaccagctagtcagtcacattcattgcttattacatgctctgaggaagaggccaagacaaaggagtttaaagatgttttaatggatagatgtttaggattgcaccacaatcgcagcagattctccgaaaagttcgaggacctctgcggaagatatggttcaagatacgtcggtgctgaaacgcaatcatcatgtacagttttcgaaacacacgtaaccagtccgatgaaacgacgaaatatcaaaccgcaatggaacaccaaatctccaggaaaacgactgagccacttggccaggaggaaaatcaccttttccagcgccaaccttcagtcaggaaattcctttttggccggatctagggcccggcaaattttggttgatgctaaaaaaatggatttactgagccgaaggaaaagtccaaggaaatcgccgagaaaaacccctagaaagacacccggaaaaagtcccaggatcaaaactcgtacgccgagcagttcagctaaaaagaagctcgcc

SEQ ID NO: 12382 - DNA, 564 bp, Diabrotica virgifera
gatccagacgtttcttttgcgatctttaagttttatatgacgcatttgtctttccatcgacctttgcgcaagataaatctgaatggaagtttttcgaggaggcctatgttcagcagtgaacgactatgggctgatgatgatcaaacaaacatcaaagatgtgtgtgctgatgcaaaaattttaaaaataatcataaataaaagggtaatcagcacactcatggaattaaatttgtatccagcgctgtggtcatccatcttgatcaggcatgcttttgagctcgtcgctccatctcatctgaggccttgactctcttgtgttcccatggtcgccagtagatcatctgcttgttccatctttcttctgcttgtcggatgatgtgatctgcaaatttccatttgagttttgccacctgttccttaacgtcttttactttggttaccctgtgatccagacgtttcttttgcgatcttaaagttttatatgcagcatctgtctttccatcgatctttgcgcttttgccactttatcgatattctcctttgtaagtgtccaaacttggga

SEQ ID NO: 12383 - DNA, 561 bp, Diabrotica virgifera
tttttttgaaaaatggctttggcagagccaattagccagacttgtttgtgattgattgcagattcatagtcataaatttcttatttcataatataagtacatactacaatattatttttagatacataggtacattgtgttgcttttttttatttgttttttttttaattattttactgtgtttttttaatatatattttaatttgtgctaaacacttttttttacttttttttttatttttctttttcttttttatttttgtttcatttatataatatttataaatatttaatatttatatatttactataatatttaagcctcaaaaaatacgattgcgatatgctacatacctctgcagtcaccgtttgggcaattacaactgtttaaataatcgtacttcgcgataaacaaactaaataacttataaacgatttggtcgatctggctgaaaactagcacaattcaataactcactcatttacataattcaagtaggtagttatgttgcatgtcattatgcagaaaaacattgttaacatttataagttattgcaaaa

SEQ ID NO: 12384 - DNA, 564 bp, Diabrotica virgifera
gttggggtggtgtggttcagatatttctttaacgcgactattattactatttcacgatgaaattcacaacagttgctatgttttgcttactttttgcagtcactatggccagcccattaaataaaacaggctcttgtgatgaccccaatgctcattttggatgtgaatatccgtgtaaaccaacttgcaacgttcgtcaattcgcatactgtggaacaaaatgtgttaatgattgttattgtaaccaagattatattctaagtagagaacaaggaaaatgtgttctaatacaagattgttttccccactaacacagttatttaggtagatatatgatgtactgttgtatatattagcatttataatttgttgatgtttttttttaacaataataattcttaattggtatttaatatgttgtaaacattatacgattactgtactaggcttgttaaatatatatgtatagtgtgtacgtaatgcattttattacacgtgtctaactaaaaacgaacaaaagtatgtatgtaaagaaagtaaggaatatgaagtaaagcgttgtac

SEQ ID NO: 12385 - DNA, 561 bp, Diabrotica virgifera
agaaatacccaaggacattttgcagcaagtaaaaatgataattctcgaggaaaatcgataaaataaggctttggaaaattctgtacgaaaaatcgaaaacttcgttaaaatttgtgaaaatgtggtatgtataatttcaagatacctccaaaatattgctgtaaagaaaaccgggatacctttgtcccaacttggtcgataaaattctaaaatttaaaaaatttttgaacttttggaaatttctttatgaaaaatcggaaaatttgaaatatggtatatacaattttaaagatatttccagaatattgctgtgaagaaaaacaagataccttgatttcgaattggttggaaaaattcaaaaatatcggaaattttgtgaaaatttggtatctataatttgaagatacctccaaaatatttctgtaaagaaaaacgggatacctttgtctcaaatttatcggtaaaattaatttaaaaggattacaaaatttttgaactttttggaaatttctttatgaaaaatctagaaatttggaattgtggcatgtacaatttgaagat

SEQ ID NO: 12386 - DNA, 565 bp, Diabrotica virgifera
  misc_feature (21)..(21): n is a, c, g, or t
ggcgagttcacgaatagtgtntaaggtcttaggtcgagtaaatatttttacttcataagtaatcatggtcacaaaccatggattgtttacagtctgctctattttccaattaataattggtacttgacgccatctttcaacaagtctattgacaaattcacaaaagtagcatacgttggacggaggtagcgaaattaaaatgagctcactagcattgcgaccgttccgtaacacgttccgcaagtagtgccacattcagagaacgaatttctaacagttgcggaaccgctccgtcacaaattttcgcctcttgaatgcgataaatgaataaatcaggcatcgcgcattacaaatcgagtactacgcatagtctgtatgctttattcgcgaatttctacgaactaggtacaacgaatcacgaatcattcatagtctgtagccagctttatgttgcacagtaaaatatttgttgtcgcgatggtccaggacagtcgtatattcatggaatatactgtagagaactgtatgcgtatgcttcaatggaaattataataaatttatttta

SEQ ID NO: 12387 - DNA, 563 bp, Diabrotica virgifera
  SmartBlast Evalue=1E-26; Info=AP-1 complex subunit gamma-1 n=2 Tax=Formicidae RepID=E2B231_9HYME
taagaaattcgaattctgattactaattaatacattgctattattattctccatgatcaaacccatattgttgccacctgtatccgttgttggtgtagatgaaatgggaccgaggcctaataagtctaagagatcctggttgttagtgtttgaaagagacgtggtgataggctgcgaattcggctttattatatctagatctgtaccgctgtctccacccaacaggtccaataaggcattagaatcactatttacattatgttgaggactatcttcattagatcttggttcagaatcgctaatgtctccatttgtttgattctctgtttgcgtccgtgttatctccatcggaggcattctttccaacaaagccggtctcaaatgtgaatatttaccgaaaagttgagaatactcgacgcccctttgttgcagttctacgtgcaaactcgaacagaaagaactgatgatttgctgaattttattgtgagtagaattaaatctagtgctcaatttcatcaaactcataagggtatattgtttagtcatgacagtgttctgagtag

SEQ ID NO: 12388 - DNA, 564 bp, Diabrotica virgifera
  SmartBlast Evalue=3E-85; Info=Chitin deacetylase 2A n=2 Tax= Tribolium castaneum RepID=A7U8D0_TRICA
atttcagcatggctgacaaaagactatggctgtgttgttttttattattgacaattgcttacgctcaagatgaagatgatgacgattcaggggaaccacagatcgaccagctgtgtgaaaacaggcctgctgatgaatattttaggttaagcactgatggagactgcagagaagttgtaaggtgtgatctcaattcagatcttaagggcggtactcgattggcagcggtaaaatgtccgacaggacttgcttttgatcttttccgacaaacttgcgattggaaagtcaatgtcaaaaattgtgatatcgtagaaaaaccaagaaaagtccttccaattttgaaaaccgacgaaccaagatgtccagaaggaaagctgatgtgtggtaatgaagaatgtatcgacaaagatcttttctgtaatggaaagccagactgtaaagatgaatcagacgagaatgcatgcgatgttgatagtgatcccaaccgtgcacctgactgtgacccaactcaatgtgtaattccggactgtttctgctcagcggacggaactagaattcctggcg

SEQ ID NO: 12389 - DNA, 564 bp, Diabrotica virgifera
  SmartBlast Evalue=4E-35; Info=Craniofacial development protein 2 (Fragment) n=1 Tax=Camponotus floridanus RepID=E2AR66_9HYME
tatatcctttgtaggtttagattgttccttcagttttttgttcatgtcatcagcatatttaatccttatgtctggagtattcagtttttctacgtgccatttattttttgttgtcgtgttttttagtgttcttttgactttttgtcttacttttgcagtcaccataaaatggtctgtgtctgcatgtgcacctctgtaggacctcacgtctgttaccgatgtttgcttccttcttgtaatcagaatatggtctatttgtgaccatgttttttggtctggggaaatccacgtcactttatggtatttgggatgttcgaattttgtactaacgataatcatattggtactagatgctagattacataatcgttggccattgtcgttagttttttcgtgtattgtgtgcttacctgctacttggttaatgtagtcttccttacctatttgggcattaaaatctcccattaccagtattgtgtcttctctaggtaacttctccatttctcgttcgagttcctcatacaatttgtctttttcctccgcagtagcactttcagttggggc

SEQ ID NO: 12390 - DNA, 562 bp, Diabrotica virgifera
tatgctcggtcatgggtactccttcatttttcctactgcagcatgcttttatcatgaaaagttaaagaacacatacaaaaggtattccttatttttagaacagtgcctataaaacgcaaataatttaatgtagcataaaattgacattaacagcaatatccctaaatatatccatttagtatgtcgcagcccactcagtgcaatagataagaaaataaagtacactttagtcactaaccaatttttatcaatggcttggttctacagaactactaacatatattcacatatttatttgattttcaagtggttataggtacatttggcaatacataaatgcagaaataggaagacattaaacaattaaaaacttgggaagctttttggcttttatcacggcttacgcagaaggataaaaatgttacaagccaataggtcccgaaatttataaatgcctgactgtaagcaggtggttatgtggacaacagcaatacagtaacatatattcgctttttttattaatcatattatttttctcataatttcttaataactgagaact

SEQ ID NO: 12391 - DNA, 563 bp, Diabrotica virgifera
taagaatttatttatatcttaaataatgattaaaaaatacaatttgctaacaaaaaataaataaaacaaaattttagtattaaatcttacaaaaattacttaaataataaaatcaggatttacttaaatcattgttaatattaatttggtttcaactcaattcgatattgtgtcctggttgtcctgtatattatcacgtccggaagaccttttacctcgcgtgcccataaaaccatacggcaccctcttttcgtcattatgcatatcgctccactgattattttgtgggccattctgtctgttatattgctgtactaaataatcgagtaaggtttgttcgtcctctagcctgactggaatttccatttcaaccgagttgtcatcaagatcatctccagctttcttgcctcttactcctaagaatccgtatggtactgctaagtagcactccaacgcaaatagaaagagaacgattagcggtaatacttgcatcttaaagcttatctaattttacaaaaattactcttataacactaaaacacgttatcgttgaagctcacaat

SEQ ID NO: 12392 - DNA, 556 bp, Diabrotica virgifera
cccccgaacatgttgatagcattaaaatttatgcaccaaaacctttttcaaaatttatcttttaaaatttttccaaaaaagtgttattgtttttttaataactccgtttatttttacgatatcaggtttatctaaaaaccgtttggaagttaattccaagggctatttaaccacgttgaatttagtcttttagacctcactttttttaaaaataaaaggttaaatggccccggttgcatggttttcacagcaaaatttaagatttaaacgtttctatctcggttatttattaccctatggaaatagtaaaacaggtagaatatttgacacagaataaactaaaatttgggtgtttatcattttttacgtatattgagtatttttggagttgttatcaaaagaatatgaaaattacaataattttaaaaattatgatttttttaaattatatctttttttcaaaaatatgcattctaaaccggtcaaaattattgaaatcattacttatgctaatataaagaagttattgtaaggattattaataaattttaatttt

SEQ ID NO: 12393 - DNA, 559 bp, Diabrotica virgifera
  SmartBlast Evalue=1E-13; Info=Dynamin n=1 Tax=Culex quinquefasciatus RepID=B0W2N7_CULQU
aatctgcacaacctaataaagaagaaggcaaaaagtaaatcattcaaaaaactatggtttatgcagctaatcctttttgctgatgagaaagctagaaaagagactcaagagaggttaaataatatacaagatgaaatgatgcaaactcaaattaagtaccaaagagaattagaaaggttagaaaatattaaaataattgacaaatatattgccatggagcatttattaagaggtcaatttggtcgaatcataataagtacatattcccatacacctttaaagtatggtcctcaaaaatcttgtcaaagaggaatgtgtatattgtggagtggaagaactcttgatagatctagacctttactaaaacaacaatatatttatcaaagaagagaatatggtatgcttatagcacgagcccttagaggagtattaaaaataagatatttgttgcttggtggagctgtagcaggtggaggagcattgcaaaagaagtataatgattggaaagatggattgccagatatgaaatggctagatgaagttctgcccgacaatgaaa

SEQ ID NO: 12394 - DNA, 563 bp, Diabrotica virgifera
  SmartBlast Evalue=5E-67; Info=Uncharacterized aarF domain- containing protein kinase 4 n=1 Tax=Harpegnathos saltator RepID= E2C531_9HYME
atttactacagaactattagacggtgttcctgtggaccaatgcttcgatctggacctagaacatcgcgaatttattggccagaaagttctggagctgtgtcttttggaaatattgaagttcagatacatgcagaccgatcctaattgggcgaactttttgtataacccgtcaaagaaacagatactattattggattttggtgccagtagagagtacccaaaagctttcatggaccaatatgtcaagatcctcaaagctgcttgtgacggagatagagatacagtcctcaatgtctctagagacctaggcttcctcactggctatgaaagcaagattatggaagacgcccacgtggatgctgtgatgattctaggtgaaattttcaggacaaacgacaaatatgactttggaaatcaggacatgacgatgaggatccaggatttggcgcaaactatgctggtgcacagactttgccctccacccgaggaaatttactccctccacaggaaactttcaggcgtgtttttgctgtgcagcaagctgaaggtgaagttggcttgta

SEQ ID NO: 12395 - DNA, 563 bp, Diabrotica virgifera
  SmartBlast Evalue=9E-16; Info=Toll-like protein n=1 Tax= Tribolium castaneum RepID=D6WCW7_TRICA
aaacaatatggaggtatttgtttaattccaagaactgtgtgttatttgctgtttggcgaaacggagttaatagaatataaaaatggttccgctaacgatcgtattactgatgttaggaacattcctaagagtaaaaggagatcaatgcgaggatgtcgatcgtaccaagtgcgtctgttatccaggaactgattacgaatatcaatgcccacctgcttcacctgaaagttatctaatccatgctcaacctcgcgagtatttgcatattgattgctatggcatcaaaaactttgatgttgaccgattgcccaattacgttgcgggaaatacaacgtacattagaatgagatactgcccttggccagaggagaatttccaagctctattagaaaagtttgggattacatttgttaaaagtttatattttgatgaactgttcttaccaaactcttcagaaccgattgtttcaaaaagtacctttcaaggactgactcacttaagggttttaactctggctcgtgtgtcgaataagctagccgatgatttacttacagatcttccag

SEQ ID NO: 12396 - DNA, 557 bp, Diabrotica virgifera
acttgactcacgaggaaaaataatttccctttgtcgtttgtataccattaatcacataaaaatacaagatcctttgtaaaaggtatatttaaaagaccccaataaaggttacatcacaaagcaaaacgttttcggattaataggtaatccatcatcggtgttaagccctaaaatattaagtataacctaattaaatgttataaaagttgactaaggttaagaattgacagaggccatacttacaatagcatgcatgcgtgagccaccaaaaagttatgggtaagaaccctttaaaagtttcaagatcttaaatgatactacatatttttattaaaacagatggatgttgcaaatattcctggatataacccaggacaacacaggactctaacccacgtggatgtgatatgcaagaaatgaacatcacatattgaaaattgagtgtcaactgaactgacaggtgaaagaactttagatgtatgccagtgacagattgtcatgcgacgttatgaactattttgttacttcagccaacgaatttaaagtttatgttgatg

SEQ ID NO: 12397 - DNA, 562 bp, Diabrotica virgifera
aaattaaatatcgttgatcttacattttcacactgtaagttttgtaagctattttttacttttatttttttaccctcttgtatcttttgcattattttcatcatgcaatacaaacattacttcatctaaaaactttctgcgattcgtttgttgccaaaattatttcctgacgcatgggttgaataagcaatgtatttttagcaaaaacatacaactatataaagttgccatcttctgaacgtaaaatattttcagagggatgaacaggacaaaatcgataaacgtttcacctcttccagcgatattaccagtttcttcccttgaacttatctcaatgtaggtacaaattatttaaacaaacaatttttgaaaatgtctgaagtgaactatgctttattagagctgaaatatgaaacgggcagattatagcattatagctatagtgcagccgatatgagaaacaattgtgcatttaatgatagaagcacataatttggaccacatacactacacatacaaaggttcaaactcagacatgaggccatctcagatcttgcctctt

SEQ ID NO: 12398 - DNA, 555 bp, Diabrotica virgifera
  SmartBlast Evalue=2E-85; Info=Serine/threonine-protein kinase RIO1 n=1 Tax=Tribolium castaneum RepID=D2A1U0_TRICA
tatactagattatctgccaagccggctttagcttgatttatgtctctttcaaaatcgatgacttcagttaaacgctttggaatatatgcctgtttaaaaacttcttcatctacctgttcatttgatgtaagttctgttttctcagcagctttctcagccaatgtatctaaacattcttccatattgttgtctgttatacttggatcagtaataaaatcaaaaagttctttaattcctaaggtagcaacttctcttttcctgaagtagtctgtaatattggtacaatcttttcttaaaaagtccaaggcatgtggatggtcatgttctactgattgagaaacatctattataactatctgtccattgtggtagagcatgttaaattctgataaatcagcatggaccaatttgcatttattatagagtttccacataatgactattatttctctatatatttctcttgcttttgattgacttagttcaacatctttaagttttggagctggccaaccttcttttccaataaaagtcatcaccagcacatgtgacctt

SEQ ID NO: 12399 - DNA, 563 bp, Diabrotica virgifera
  SmartBlast Evalue=6E-79; Info=Probable acetyltransferase san n= 3 Tax=Aculeata RepID=E2C1H1_9HYME
ttcatttgtcaaccctttgcaaatttctaaaaatttttggttatttatttaaatttaaatatgaccagggaaagcatagaactgggcaatgtaactccacataatataaaacaacttaagcgcctaaatagtgtggtttttcctgtatcctataacgacaaattttacaaagacgttcttgaagcgggtgaattagcaaaactcgcttattacaatgatattgttgttggggcagtgtgttgtcgcatcgatacatcggaaaaatctagaagactttatataatgactctaggatgcttatatccttataggagattagggattggaactcttatggttcaacatgtcttgaattatgtagaacaagatggtaatttcgatagtatatttttgcatgtccaagtaaataatgaaggggccatcgatttttataagaaatttggttttgaaattgtagaaacaaaagaacactattataagagaatagagccggcagatgcacacgttcttcagaaaactcttcgaaacaagggccaaatgaatggcattattgaatgaaattt

SEQ ID NO: 12400 - DNA, 560 bp, Diabrotica virgifera
  misc_feature (543)..(543): n is a, c, g, or t
  SmartBlast Evalue=5E-91; Info=Voltage-dependent calcium channel type D subunit alpha-1 n=1 Tax=Harpegnathos saltator RepID= E2BJ11_9HYME
cgtagaatttacccacggtgacttcgtcgtccactccaggtggaggcacaacttgatccaacaactttggactcgtcctcttccagatttttttgatcacagctcgaagctctgcattgcaatcatcaatgttgggtccatcggttttgatacgcagggatgttcggaccacggcaaatagcgtagcgttaaacaacaccgtaccatcactgtttagaggcatattcatggaaactaaacgtttacatgctacgcgatgcggacacagtttaccaaatccaaggggaggagaaatttttctaagaagagttacgacgtctaaatgttttatcctgcccttagcgtctggatcgtattcgctccacagccttatgaattcatctaagtggtgcggtccaagaatagaccaatcacgtgttaagtaatcaaaattatccataataacagctacaaacagattgataatcagaaatgaacaaagtacataaaatgaaataaagaaagggtacgctaacaacagatccgcaagttgctacagccttnttcagattgctatgaca

SEQ ID NO: 12401 - DNA, 563 bp, Diabrotica virgifera
gccctaggagaattaaaaattgtagacaaacagaaaatatttaaaataaaacccaattaaattgtaccaattagagagatcaagaagttcatacaaaaatgttcgtatattggtatttattagcatttgtaaattttacaaaattactttagaatatataccaagtcgtgcctaagtcacaataataccgttaagtgaaaaaagtgattcgtttaacgaccaaatattcagttccctttttaaagatacttagttaatacggttgtttcatttgtgaagtaatatactgtctatgtacttgtctttattatggaagtttctatgtattcgagtatttacaaaaaatgtaagtaccagcattgtttcagtaaaatgtataagtctataaagttagggatatgtcaaattgctaagaaaaaacttattaagataagcttacagcattagaataaatataagattcacaatggcgaagtaaaatagattttaaaactattattgtttctcattgtcccaacacctaaactaaatatttgataaaatcaactattagccctaaaaac

SEQ ID NO: 12402 - DNA, 562 bp, Diabrotica virgifera
gttatatagattgttatatatttttactttatttctacacactattctacacacatttctacacgtttgctgtatggaacttaaatccaactgacacttgacagttattgtcgaaactgctcagtactgcgcatagaggcgtttacaaatagacatgtcagacattttgctatatttgacaagtgttactaacaaaactcgcttcaacaggtagaacatttctatagattagtaagatttattttccaaaatcctctaacatatatgtaatcttaaaaatatacatttgggaagtattctttgttcctttgcgcatcgtcacagtttcctgtgtccagaaattcagcatcaaaacccttgagactgagattttaaaatttttgtccattgttgctcattcgtgtgtataatttattgatttttccgtagccggggacttttcccctttttacacatttttcatgttgtgaaatatgttaaaaatgtgctgttacacatcagataaatattttggcttagaacagtaaacacaatgtaattgttgacatctattgcattttac

SEQ ID NO: 12403 - DNA, 549 bp, Diabrotica virgifera
ttagaaaccttcacgttttttgacttgtttcactttattataaaatcaacaataattattgtaatagtaatacttttaatatgcaatggtttgatgtttgcattgatacttatgtacttattttttgataatccaatctaattagattcttgttgactatcagcttcttgtctaactaaccggtataatatgtatactcttcttttagagtggaatcttctagtctagagcacaaaaatactctagcgaaaaattcctcattggataataattccatcaatgaaaaacccgttaataataaatgtgaaactacggaagaagtaagtttcaatttgtattactttaatatatgtatacacatttttttattagaaactaaggcttttacttctttctatcaaaaaagtaatagtatcttacgtaataatagtaaacttacgtatctatgtcaaaaaatacaaaaaaaaaaactatccccgctcgttgtctgaaagagccatgtaccgaaaagtgcagacttaagtgctccgataatatcaatacagcaaa

SEQ ID NO: 12404 - DNA, 561 bp, Diabrotica virgifera
  SmartBlast Evalue=2E-43; Info=Rhophilin-2 n=1 Tax=Camponotus floridanus RepID=E2AKP7_9HYME
ctttgcacagtatcgcgtgacagatctgtttagaagtctgggaccgattgccattttttcagcgaagaggcactggaccgctccaaggctagttcagctccatcgaggaagaaccaccgatggatttgggttttccctccgtggcgatgctccggtgcttgtagctgtggtcgaggctaattccttagcagagtttggaggaattaaagagggcgatttcattgtcgcggtggccgacaaggatgtgaaatggtcctcacacgacgaagtagtaactcttatcaaaaacgctgaagaatctctgaatctcaagctggttactccaatggatagaaactatctgaagccatcaaaagcaccaagtacaaacaaaggctcagtctcgacccatagcagcagctccggagtctcaagcggcatgtctagtccatccggttccatggcccaacataacaacaacaaccaaaagaagtcgaattggaatccgttcaaacgacactcatcgtccagagaaggaaaagattttacgaaaacgtcatcttacgatgaggaaaattttgt

SEQ ID NO: 12405 - DNA, 561 bp, Diabrotica virgifera
ataatgtgtagagtaaatttgacaaagtcggacacaatcgatgagatatacattggtttatcaattctaaaactgaagaggtatcatttttttcaatggcttgttggaataattcatttattcttgttatgtctaaacatgaaaaatctgcaatactatgattatcaatatatttaacaccataggacacatttgggatgggtttcttacagctccatttgtccacttttttctgcattagttgtgttgtaaaatcatctatggtatctaattctagagatagcattttgcaatcattattatttctgacattcaatatcaggcttctgtagacatttctacctaaagctctataatatgctgttctattcatataaaaacaaaaagccataacacttttaataaattttcatttacagcttacatatttatggataagctgcaagtcgatgtacattcgttttataaaacaataagaatcattagctgcgtaccctaccgttaaaaaatgttgaataattataaattatatacacaaaataatctatttttgctcatttt

SEQ ID NO: 12406 - DNA, 555 bp, Diabrotica virgifera
ctccattgttccttctgaaggattgtttctatgtaatatttatatcacatcaacaattaaaccatctccatagcacagttctaatatattcattacataatatgataaaaacaaaactgagaagtaaaataatcttgtggcagtttgattctacttattgtgattacttgtgaacaactgtgaaaaaggaatacttcaattaacttatagtgctcgaattatgctatacaacaagcatttagtgccaaaatagaaaaaataattccttgttacttgtataatatccttcaagccagtggcggatctagaaatttgccttgggagggaaaatttgccttaggggggaaacttccagtgaaacaccaaccaaaagacatacaaaagataatcgcaaactagataaaacacataaataatatcaaaaatgaataaccactttcaatttcgttgcaacatgaaactacagccgcatcattattccagttcaatcagagagcgcagcaagcagctccaccggtctcgaaacttgtcagtctctcatccgtcatggcttgc

SEQ ID NO: 12407 - DNA, 561 bp, Diabrotica virgifera
ggcgggtacaattcatggttaatatttgttaatatttagcgattttacattttatcaccacgtgaagattgtgaattgtttctttaacattttaagttataaattggtgttaaattagcccggtgttgataagcagtcgtaaaaagattgttttagcttcaattaatacacagaaaggactttctacgtagtgtatctgtgccatataagtagacatgtcgtggcctgcgtggcctacaggcacacctgctttacccacagctgtaccaggcgctgtattacccaatgcgattaatgctgcgccggctatcactccaatgggttacagtcaagaacagtgggctcaagcgcaacagcagaattggcaacagtgggcgcagtggcaacagcaataccaacaatggcatcagcaatacggagcggagtatcaaaaatctttaactgccatgcaaggggcggttcccactcctatgcaaatgcaaccaccgctaccaatatcagcagcagctcctccattgcctgacagtaagcctccacttccaaaagaagatcctcctatgc

SEQ ID NO: 12408 - DNA, 560 bp, Diabrotica virgifera
tttcattgtttatataagctttcttttagttttatgaaaacatcttgattatctttgacaaactgtagtttcttctctagtttggttgttttgtttcgttcatttattaaacataagttaactttttcaacttccaaatctaaaagcttatttctattttctaactcaatgatcttatttttcaatagttttacttcgtcgccgtcgtctaagatactggtactaattgatgaagcactttgtacatccccagcttcacagccaatacctgcagcactggatgatttggttaaattatttggagtagttttttcttcttgagatagatctccttcactatttgaaatttcacctgattctgaactaaaaatgtattcttttgcatcgttaaatgtaacggtatattgaggtttgacatgttttgccataaattgtttaatttgattcttatttctccctcctattttctcttagatttttggtgcaaaatcagtttcaaaaattgagtttatcttctttatagaccattccaacatgctgttaagattatgtcaatatgg

SEQ ID NO: 12409 - DNA, 563 bp, Diabrotica virgifera
ttattgtaatacataatatttaagtttcacaattgttcactgtaaaagttattcattttgtattaatttttccagtgtgttttatttattagtatcccacaactttacgagaaaaacttcacatttctcgattttaaattaaacataataatttaatgtcatgtctagagttattatctgtcattcatgtcatatctgtcataaattataatagaacacgaattaatttatgggtacttaattgagatgatggaacattacaaaattaataagagaattttttaggatgcatgtttaaataaatgtgactgactaatcgagaatgctcgatgttgttttaatttttagtaaacctactaaaaacttgcggtctgccgcacagccctgcttttacctggtttgatataatattttagttgaactggcaacgttgcctagaaataagaatgacatatgtgacaagaccaatttacacaactagaaaaacacgattttcggttataagacttgtaccagtttttttttgacgcgaagtgtaccagctatatggcgtttgttcaaga

SEQ ID NO: 12410 - DNA, 562 bp, Diabrotica virgifera
tgaccatatggtagaaccacataatgacagattagtgtttgtggtctagttcagtagtcacagcgggcaccccgtgcggtcacaccctcgctaaaataacaaaccctctttcgagacattttcacattcccgattgaaataaatatattattgacagacagtttgttgtttttacatttattttaatttcatttaattgtttccgtggacaataaggttatcaaacacagaactctgttttgacatttgccattcatgacatgacgtttctcaaaaatttaaagccaaaaaaactgttggtttttcagccgtcagaaacaaacaacttttgagttttcggtaaaatggaaaaaatcccgtattgttcgtgtgaccagttcggagacgctattggcgatgatacgacgagatccgaagaattgttttcgccgatttatcatcgttgatggaacctgggtgcattgttacacaccggaaaccgaaaaatagtcgaaacattggcgcaaacgacggcgaagacccgccgaagaagtcaaaaagtgtacattcggccggcaaagtg

SEQ ID NO: 12411 - DNA, 553 bp, Diabrotica virgifera
gtaaataaatgtatcaaataggcagacatgcacattcagagacaacaagacaagcatcaacacgatggcatctcgtcagtttggttccacaacgacgattatgcagatatgtgtatcgctataccgagaaactataagattccattgtccttaggttaacccgttcgctaccaagggggtatttaagtttcctcctcacagatcatagctatttaaattgtcatgatgtgcagggaagttatgtgacataataaaggaaagttttcaattctataaaggggtttaatttttgaacttatacttttacattaatatgaaatgtcataaactgagaaaatgtaaccaaaaacgcatttcatttcctgtttcgttactgtaagattaaggagcaaataaatattttccacctacctctaccgaaagtatacttttccggacctgattgtagggagcaaagtcgtacttttcctccctagggagtaaaagtaaagtatgatatgtcattgatgaaataacttattgacgccctatataatattatattatctattac

SEQ ID NO: 12412 - DNA, 559 bp, Diabrotica virgifera
  SmartBlast Evalue=2E-58; Info=Integrator complex subunit 4 n=1 Tax=Culex quinquefasciatus RepID=B0X7L2_CULQU
ctatcaatagctttaagtcttacatcctcaatttcatcattgaacatatctactaaaaaatctagtgccatattggcaaaatgtggattacttattgacagctgacaaagtgattcaacagatgttgatctcacttccaaaaactcatcttctaaaccatgcacaaatgcaccacaagctccactgctcataagacttatactgtctgcatctagaacttcttttggagcatcatcagcccatttctttccacttgcccattctccactggttacattctcccaggctagctcatgagctgttcgttttcttctcatgttggacattaacttttgtctaaagtttggcacaggaactttggactgactagcttcatagaacctaacaattgagcagctagtgtccttacattcatggaaaggtcagtaaccccattgcatattttaccaaaagcatcatctatcaatctgatctcatgttcacttccaggtacaaatatttcattttcaggatatgtattacctaacaaccagataagctttaaaacaacatgtctaac

SEQ ID NO: 12413 - DNA, 542 bp, Diabrotica virgifera
  SmartBlast Evalue=0.000000002; Info=Pol protein n=1 Tax= Drosophila melanogaster RepID=Q9GP60_DROME
ttcattttgcgctgttattcagctttttcgcgcttgtctaagatataaaactcttctcatgccttttgtggggatttttcccagtatcctttgtattgtcttcgtatttatcctcttaatcggtctcttattgttattttgggcactcccagtgccggttttggaccgacgtatcttgttgctgatcctcgtctagcaagttcgtcagctttctcattgacagcgatcccttgatgtccaggcacccaaatgagttttatctcgttatgttccgccagaagttcttcgcggcattcccgtacaagctttgagtttatccttgggttctttaaagccctcaaggccgcttggctgtctgaacagatattgattctcttattagtataagtcctcaatatgtttatccgtgcacagtgcaggattgcatatacctctgcctgaaatacagagatatattctcctagtgggatggaaccgttatagttcctatcctcactatgtactcctgatcccgaactatcttctgtcttggacccatctgt

SEQ ID NO: 12414 - DNA, 561 bp, Diabrotica virgifera
ccttgatgaggtacatcttgtctgtctgttcttcttgctgttggattgtctgctctcttttctgtcctgtgtggaggtttgctttttgtgataatcacgtttacctctatgatatctattattcgattgttcattttgctttccctgattgggattgaagttaaagggaggagggatagggaaagtcccaccgcttggataaatagggttataattttgtgcacctctgtggttgttgaaaaccctattcatatcacctcctgaaaacgattgttgattttgataatcatagtcactagcaaagccacgattaggacgaagacgaagtcttgcccttgtaggaggattggtagaattggtacctgattgagaagaccggcttgggcctggttgactgaggaaactattcattttcaacgtttcaatcccgtttttcttcgtatttagaactagtatatatttatcaataatctaattcgtcaaaaagcaccgtaatatctattttcatgctgaacaagtaaaaaacatctataaaacaaggcttgggccgctatctaataa

SEQ ID NO: 12415 - DNA, 562 bp, Diabrotica virgifera
accctgtatattataatgataatgtataaataggatatgcgatctattttaccgatcggtgtaacatacgtatattgcaggagaaaacttctttaaatattttattaagttcaggttgaaagttcgtaacaattatggtcagtcgtaaaaaaatggcaggctaatggcctatattattttataattatttaaaaacgtttaaataaataaatgtataaacgtcactcaacacaaaaacttcagtctagaacactcacatataactgttttataagtttgaataagaagctcagcatctgcctgttaaaggactggtttttatgtaaatacaaaataataaatgcaatatatacatacgatacaaattaaaagtacacaaagaatacaagcaattaattattcgtggaaacgattgtataatacccatttcggctgcggcaaactttaagggtacatccaatgagttactttaaaattagattcgtcttctactatccttacactaaggcaacgttctcatgacaagcgttaaacgtgcgttttgataacgcgctcttacaac

SEQ ID NO: 12416 - DNA, 558 bp, Diabrotica virgifera
tctcgatgcgtaggaagagaaggaatggagaacctgaagctggaacaggagacaattataagctgcaatgaatatatgtatatctaatatctgggaataaaactaatgagtacaggaagaagaaaatattgaagaaattatactaacaggaagataggtgataggagccctgaattcagtaacgtgacaaaacaataaaagaacagaaataagaaacgaatttacaacacaatattaaaatcagttttaacctacagagctgaagcctggcaattaaccaagaagtacaacactaaattactagccactaacagtgatttttggcggaagtaatcaagaagatctagactagaacacataagaaacgacggcgttagacaacaaatcggaatagaaagaacaatcatagatgccatcgaaagacaacagctagtatggtacgggcacgtaagatgaacggaagaaagaagaatccccaaaaaagtgttaaaatggaccccacagaaaaacgaaaacattttacaagcaagcgtctcatcatagtagctaatataaaag

SEQ ID NO: 12417 - DNA, 557 bp, Diabrotica virgifera
atgtatattgtgacatttcgtgatttttatagacccccccccctctttcgaacctcacttgattaatggattgtaatcgttattaaaataatacccctatgctgtaatcttattgtagagatttaagtaaaaatataattaatataggtaccaatagtcctgattatgttgttttcttcatggggttgacttatgtagttgcctgtaaaagtagtttcacaaaagtcaactaacttcacacttaattaatatgaacttatcaagtatgtactaaaatataatataattgtatgtactaataaaatataataatattttgaatacactgacaatttagaataatatctatactagaatataattgggtacatttggatgacctcagcgcctggacagctgagtaagcggtagagttcaaatgacgaaatgactcctctggaagtcagccgctgtgaggtctagtacatacatatgcagtaagtcaaaatacatacaaagttcataaacatagtacatatgtacatacgttttagttacaaggaatgaaacacctgcat

SEQ ID NO: 12418 - DNA, 562 bp, Diabrotica virgifera
  SmartBlast Evalue=5E-92; Info=Serine/threonine-protein kinase mig-15 n=2 Tax=Formicidae RepID=E1ZV73_9HYME
ggcgaagattccagcaaatggaagttctcgaaggccaaaatattcttgtaaccatatcaggaaagaaaaatagggttagagtatactacctcagttggttgaagagtaaaatattaaggacagatggcgctagtgatcaagtggaaaggcgaaatggttggatcaacgtaggagacctccaaggtgcagtccactttaaaatagttaaatatgaaaggataaaagttcctggtgatcgccctaaaagacagtatcgaaatttacgcgtgggcgccgaaaccttaccacaaattcatggctttcaagtcgttctgtgatctccaatatagaccgttgttggtggaccttacagtcgaagaagggacacgcttgaaggttatttacggaagtagtgatggtttccatgctgtagatttagactcagccagcgtatatgatatatacctccctaaaatcgcgcagaatggaatttgtccacattgtatagttactctaccaaacagtaatggtatgcaacttttactgtgctatgacaatgagggtgtgtacgttaacacgtacg

SEQ ID NO: 12419 - DNA, 559 bp, Diabrotica virgifera
  SmartBlast Evalue=1E-18; Info=Alpha globin regulatory element containing gene n=1 Tax=Culex quinquefasciatus RepID=B0WEL0_ CULQU
aaaactgataatcataagaaacatttgacatcaccatcacccagaagtagtactgtaatgtcaaattaccaaataacccatacagaaagaactgaatcggaaagtggagcatctaatatatcagaggcgccggaactgataactaacagaaatattacgttagagaatgttagttttacctctacagaagacgataaacaagactaccaggaggaattacttctggattttcccgatgaagaaagaagttctattttcaaaattcctgccacaaatacaccggaggacctgaaactattcgcccgcttatgtagaaaagaatactttcaaggcaaccaccacgtggaagaaatcatgtacctggaaacctacgaaggagtcaattactacaattgttggacaagtttagggacgtgctgattacgtacgagacggaagatcctgctatagcaatgttttcctgctcttcatagcacacgatgaaattctattattgactggatttcatttgtgagatggtggtacaaaattattgtccaatgttaaaaaattagtagat

SEQ ID NO: 12420 - DNA, 562 bp, Diabrotica virgifera
  SmartBlast Evalue=2E-96; Info=Cytochrome P450 n=1 Tax= Leptinotarsa decemlineata RepID=Q3I413_LEPDE
tttcctacggtcagtctgccggtttaaaagacgatttggatgtagatgaagatgtcggagaaaagaagagaatggcattcttagacttactgattgaagcctcccagaatggtgtcgtcatcaacgacgaagaaattaaagagcaagtcgataccattatgttcgaaggacacgataccacagctgctggaagcagtttcttcctgtctttgatgggaattcatccagaaattcaagacagggtcatccaggaaatcgatgagatctttggagattctgatagacctgctaccttcgccgacactttagaaatgaagtacttagaaaggtgtatgatggaaactcttcgtatgtatccaccagtacctattattgccagacaactaagacaagacgttaaattagtttctggaaactacactcttcccactggagcaaccattgtagtaggcaccttcaagatccaccgtgattctgatacctaccccaatcccgacaagtttgatccagataatttcttgccagaacgtagtgccaatagacattactactcgttcattcc

SEQ ID NO: 12421 - DNA, 561 bp, Diabrotica virgifera
caagcgaaatacctgtctcctctgtgatgtcaagtgctagagaaccgcattcacagtgggctactcctgattttattggaagttgcgacaatcaaggtcatttttcaccgagaaaatcttcgagcccaaaaccgacaagatccacaccacctagaaacaaatcgaaaagtgctacagcgaaaccatcctcttcccctaaaccaagactgattagaagcaactcttatactctcgaatcaccgagcccgatacttttggcccatctccagaaatgctgcaagacaaatctagaagtgccagaagcaagtggaaacctttcacgaggttggacgtctttagagaataacttttctctaaatagtgaagatagtgaatttagcagtttaaacactgtatacaatgctaacttgagcagtcaaactgttagcgataaagtgcctttagatggagtgggtgacaaagagctgaggctacaaaaggatactggacagaagtctcctactattgaggtggtccaaactgacatctctgttcagcatataactgtcaacgccaatagtg

SEQ ID NO: 12422 - DNA, 559 bp, Diabrotica virgifera
aatttgttcttcctcttcctgagattcaactacgtctggatctttgctgaggggcgctggcttcttaacaggtttatatgtagcattttgtataatttgatacattaaatgataaccggaaaacatcattcatataaatatataaaaatcgtttcaccttctgtcacaacctgttgcaattcaacgaaatattaacaaaaatacaaaacacaccaacactctcggtggaaacgagaacaataatatcaaagtaactgtttacatacactcgcactggactgatataaatgtaaataggtcgttaacttccgattcagtactagtatacgagggaagtacttcttatatacatgaagacttatgcacaactaaatgaaacccaaagttgcgtactgactagagcagagcggttcttaatctgtggtacatataccactacactggtggtacacttcccgtcataaaaaactggtacccttttttcccaatgtaaacctgtgttcagactggacacaatggttcgtgaatcatttcgttgttgccatcacagataacggaa

SEQ ID NO: 12423 - DNA, 562 bp, Diabrotica virgifera
  SmartBlast Evalue=3E-27; Info="NAD-dependent deacetylase HST1, putative n=1 Tax=Pediculus humanus corporis RepID=E0W166_PEDHC"
gattcgtatttatcggtaaagttcgaattttccccgatacccgaatctttggccgaatcgatactcatgtgtctctctttgccgctcttactttctaattcgctatcgttaattgacttgtatgtaaaacataagcactgcgtttcagtggtcacgtctgcacttaaggaactactatttgtactcttgcatatacaatgggaggagactgattggtgtgagtagctgaagtctatgctgggtataggttgtttgtctaactctggcaggagtgggttttccaatgggagcaacgtttcggcgtgctgtaacgtttgagaggagtagatcccttcttcccaatgattacccaatagcctacacagatgattaataatgacatcacaatcgcctaacagctccacatcgaagtgacaatgtggcaaaggctccctattgattaagatttgaggaacttgtgaaggaaggctgctaggtatcaatgccaccggtcgaaccttcaaggaactgccaatgactagaagtaagtcacactcagacttgtcttctatcatagcttcgt

SEQ ID NO: 12424 - DNA, 562 bp, Diabrotica virgifera
  SmartBlast Evalue=8E-47; Info=Probable multidrug resistance- associated protein lethal(2)03659 n=2 Tax=Camponotus floridanus RepID=E2AJR5_9HYME
aatgaattcgatgatgagaaaatttggaaagctttggaacaggtagatttaagggaaagtattgattcgttagacttccaagttgcagaaggaggtggtaactttagtcttggtcaaagacagttagtatgtttagccagggcagttctaaaaaacaacaaaatattggtattggatgaagctacggctaatgttgatcctatgacggatgcattgatacaagcaacaatcagaaaacggtttaaagattgcactgtgcttaccatcgctcaccggttaaataccataatggactcagacaaggtactggtaatgagctttggaagcatgatagaattcgaccatccccacaatctgctagaaataccagatggacacttccatcgaatggtcttggagactggggctggaatgactcagcagttaaagagtatcgccaaggctgcttataacaacaagattgaataacgatagtagtatttgattgattaagtatttataaattattgttatagcagttgcatatttatctctttatttctaggatataggaattttaata

SEQ ID NO: 12425 - DNA, 557 bp, Diabrotica virgifera
ggcaacactgagtcatataacacggaaattacagatccattgtttatgcgcattgacgatgctcagttgcactcgcatatcgacacactgctgcttggttcactgtgttatctattatactcaccaatttcggacaaaaaatacatttttctaataactttgaattttagacaaatcaaacatgaagtgaaaggtgacattatttagaaaagtttgtgggtcgtctaacatacatttacttaataaggattataaaagaaataattcatttatttcttatatgatgataaagtatttttcacttatatgatgaattctagagctggatagctcaggcggtagagtgtctgactttcacgcagaagaccggggatcgaatcccagcgccggcgagaacacctagatatttttaaatatctacaggcaccaggtcgactcagcctgaacaaaatgagcactttgggtaaaaccaggggtgataataggcagttgaaaggtagcactggccttgtgaccttccttgtatgccataggtccaagggatagcagactacgtt

SEQ ID NO: 12426 - DNA, 559 bp, Diabrotica virgifera
tagtgcatgtagaaataaaccaaaatgaaaactattttgagtttgtttttgtgtgctattttggttggtgtaaacgcgtgggtgtctattatacgagctgatccagcgaccgcacatcttggagattgctacacaaacgaaaataatctcggggccttcacagcaggagaggaaaaaagaattgaaggacagtgtgccatagcaacttgttatgacggaggtgaaattggattgactggatgtggaactgtacatgtagaacctccgttgagagtaatccctggagacttgtcaaaaccatttccagattgttgttatgaaatagttggccctgctaatcacaccgaagtaaatccagaagactgcgatcctgacattcgcaattccatttttgcaactatagacctgccaagtacacaatcgattgcaaaatgaactacttataacggaatatgcattaaataatcatgcgctgaatgaaattaactgctaaaattaaaactgttaccaaaagagtcgaagcacaagaatgaaaaaaatatggaagatcctgcttatg

SEQ ID NO: 12427 - DNA, 561 bp, Diabrotica virgifera
gtagtatcgcttttgtagtaaaaatactatacataggacatatttttgacaagttgaaatatatcactatccgtgtgttcagaacttgattcgacacttgtcgtgtttataactaccacaccaatattggaaaagaagtgaaaggcgcaatttacacaacagttatcagaccaataatgacataaatacgcggcagaaacacgacttgatacagaaaggacagaaagaatgctagaaacagcagagatgaaaatactttgaaaaatcgatgggatatgggaagaggtagaagtgcagatatacgacagatatgcaaggtggacaacatcaataactgggtaaaaagcagaagagtataatggaacaactacatgagccaaatgacaaaaacaaagtagtaaggacggcgagagacggttccccaataggaagacgatcagttaggtctgtatcccgcgtatgaaagaaagagttgattaatagtaagctgaaagtttgttgatggcttaaacggtgtctagtcggataaactgtgatatatgggaacactgtaacgggggc

SEQ ID NO: 12428 - DNA, 555 bp, Diabrotica virgifera
gcccatgaataatactcagggtatccctggacattcgcttatcatctgccgcttgattttcaaaatggcaataaccagtggaaaacgcaagaagaatattttaccgattaaacaaacattagcgattttaaacagaagtggaaaggtgaaaatgtcacatcgttatcatgaatatatgaagatagtattaagcagaccacacaaaattctaggaaatttcatatctaagtcagacttatttaaaaacatatccaaggaaataattgaaagtatcgacctttcaacaactcgataaatcattttccaaccaagtggtttttgtagaacagatcagagggcgttacaatctctgggccaatgtgtcctaaacaagcgaagattttcacgaaacttgaaaataaaagaactttttaaactgattcatcagatcccgacgaagaaaatgatgggacggtatcaatcacaagagtaactgatcaggtggctgaggaatctgccaatattccactagacttgagcaaacgagaacctaggaaccatattgaagttgtgcag

SEQ ID NO: 12429 - DNA, 557 bp, Diabrotica virgifera
gcgccatacattgaacttgtcgattcgttgttccatttttattggcctgactggcgagaaattgtcctcgtctcgtcaactcgctaaaaaatttatcgccagtaccctgactcaattagagttgtacacatattatgtgtggttaaaaatttgtagaccatacgtaaaaattgtattttgttgttttgaataagtgtgtttaatcatttattgtttcttaactcctttattttatacaggagtaaatacaaaatttcacgtaactgttcagtttgtagtagactatattggagtctacttatttatttgtgattttattaccgccaaattcagcaaagaactaccagatttgtggtgtttgggctaagtttgagccgtggccgttcgagaccagcagattacttcgaccagcagaagttccttgacttgaaaccagccaccgtgaagtgcaataatgggactatggtagctatacagaactttttgcgtaaacattttcaaataaatttacattcatagacattttgaattttgacttcatattcagtacacgttta

SEQ ID NO: 12430 - DNA, 556 bp, Diabrotica virgifera
ctgtcagcgattttaactattccgtcagcaaaaatatgttgctgtgcagtggctacaaatttaaattagtaattcatatacctaaaagatatctcaacttgaattgatgaaataacggtaagacttacaattcaaaacaataacagtgtcaagtcgaaattgtctctacccgatttcggaaaatcgtcctgactggaactgccggttttggctgttgtaatcaccgctaggatatcttcttgtaagttgtcagctatccacatttatttttcaactctgatgacatgctgtatataattttgccactgttcagcagagacattggcaaacgcttcatgtatgagttattgcacacgatcttttttaaagtcagtgtttcgggcagcaacgtaatgtttaacttgacaccaaatcatctctatgggattgagttcacagtgatagcgaggcaatcgtaatacttctataccaagtatttctcgaccaaattttcgatgttatacttgtcgtgtatatttgcgtaactttttgctacatccaatagttctgactctaa

SEQ ID NO: 12431 - DNA, 559 bp, Diabrotica virgifera
  SmartBlast Evalue=6E-18; Info=Pol-like protein n=1 Tax= Biomphalaria glabrata RepID=A3FMR3_BIOGL
ggccggagtccgattgtatttatacagatggatccaaattcgctgagtcaactggatgcgccttttaccattcaaatgaaaatctatccaaaaaatttaaactttcaaatcaaatgtctagttatactgctgagctcatcgcaattcttcaagctttgaggtatattaatatccatcacaagaataagtttgttatattaacagatagcaaaagttcggtagacacaatagtacaaactaaattatcaagcacttcatcagtagtaattataaaaattttagaaacaatccagttacttacgaatacaggtaaacaaatttctttggtttggattaaggctcattatggaattaacggaaatgaaatagtggatagacttgccaaggatgctactacaacaggggaaacgatagaagaaccattaatgccagtcactgatctacgacaatggtttaagaaaaaacaaatggagcaatggcaactggaatatgatatctctcttaaaggtgtacgatttcatgatatccaaccaaaaatttatagaaaaccgtggtttaa

SEQ ID NO: 12432 - DNA, 560 bp, Diabrotica virgifera
  SmartBlast Evalue=2E-25; Info="cAMP-dependent protein kinase catalytic subunit, putative (Fragment) n=1 Tax=Ixodes scapularis RepID=B7PRK0_IXOSC"
gccgcccggggcgggccgcccctgccgcccccactacgctacgccactgatgctatacaaaccgtttagtagtttaggcatagtgacaacgtaatttcaaatctaagaattgagttccatttaaaatataaagctttgtactttatcgtttctcttcatcttcttcttatcttctttttattcgaggatctctcttttacaaccattttaaagactttggttccatttgacttacgtttaagtaaaacttaacctatttcttaaaaattaatatcccagttcgataattcgtcaggaggaatgtcgccatctttaggaaagtcgtcgaagtttgagctatcgcaaggacttctgacattttgttgaataggagctggtaaagtttgggcgaccaaaccgtcccagtcaaaaccttggaaccacttatgtttcttaatatccacaattcctcctcgttgacatcctaaccgctcggacggaatgtcttacacaatttctttatcaagccttgggcagtccttcctacattatgtcttgcaaagtcaatcatgtctattcct

SEQ ID NO: 12433 - DNA, 561 bp, Diabrotica virgifera
gttaatacctgatgcatatcaaattccgaatttatatctgtatttggatagtctgataagataaaaacatttaaacaacctttgtctaatatagctaacgaacacataactattagtgcccagagagtgttgtgatacaaattgataatccatttagatctttgatcacctaaaatgtcgtaccaacaaggacaaggataccctccacaacagtatccacctggccagtatcctcctcctccacaacctggatatggtcctccaccaccacaatggcagcaacctcaaccacagtattatccacctccacagccaccaccaagagaggaagacgaatgttgtaaatggtgttgcggattaacctgtttatcgttgttatgttgttgtttgtgcagagactaaatagtatccaaaagcgttgcaggtattcattttgatgagagaatagcatcattcatataatctatttaaactatgtactaaatcatactaaatataaggagggtatcatataattttacaatgtaaaacttaaatacaatatattttacaataaaattt

SEQ ID NO: 12434 - DNA, 560 bp, Diabrotica virgifera
  misc_feature (209)..(209): n is a, c, g, or t
  SmartBlast Evalue=4E-59; Info=WD repeat-containing protein 48 n= 2 Tax=Formicidae RepID=E2B8Z6_9HYME
ggggttattatagaaattataaatgaaaattgttgagataaattaaagaatttttgtatgaaaatgatttttctgaattaaaataaaatggcaaatttaaaacctggcagtcaaaatactcgtaagaaagtccaggtgtcaatggtaatatgcgaagcagaagaaaaaaggcatagatctggagtaaatgctctacaattagatcccgnattagatagattgtattcagctggtagagattcaattattagagtatatgagcatgaaaggtttctccatggaatggaacaccataccgactgggtcaatgatatcgtattatgctgtggtggaaaacatttgatatccgcaagctcagatactactgtaaaagtatggaatgctcacaaaggattttgtatgtcaactcttagaactcacaaagattatgtgaaggcgttagcgtatgccaaagatagagagcaagtggcttccgctggattagacaaatctatttatttatgggatattaatactttgacagctctcacagctagcaacaatactgtgacaacttcaag

SEQ ID NO: 12435 - DNA, 559 bp, Diabrotica virgifera
  SmartBlast Evalue=8E-31; Info=Transposase n=1 Tax=Agrilus planipennis RepID=D2WLV0_AGRPL
atttcctacgaacgcgtacacattattcatcatcatttggacataaaaacgatgggtgccgcgtttgctgacaatcgaccaaatgcgaaaacgtgtgaccacttctgagacgcttttggcgatgatacggggcgatccgaatgatttttttcgccgatttatcaccgatgatgaaacctgggtgcattattacacaccggaaactaaggaacagttgaaacagtggcgaaaacgcggcgaagccctaccgaagaagacaaaaagtgcacattcggccggtaaagtgatggcgactgtttatctgggatgcgaagggcatcatccacatcgactacttgaaaaatggagaaacaataaatggggagtactacgcagcattattggatctattctatgacgaattacgtcgaacacgctccggtttggcacgcaaaaagtgctcttctaccaagacaacgcaccggctcaccgatcggcactcgcattggcaaaattacacgaattgggctataaatcggttgaacacccaccgtatttcacagattttgccgccagcgac

SEQ ID NO: 12436 - DNA, 558 bp, Diabrotica virgifera
  SmartBlast Evalue=4E-32; Info=RNA-directed DNA polymerase from mobile element jockey n=2 Tax=Drosophila melanogaster RepID= RTJK_DROME
ttggacatatataccttcggtttgtaaatgtaatttgggttgacttcgtttcatttactttcaccttccatttgttgagccatgttcccaattggccaaggtggttttgcagttgtgcagacgcgataatagggtcctcattgacagcgattatggtggtgtcatcagcgaatgttgagatttgggttgtttcagtggttgggatatctgcggtaaataataggtaaaggagagaacccaggacactaccctgtggtacgcctgatttaatgggaaaatatgtggaagttgctgtgttatattttacttggaagtaacgatcttcaatgtaggatttcatgattaggtagtagggggttggaagaatacatttgagtttgtataaaagtccagtatgccatactctatcaaatgccttttctacatctaagaatgccgctctgcaatattttttcctcaatagcaataaggatttttgttataattatatgagtctagttgtgttgtggagtgtctctctctaaaaccaaactggtgtgtgggtatttctacatctag

SEQ ID NO: 12437 - DNA, 561 bp, Diabrotica virgifera
  SmartBlast Evalue=6E-57; Info=Tm-peptidoglycan recogntition protein-SA n=1 Tax=Tenebrio molitor RepID=Q2MHG6_TENMO
tccggggctagcagtctggctaacttgtctcgctccaattaggatgtaatttttgtcaacttctccaagctccaccgcacattttatgaaatttttggctgctcttaatgctttactgtttggtcgtttttctgaaaagtttccaataaaggctaagccaagtgatttgctattataagttctagtgtgagctccaactttgtgccatccagtagcttcatagattcttccatcttctcccactagaaaattgtaaccgatatcatggaactctaaattttccatatgaaaattttgtatactctgcataattttggaacagctctcttctgtagtacattgtggagttacagtgtgatggatgatgacatatttgacgggcatgatggcgtattcaactgctattgctgtacgaccaccccatcttgcttttgagactatttctgggcatattgcaggccagtctgactgcattgcccatgttaagttcttgcaaaaacacaatagcaacacaatgtgtaaaagtgaccgcatgatatacatatctagcgttattcttat

SEQ ID NO: 12438 - DNA, 560 bp, Diabrotica virgifera
attgcatggcccacacactgtcaagactgtccaagccgtacgtcaggtcgtgtggaaatgcctcctgaagcttatctgcaaacttttcgtacttcctgatcaaagtaactgctgctccaccttcggtgacatcggtttccagattctcgtctaaatagcctaaaatttcatcccacaaaatgtcctctagcgctaaaaagtcgtaccgatatcggtccacaagcacaattctactcgtctcattgtctttgccggccacgacaccgaacaccaccaacgagcacaacaaacacagtattgtctttttagagttcatttttttatagttcttttatcagttcgtatgacttaaagtcctcatttgtagagaatcgattgtggtgcatccatcaaagaaagataatatacacgataacaatgaacttaactgacacactaaacaatacagccacaacaaaaaacttcttcagtgtaattaaagtgtaacaaagagcaatgtcacactcacctcacattggtcaccactcactaaatcacgttgctactgttgttgctagact

SEQ ID NO: 12439 - DNA, 552 bp, Diabrotica virgifera
aaagtggggtattggttagcgtaggggaaagaacaaaatcaagaaaacgaactgcaacgttaggaaataaggctagaaaaaaggctagatctgaattggataagcttcatgacgatatccaagaaatgtttattagagatggtgttttaactgcatctggtaagcgtatgtgccatatgttaaaagacgataagtttgcgatgaattcagaaaacgttgaatgtaatacagaagaaatagtcaccaaaacagctaaaaaacctcagccgaaaaataaaaatcaaaataaaaaaaagactgaaactgaacttaaaactatgaaacatataagggtaattatacagaaaatacctgatacaagtgttgatgaatctgaggcatcgagacgtttcactagaagtatgacagttacagaaagcgatgatgaatcttctataagtactggggtatcaatgtcaaacagaaattcagatatcgaagatgcagacagtcgttctgataaagaggatgataatttatctacagacagtcataagttaaaatcatcaaaac

SEQ ID NO: 12440 - DNA, 551 bp, Diabrotica virgifera
gtaattccgccacaattattcctggtcctccagctttattgttcttcatggaatttattgcttgtttcatctctttgtctgttatgactattttttcttcctctgtggtcattattttttgttcgtcttcatcgatgctgaattctggtctttgctctatcagtagatttttatagtggttctcccactcgtcgtttggtatgtattgtatgaaagttttctctttcctgttagttcgtaatgatttcacaattttccaggcttctgaacttcttgttcctcccatattctgttctatacttctacatgacctttcccattgttcattttttctttcgtcgtaatagccctaacttctctgttcttatctctatatttacggaggtcttgtggatcttttgtgcttaggtatttatggtatagttctttttttcttttattttctctaaggtgtcttcgtggaattcccatttgtaatttttatctcttgtattttcatttctcctagcgcttccagacctgcttgtattatgctttctcttatgtgttcg

SEQ ID NO: 12441 - DNA, 559 bp, Diabrotica virgifera
attcaggagcactggtgtaatgaggataatattaatcttatttatatcccagggtacactttaataacccatttactagaaaaaataaaatacatggtggaactcttattttatctaaatctgggacagacaagtatgcagtctcagtcgttgattgccgtaaattctctgaggaagaaagctttgaatgttgtgctgtgactattttaatcagtaactgtaaatttctagtcattaatgtgtacagaacgcctaacagcaatctagattcttttataaataattgttttaatattttaggtcattttcacaaccgtgttgataaaatttatctctgtggagactttaatatcaactacttaattcagagcaatgaaaaacttcgattagatgatctttttcaatcgtttggtttgtctcttaatatcccaaatataccaacacgtattttcatgaataacaataaagtaacaaaaacaaaaattagactacattgctactaataatatcactatgaatcatacttgtcaagtcaatcaacccaatatgggtgaccatc

SEQ ID NO: 12442 - DNA, 561 bp, Diabrotica virgifera
  SmartBlast Evalue=5E-49; Info=Reverse transcriptase family member n=1 Tax=Glycine max RepID=Q1AKH8_SOYBN
atatgatagagttcctcaagagattctgtggtgggcactcaataagaaaggagtccctggtgaatatgtaaagattgtgagggatatgtatgagggagtaacgactagtgttaggacaggtgtgggagggactgataaatttcatgtgaaagtaggattgcgccaaggctcggtacttagtccgtatttattctcattagttttggaccagataacagcgaaactacagggtaacattccatggtgcttaatgtatgctgatgatgtcgtattagtaggaaatagtgaaagagacttagaacaaaaactggaacagtggaggcaagctctggaggaaaaaggtttaaaacttagtaggacaaaaacagagtatttgcaatgttcatttaaagatggagttactacaaataaaatggtatctttggatggtgaactgattgtaaaaagcaatagttttaagtacttgggatcggtattacagagtaatggagaaatagatggagatgcatgcagtagaattagggctggatggatgaagtggaaggaagcgagtggtgtgct

SEQ ID NO: 12443 - DNA, 561 bp, Diabrotica virgifera
accctgtatataacaaacagtaatgatactctgcgaccttgatgaagtcacgcatttttccgcacagacagattgcggcgaaaagtcgcagaactcactgcgcttctgcaaactttcaatcttgaaggtttgactagcaactcagctgcgtaatagcacagttgctgctgatttaaccttatacattcgttttaatatgtagcctcttgaagctgttggaactactgagatcataaactgattaccatctaatcaggatctagctaggcgattgctgaagacgatctagcaaggaagtaggtatggtgctaaaacagaaagagacttccaggagcctaacagcatagacaatcaggtacctgaagaggatgcggtgccacaaagtaagtggcgtagaagcgaaatgttggcagaagaataaagtaggctgtaatatatattctgcttccatagaatatgggaagcagaagaaatgcacgaggattggaaagaaggcagaattataccaatatttaagaaaggagaaataaaaaactgtaacaactctaggggaacatctct

SEQ ID NO: 12444 - DNA, 551 bp, Diabrotica virgifera
gaaacttgtagtacttacgatcaatcctactgcctgttatgtgcaccagcaatacattttttatagaaataatatttactgcatactatgaaacatcaaaattttattaaggttttacctttttaaagggttgaaatcaattttccccctttcattgttactacacaagttgaacatacagcgtgggccagagaaagcagcccacctcgatatttggcagtagttatcggatttcaaggaggtgacgagacaggtcgattttttgttctaagggggacacatttttgcgatacatgcatctgtcattcgtcaacccccgcccttccactaacccaaaccctaatttttaaatagggaaaataccatgtacggcacaacattagaaaggcattcacatggagtattcagaaataacgaccgtccaagatttttttttcgatatttgcaccgtctttgcaaaaaactgttaattcatttgaagtacaaaacctcttaaaaatgaaacgtaactcctatgatttgctaataatttcattttttcttgtcacatc

SEQ ID NO: 12445 - DNA, 560 bp, Diabrotica virgifera
  SmartBlast Evalue=2E-40; Info=mRNA cap guanine-N7 methyltransferase n=1 Tax=Camponotus floridanus RepID=E2AAT3_ 9HYME
ggaaacaaggtttatgaagtttctatcgatttcgatattaataaacctcctttatttggtgctaaatacaactttcaactagatggcgttgttaactgtccagaatttctcgtctattttccggcgctggtaaaattggctaaaaaatttggtctgaagctggtgagaacagagaaattttatgacttttttgaaaggatgaaagaagaaggaaaatatctgttaaccaacatgagaagtttagaagcttatccggcaccagagtcggtacaattagttggtacagattcttctgattacatacatgctgaaacttttattaaaagggaacagagaggaagtctaaaaattggaactctatcaaagtctgaatgggaggtttcttctctctacacaacatttgtatttgaaaaagtaaaaaatacatggaacgcagatggaactccagtatatgatatttgacaggacttactttaatttatcttattataataattggtggagtcgatcagtcctttgtaattatagattttacaaattaataaatatacagaaattag

SEQ ID NO: 12446 - DNA, 559 bp, Diabrotica virgifera
  SmartBlast Evalue=7E-64; Info=Exosome complex exonuclease RRP41 n=2 Tax=Culicini RepID=B0XII7_CULQU
ctactgttagtgttggacctcccattatctcttcatggtgagaaatatctaccattggaacatcattattagctaaactggctgtacatgcgcatacatattctttcaaaggtatccctgcatctacaagtgcaagtgttgctgcatttacacaagctggataaattcctccatcagcatgtagaacttctacgtagatatctatttgacaaaaaggatatagttcgcttttgattgcagcttctagagcttgttgtagatgcattgatagttcagtagactttctatctcctctgggtctctttttgcgatctgttgttgaaaatactgccatgctaaactgacaatttatacagcactatcatgtaatgctttagatcggcctccttttacatcatggggtccatatacagcagctagaacttttgttaaaccctgttcaatgtatgcacttccatcgggtgctgagaaaacgcctaatttacaacggattcttctgagctcatttggtcttctgccgtccaaacggagaccaccttttgaaagtaattccctatca

SEQ ID NO: 12447 - DNA, 561 bp, Diabrotica virgifera
  SmartBlast Evalue=8E-23; Info=Zinc finger MYM-type protein 1 (Fragment) n=1 Tax=Camponotus floridanus RepID=E2AEF4_9HYME
gcttcagcatcaacccttcagcttcaccctcaaccccttcagcatcagcaccttcagcttcgtcatgtgttgatactgacaagatcaaaccagctatatccgaattaacttttgttgttgacgagattgaagatcaattaacagtctctgaacctgactcttctgtccatttgaaaccaaattatgatcctgctttatggatagtgaatgaagagacgcgggaatattttgttaaaaatggatggaatcaaaataaagattgcgattttaaaaaatctgaaaggcaatatccagacaggaaaagagtgttggctaaatggctattcgacagaaaacttgcaaatggcgaaattgtaaatagagatttcttgatttactcaccaagtttaggctctttgttctgtggtccatgcaaattgtttagttcgacctctactcagtttactgaaaatgggttcagtgattggaaacatgcatcagcgagaataaaagagcatgaaaactcgcacgttcactacaatagtgtaatagtatacaaacaaagagcagaagcagccggga

SEQ ID NO: 12448 - DNA, 560 bp, Diabrotica virgifera
ctggggtcgtctgtgtttgtcatcatttttgttttcctcattcattttttagaccgacgcattatgagatgcctgcgagttcctccatcattatgatgtaaaatcgccctaactaagcttttagtcccgaaatatgcatgcatctttcgtaaaaaatcgtaaaaaatctttcgtcacctcaatttccagatacatgttattaatgttagcaaatatgtatcatttgatagatttttgaaaaatattgaacacgtatttttcagtttttcgatctgatgttcatttcgcgaaatattcgcttttgttgtgaaaatttgtgaataacctatttgcttacgtcccgcacaaatcgtcagatttttgaaatatacactgttcttcgagtacctaacttaccttgtcttaatctggcgcgctcgagtttttctaaaagtagatttttccctgtcttaagagtccctgtattatgagtccatatatggtaggggtacatttacagggtacaaggtttctgcccatgtgattttctgacgtactcaagcaacgcgcaaaatcccgct

SEQ ID NO: 12449 - DNA, 559 bp, Diabrotica virgifera
aacgggaatataaggaataacaatcatattaaagatttaattgaattaaagcataatgtaaataaggaactactagcaaaaaataatgaaaagatagatgaaactaaggacacactgatacaaaataatgcatatactaagaacacatataataatatttccccggtcactaatcatatttttaaagaaaaggggaagataatagacaaacaaataaacgacaaacctaatttaatagttgatgaaacaaataatttagataaagacgttctaacaaataatgaaaccaaagaaaatgatgagaaaactaaaagacaactaccaaagtaatatagtatttgctagtagtcattttaaagcacaaaatagagtattgcagttaaaacattcatttgaaaataaatatattcctaaagaaaaagtaacagtgataaaagtagagaaactaagttacccaatatatcaatgagcaataaatttgacaagttgaatgttacaaataatattttttgaatctcaagttgaagaaacaaaaataaaaaatactgttatgtacggg

SEQ ID NO: 12450 - DNA, 560 bp, Diabrotica virgifera
  SmartBlast Evalue=4E-45; Info="LSM4 homolog, U6 small nuclear RNA associated (S. cerevisiae) n=4 Tax=Deuterostomia RepID= Q6P6E4_DANRE"
aaagccgaaaagtcaaccagcataaatattaaaaattaaaatatatttatatttactctgattaaaaaaatcttgcaatgcttcctttatcacttttgcgaacagcacagaatcatcctatgctggttgaattaaaaaatggagaaacttacaatggtcacttggtcagttgtgataattggatgaacataaatcttagagaagtaatttgtacatcaagggatggtgataagttttggagaatgccagaatgctatattcgtggcagtaccattaaatatcttcgtataccagatgaagttattgatatggtcaaagaagaagcagtagttaaaaataagggaagaaatgatatgaaaggtggaagaggaggacaaaatcaaaggaataggccagcatctcggggaaactttggaggtgccaggggtaacaaacaaggaggtcaaggaggaagaaatcctcagctacagaagcagaagccaaaatgatttgtatattattgtacgcttaggtttactgtcataatttaagaattattattaataaattgcaaatgtgta

SEQ ID NO: 12451 - DNA, 560 bp, Diabrotica virgifera
  SmartBlast Evalue=1E-35; Info=Acetyl-coenzyme A transporter 1 n= 2 Tax=Formicidae RepID=E2B0W4_9HYME
cgttgtcacctaactgctgcagatgtcgtactttctttgctccccataaataccataaaaatcctattgcaacacagatgagggtttctatatagaaaccgtctagaactgtcacgcatttgcctcctactttttcgcatagtactttttctacgttattcctacatatattgtctacactctcagctcctccttcacaccgtttccaagtcaacggatcaacccaatagagggcaagcatagtcggccaattacctccaagattcgtaagagtatttagtaacgtcatatacgttcctccgactgcactgtcactgattttggcaaaaaatgccatttgtgcaacaaacatgcaatacacgcacacctggtgaagagcgtagcaggcaaacaataatattacataataaaatggtaggccatttgaagcatcaggtactaaaattggtgttataaatactacaaaagctgctacaaagccaaaagctaaccgataaggtatagctttcaagaatatatttagcggtttaggccctgtggtatatttagctattactaaa

SEQ ID NO: 12452 - DNA, 557 bp, Diabrotica virgifera
  SmartBlast Evalue=3E-20; Info=Probable RNA-directed DNA polymerase from transposon X-element n=1 Tax=Drosophila melanogaster RepID=RTXE_DROME
atactggattatcggcaggaaatctaaactgaccattcaaaacaaaatacttgtatatacatcaattctaaaaccaatctggacatatggaatccagctatggggcacagcgtcaaattcaaacttagaaatacttcaaaggttccaaaataagggttttaagaataatagtcaatgccccctggtacgtgccaaatacagcaatagaaagagacttagaaatccccaccatcaaaagtgaaataaaacgacatagtgaaaaatatcgggatatagcgaatacgcatgtgaaccccctcgcgagtgatctatttaacaccgtaggtgaggtgcgccgcttaaaaaaatttaaaccaacggacctgatacgcaggtttaactaagtgtactcagaataacaaacaaataacggttttaagtaaataggttaattatgtaaaggaaataattcactggaaatatttcctacatgtccaatgtaaatatccgaccatttacttattgtcctttaatattatatgatatgtgacagattgtaaataaatatactgggagtt

SEQ ID NO: 12453 - DNA, 556 bp, Diabrotica virgifera
  SmartBlast Evalue=5E-16; Info=Zgc:162621 protein n=3 Tax=Danio rerio RepID=A4QP13_DANRE
ggggctgtttcccttagagtctgccactgctcttgcctgcgcaaagcatttaattgatgaagtaattttacgctatggagttccccggagttgttagcgataacggaacccaattcgtaagtgcggttatgcaacaggtagcacattgcctgggttttcaacaaaaccttatccctgtgtatcacccggaatccaacccggtcgaaaggaaaaacagagacattaagactcagttagctattcttacgaagtctgatcatacgtcgtgggcggacaaattacctagtgtgcgtttcgcgatgaacaccgtgatgtgcgattcgactagttttacccccgcatatcttacgttcggaagagaactgcgaactccagacgatgttaacagagactttcgagcaataataacacacgaaaatttcgtaactcaaatcacgccttacttacaaactataagtgacgttttaagtaccgcgcgcgaaagacatgaactatgccaggataggcgaaatatctataaagactctcatcgccgttgtgcaactttcgtcgtcgg

SEQ ID NO: 12454 - DNA, 557 bp, Diabrotica virgifera
cattctcttttattccacaatgtcctttaatccaaactaatgatacattgatttttttgtttgtaattcttgaagtttaataattatattagtcaaaatataattactactgacttggtggatattttttattttcataatagcacttttactatcagaacaaattgcaaatgattctgctgtaattttcatattacttatatacaggagagcttctaatatggctattaattctgcagtatatattgtaagcttttcatttaatttaaaagattttttatgatttttatgtggatcaaatatagcgcaacctactttcttgttgttctttgatgcatccgtgaatatatattgacatctgggaagatacttttctaaatcctcctcaaatatgtattgtctaatccttgggtgaaattttgaatagtcttggagaaaaacacagttaattggatggatgttataaatatttatgctatataatggatctatatctgaagagtatatttcttctattacgttatttattacataatatgactcagtaatagttaaac

SEQ ID NO: 12455 - DNA, 555 bp, Diabrotica virgifera
tcgtccacaaaacaacaaattaacaatatcgaaatggaagtttaagatcaatagcgggcatatcattaagagacagataaagcaacagaagtatacgagaacgatgcaaaattcaaaatattaacaggtggataaaaacaagaaagaaaaactggaacgaacgtgtaaaccgaatgggaccagatagattctaatctgtacaatagaacatcgattagccaacatctgtaaaaacagcaagccgtataacagaagatccgttggaaagccaccgaaaaggtggaaagacaataagacatcttcaggattctacgataaagccacatttcgaaagcctcaattttcttggaggtggcgtctgtgagagtccaccactcaactccttacaacagtataggaaagatctaacatcgtagtaacctgatttttatgggtattgatcttcttcttcaggtgccatcttcgctacggaggttggcaatcatcatagctattttaatttttgaggcagtagctctaaatagttgttttgagctgcatccaaaccattctctc

SEQ ID NO: 12456 - DNA, 559 bp, Diabrotica virgifera
tgataaaggtgctttagccggtatttcaacgatgaaatatgttcacttacataataacaatcttggagatttaaagctgtctactcttgacttcctcaatactcctttaaactatctagttctgagtgataactgcatttcaaatattgatattggtgtgtttaaaaatagtaaaatagatgacttggacctaagcagaaaccagataaaatcgattaaaaaaaagcttttccaaaatgttataattcacaccattaacttgagtgaaaatgaaattagcgaaatagaagaagatgcttttgacgatatcgaggatttaagtagcatagatgtgagcttgaacaaacttaaagaagttaagaagaggatgttcagtctaccattggataaagttaatttggaaggtaatgtaataacttacatcgatagtgatgccctcaatggtcttccgctgtcacatcttcagataaaaaataatcctattgctaccaacaacaacgcttaacatatattatgtatttaataatagttgtataaataataaaattttatgtatttg

SEQ ID NO: 12457 - DNA, 560 bp, Diabrotica virgifera
  SmartBlast Evalue=4E-13; Info="Paramyosin, putative n=1 Tax= Pediculus humanus corporis RepID=E0VVG5_PEDHC"
gtacctttgttttacttgtaggttcatactgatattgaaactcctcgatcgttctgttcaaagtaaaaatctcggtgtctttttcctgtagtttcgcattagcttcacacaggcaattgcccagtctttgtatttcttcatttagggtggtcatttgtacatgcttttcctgatcttctttctctcggacggttttactttcttgtagagtatttcgaagttcttcaattgtgttgtttaacttttcaacttcttcatgagttacctgttgcttaagctgcttaatttccttcctcagttctttgatgatgtcgtctcgaaacgctgtctgtttgtcggcctggatacatcgttcctccaattcttggcactctctcttaagtttaagtaccgtgtcgtgtttggtagcaacctcttcagtcaaagcttgccgcatgtcgatcatattcttttgcagattttcacattcatcttttttcatttggaattctttcgtcatactatttagttcatctatttttgcttctaacttctggattgtgctatctttttctgtagat

SEQ ID NO: 12458 - DNA, 559 bp, Diabrotica virgifera
aaaggtctatgggtactagtattgaaatgaggtctggaactgttagtgccgacacgtggtggagtattgaatactgaacggaccgttgaagtactgatataattcccagatgaatgattagttctacctgtgggtggatagtttggattaaatggaggttgtctagcatgctgagtagtcctctgcgtggatggagttgtcattggataacggtttgtcgtgttggacggtcggaaattaggattaaatgggggctgtctactatgcggtgtagtcctttgagtgggcatggtagtcataggatgataccttgtcgttcttctcgttggcatagtcgtcattggatgatatctcgtcgttctcctagtaggcatcgtagtcatgggatgatatcttgtcgttctcctggtaggcatagttgttacaggataccgtctttgagtaggtctgggtggaaaaggtctagtagcagaacttgagctgccacgggatccagaaccgaacgaactaccacgggatcctgaactgcctcgagagctggaactagaacttcgagaac

SEQ ID NO: 12459 - DNA, 559 bp, Diabrotica virgifera
ccgtgttcctcgggaccggatgttggcacggataattgaaaagcacggataatccgaacattcatttcctattataatacatctgtacgtatatccatacatatatacctaccataaaaagacaacagaacaaataaatctttcattatgagtctccctctccacgtatagagtttccgtcgagtgattaacagtgacgctattttgatgaaacctcaaaaattcaatttaagtaatacaaaatcatagcacggataatccgcagcccggataatccgcacacggataatcggggttctactgtaatctatttccaatcaccctactatgataaacttattagggtaccatgaatttgcaaccggcttggcggtattgctaaagtaaggtatcagtttctccgaatgagaaaccaagtacatacaggctatgagggataatccaaaacagacgcgaattcgtgaaatacagtatagctactatctagttgcacgctttaaaaagagatgggacactgaaaaaaggctgtaacatgaactatatcactgtaatgagggtc

SEQ ID NO: 12460 - DNA, 555 bp, Diabrotica virgifera
  SmartBlast Evalue=7E-11; Info="Fetal alzheimer antigen, falz n= 1 Tax=Aedes aegypti RepID=Q16LL8_AEDAE"
gacacaacaaagtttgataaaagctcctgcggttaccggagcacaactggttcaaacgcccacgcagagtcaacaaccaacaacttcaacttcaactctagccaactcacaaccgcaagcgccgcaatctaccaaagattctccgcaacgtgttcaaataatgcgcatgcccgacggccgcatcagcgttaaaggtcttctacctggacaacagctcgttcaatatccggacggtaagcttcaggttttaacaacatcacaactccaatcgtccggtatcgtaacgtccaaaccgccacctccagtgacaacaactcccaaagctatcattaaacagactatacaaacttccgcaggtactagggctattgtccaatcgtccccagtggtaaagcaagccatcatcggtcaaccccaggttcaaactccacaagctgtgaagagtgtccaaccgcaagtatccactccacaatctcaacctcaacaagtgatcattaagcagacttctggtcaaccattggtgcagaaactcactcaaggaaatgttgttttggg

SEQ ID NO: 12461 - DNA, 559 bp, Diabrotica virgifera
  SmartBlast Evalue=2E-70; Info=Calcium-transporting ATPase type 2C member 1 n=2 Tax=Formicidae RepID=E2AVH1_9HYME
ctatgtaaccgtcggaggttacgagcacggtagctgtcatttcatttctcgtaatcgtaccggtcttatctgaacaaatgacgttcacgcaccccaacgtttcgaccgttggtaacttcttcacgatggccttcctcttcgccattcgcatcacacctaaggctaaggttactgtcactacaataggtaaaccttcaggaatggcagctacagctagactcactccgatctggaacatctccatgatgagttttccttggatccatcccacgagcataataaaaccgatgatagcgaatgaatagatggatagttgagtgcctagtttgtccatagatttttgtaaaggtgttttcggagcttcttcttctaacatcattttgaacactgaaccaaactcgctgttggttcctgtacttacaactacaccctttcccgtgccatttctaaccaaagtacccataaaagcaatattggtattcgacgaatgcgctccatttggtctgatgactgaatcggtgttctttttggccggttccgtttcacctgtgaaggagct

SEQ ID NO: 12462 - DNA, 552 bp, Diabrotica virgifera
  SmartBlast Evalue=2E-10; Info=Origin recognition complex subunit 4 n=1 Tax=Camponotus floridanus RepID=E2AUK1_9HYME
ttcttcagagttgattcatttacatctatatctgccaacctttgaataagctgtttaaattttttatctttaactaatttgttgacagtttcattccagttctttttaactgacttactgatatcactatggcatttatctggcaatactaaataatatcttactctatctaacatatactcaagagccttatcaggatcagctagaccaggaactaagaatatttgcctgtgtgaaaatctagatttcacacgtttctctaacaatactggaacatcaagacggcaagttattccttcggtgaagatgatgaggggagagccaaataaggtatcctctggttcccaaccctagggaggtactccacaccaacaggaaggtacggcaagcaggtagctgcccagtatcggaaaactcaacttttattccacaaaaaccaaacaaaacatccacattccatccaaaatatccccaaaatgattatgtattccaaaaaaacaattaaagtatgattgactttaattttccatcttcttatttttcttccgtggc

SEQ ID NO: 12463 - DNA, 557 bp, Diabrotica virgifera
ttgtgttgggcaacgaaacacagtcaagacgtcacctacagggcagtcatcaaaataggaaaagggcgaccaacaccttacaacactgccgagtatctcttagctttaaacaaaattcccagtgaagggctcctcagcaaatccttctgtagctgcgttccaactcaagacggttggattctggttgcccatgtacccgaaaaggcttacaaggagtacagtgcattaaataggaaacttaagaagacgataataattccactcacaaccgtagcaacctcgtgtctacaacgccaccccacagtaacaatagtcaccgaggaattgcatcaaccctataagcacgtccttgattgggactatgtcaccaccactacgccatcggcgccatctgtacaagagggtgaatggatcgagggtgtgcgtaatctgcatcttgctgacactagccagtctacttgagacaggggaactgaggatacccgatattcctaaacctgcgtctccttcctctgatgacacagattgaggattgataggttaaaaagatgattatt

SEQ ID NO: 12464 - DNA, 551 bp, Diabrotica virgifera
aatttattgaattatcataaaaatgcttataataaacgtaacagcaaagaattataccacaagagtgacactataaaaaatcagtggatctgtgcaaaatacaaaattcatgtgtaaatcattgcatttgatattattatacgtgtatagctccctatatttatgatctcaagttttgttatggcaacaaatcactcaacaatacgagaaaaaaaaattatttttaaaataacagcagtaattaaaaacaaagatttaagtcagatatgttaacaatacagttaagttactagtacactttagaacaccaaaataagcatatttttcaagaattcttttctcagaacctttgttaaaaatgaacataaaaccttccacatactaatatccaactcttagagagtacaaaaaaatctttatctgctctaagtcatattatgtataagtttttagtttgtgaaaactgtcattacagatagcagtctgtgaaggatttaaagtgtgcgtgaagtaacaatgtattttaaacgggatttactttttcgtcacgg

SEQ ID NO: 12465 - DNA, 559 bp, Diabrotica virgifera
  SmartBlast Evalue=7E-69; Info=Dynactin 4 protein n=1 Tax=Bombyx mori RepID=Q2F6B2_BOMMO
ccttatttaatttaataattttgtaaatatttaatattgaaacttgtactagagcaacatggaactaagagatatcaattatgacaaaggagaatatgtagaaacggcttcaggtaacaaggtgtgtcgccaaactgtattatgtgggtcccaaaacatagttttacagggaaaagtaattgttcagtccgatgcaataattaggggcgatttagcaaatgttaaaacaggaaggtactgcattatcagtaaagaagcagttcttagacctccatacaaaaagttcagtaagggggtagcattttttccattgtcaataggagatcatgtttatataggagaaaaatctcttgtaaatgcagctactgtaggaaattatgtttatattggtaaaaactgtgtaataggcagaagatgtatcttaaaagattgttgtgttattgaagataatactgtcctggcaccagaaactgttataccaccattttcaagatatggaggctctccaggtgcctatattggagatttacctgaatgccaagctgatttgatggtcgat

SEQ ID NO: 12466 - DNA, 560 bp, Diabrotica virgifera
  SmartBlast Evalue=1E-15; Info="Beta-1,3-galactosyltransferase, putative n=1 Tax=Pediculus humanus corporis RepID=E0VA81_PEDHC"
attccatttaaacatggaaaaggttccaattataatttactgcttttatttatagattatgtgttatatctggcagtaatatggtgtgacaaaataataaaggatattgcagattttatgtcctatacaaaagttgtagttatgctttgaaatgaattcaaaaatatatattggattgattgtttcaattatagtattgattttagtgtatctaaacgttgaacataaagttcaaggctgggataaaaatgtagataggaatgtaagtcattatttaagtcacatatccacacaaatcgttcctacacgtttttgcaatgaaccattaaagacattaataatagtcacatccgcaccatccaatgaaaatgaaagacaaactataagagaaacttggggtaatacagaggatatcaagaaatataatagcacagtcatgttttttactggaaagtcatcggatccagaaatacagaaagcaatattgactgaatgtgaaaaatacgatgatataattcaagaagattttgtagagtcctattttaatctgactttaaagt

SEQ ID NO: 12467 - DNA, 550 bp, Diabrotica virgifera
taagtaaatcatcggtttttaagggaaagtttcgacaccccgtatctcagaaacgaagcatttgcggacatatgtttgtggagtaggctgtcattattttttcatgtagaattgccccttggggtttgtcatacttatttggaaacaccctgtattatgtatatattttttgtaatagattcagatatctcatacatcattttgtaacaattacatcacatcgtagttgaaattgaattcaagtgtttcacataacttataataagtagtgtattcgtactttaaactaatatagatacttatacaaataaaccaaaaatattaaaatttagtttttaataatataaacctccaactaatacttaatcgttccttactgcttaggtttaaagctctctttaataataatgcattaaaggttactttgctaaatatattattaaacaatagcgtttctccaatgggcaatttttgtctaaataacaagtttttcaactgttgttggtgtttatattatataccgttgtagtttatacacattcattttacc

SEQ ID NO: 12468 - DNA, 558 bp, Diabrotica virgifera
  SmartBlast Evalue=2E-95; Info=Ryanodine receptor 44F n=2 Tax= Aculeata RepID=E2BZJ9_9HYME
tttcgttgaagccaccagcaaagaagtgctgcagtttgagttgggcaggactactacaagtcttccgttatctgcagctgttctgcaaaacagcgccagacatgtcaccccacaattccctccaaggttgaaggtccaatgtttgaaaccgaatcagtgggccagggtgcccaatcaaagtcttcaagttcacgctctaaaactgtcggacataagaggttggtctatgctctgtgaagatccaatatcgatgctggcgctacacataccggaagaagacagatgcatagacattctggaattgatagaaatggacaaattgctcagttttcacgctcacactttaacgttatacgcggcgttgtgttaccagagtaactatagagctgcgcacgtgctgtgcaaacatgtcgatcagaagcaactgttgtacgccattaaatcggagtatatgagtgggcctcttcggcaaggcttctatgatttgcttattgctgttcatttggaatctacagcaactaccatggaagtttgtaagaatgaatatgtaattccaat

SEQ ID NO: 12469 - DNA, 556 bp, Diabrotica virgifera
  SmartBlast Evalue=1E-26; Info=Minus-C odorant binding protein 4 n=1 Tax=Batocera horsfieldi RepID=D4P8G5_9CUCU
acaactcgcttcaaacttagtaccagatacaacttacaagacaaaatgaaatccttcattgttttcgcttgtgttttagtggcagccatggctagccatttaccaaacctgcctgaaagtgacagaattaaactagctaaagtacatgccgactgtcaagctgatccaaaaacctatgtagatgaagataaattaagaaaccttcaaaacaacatcaatgaccatcaagtaggtgttcatatgttctgcatgggtgtaaaagcaggattattgaagagaaacggagaccttgatattcctgctattaccagcaaagtttccttggtggttaaagatcagtctaaggttgatggactcgtccaaaaatgcgccaaaaaatcagacaactcaggaaaaaccgctaacttgttgttcgtgtgcttcgtccaaaacgatattcaatattaccataatttgtaaattagataatatacttaattgagactgtaggtaactaaattatactaaataaaaaaatatgtgaacgctaaatttttaaaaaaattatatattatat

SEQ ID NO: 12470 - DNA, 548 bp, Diabrotica virgifera
  SmartBlast Evalue=2E-40; Info=Angiopoietin-like 1 n=1 Tax= Tribolium castaneum RepID=D6WEJ6_TRICA
ggtgaattctggatgggattagaaatcatttatcatatgacaggattcgaaacaaatgaactcctcgttgaattgacagatagagaggaaaaaaaagcctatgcacaatacaaatcctttgcaatcggacctgaaaaagatggctataaaataaatacaataactggctattcaggagatgctggagattctctgatacaacatttaaattttaaattctctacttttgacgtagatcaagatgcacatgctacagctaattgtgcacaactctacgaaggtggatggtggtacactaattgccactccagcaatctcaatggaaaacatatggacaaacctcttcccgatgcctataaatttcatggactgaactgggatggatttagaggacatgattataatttagctgcttcaaaaatcatgatacgtccagtataatgaataatacatttattattatatacctcatcataggtatatatttactaaaaatcttactaatattgtatcttatatttgcttaaccaaataaatattttatggtg

SEQ ID NO: 12471 - DNA, 558 bp, Diabrotica virgifera
gttaacagatttgatggttgtcgagaattgttaacatattctcaggtgcgagatcacgaacaggtatgcttggaaaaaattcacgagtgcccaatttgtggtgacgaaatggcaagttttctgatacttcgacattttcagtccaaacataaagatgctatattggagcatactgcgtttattttcaagttaaatgatcttttagaaatgcctagtgtttatatatatcaagaagaagataagttgttttttctctatattagctatagtaagtcggaaaatacaataaaattatatttgtattatattgggagttataaactcgctaaaaatatataccatcaattaactgtaagtagtgaaaacaaagaatttgatgttgtattggatccaaaaccatgtactaatgatttttttgttgtggatatatcgcatatgtcaaatttgatacaaattaaatttaagttaattgatcgtaatctaaaagttttgacagcacctgaaattagcaatgctgtgagaaaacctatggtcaaaatgttccacctgggagtcaaa

SEQ ID NO: 12472 - DNA, 558 bp, Diabrotica virgifera
  SmartBlast Evalue=6E-26; Info=Double-stranded RNA-specific editase Adar n=1 Tax=Camponotus floridanus RepID=E2AF18_9HYME
catcaaaacaatctgcaaaatatgaagctgcagcaacagcattaaaaaatatttccatttcggatgttacaactacagagataaaaaacaaattatttaataagccttcagttattttgggtgcattatatccttctgccaatttcacatgtactgagaattccagtgatccttatgataggtttgaagtttcggtaaacattaatggcaatactttcctaggaagtggaagcaataagagctcggcaacagaagcagctgccactgttgctttgagaaagctgaaaaattataatggtggtgatatacttagcttttccccaaatgatgtaaaagatcaacatttagcagatactattggaaacctggtgaaagcaaagtttaaaaatttgatgtcaaatgatgagatccattcgaaacgtaaagttcttgcaggcattgtgatgacgagagattcggatatttcaactgctgaagtaatatgtgtgacaactggcacaaagtgcatctctggaaagaatatatgcttaaacggaaccgcactcaacgatatgatgc

SEQ ID NO: 12473 - DNA, 556 bp, Diabrotica virgifera
  SmartBlast Evalue=2E-38; Info=Hemocytin n=1 Tax=Camponotus floridanus RepID=E2AVY8_9HYME
agggaggaaagaggaatattcctactgagggatgcttctgtcctaaaggaaaggttctattaaacgagacttgtgttacaccaagagaatgcataacttgtgacaacgaaggacatcatcctggagatgaatggaagaaggacaaatgcacaaaatgtaagtgccaaggtaccaacttggaatgtgagaaacaagaatgtgttgatccatcgactatttgtgaacatggatatactgccgtcagagtaccaaccgctgaagacgaatgctgtgacaaatatacttgcattcctggacctactttctcaccaacttgcgaaccaccacaaaacttggtgtgtggtaaggatcaagttaccagactgactactaaagcagatggctgccaatcttacatttgtgagtgcaaagctctggaagaatgtgaagaaattgatcttacttcaacagaaccacttgaaccaggatacgtcaaagaaattgacaccaacagcagctgttgtccaatcatcaactacgtttgcaagaaagacaggtgtccagtcatcgaaccctg

SEQ ID NO: 12474 - DNA, 558 bp, Diabrotica virgifera
  SmartBlast Evalue=5E-49; Info=Signal recognition particle 19 kDa protein n=1 Tax=Bombyx mori RepID=Q1HQ41_BOMMO
cgtccttttccttttcccttgcctttagaaccagtagatgcttgctgaggagcctcggtcgagcttttattttgcctgcttttcagtttgggaatcatgtctcctaaatggtacataatgctgtctctggtagggaaactgtcattacacaaacttccatcgtcgttctttaactgtatccttattctaccacgatataacatttctttacttctctctctgctgtacaatttgttttcgacacccactttcaaaccagccgcgaccagaacatcacgaatttcctggtgagtgggattttcaacgcatctttctttggctatttttctgccctgtgccaatgtttttttgttgttgatgtaagcagggtaaatacatatccacctttctcggtcgctatgctttttatcggggctccattgcaatccagggcctcccggataaccatgtaccataccactcgaagattgcatcttaaatttttatttatattttctgttttagaaaatatgacgacaggacaagtattttttattttgttgtgacgtgactgtcacc

SEQ ID NO: 12475 - DNA, 551 bp, Diabrotica virgifera
aaatggcctttttacattctgcacacacagggtaaaaactaacaaataagatttaacattgtgttggatcctacgctgtcaaatggggcagcagaaaacatgttgcatatcggtaacagccctatatttcatccaggagctgcaatatatacttctatcgattcagtagtaaaatagtagataatattctcgagtagaagtggttttatgcattaaacttttaaacagaagccactagacgtatttctatcaattttaatacaaaaaactttacttatatgcccaattcaacaattacttcactgtataataaatatgtgtgatatcttttcccatttgtaaatttactatttgtgtagatgttttaattttaccaaaattactttatctgaaacctatttcttttaagtatgtagatcaacgtttaaacaattattttattagtaacaagtatgatacaaaaaatatattgatttgttttctagtttgccttccctactcgatgttacaaaaacttagtttcgttcccaatatgtatttaaggctcaatt

SEQ ID NO: 12476 - DNA, 556 bp, Diabrotica virgifera
ttaattatagacatgcgctgtatagctatatctgtccttcagagcccactatgatgacaataattgtggatcaatggatatcgtttcgtttagtcaaatactattgactgtaatacatccaacttccacagaaatctggaagcacgttgcactagcgccactgttggcttgagttgaactacgtgttgacaacgtaaaatttgacgtatatattcaaatttaattttataaatttttgaataacgagctaattttgctaaattaaattataaaaatagttcaaacacttatacaaaaacaataataaagcaattttataaatgtaaggttagattgctctggttatcctactcataccgctagatggcgctatttttttgcttccgcaaaattaatgggaaatgtcaagacttgtatgtattacagtctatagtatttggtttagtacatcgtaagaacgtagttaaatattttttcgtatattttttgttctctttgtagctgatcgatttcctgctcaaaaactcggtacaccgacgatttttttagactattt

SEQ ID NO: 12477 - DNA, 558 bp, Diabrotica virgifera
gttcaattgcagctttaacatactttaaaacaaaaattttactttacaatgaaaagcatagctatcattgctttctgcatttccgtagtcgtatctctacctttggatatcattgaaaatgaaagtggacaagagtatgttttagttccagtccatagagaaagaagagacctaacctggggcgccaaccaaaatggatacagtcttggccaaaaaggaaatatctgggaaaatggtgcccacaaatttgacggtgcttacactggttcaaaagcttgggattcccatggactgaaaccagattcttttggaggtcgtgtagaatacactaataagccaacaaaaactactgcttttgtaggcgcagacagaacgcctggatatggtactgatctcaatgctggagttaaatacaactttgttcaagataaaaaacttaacatagatttaacaggacaagtaagtcagcaccacggcggaccctttggaaatacaaaacctgaagcaggagtatatttaaattttaatgctagaccttaaatcaaaataaagactata

SEQ ID NO: 12478 - DNA, 549 bp, Diabrotica virgifera
  SmartBlast Evalue=1E-43; Info=Organic cation transporter n=1 Tax=Aedes aegypti RepID=Q17CS1_AEDAE
aatgatatcagtgccttcgctttttctgatctcatactattggattcttcctgaatcacctcgatggcaactagcagttggtaaagaaaagcaagcaattgaaacattaaaaaaagcagccaggcggaacaagctaccaacagaaaaaatcgaacacgacgttaatctttatttagaacacaaacatctaaatcaaaaggaagttcatcaaggaaatattctagacctggtccgaacgccgattatgagggtatataccatagcagttggatttaattggtttgtatgtggtctgtgcttctttggagtatctcagtttatcggccagcttggtggaaatatttttgttaacgtcgctatatctgccgttattcaagtccctagtacaatatttgcatgctatgcaacgaaagcatggggaagaaagaagagtttgttgatagctaacattgtgagcgtttccatttttataatgggtttcgttccgtcgaatttaccttggctcagaacattgttgtcctcaattggtatgtttggattagctttatc

SEQ ID NO: 12479 - DNA, 558 bp, Diabrotica virgifera
ctaaaattaatgtgcacaataattttaaaacatcagtgtacccaatgatgattccattctttcatatcaagaaggttgaaatgctaggagttgtcgaagcaaacatgataatgctaaaatcactgatatcaggcattcacattagtcatctggccaagccttttgctatggtcaaagtaaataaggatatagagaaagactttctctctaaaaccaaagtcacaaagctttacccaggtggagatgttacagggttctctttagatatttctgagtacactggagaatccgtctggaagctaaatctactatctggaatggaatgtgagcttgatcaattcttgatcagtgcgagtcacatgaaaacctatccatccttcactcctccagtctctttttcttaagatacttctcttaaaagtaagaaaattacaggaggcttggtttgtcaagtagataaaatgcttactttaatcactgcaactagtctaaaattatagctcttccctctttatacactcctatcttatttaaccccaactaatttatttatctcac

SEQ ID NO: 12480 - DNA, 558 bp, Diabrotica virgifera
  SmartBlast Evalue=2E-37; Info=Lysozyme n=3 Tax=Tribolium castaneum RepID=C8C411_TRICA
acaataaataggtatttattaaaattaaatttggtacaagtttataaatataaaagtaggcacaaagtcttattacaaaaaagttattaaagtctctatatgccacacccattaatatacccttcattgtttcccccacaaaatgcgtcgtatgtcgtccaagctttaaaaccattccctctaatcctctgccattcgtcgaatatttttcttacgcattgaacatcgttgtggatgtcatcgtctcttaaactgtcacaagatacgtgacagccttgaggatggtttggcggatcgcaccagtatatttgggaaatctggaacaggccatgatcatgagtttgggtatttatggcagcagtattgaaatgtgattcatgttcgacaatacaaatccaagttgggatttgccaacgagggaatttgtattggtgtagtaattcacgcgccaaagtacatttgtcgtagattctgcaatatgcaaaaggaagaacaactaataatagtaatactgctttggagaccattttgaagtaccttgttttgcactgaaaaaat

SEQ ID NO: 12481 - DNA, 558 bp, Diabrotica virgifera
  SmartBlast Evalue=1E-50; Info=Yellow-b (Fragment) n=3 Tax= Tribolium castaneum RepID=D1LZK1_TRICA
gaaataatgatgggtaacaatccatgatctattttgcttaaaatcatacaccaccaacgaaggttttcccaaatcggccaggtacgcaatactattatcgcagccgtcttcttctatcacaatattcgaaaagaaactgtcgtccttgttaaactgttcgtctggaattgggaaaactcgcactagtttgtccgttttcaaatcatagataacaattctgggaaggactatctgtttaggattcctgccatagagatctgagaatccagtgtccaatacccacagttggccgcagctgtccactttcgttctgaatgctgacactaactctggtacttctttcctttggttatgggcctcccaattggggtagggacgaaggatcggggagtctaagggatctgttgtgttaatataagctaaagaagctccaactccctccttccatctcggcaaggtgatgaatattctatctccatatacttctaatcccagtggaacattgttctctggtataaactgtctagaggttgatgcctcccacctggcgtttgatgt

SEQ ID NO: 12482 - DNA, 558 bp, Diabrotica virgifera
tgaataaatacagcaaagcagttacgataaattctgaaaatacttttataaaagaaaacaaattaatagagaactacttccaatatcaaaatattttatgcccttcaaagagttttagaaaatctctacgtggattatcttttgtcttttttgtcactttaatgacagctttgtgtagttccgtacacaaaaaaattcagtttgaatatttttcgagagtcctctatgagaaacggcacgaaaataaccacaatttataccgactgtactgtattgaattcggagttagatgataaggagtctccgtgggtcacaatcagcaatatattccactttttcaatcgacagttaagctgataaattatatggcaattattaagacttcagttatataaagaataattcaacagtcttttcttttattattggaatatactttagcaagtttcgttcgaacaatatcttaatttatttgcactatcggttaacaaaatgaaagagtagttagatcttttaagtaacaagcttataagaatagaggtgctagttttgatatta

SEQ ID NO: 12483 - DNA, 544 bp, Diabrotica virgifera
tttactaattagaccagcgtattataactattttttttaatttaatgattatgcaaaaaaaaatttatattttgtcgataaaatattaaataagcatctcatctttataatctttataagtttgatcaatgtatcatgattattttggttattattgctgatcgtaaattgttaattaacaattgaattgttgctaaaatattcgtttaattttcaccggcttctggaattacaatctataccaagaaagctttgatgtcactaagttatttaattattgattaataagtacttacctaaaactttatttgaaaattagagtttttgttgggaaaacccgcatttttcgaggaaaattttcgtcggagcaaatcggggaaaacgtatctctatgcagaatttaattgcggtgaatttttatttgggtgtttttgttgtaaagttaaaatctttggagttatagagcaataattgaaaaaatacgatttgtcggcgccattttgtttataaaaaaagtagcacactatgtgcggactttgcatac

SEQ ID NO: 12484 - DNA, 557 bp, Diabrotica virgifera
tatctttgatgggaactaacgacaatttcagtttcaatttaaagatcgtttaaagttaagattatcgaagtaaaaatctaaacgtcaaaataaatgtgtattttaaactgaaactaaagttgttgctaataccaaataaaagatagtaaatagcataaaagtcttgtgtagaatgtttccatgcagccctaatgttaataacatattttgtgcgttgtttttattatacgataatttcccttttgatacagtttaaaaaatacttaccttgtagtttttccaaaaccttaatgcaaaattcaccatctctatgttttaactaagcgtcaatattacaaagaagacgataggtttaaatagtttgcgtttgatttatgtgtttctggttacattttttatataaattagtgatggcttcgaaccattctcttttttacaagtaatctatcgtacgtcccatgcctccaacattttaatacactgagagttggagtatattatagtttttatctttataattttggtaactccagagaaagcagttcatatcttttaat

SEQ ID NO: 12485 - DNA, 555 bp, Diabrotica virgifera
  SmartBlast Evalue=3E-33; Info=Zinc finger protein 294 n=1 Tax= Harpegnathos saltator RepID=E2BFS0_9HYME
aaattctctaaaagcaaagtggctcatgtaagggcttccttttttaatattatatcagtaatctgtcaaaaggctacttttctctttgatgataaaggatctcaagttgtcaacagtgtctttgttggtcttgatgaatatgatccaacagttttacctaaaatttgggaagccacacttttgacaatgtccaacataaaggattggtggacgtatataaatatagaaaaattatttttaccgaaattgtggaagattctcaaacaaggaggtcaaggaaatgcctcgattatatatccaagtttgttgcctttgatatctcatctacctcagacaattgatgataatgcaccccaattttacaatttattttttgaaaatctatggttagggctcaatcaaaaatccactgtatctagtcgttcagaatcagtagcggtagccacagcattcgtggagtgccttcaatacgtgattttaaaaaggcaatcggatctccctttttgtaaaactcttataaaagcacatctcgttaattcgatagaatggtgtctt

SEQ ID NO: 12486 - DNA, 555 bp, Diabrotica virgifera
  SmartBlast Evalue=2E-57; Info="Transportin-3, putative n=1 Tax= Pediculus humanus corporis RepID=E0VRR5_PEDHC"
cactactgcccactatgaaaactacatctcgtattaattctgctaccttcaatctaaaatctttaaattcatctccatcttctaacaacccttcgctatctggctccatttgacaatgcctacatagtgctgttattaatcgttctacatagggtcggaatagttctgtcttttctttgttatttttttggtataattcttcacttaaaacataccaaaggttaaaagtgatttctgctacctcatagtcatggtgtccaacacacattaaaactagatctaaaattttaatagcatagtgcatctgttttgtattactattagctataattttttctaaaaatgattctgccagttctgtaaacagtctgcagtagtccatagattttccttgatcctcattcgcaacagaaaggtgataaggtacatctaggttgataatattattgaagaggtaattttccaaaccaagttggttattgttgttttcaagacttagtaaaagagtacaaatgcagtcagtggcagcctcatggaaggcagctgatatggtat

SEQ ID NO: 12487 - DNA, 555 bp, Diabrotica virgifera
ttgggttgctgactttcttccaccaaaccgccagttttgttatcatggtagttgcttctactccagtcatcagtgtgtaagtttccatgggtagaaatttgtgcttgaggtaccgacggcacttgaaccaaagctcgagttggtggtggaggctgtgacatctgattctcataactgccataattttgatatccataattattattgtgttgtggatagttttcaggatactggttgtatgtattttggtaccctgtattggtatactgtggaatttgattgttgttatacatagctaattcctacaataattctaaatatgtaaccacttaaaagcacaaactatttatcaaatattttgtattcattattaaaaatgaaaacttcaaacttgattaattaggtaagtaaagttttttgtgaagacggtaattaacacaaacgatctattattatatttttaatagaattttaatgatatctggcactttaacactccactaataatatattccggcagaaatataatttaaatgaataaaatatacacgccat

SEQ ID NO: 12488 - DNA, 554 bp, Diabrotica virgifera
aaataacgtaaaagacggaaaacccacctttagacgtatcggaaaagttggcaaactaccactgcgacagtgacagttttagttgacatactcctccgatacgtctaaaggtggaaaaccatcagtagtaattacacgagagctctaaaattatcgatttgtatcccgagtgacactttgacagttttaatttcacgacccgaaggggagtgaaattatgtcaaagtgtcacgagggcaaaacaaatcgataattcgagctcgagagtaattcggtaagattatttcatgaataaaactgtctttttaaataattttaactacctaatattttattgatatcttcgcctgaatatttgctaaacctgtttcttgttgttctctgtgagaagttgtaaaacattgttattaatgtcactgaatgtatttttgcctagcaacgaagggcatctgacgtaaaatatttgacggtgggaaattatagctgtaatttttttcttgtaggtcagatttctattggtcagaatctctatgaataaaataatcagtataatg

SEQ ID NO: 12489 - DNA, 543 bp, Diabrotica virgifera
  SmartBlast Evalue=4E-21; Info=Trypsin-5 n=1 Tax=Anopheles gambiae RepID=TRY5_ANOGA
attggacttctcggttatctcatccgtctatggttggtaataagaaaaacgttttcgaatttttggtggaaaagaggcctccatagagaatcatccatggatagtttcacttcaggtttcttctaagggtcacgattgcggtggatctcttatagctgatgattgggtaataacagctgcacattggtttgcacatttaagggtatctccagactcaattattgctggaacatctaatttaacccatcccggtactaccataaaaatagaacatgtaataaaacatgagctattcacaatgaaaaagttttataactatgatatagcacttgttaagttagcagaaaaagttactttctctaaaacaattcagcctataaatctaccagaacaagacgcacaactacgagtagggacatccgttggagttgcaggatggggaaggactaagctaaatggaccaccgtcgaaagttttgatggaaaccaacgacctacagaccaccattttgggaatactataatttttgcttataataagcaa

SEQ ID NO: 12490 - DNA, 557 bp, Diabrotica virgifera
cctggttgctggataattgtcaagaccatagtccaaaaaaataataagaagaaaaaataagatgcaggttatgtttagcaaacgtaaacaattgaccattccaaatcacgtgatataatatggccggcagtgggcaaaaatttaataatatagggtttacatcagtttttgtaaagaatatcctgtctggttttgttttttattgttaattgtgcaccaaattgtgatagcaattcaaatataaactagtttatcgcctacataactgaattatcccatagtagttattaacacaaactggtaactaatatgggataattcagttctgtaggcgataaaccacttcatatttaatttgttatcacaataatttcgcagatttccctacacaattaacacaaaaaaacaaccaaacaggattttctttacaaattaatgtcgatgtaaggttagattttgcccacacccggccatgtttgacgtttcattggaatgcctaattgtcttcatttaacataggtatgaaatatcttttttgagatatagtaccaccattt

SEQ ID NO: 12491 - DNA, 554 bp, Diabrotica virgifera
gccggttacactagcactaggttgaacagcatggttgatagtgcgtctccctatctcactcccactaataggggtgtcagtttttcatctactctaattgctgcttttgaaccctttgcatataggtactatgtacttggaaataaaactaacataacaaaaatctcacaaatttaacgaaaaataaaagaaacggaatgatttaataaaaatttctaattagaaaataagtatatgtgcatatttctcctgggatgaatttctcatctgtcaaattcacctttttctgcaaacctcgctcacgacgactcccttttttaagacatatataaaataattgtatctcctaagactacacgttttgacatttgacattgataagagccgttctattaaacaccagaaacgagcttacgtttacgacatgtatattgcagaaaaataattttactaaaaacttaaaatttacttagcagtctgttagtttccatattttaaaatttttgagttggtaccgcacgtcatattcgaccaacttttttaaacacacatct

SEQ ID NO: 12492 - DNA, 554 bp, Diabrotica virgifera
atcagtggaccgattctataagatcaacgtgaaacaattacgttcgttatccgacggtttgctattctgtaagctaattcgggaagaaccggagaagcagatcacgaagccgattacaaagcgaaagcgataacttttggcttgcgtttcgcttcgctttcgatagtgattggtcgatcattttcacgtggtacacaagcgcaagcgctaagcgggttgttcgttgttgttgattccacaagaattctgtgttttttgttgataatgaattcgtgatgctcttacaccatatcttccgtaagttcctgtagctcatcaaaaaggaatcgaactagttctttgcttgagtgaaaaatatcaataaaccttatatctgttacaccaaatgggtcacttctatctcgaaggaacccgctttcctctcgcgttaaccgtagatggtttcttcgtgagttttccataatatagaacaaattgcactggcaacatttttataaaacataataaaaatatagctattcaaggaaataattcaatcaaacttgtgattataa

SEQ ID NO: 12493 - DNA, 557 bp, Diabrotica virgifera
  SmartBlast Evalue=3E-46; Info=MORN repeat-containing protein 4 n=1 Tax=Camponotus floridanus RepID=E2A8P4_9HYME
tggtttacgaaaggcttccaattgctgcagatggtggccatagatataacgatggtacttcttacgtaggaacatggaatacagaaggaaaacgacaaggggagggacatttgcaacttcctgatggtactagatatgatggaatgtttgaaaatggattattccatggaattggagttttaaggtttcccgatggagcaaaatatgaaggggagtttttcgatggttggttccacggctatggcatattttggcgatcagatggtatgaagcatgagggtgaatttagagcaggaaaaatatggggccttggtttgactactttctcagataataccaacgggttcccgagaaacgaaggatttttccacgactgtcagatgaagacctcttcaagatgtcctcaggtcatcaaaaaagcccaaagggtggctttcatggctcgaaatcagtatacagaaaagataaaagcgtaaaagtaaatattttttggctttgtgcagataacaaaacatgtattaagtagtatttgttttaccattaaattttttaccagt

SEQ ID NO: 12494 - DNA, 556 bp, Diabrotica virgifera
acaacattcaacaaatttcgaaattctgttgaaaaatgaaatgtttcttcttgtaactcgttgtgctttttgagttcatttatgtgtgtgaaataatagtaggaatgtaaccattatggtgtctttacaccgtgtccttttttcctgtgttgttgcatgcaacaaacgtcctttgcaacctgcttctttctattttgcatcaacaaattaattaaactaaatactttgaagggtaaaagacaaaaaacaatacattttataaaattatacaaaaataatcattctaatagattttattgtaatgcatgtctgaataatccattcaatctttacaagtcgctttgaggcatgtgactccaggttagaataaagctaacattaattataaacatacttgtagactgtaaaaaggcaagcggatcgcttgtcgatgtggtcagatcacctgcaacgccttgcagcacactttgccgcttttctgtgacatgcgcagttggatcccttccccagcgcatttttttagatgcaagggcgaaaagaatgcaccatgtaaacg

SEQ ID NO: 12495 - DNA, 557 bp, Diabrotica virgifera
ctcaatgggaagttacttgctaaactgtcgattctatgggttaatcttaacatacccttatgtgagttattgaaatgtgatcagattaaccaaaattctgattaaattcagaacttcattaaaaagattcatatcattttgcttttttattattgaaaattttgttgtttttgttgattttttaatgaattattaattattttttgtctaaggagagttcttcgagcaatggttgccggaaagaagtaccaaaaattacaaaaaccgaaccatacctacaaagttgaaaatatccttcgggaaacatatataaaaaatataaattaacttgttagcaaaaaaattattacaaatatattttatgtaagaattgtctttgaaatggagacaatggatttacaaaaagtaagtgtcttggtatagaagttttagtatttttattttggaaaaccacgaatttaaggaacattttttgtacgtatgcttctacaatattatatagtacgattattttgaaacatgtatttaaacaatttaataaaaaatatttatttatt

SEQ ID NO: 12496 - DNA, 555 bp, Diabrotica virgifera
  SmartBlast Evalue=7E-31; Info=CG4302 n=4 Tax=melanogaster subgroup RepID=Q9W2J4_DROME
tttaaagtcggaaagtggttttcccaacaagacattttagcccatccaaacgtaaaactttttattacacatgctggtttattgagtcttcaggaagccgtgtacaatgcagttccggttttgactttacccgtcttcgcggatcagtttagaaatggaattttaatggaagaaaatggaatgggtttgaaatctaccaattcgaacagttactgaaccagcgttggctgataaaatagagaggatcataagtgattcaaaatataaagaaactatgcgaaagagatctaagctattccgaagcagacctgttaatccgttggatttggccattttctgggtggaacacgtagcagaacacaaaggtgcaccgcacctgagggtagattatttgaactatgaatggtacaaaatcttattactggatgtgatagcattatttagtacaattgcgttaattgcagctgtaatcgcttattttgttttaagaagattgttaaaaatgttgttaggaagtaacgaaaaagttaaaagacaataaacatatagtgtaag

SEQ ID NO: 12497 - DNA, 551 bp, Diabrotica virgifera
ttatatctactaaaaatgttcacctgttgaggtcaacgcgataaacaacctgtgcggtgtagttatcacgtccacttcactccttcatttcccagtcttacggaatttcatttttttgaggcattaagtatctttgacataaactgcgttacactattttttatgtacctatatatattatatctataactacttctttcttttggtctatgtttttaattccataatactactttcatatttcttattattcttcttacatcgtgagatctttgtgccagacctgtcctttcattaaactctacatcctctaaagtcatatactctgcataaaaaccatcaactttcgtatggagagtttaacaccggttttacctgtgtatacccgccttatttcacattattataggctgtgtaatcgtccttatatcttgtttgctaagattcattagactatacagaagcctcttgtcaatgttactaatgattttgtttttatatggatttgtgcctgaaggggctattcatttcttgatattgtattgttagtg

SEQ ID NO: 12498 - DNA, 556 bp, Diabrotica virgifera
aaagagtctatttatgtataaatcaaacaatctgaaaatcgtaattttaatagatgttttttaatgtgtagcttcagtcaaactgcaaatattacagtacgacctgatgcagaaaaaagtctacagcaattttttctttcgaaatatagagcgttatttgatatgccagtctgttgtatgctgaaatgcacaagagttgagtctctatatattaaaatcgaactgtattttcttgtgaaatttctattatgtgttgtctactatatttaatacgaatttacaacaattttaactgaaaatacgttcaattctcgttaaatatagtagataacatcgtacagtgttgtcgcgttttacctagtttactaattaacacgttctatatacctatagtagcattttgtctacaattcttatcctgtcgacttttgtagctcaagaaaaattaagttttttctcagaagtatgacaaatttgactaaaaaggcaaatacttatacatttcctgtagcgaaattaggtggatgccagctttacaattatacgcgttttctga

SEQ ID NO: 12499 - DNA, 538 bp, Diabrotica virgifera
  SmartBlast Evalue=1E-18; Info=Zgc:77076 n=6 Tax=Danio rerio RepID=Q6NYE9_DANRE
atatctagcataatagtttagcaaattatgatcagttacttctatgagcaactcatttgatttgctacttgtaaggtggtgaatgttttctacccaaccaaaattcacctttaagattcccaaaaccaaatttataatctctccaaggtctataaaagtctacagatccatcaaatctcttctgtatgattgtccatccacctccctcaatttccatgtcgcataaaaccgttactggtttgtttgtccagttggtaagatttcgtatgtaccggagattgtcttaccatttctgtaaatctcctggcagcttcctggaatatttaggtttgtaactttggtttcagtaattggacaatagtctcctttactgactccaaccaaatgttggcatactccaacagaatcactaattccatttcccaggattgtagcacctcttataccttcatgtgagttaggcttttgaatttgtattgtgagagtaattttattattgtcttgtgttatgcctaaattattgtcttgtgtaaatgca

SEQ ID NO: 12500 - DNA, 555 bp, Diabrotica virgifera
aatatggatacaaaataccttctttcacaggacgttttattttttaatgaaacgcttcaagtttttagctcaaccttataactgtcgattgagatacatcacattttcttgctaggtctctttaactgtgttcttttacaatagaatagaacagaagaaatctgcgcaatagaaaaatctttacattatcattttatcagatttacatcttcacatctcaaaaaacgatttcttgttttatgattagaaattaactaaattcaaaactaacgtaactatataacaataataatactcataactgaaaatttcacacaatttgaacaccaatctgtggcgctgcagagtgattcgtctgtttctgcgcttagagttactgcacacttttagcgcattctattgtaatctgtcaagttttcttaattcaataaaaaaagttccaggatttttaacttaatgtaaacattatcaattcattatcaatatttgaagccggtcttctttaattggttatcttcgtggttgcaataatttgttcacattcttgaaattagg

SEQ ID NO: 12501 - DNA, 556 bp, Diabrotica virgifera
agatggcactaaaagaagaagagtggactataacattaaaatatacaatcgacatattttcttcatttatgtcatgatgtcacaaactgacgcaataggaacagtgcctcaatcgaattgaaatatagagccgaattctaaacaaatgatactcttatatgagaaaaatagactaataatcatacaaaccttgataataacctgtaaaatcaataatgtttagaataaaactaacgtgaaattcacactgggattgcaagtacggttaagataggaatgcgcattcagtgttgccacagttctgtgcgacgctcttgagagagcaatcaataactggtgaaaaccgacaaccttgtgcgtttattccccattagaaatgtattgctctatcttagccgtactgcattctcggtgtgaatttcttagtagactatgtttaaattaacattatgaatatgttaggacaacttttagaaatacagaaagagctaacattcgcgtcaagaaataagtactgtaaggtttagagatgacacggcgtcataatggaaagtgt

SEQ ID NO: 12502 - DNA, 555 bp, Diabrotica virgifera
agagcgcgaacatggtggatgcgtgccttaacgttatttgaaatactaataggtatgttgaataaggaacttgtaagagaggtggcgaatcccattgactgagatttaaattataaaataattgacaaactgtacttacaatttaattatatgctctatatttcggaaaattattgtgacatgtttagccagtgttatatatttttgtgttataattagggtgacttttgatgtgcacctaccgtatttataactttttatgttgatatttgaataggtgataccttctgctttatttttttacatattattatacattttaatgtaagtggataaatccttaataattgtaacaacaaatctttccaatggtttattttaaatattttttgactgatcagtttttaacctatcacttttttatttttatggattctctctgagttatatagaactgacgcttgtcattgactgttcatagcatgttggattgttttttaatagtattatccatgtattttcagttcattatccacaataaagaatgtatctatt

SEQ ID NO: 12503 - DNA, 556 bp, Diabrotica virgifera
  SmartBlast Evalue=7E-72; Info=Carbamoyl-phosphate synthase (Fragment) n=1 Tax=Strangalia bicolor RepID=C6F5L5_9CUCU
ataaaaccaacgaaggtataatccatacgaaattaccatacttcagcgttcaatttcatccagaacatatggccggaccagaagatctagaatgtctctttgacatatttatagaagcagttaaaaatgacgttaaaaataatattaaagaatcaatgactacaaaattaaaatttaagattgaaaaacctataactcaactaccactaaaaaaaattcttataatagggtctggtggtttgtcaattggacaagccggagaatttgactactcaggatctcaagctattaaggctctaaaagaagcaaacatccaaacggtacttatcaatccaaatattgctactgtgcaaacatcgaaaggtttagctgataaggtatattttctacctttggtacccgaatacgtcgaacaagttatctgttctgaaagacctagtggtgtcttactgacattcggtggacaaacgggcttaaattgtggaatagaactggaaaaacttggagtatttcagaaatataattgtaaaatactaggtactcccattcaagcaat

SEQ ID NO: 12504 - DNA, 549 bp, Diabrotica virgifera
  SmartBlast Evalue=7E-32; Info="Reverse transcriptase, putative n=2 Tax=Pediculus humanus corporis RepID=E0VCN4_PEDHC"
atagtcgatgataatatagtgacctttttagagcatataatgacagagtggaaaactagaattcaccttcaaatacctggtgaaattaacatcgaaactgaaaatatcgcaatcagccggggcctgtttcaaggagattcgttgagtcctctgtggttctgtctagctatgaacccactatctcagctattaaactccacagacgcaggttttagcatcaaaaataacaacaatgtggtggcgaagcttaatcatttattgtacatggatgatttgaaattaatggcttccactcgaaaccaactcgatgagatgctaaaaactgtagaaactttttccaatgatattagcatgcacttcggactagacaagtgccgtattttaaatatagtcagaggaaaagtacagcccggaggattcgatatgcaaaatggccagaacgtcgaggccatgggtgaaaatgatatgtataaatatcttggagtaaagcaagcgcggagaattgaccataaacaaatgaaacagagataactactgagtttatacgaa

SEQ ID NO: 12505 - DNA, 536 bp, Diabrotica virgifera
  SmartBlast Evalue=2E-10; Info=Endonuclease-reverse transcriptase n=1 Tax=Bombyx mori RepID=D7F164_BOMMO
atttagtaaagttatgggtctgtaattctttagatcctttttatctcctttcttaaatagtaacaatgttactgcttcgttccaagtgttgggtatttgttttgtcattaatattttattcataagtgtgtacaaaacttctctagttgttttcccaccatttttagcatttctacagttatcccgtcttttcctggcgatttattattcttcatctccttgagtgctctttttatctcattcttactgatttctggttgtaagtcggaattgacattttttatttttatttgtagttgcttaaggatttcttgtgttggttttgttttgtattgtagaggttttataatattcttgtgttatctgtgtaatttcttctatattattggtctctataccttctttgttctttatactattaatctctatggttccaagctgtggttttaagcacttcatatttttattttgttcaatggttttttctattagtttttcctttactcttctttgactttccttgatattccttctga

SEQ ID NO: 12506 - DNA, 555 bp, Diabrotica virgifera
  SmartBlast Evalue=3E-10; Info=Fam195a n=1 Tax=Ictalurus punctatus RepID=E3TFN8_ICTPU
atttttattttaaaaatgtataatgttaaaggacccagtaaattcgtagcaaagacaactagaagaggtatcccacaaactatagacaatttaagagaattcaataaaagagtcccagaaagtgaagaaaatgactatacaaatggcccaaaaccagtatttcacaaaaagtcagccacctcaagtccaaaacacaagaatcttacaccccagcatgaggagattataaattttatccatgagtcatggaattcagtgtgtgcagaatttgaccaggaaaactcagaattaaatgaaggagagtcgtcgacgatatgttactatgaggaagaaccttgcctgtccctcgaaaactttagaccctttgatttggaatcgtggtgggggaaaaggctttttgcttatgtaacgaatccagaaacgcagcaaaattagactacttattatcagttactttacagttacctatatttacacaaagacataatattttagatttttttatttattagaatatttgttactattttatgcagttgttttatttgcatgtta

SEQ ID NO: 12507 - DNA, 556 bp, Diabrotica virgifera
ggcttgtgggtttaggacgtccattttgtagcattcatcgaaacgtgaaataaatttcgaaaataaatataataatcatattgtgtaatttttttagacaataaaagtgtgtacaaatattgctgtagtgaaaatatacgataaaacgttatgtaattgtgctactcattaattgcattcgggaacaatattgtttttaatgtgctattttttgaaagtgttttgcgctcttactgaaattattttagtcggtttataataaaatatccttcaaaatggattttgcccaaccaccaccaaatatggggatgcctccccctaatttagcagttggcccacctatggctccgatgcaaggttacggtaatagaccgccgtttaggccctttgtgaatattcacaagcctctaccaggtccgttaagtaacatgactttggaagattttgatggaaaagattacgaaagtctgtcatgagaaaactgtagattataattcatctataataaaagagttagaaaatagagtatggcaaagagattatagagatagaagag

SEQ ID NO: 12508 - DNA, 553 bp, Diabrotica virgifera
ttcatgtaaaaatatatagtgggaagcactacttgagttcgcatttaccaaggtaccttggaaagcatgaccatccaagtcccatcactattctatcttctcaacttcaccatgaccaacactatcatttttctcatgaacaactatttagctacgatctccatcagagttaaatttacaaacataaatctaataataataattcattttcatattcaaccatttggggctgttctcaccaaaagcaaccagcgaccgcaacagaacagcaacgcgactcagcgctaatgtttaattacacgtgttttcaactaataaaaggcttcttttaaccgacaaaacaacgataaactcaacaacaactcaaccagttgctcattagttgctggcagcgctacataccgcgtcgccgacgccacttgccctctacagttgccaagaatagcttagtcatagaggacgagacagcaaaatcttttaactttgtggctctcgtcgagcacaagaagacttaaaaacagttgatgtcagtaagtacacaagagcaactcaa

SEQ ID NO: 12509 - DNA, 553 bp, Diabrotica virgifera
aaaaatgttcctgcactgttattatattttaggtgttgtataggtattttaatttagttatataataatttggaacattatctgaataattattgattatagagagttagagcaaaaatatgtaaacctttggaattattttcaaaatatgttttttcaaaatttgttaattgtgacatatttaagaaatcaagtatcaataatcaaattggtcatccccacacaatgatttggtgtgttaatatacttgatacaatcagttttcaatttttttgaacatggcattaaaatgtgtaaatatgcttaaatttttttcattttgaaaggttgacctacaaaattggtaaatttttgttttaactcctttaattctaaagaaagcatgtattttaataatatttaatgagtctgtcatttattccatgacttaaaccaaaccttcattattagagtatacccctaatgacaatatattgtacatatttatagtcaattacttttgatataaaatatgttttctggtagtgatgagattaacagaatatgaacttaa

SEQ ID NO: 12510 - DNA, 554 bp, Diabrotica virgifera
attgtgttgggtttttcaaacattttaaaaaaaatatgaaaaatagttaataaaacgacttgtgagagaaaaagaaatattttgccaaacatgttatacctcatcgctttagtttaatgtcagttgtcacccgttagctaatgtctaattaaataaacttcccttcttcttatgcaatccactaatggatgtccgcgatcacgtttgaccatttttctctatgtatttttaaagagtttatattgttataaaatataaatataagtaattgatacatgaaattgttgaaacacactgaatgatcatacttttattagcatatatttatatatccatttcctttaacagtattttcgtactgtgccaaaaagaaatattgtatcactttgatgaatgaatacttgcttgatcgtttcgatgaaaaaacaaagttttggcttattttgtacatagaaaatttttattatcgcttgtgagttggtgtaaaaatggtaaaatcttaaataactactaggctgtttgtatttcttgcctgttattgtttttacagtttt

SEQ ID NO: 12511 - DNA, 551 bp, Diabrotica virgifera
tacctatatgtatattatgtattttatttcaatttatgcatataatataactaaaagaacctaatttatttaattttgaactttgaactcttgacaaaaccgcatccatagaaaaagtacagtgtacaacacatgagaaattgacataattctctctcacttgatttgcggaacttgccgtgccaacaaacttctgcgctcgtgagaaatatgtctttcttctcacttattgtacaatacactattattttccggtccctatattttattttccaatcgatatttcataacacagactgccttgattctatcaacatttatcaacattctatctgttactatgacaacaactttgcgatttgttatgaagtgagaagtgccagttgatttttaatttcttagttgttaaacttgtttggtgagttcgcaaatttaaaaatattaatcttcccttcagatatttaacatttacagttgtacatttgacatggatactcaaagtaatgtacttacttatttattcggtttatgcagttgtattcagtgtttag

SEQ ID NO: 12512 - DNA, 556 bp, Diabrotica virgifera
  SmartBlast Evalue=6E-31; Info=Odorant binding protein 19 n=1 Tax=Tribolium castaneum RepID=D2A1G4_TRICA
gccttaaaaaaagttttatttaaaaaacaaattaacaaataatattttaagcttttatttttataatctctcttcaatttacatgccaaacatttctgacttgattccagccgcccttccttcagttattgcgcacgctgccacattgacagctgtcacacatccatcctcgtcaataaggtctttttttccttggcaagttgtgaacactttcatcaacttctcgtataattctgcgtcactttcttttacctgctccatgagcttcaaagtttcgtcagggttcatggatccatcttcattttggattttaaatgctttgtagacacaggaaaccatacactttccttcgtgagtctctggaatttggtgagcaatgattcgagcaacatcatcacttgttgctttggtctctgccatacacttttctccaaatttggtaactttttccataaatgaagctactattttggggtcaagtactgcttgtgcggaaacgaagaatagagcaacaatcacgaggtacttcatggttacttgtggtttgatgtttaac

SEQ ID NO: 12513 - DNA, 555 bp, Diabrotica virgifera
  SmartBlast Evalue=9E-13; Info=Cuticular protein Ld-CP4 n=1 Tax= Leptinotarsa decemlineata RepID=A8W7B3_LEPDE
gcgttacattgtatgtaaagttagtgaaagaaagtcagtgacgtgcttgagattaatgcaataagtcattagtctactacgatgccaatcagataaagaagaatgattgaaagagtagtggtgatcgttgtggcctcagttctcttgtgtgtgcagtgtcgacctaccggagatgcccgaattgtgaaatatacgaatgaattaacggacaaaggatataattttgagtatgaaactagtgatggaattaagcgccaagaaactggatcataccaacctatcaacaaagaagacggcatactaaaagtaaatggacagtttgaatacccatcaccagacggatacaaggtgtctgtagttttcgtctcagatgaaaaaggttatcgtcccaaagtttcattttccagcggccctcctttgctaggtggaatacctgaaggtgctttcatagtattcgacaacagaatcaaccctggagaaaagtcaatatcctcttcagctatcgcgtctttggccggtggagggttggggaaataattttaatttatcatgtcg

SEQ ID NO: 12514 - DNA, 545 bp, Diabrotica virgifera
  SmartBlast Evalue=1E-20; Info=Cytochrome b5 reductase 4 n=4 Tax= Simiiformes RepID=NB5R4_HUMAN
gacgatactactgacgaaatctgccttatggtcaaaagatacgagaacggagctgtcagcaaatcgataacagatcgagaagtcaatgacattttgtctatgaccagacctttaggggatttcgatcttaaaagactggagaaaaaggtagcgtttttgatacttgctgctgggactggtattacgccaatgctgccattaatgctgttcttattggagaggagagtgaagaagtgtcagtttgtgaggtttcttttcttcaatagaacggaagaagatattccatttaggagtcaacttgcagcaatacaagaaatggatagtcgtctaaccataaaccacgtactttccgagccatcagcttcctggacaggactgtcaggtcacgtgagcaacgaaatgatcaacaacgccatccaggagcacatcgacaccggttatacgataagcgacatcttcgccttcatctgcggaccaaaccagttcctggaactgtcccttgaccgactacgtagtttagatataaccgatgaacaaatacacac

SEQ ID NO: 12515 - DNA, 555 bp, Diabrotica virgifera
  SmartBlast Evalue=1E-56; Info=Frizzled 2 n=1 Tax=Tribolium castaneum RepID=D6WG76_TRICA
gactgatcttcaatagcctgtagataccttctagaagttaaaacaagttaacaagtctgataatagtagtaagtgaatgaaaacactgtcattatgaaaaccacgagcgcctatctcgtggtctttctcacgtgcattctagcagcacttccaagtctagccagttcttcggtcatttcttccgagccaaggacgatgcgaagaaatcaccataccgatgtgcctcggaataggatacaactacactcgaatgccaaacgagctcaaccacgagactcaagacgaagctggtctagaggtccaccagttctggccgctagtagaaataagatgctcaccagatctgaagtttttcctgtgctccatgtacgcacccatatgtttagaagactttctcaaaccattaccgccctgtagaggtatctgtactagggcgcgaattggctgtgaacccatcatgactcaatacgggtttaaatggcctgaaaggatggaatgtgatcattttcccgtgcaaggaggagatgtcctttgcatggaccaacctgctcaaaa

SEQ ID NO: 12516 - DNA, 554 bp, Diabrotica virgifera
ttctatacataacgtatgcaaaataattcggtaattgcatttacgtaaaagatagcaattcaaatacatacataaataaagatagcacatagtttaaaaattcaaatagatcaagttgaaatcattttctgaatctttgtgaaatacaaccaaggaactgtcaatagggaaatacacatacatttaacatgattgtgggaagtttatttttaatcttattatctacagttcatttcggaaattcgtacgtttgtccaccttgtgacgaaaaaacagtatgtgtaccaatttcatgtccagaaggacaaaaacctgttccaaaatggtcatgtaattgttgtgatacctgtcttacagtgttgaaagaaggagataattgcagtggtaatcctttcttaggagttccaagtaaggttgtatgtgacacaggcctcatttgttataaatcaaaatgcacaaatgaagaggaagttgccaagattttaagtcaatagaattaaaagtatgttatcctctctacatattgtattaccaagattttaatataattattg

SEQ ID NO: 12517 - DNA, 555 bp, Diabrotica virgifera
gaccctgcacgtaatcttccagaactgagcaacggagccttcgagcgcatagtgtatcaatggtctaagcttacctcttagtaattcacttcactacgtatggaacagacggaagcacaccacccgaagcgccaacgcaagggaaaagaccaagaaccgagagtgtgactttcagcgaagctgcttcttgttacaggaggtgattacaaccctaagaccttgggaaattgcacatctctcaggactttaaagggggaagacatatccaagcccacacatatctggagcatataatctcattatatctcatattattctcaatggaaagatcgacggaaaaagaggtattggtatgaggaaatattcatggctccaagaccttcgtcaatggactggctcatcagcaaattaattgttacataccgcccaagatagagaacgatatcagcaaattgttatggaagctacccacgcctaaaatttgggcactgtactcaaagaagctgcactagtgcactgtcttcgtacaggatgaggatgggaaacgtctggact

SEQ ID NO: 12518 - DNA, 556 bp, Diabrotica virgifera
  SmartBlast Evalue=5E-44; Info=Zgc:92611 n=1 Tax=Danio rerio RepID=Q6DH77_DANRE
aacacacgtgttgtaggaattccctttaaaaacgatggatgtccttagtcgtcctgcggaagaatttgaaaatgaccaaacagtggaaactatgtgggctataaaagccttcgaacatgccgaagtttactttaacattttatgttcagttgatccaaaattgctcaaactaacaccagtagacgatttaatctataaagtctttagagaagaattcccaaaactagaagtcgaagtaataatagaaaatgaattgaagagcacaaaagaaaaaagcaagtggagacctttttgtgaacgatttaagaccattgtagaagactatagttatggtactttactgagagcagatgccaaagatgattataaagaggagaacaccatattagttactaggattcaattttatgccatcgaactggccaggaatagggagggagtcaatgacattctaaggaaaaagttctggcctgaagccaaggaagagaaagacgattaggaagtatttaataaatctcagtttttttatacattttagttatttataagttttttg

SEQ ID NO: 12519 - DNA, 555 bp, Diabrotica virgifera
gtagatcttggatgtacttatatggctggtaatattctgttactaattttagtcataacaatattattgtttagtgttaatggcactaaaaggttgacacatttttgttaagtgaactagacgaaataattttacttagctctattaaagtcaacagattttctaatattgaatagcattttgcagattgcaatcttgctattcaatttctggaaaatactgggaaatatttttaaaactcgaaaaataatcaggatcagaccatgagtaaaatgtatcttgaatgtacgttagagaagaggaggatgccttttattttggccaggtatatctataaaaaataggacccttctccatgtgtacgtcaaatcttctcatactatcagtaagttgctataagactctcccacactcacacactcagtctcggaccgaagaggttacattacttattttacgacataaatattttttgacaaaactatttatagtatggtatagttgatccaaaagatggcataatccagatatccaaagtgtttccacactatttta

SEQ ID NO: 12520 - DNA, 554 bp, Diabrotica virgifera
taataccaaaaatgttttatcaaactattatttctttaacagccgaaaaaactataaacatttttttgtagaaaaaatatgtcattggatttaaatattatatcgaacaatattttttataggtaactgtcttacagtatttaagaatatcttcttagttcagaaaacactcattaatctttggcacttggttttaacactcctgtaccagatcttgttttttccattaaactttatctaatgaattctggggcctcaactaagaccaacagtttcctcattggtagttttaggatctcttctggttcaatcctcagttgaccagtgaattcctgcctcgataggcacattggaatggcatatgtgtatggcgatatcttcttccatttcgcattttttgcaccatggttcattcacctgaccaagtctatacattatctgttttcttaaacgacaatgtccaatcactatttcggtccaatcactattttgatctctcgtttattgaggatcatcaaattgtcagagagtagatttgtcctcgagtggttctc

SEQ ID NO: 12521 - DNA, 553 bp, Diabrotica virgifera
agctcatagtatattgtctccgatcatgtctccaacacagaacatatctattacagatgtgcagcacattgacgaacccctcaataacagtgactgtgatttaaataatacttttacgaaaattatgtttcctagtcctaatgccaaaagagatggattaaaacaaagttacgatcagggctcagtgatatcggtaacttcaagtggagcgtttaaaccgaaagttgagaagaaaccagataaactggcgagtcttacgaagtctgaggtgcaagttcaagcctacatagacgacaaaaattatgccgatgtgttcacagagccaccagctaaaaaggacaacaagaaagttgttcccaagttgacagctactatcgttaatgtgcaaagtatagatgtacaaagttctgttgattctagtggtgttttaagtgcaaatatcgttgtcactcctaaaagcgttaataatctaccactactgtgggaggatattcagccaaagtagcttcgtccaagataccttcaccaacacatatgtgtctcgtccacgcag

SEQ ID NO: 12522 - DNA, 553 bp, Diabrotica virgifera
gttcgcatagcactaattgttaataattaaaaataacagctttgtaataaaattatgacaaaaatctcttcaagaccttgaagaaggggtttgaaatgaaacttgatttggtcactttttgaatttcataataatttttaatcgagttattaagccttgaaaatggccattttcgcatttttcaaatttttaatcgcatataactcgacaacaatcaattttagagaaaaatcacaagagagcttttttgctcagaatgacccaaattatctaaaaaaaaattgttcgaaatgaaaaagttaatttttgtgaattgtttaaacaatttttcgaccactgcaccgtctggcaccctgtggatatgttataaggactctttttgagtaagtttgtgcaaaaaaatcgaatcggaataatttcgctagcgggggcgacgatacagcacggtctactaaacgtattcacagagcaagacagtaaaaactggatcgcatgcctacttcgcaggagatgagacggtatatcccctctggcatagtaaaagatataattg

SEQ ID NO: 12523 - DNA, 554 bp, Diabrotica virgifera
  SmartBlast Evalue=2E-18; Info="Protein PINCH, putative n=1 Tax= Pediculus humanus corporis RepID=E0VU66_PEDHC"
tggggggaaatcaatgaaataccaaccaaaagacacgaaactatataaaagacataaattaattaacttatatgcattaagttttattaattttcctatctaaagggtttattaggttgaatttgtctgtctatggtttaagcttcatgtcagctaatatatttttatgtttcaacaatttttttctttaattttggaccttattgggtggaatttcctctattccacacgacgcctagtctatttttattatgtctatgggtctaccaaattttgtgaaaccgcgaaaatataattgaactattctgtaaaaacaattttaatttttatgaaacttttttgtgtatcccctgtcaatcaaactgcaaaaacctgtttaagttggtacgggtgtaccgggttttcttggggtagcttcatgttgtcttcttaaacgctttcgtaactcagttgggaacttctcgtagcatctcttgcatactggcttcaaatcgtattcgtagaatttcgtcttttggttcattttctgatcgcacaccgaacaggcgaagtgg

SEQ ID NO: 12524 - DNA, 552 bp, Diabrotica virgifera
tttattgttcgatttatttgaaactataatcgcgtgtaaggtacgattaaatgtcttcctgatctgcagacgacgtaatactaatctcttacattgacaatgatttacaacgcatactgcaccaatttaatataaaaaataatataaaatataaaaaacaccaggtagcacctaatcagaacaaagtccaacaaaaattaactctaaaacttatggtatgcacaatgcatacctttactgtcttaatgtccaattctatacttttttcttctttttcgcaattttttttttcatttttcttctgtttctcaaaggttgccaacataaatttgttgtaactaggactaaggaaggtttagttactctcagcttagtccatgtctattaataccattcctaaaatgaagttagtactcgcttaatctcgttctatctagtcctagactaacttcatactaaacagttttattaataacacattatgggacagagctagagcgtagaagtacagatatattatgatgcagatgcaagtagcagtaaatacgacga

SEQ ID NO: 12525 - DNA, 554 bp, Diabrotica virgifera
ttgtgatagttcaacaacatttttgtactactataatttactagaagtcacaataaaaaatttaaaatatttatcaaacttagtatgagattaaaacgttgttttaaaattttttgttactaactacaccaacaagcacttgtagtaggaatgaaagctcttagaagagtaatttattaaaaacctattgtaaattaccggtcccattcccaatactctaactggttacgtcacataatctaaatgtatctgtatactttaagtaaaagtagttatggaaagtgtatttagtatgtacctaatacactaattagtattcattatctgaattatatgtattaattttgaggaaaatttcagttataaatggtcatcaactaaagtattaagaagtagggactgtactcaataatattaaggcataaaattggttaacgaacatcgatgattctatgaacaacgatctatgtggcataaaacatcgacagcctgttgcaggaacgtcattagtgcagaatattaaatagctcagccaaacgaatttgatttacata

SEQ ID NO: 12526 - DNA, 554 bp, Diabrotica virgifera
acttaggcctctactactctgacatttgcagtttatttggcagtaattctgacagtgacaatgataaaaagtaaaagataatttgttaagttttgtagttgaatcattgaccaaaatctgtggttatactagttattaaataagtctgtgcctcgttatagtaacagcatagtaaaataatcagatttactttctacccaatggccatacaaaatcaaacatttcttactaccgagttttgttagagtaaaatcaacttttgagtctctattttattgaacacagtatggtattaaaacaagtttacgaactcataagctgccaaaatgtagctacagcaaaactttttcgacaaagctgtatatgaaccgtgtttatagtgttatttatcgcaacaaagcttaaggcatatttaactgattttgtgtgagctgtacaaaaatatatcacatgacaatgttttacttctttcgaagtatgcagaacgataagtgaatactgtataaatatttatacctgtaaattgttataaaatgtttattacttctaatatt

SEQ ID NO: 12527 - DNA, 555 bp, Diabrotica virgifera
aaaaaatgtattactttgtctggactaaattacagttctttatcttaaaagggatatgttactatcaacattcacagtgttgccaaactgaattttgttattttgagtgtaaattttcccagcgatctccgagggtacaccatttttattcaattgcaatgcgaaggcaaaactgtcttattttacttagtagggagcgcaaaccagcactcttatggccggtttcaccaacggcaaatagtagtttattctatgaataaattctatatgtacttttattaaatttaataaatacctgagtattactattacagttattcgaccaataaactgacatttccccaatttactaataaataaataataaataataattttactcaaataagaattattttgcttatttatcaaataaatacttaatcttcgaataaactggcaagttaatctcactgtaaatatttataaataagaaagtaaattcgccagtttaactttaaattatcaaaatatattgaaacaaaatataaatacagtgcggtggaacaagtgttg

SEQ ID NO: 12528 - DNA, 541 bp, Diabrotica virgifera
caatatacaaagattttttttactctcatattaagttattataggacgcaatgatacaattttatatgatttttacatatttatcaacgtataccttatcattgctgacttttattcatttattatttgactactgatttttagtacatttttgcaattttttatgatcttaatatttgctatcgtaaatatacctatcaaaataaatatacgatataacaaatatacgctatatgcataatacatttaaattattattctaactacttatttacaagggttaatataacgttatttatttttgaatttttattactactgcaatttttacatatttttaccatataatgacgtattattttatctcatatttttttactatatatctatatactacatatctatatacaccgtaagactatcgaatttatattttcgctaagaagtgcaggaactgaggatagagaattatgtatacatgagtagcaacgaagttacttgggaagattttgtcaaaatagttgaggaaattgcgcaagaa

SEQ ID NO: 12529 - DNA, 554 bp, Diabrotica virgifera
ccagttgtatgaggcagttcttagcacattatatgaggagcaaattaatgatacattatttttactaaattaagtctgggaagtctgatctgggaagacgtagtgatgtaaaatctgtcacattttatccctgatatagttccaagacaggtagattgttgactatcatgtttgtttctatattcgctgtcctggttgtattgaaagcagctttaaacaatgttgcagccagttttccttgcccaattaaccaatgatgttcttcttagacagaatctacaaaaacgagttttttgcactttgttctaaaattataaaagtcgaatctatagtcgatatgtatagttgtatagtccatacatctttcgtgtttgccttcagttgtttaaggtcttcctttattgttgtttcattgggcactcaatctttcacaatggtttagtcttgagatcgtttgaggttgatagagaatcaaaacgactccttcactttgcaagtatttacattaataattataaatagcaggttaacggaagtcattaatgacgtaatgt

SEQ ID NO: 12530 - DNA, 554 bp, Diabrotica virgifera
  SmartBlast Evalue=1E-24; Info=Protein cueball n=1 Tax= Drosophila mojavensis RepID=CUE_DROMO
cagatccgtctacgacccctgataaaattgcgacttttcatgatacgcctatgggtttagtagcgaattttgttatgaacgactgtaaaggacttccagacgccatcaaggaatatcaacaacaccaaatgcaatcaaaccaaagtaaggaatatgatgatacagaagaagtcttccagtgtttcaacagcggtgtcctaaaaaacaacacgtgtcattgcaaacgtggctttagaggaaaattgtgcgagatatctgtttgcagtaacgattactgcttgaatggagattgctacctatcgtcatctgggaaaccaacatgtaattgcaataaaggttttattggtgacaggtgtcaaaagaataaatgcgatacgtattgcttgaattcaggagaatgtattatcacgtcgtccatgaatacacccacgtgtagttgtcttcaaggattcattgggaacagatgcgaatacaatgaagaaatttgtgatttgtactgcaataaccaaaaagacagcggatttccagatgaatttgaaataatgtgcaggtgc

SEQ ID NO: 12531 - DNA, 555 bp, Diabrotica virgifera
acattactcaattacctcgaattttaattaattctatttttaaacgttcgtatatatttgcttagtttgaccagtttctctttacataaaaatttggcagtgctaaatacaagaacagttaagtgacaactgcaaaagtgtgaatatgaaccacgcaatatcaattgtactggttgcactatgtgcctgcttacttgcatctccagtcccagagtattcgacaggcgtaaagaacgcggctcagtctggttcaaacaatattataaatactaatacaaaacaacaaccctcattggaatctaacaatacagatggtgacgatgatggtgaagatatggaaacagctgacatgattattttcagacctttgtttgtgtatagaaagaggacagcccagaagtatcgcgtcaacactgccaatagacgaaatgatagaccccagtatggatatggatattaaggataaggttataaaaaatacatgttattatttatacaccgatcaatggaaaataatactcttgccaaattttgtcaaattcaaaaaatatcgaa

SEQ ID NO: 12532 - DNA, 553 bp, Diabrotica virgifera
gcaatgtgttttgtgttagtggaatgttgtctaatattgaaaaaatttttagtgaatacgtcaaagtaaacaagaaaaagtatttgcgaaattttaaggtggaaaggtaatagtagataaatgaaaaaggacttgaagtattttaaattgactataaaatgtaatcgatggtacgtaatgagttagtgtaagactggtattcagaacttgaataattgagtaatttgtttgtattttttaaattttgggaaagaatgttatgaattacttagaatattacagtagatattactaaaatggttagtgtcagtcttataattaattgattctggagttttgttaatatgtaccatctcaaggaagagtcgttttttatagttgtcaacttgttccaaaatttttacattattaaatcaatttatgtcctgtatttaagtggtgatctactaaggcacaacagttttttttgatgttgcagtcacttttatgttgagtgacgcgttgcttaagccactgtttactttgaccaatataacaaccttgacattcaatg

SEQ ID NO: 12533 - DNA, 553 bp, Diabrotica virgifera
  SmartBlast Evalue=5E-73; Info=Calpain-7 n=1 Tax=Harpegnathos saltator RepID=E2BKM8_9HYME
tactgttgcttcctggaaaatcatatcctcccataaccttcatataagctttctctaaaagtgatatccaaaattcatttttattcgccgaatacgaacataacagcctgccatatctatctataggtaagctatcatctattatcactttccttgggattccattgatatgcagtttgatcatatacttcccaaacggattatgtataggtttattatcctttgtttgggggtagatgatagctgtaactagttttctcccaaaccttttttcataagaagcagcaactgccaaactggccacaaacgaacaatcagatatcacagtctgttttatacttaaataattcggagctgacccataaacaatgcaagggtctgaacatatttcctctggccttacaaacttggaaaaatcccttctttgtttgggggacaactgtaaatggccatgtttatctgagaaaggtattgaatattgaaacctttctgacaaatctatatccataaaaggaacataatttcttccattaatatttgaggtatgcaagag

SEQ ID NO: 12534 - DNA, 553 bp, Diabrotica virgifera
tagccgcaaatagcgctttattatcagaaactgaaaagaaagtagtgggttcgatatttagtcaatctgacggtcaatcgacaacttgtataagagatccttttaaacgtactaactttgctaattctgctattttgagaaaagaccctgatcttagagagtggtctgaaatttatggaaaatcatcaaggacctatgatgacaaagacagaaacagaaaagcgagatatgaagaagaagatcgcaacggaagatatcgttctgggtcaaagcaatctgaaacgatggctgagtcattttcaagacaggagtcgaatatgtatggggttatgacaagccctttgggatatgatcgtgcttctaattcatatggacagaaaccttcacgcgaaatgaatacttttggcggcgaaagaagtcaagttcatcgtgaaacccgcggaagaagccctttcacgagtaaaaaaagtcaactgcaccaagcagatcgtagacgacgtccagaaggcatcggaagaatgacatccgccgtgaaactcatggaagaagccct

SEQ ID NO: 12535 - DNA, 549 bp, Diabrotica virgifera
tcgttgaatgattcagctggtttgttagttttgatttattgattatgaagtcaacacgtacgtttttttattttctcgacatcaacttcgtaaatttccagtaagattctctcattcacttctttttatcatcaaatggtttacgatagtttataataagtttagtaaagggcttaagtgattactttttcagaattttaattataacgtgatttatttgttgttaaatttaggtgtactcatatgagtacaatgggcgcatgggagtatatttgatattttataattttgttacagatatggcatctgtagatgattttgagagtattggttcgaaatttctatgaaaagaaatacgaaggtttaccttcacccttagaagatattcgtgcttctaattcgcggtctgaggtggatattgttattatatctccagacccagatatgctaactgatgaggaagacattgggatgataaccttatgacggcaatttgacactacctaaagacttaggagaaattagggttcattgctcttcatattaaaa

SEQ ID NO: 12536 - DNA, 547 bp, Diabrotica virgifera
agcaaggttttatttcacttatatattatattattatattaattgttaaaatgtgtaccattttagttagacattttttacaagattgagtacatgaaagaaagtgtgagatagacattgaacgtggaaacaattattcttacacccaaaatacataatcaatcgcttctggctgaattatcttattaaatgtgccatatttaacttaaataataattatttgtaaacaatatgagtttcaatatttgttatctctttagaagatctaaagcggccactagatgctcaatattgttgtcaatatattgcataatatttaatattgtgcaatatattgatcgtctgtagatcacattaaacgattgcgcaatatattgcgtcaatcaaggggactttgcgtctaagcgtctgtggcctatattgcgcaatattggttcagtcacagaataaataaccacacagaagcgaaactcctgccgaaaacggtaacataattttcatgctcatgtgtcaacctaactggtgcaaccccacttttgcgactgac

SEQ ID NO: 12537 - DNA, 555 bp, Diabrotica virgifera
  SmartBlast Evalue=2E-11; Info=Protein cueball n=1 Tax= Drosophila ananassae RepID=CUE_DROAN
ttgatgtgcctttaaaataaattcgtgtccggtcttctttataactaagatttatcaaaaagctcaacgaatatgttaaaacacttaagttttgtattgtttattgtgggcatataccatacccaatgtcaaaaattggactgggatttggcagtagttgtacgtaacgaaatacaattactatcttcaactggatccgttttagaatctagaaaaccgttttctgcgttaagggcaattacgtacgatggtatcagggatcagttcgttgtcagcgacactgacagaaacaacgacacaatttttactgtccgcctatccaaagagactgctaccgaaccaataataacaagtcctcccggtgacgtacaggggctcgcaattgatcctgtagaagatgttttatattggacaaaagctctcgagaatacaataggctatgtgagattgaacagctccgagcacattcctgaagattttattacttttacagatacagccccccatgctattgccattgatgtttgcaatcggtacatttattatacaaatccc

SEQ ID NO: 12538 - DNA, 554 bp, Diabrotica virgifera
aatgtcaaagtctataatatatacaagtatattttatttaatagttattgaattagcaataacagaagctgctccacaatcggatattaaagaattacaaaacttgttgcaagcgctaagcgaaaattgtgcaagaaaagctaaaatttcacaacacttagcgacaaatattgaaaatggtatatttgaagacgatgctaagtcaaaagcttatgttgcgtgtaactggttggactcgactgtgatagacgagcagggaaatttaaatgaggatatactggatcacctttgtccaccatccaagaaaccccaattgacgaacttgattataaggtgtcataaagcacaaccaaaaaatcaatctgtcgaggacataatatacggaatgtcaaaatgtatatatcccgaagacacaacattatttaaaataaaataagcaaacgttcccatttctacgataggtaatgaaagttcccgtttctaagaagatagatttatttgtatgttgatatgtttttactctttataaataaatcaataaaagactaattgtt

SEQ ID NO: 12539 - DNA, 556 bp, Diabrotica virgifera
  SmartBlast Evalue=3E-69; Info="Replication factor C large subunit, putative n=1 Tax=Aedes aegypti RepID=Q17LI6_AEDAE"
gggcaattaggtgtgactcccaaataattttcttgcacaaaaagtggccccatgctgtaatcgtaaaagaataatctagctttatcagctacgctcatattcttcttttcagattcagtaaaaactgttctaaccacttcccacggacccagaacagtatcttttttagattgttttgctttgttctgaacttcctcgagagtgagattgtctttttgggccgaccacatggtgagatggttcaaagtttgccgaatatcacagcctgttccagatattatttctgacaaaatatttggagataactttagaccttctttgaaacaaatagacatcatagcaccccgaatttgctccaatctgggcttactaaatcgtaaatcaaaacaataattaactaatgatctcatcttttggtggttcctgtcattacacatacaaataatcggtacactggttgtttttatgagatttattagttcctggataccacccctatcttcatttcctgccataccatcaacttcatccataagaagaactcgctttttatcag

SEQ ID NO: 12540 - DNA, 555 bp, Diabrotica virgifera
ctaaataatttttgtatattagcagatgttttactcacttaaatatcagcaccatattaatacaatagataatccagcaatactcttgccagtatcacatttttgcagtagtgaatacacttgccttaatatgataaatgtaatatgtttttatggtatgtattagatcctttgacgtttaatgttctacataaaccttttataattgtcacagtttgaaaaaaatattcgaccttgatctcatagttcatatgaaccacatttttttatgaatatgtatttaaacgcctagagcgatgcggtgaacatatttcatcaatgataaatggacgcatatgtaaagtaactgattgtcggattgtctgatcataaatatatggatcatacataggatattaaaaaatgtaattaaaaaaacctgtttacacctaagctaaagcttgtatacatggttgagagtcttaagaacacgtcattaagaggttctgagaaagatgaatgaagaaatggaaaacttaaatacaatcaaaacaagaaaattggaatatctcggac

SEQ ID NO: 12541 - DNA, 551 bp, Diabrotica virgifera
  SmartBlast Evalue=2E-22; Info=Pol polyprotein n=1 Tax= Schistosoma mansoni RepID=Q6IFU2_SCHMA
agaaccatgtcactgttgctgcaccattcattcaaccgattcaaatcggactgaagccttaaacagtcgagtggattcctaatgtggcagtaaaacttaacatcgtcagcaaataaaagaaatttcgcatattggaaacagtcttttatatcgttaataaaaacattaaacaacaaaggtccaagatgagatccctgcggtacgcccgaagggacaactatttcgtaggaaaaatagctgtagagcttgacgatttgttttctgtccagaagatattccctaagccacagcagaagtgaaccatgtatccctaatcgctgcaatttttctaatagaatattgtgattaactctgtcgaaagccttagagaagtcggtgtacagggcgtccacctgtagtccttcgtccaaggcgttcagtaagaagttagtatatgtcagcaaattgagttcagttgacttatggcgcctgaaaccaaactgctgttccaatagaacaccgttcaaggagggtggtaaggaaatcgcagacaagtgattcgaatagtttag

SEQ ID NO: 12542 - DNA, 548 bp, Diabrotica virgifera
taaaccatgaagatcttcttcgtcctgaactgcgtttgcctgctattttcactggaataatattttgtagcaacctatatttgggacctctcattaaacgtcaaaaataatccagctatcttttcttgatgctttttataatcgcagtagtcttactgagacattctagtattgtggagtttcgaatcttctccatccaataaactcttaaaattcttctatgcatcacatttcgatagcctcaaggcgatttagatcgattttattcacagtccaagactcgacaccatacagtaagaccgagaacacgtagcgaagtagtcggttccttaatgccaattttaggtctctgttacataatactttggacatccttctaaaagcggctcttattcggggggttttaattaaatgatcaaattaccataacatagcaccagcaattactattttatctggtctctggcattgaattgaatagatggtaataaacagatttattgtgggactttttcatttattatgttccaaacttttaataattttcg

SEQ ID NO: 12543 - DNA, 552 bp, Diabrotica virgifera
catgtcttactttgtcaaatgctttttcaaaatcaacgtaacaaacacgcacgtccacattattatccatgtatctttgagctaacacattaaaagcaaataacgtctctctggttcctagtcctagacatccaggaccgagcaagctacaacaaagtcataagaagagtcaacaagataatgcaaataatggaaaccatcaaaacacgaaagctgcaatacctggaacaagtcatatatgtggtgagagacacgatacacttcgatttattatacaagggaagatccaaagcagaagaagtataggaagattttcatttctgcgtaacttgagggaatgttatggatgcacattaatcaaactattcagagcagtctcatccaagatcagaatagccataatgattgtcaaactccgtcccggagatggcacgtaaagaaaatactgaaagggcgtgatctagaaatctattataaattttcaaactttttcatttctcatcacgtatcattttcaatgacataaatcgattataaatcgctatatacatg

SEQ ID NO: 12544 - DNA, 553 bp, Diabrotica virgifera
gtttatcgctaaattactactcaacgaataattactaaaaatcgtgttagtatacatatataatttgtttattttgaaaattatttcaaaatgaggggcgtgtctgcattagtggcatttctctgcgtcgcccttttgataatccaaactatatcagcagcacctgcgccggatcctcatcattggagaggaggacatggttacggaggaggaggaaaaataatcataattaaaacaataggatatggcggtggtggatatggacatcatcaccacggcggtggggaggaggtggtggctttggattcggtggaggtggcggttccggatatggaaaataagacaaaacccgtgatgatatttcaattgaaagtgataaaaactgttcttactaataatatgttcatacctaattttatatatggactcttttttgtaattagaatatttatttgtagttgtttgatattgcggctaatactctaagtattacaggatgtgatcaaataaaaaatttatttcttattgtaataagaagatttaattaataaag

SEQ ID NO: 12545 - DNA, 542 bp, Diabrotica virgifera
caataccaggtataatctgcaccattctcaatggcgttataaatcttcgtgtgtttgctgagtttactattgcctacgatgtttgtcggtcctatgccattattttccattatctcactcccatattctccaggtcctctcctactgcatcgttccacctttttttagggcgtaaacacattgtttacaaggcgattgccgttattgcatataacatctgttcctcctagtctattggcctttatatacttacctcagtaaattttcctcttggaagagaaattttaactctatatgtctgcgcctccattcgcttgccacgctatctatgcaaggaccatatatcattcgaatgattcactagcaattcatttattacattttttattagcgtttaagtttcactggcatacgcgactggtcgtgttatgtttttgtatattgtaattcttgcactttatgaacgaagttttaaccttattagatgttgcattgcaaagaaagtttcccaccattagtcgcgtttcaacttcttgttctac

SEQ ID NO: 12546 - DNA, 551 bp, Diabrotica virgifera
  SmartBlast Evalue=3E-14; Info=Novel protein (Fragment) n=2 Tax= Danio rerio RepID=Q1LV84_DANRE
taaactcaaaacctaaaataaataaaaacttacattttttatgcggatttaagaagtaaatcgattcttctggccttagattttgcgaaatgatcgatcacttgctcgttgaaatttgtgatcgctcgaattaaagatttctccatagttaacatagctaaagcacacaacctgtcctctcccatagtatttcttaaaaacgtcttgatgcgttttaacgtagaaaagcaacgttcactttccacttactccctgcgtagatagtcacagtcacgaaaatgatacttacggtctaggtcaatgaccacgatttagtaccaacttgcataaatgcgtattttcgtgaacgttcggaatcccaatgctgtattctcacagtgaggtcaaataaatttcttgaccattgtgaatgttcgtatttagctgtttaagagtaatattgcggtgtagtttcagtcaaagataaatttggcttttcggtatcgtcaaacagctcgtatttcatgtttatttatcggtaatcttctggcggcatcttaatacaatacaat

SEQ ID NO: 12547 - DNA, 552 bp, Diabrotica virgifera
  SmartBlast Evalue=1E-10; Info=10G08 n=1 Tax=Ips pini RepID= Q5FYF7_IPSPI
tcactggtagagtaaaagcacgaaaaatttcgtgaggcaggttaaattttaaccttttgtcagtcaagcatatccggctacaatgaataaaattaatgagttcaaggagcttattagggactatattgggcctagtaagagtgtggtagatacaaaagtgagcaatgttacagcaccgggagagaattacatgagtgaaattattcggattaacgtactctaaaaaatgatactacggggaaagaagaagagttgtccatggtggcgaaattggtgattgatgctgagattgttaatggaggaaccacagccataatcaccaagaatgaagtggtgttttataaagaagtgattcctgttatacaggaatttcagagaagacataatttgccggttctagatttatttccaaagtttatagcgggtaggcttaatctcaacggtagcgatgtagctgacacagatgctgttttgattttggaggatttatcaccggcaggatttaaaaatttggaccgcatgaaaggatttgatttaaatggagcgaagtta

SEQ ID NO: 12548 - DNA, 554 bp, Diabrotica virgifera
  SmartBlast Evalue=2E-10; Info=Protein pigeon n=1 Tax=Camponotus floridanus RepID=E1ZYH0_9HYME
cgctagtgagcgattccttttttattgtgtcatcagaaggttttatttggtattggtaaataccttcttgatgtataagaagtagaaacttcagagattgagtctccacaggtgaattgaaattcaaaaactgaacaaacgtttggttttttgacccatttttgatcacaaaagcattttccagcaaatcatctatcttatacaagtaacttctatatatcagttcttcagtttcttcgcatttttctttcaaaacaaatagtaagaccgtccgtgctgcattcatggaggcttgaacacaatccaccttcttttcaaaggagtaaagtggggttaaggtattttcttcataattgtattctcctatgcaagtttgggatttgttttcatcggggttggtttgaacccagctaaaagaaatgattcatctcgttcttgaccaagcagccgccattcgttgtagctatcgacattattttctgtggaaattatcgataccagtttggaagcgaggttatctacggacaccatcgtcaacctctcgattcgcttca

SEQ ID NO: 12549 - DNA, 553 bp, Diabrotica virgifera
cattacctggcacgtatcagccttgcacatcatcatcccctatatttgtgaaagtgtagaaaaaatttgaaaaaaaaacttattttaaacttttaaaattttagaaaaaatttagaaacaaagaatctacatatccctctttcactacagtgtttataatccggagcaaagcacattaccatttttattattcaaaatacaatggttcacaaaagttcctaacatttgcttggtgataatatcactaaaaaaactatatttcatagaaatttaagaccgaattatggtggtattatcaaaaagcactatacgtaaacagaaaaagcaacagaggaagcaaaatttcaactttatgggaattgaaaaggtttgagattgtatgtattgatacattagcacaaaattaatagtaaattttaaataatcccttgtttttgtatcacacataaagcatacacataagatctttccctgcgacgtcagagtgtactaccacgtgacccataatcatagttaacactcccagcggatatgacacatctttcggtttacc

SEQ ID NO: 12550 - DNA, 545 bp, Diabrotica virgifera
  SmartBlast Evalue=2E-19; Info=Chemosensory protein 5 n=2 Tax= Tribolium castaneum RepID=Q0MRL8_TRICA
tatttatattttaaatttattttatttattaaaataatcgtttatacaaaaactaaatcctacaaaatgaaacttttcttaaaaaattaattatttagaatcttcatagtcttcatcgtagtcttcatcaattccatttgctttacgagcttccccagttggatcatatttagtgcacagatcgaggaaaagatccctttccttgagtagaagatgagatagtattagtcctgcttgtttcttctgtttttcattgcatctagcgcacttgttggagattgcatcaggaatgatatctttcaaaaactttccttctggcggacatgtcaacctgtccatcaaacagtccacgtatctcctgaccaacctggtgctgtccaaaatcttcgttacatcgaaattgtcatactttgttgagtaaccttgaagcttcgttgtcgtttcaacgacagctccattaatcccaattaccgataaaacaataaataaacatgatattgttaaatgtgccatgttttaatcttgacataaaaattttaacttaa

SEQ ID NO: 12551 - DNA, 554 bp, Diabrotica virgifera
  SmartBlast Evalue=1E-17; Info=Endonuclease-reverse transcriptase n=1 Tax=Bombyx mori RepID=D5LB38_BOMMO
agttttcttctgtgtccatgctattttaagcatcctcctatggcaccacatttcaaaggactatagcttatttatgtgttcttgctttaatgtccagctttaaagtccatattgcagtatcgaaaacacatagcatctcaaaactcttactctcagttctaatctaagatctttgtttcagagaattgtattcatttttacaaacacatttcttgctatgtacatcctcgccattatttctgttgtttgatcattattgtctgaaatacaggttcctaggtatttgtatttgtaaaccctttctatgggtagatttcccaaatgtatgtttgtatatttgttttctttgttattaccatgtatttggtcttttatattaatttttaatccatatttttctacagaaactgtttgttttgtttagcagtaattgtagttgttcagcagagcttgccataatcacggtgtcatctgcatatcttatgttgttaatagatctttcgttaattattattccttcactttgagatactactgaaactagatactaatct

SEQ ID NO: 12552 - DNA, 554 bp, Diabrotica virgifera
  SmartBlast Evalue=3E-44; Info=Mediator of RNA polymerase II transcription subunit 23 n=3 Tax=Aculeata RepID=E2APD6_9HYME
aatgaagttgagtttgattagcctgcggtactgcagccaaagaatgcagatgactcaacaactgtactctatagtggggatgtatatggtgcatcctgtagctgaacatctccagtagagtatacaaagttccccaagcatgaaacttatacacctgcggtaatagctggttcagaaaccctttgattcccagagattcaatttctgtgtagactagaagcctactgtaggtttctactagagctggggaaagcggcattccagatttggcctgggatgacttgatgacgtgtgttactatgctagtaaatgagctacagaaggctttcccagactgcccccattggagactgtctgccctgttttcagactatgtagaaagttttagagcttgtgcccaaatggtatctattattggacagactgaaatgcggccagttgttgaacatagcgggtgtcctgagcatctggtgaatccttggaaattggatccacaaaccctaagatttgctgtaaaaggaactttaccgtactccccagaactactagaaaag

SEQ ID NO: 12553 - DNA, 550 bp, Diabrotica virgifera
ttccttattgagtgtccagctttcgacactgttggaatattgaaaacataacacctaattattctaattacacttctttacgatcgagagtgaaattttataattccctgacgtatgcgcacacagacagtatgtagttcgttgctaatctttcaagataggtatgtatatatcagcgcaaatacctaagtcattaaaagaatatattagcgtttttagtaaatgtattatttattataatttttgtgtctttggatttgtcttcctcggtagtaagataataaaatacctaggtataacatttttatacttcacttgatctatttgtcatcgtgttgtgtaattatatccgaaacgtcacttccaagggtctcgatctctggccgaatgctataccaaatacgctacgaggactgtgtctgtatcggttcggacgtacctaatgacaattcacggtaacaaacagactggaaggtgaagtataataaatatacaataaaatgttttaataatacttatcttatcctgaggaagacaaatccaaggacac

SEQ ID NO: 12554 - DNA, 550 bp, Diabrotica virgifera
gaaaagtaacgataagggcgataacaaaaaagaaagttatctactctaaaccacaacaatgcacatcaaacattgtgaacaattgtttttatagttatttcaagcgatattttgcatataatttaaaataagatattatttatttaaaataaagtattttacacattttcttgtcattgtttcttttttttttgtataataaacgttacttacaaggaattacttttaatttaattttgtaaaagcttctagttaatatattttcctttttgactcaaaaaatactataaattttacttgaatttgtaatttaaaatcgtgtttcgaaagcagtagtccgaaagtcagagtaccgacgtcatcaattgcgacgttgcctttttctcttcatggcttgtaaagtaaaggtggctatggtcggaacaatgacactttgagattgtgctctgacgtttgacgtgaacgtatctttatttattttgaaaaccgttgtatttcgagaagtgttctaggtatttttcgttagtgtttaaaaaaagtgacataactc

SEQ ID NO: 12555 - DNA, 547 bp, Diabrotica virgifera
gccgcgctatgaggtgtaagatcggctaacagtcaagtaatatcgaggtaaagacaccgatcgactgctctcgtgttatatttctgaaatattagtttttaatgtttttttttctcatttagtacaaaaaatagaagacaaagtaaatagaatgagaggtatacgaggtacagtatgatgatttaatataagaattatataaaattttattaggatcttcaaaaatgaaaaatgaagataacgtatatatacatagaaattataatttacatggtgaaaatatcttggccaaaaataaactacaaaaacttccataagctgaaattgttccttttgagctcttctatcattattgttaaccaaagtataaatgttctatggctcaactttgcttgaacccctcacaaacaaatcaatgtccaattttttcaagaaaattataacttcaaacggatacaactctaaaacaaatgaagacaaagtaatttaacaaactttgtttgaaagcctattaattaagctttaaaacgagaccctccaatgctca

SEQ ID NO: 12556 - DNA, 553 bp, Diabrotica virgifera
  SmartBlast Evalue=2E-39; Info=WD repeat-containing protein 33 n= 1 Tax=Camponotus floridanus RepID=E2AQ06_9HYME
aaggctggtaactggtgctagttcaggagaattcacattatggaatggattaacatttaatttcgaaactatcttacaggcacatgacagtccagtcaggacgatggtatggagtcacaatgacagctggatgataacaggtgaccattctggttatgtcaaatattggcagtcgaacatgaacaatgtgaagatgttccaagcgcacaaagaagcacttcgaggcataaggtatctacaacttctctccgtaattataaaacttgtacacttacttatattttactttatcaataaaagatccctccttctccctacattagtgcaaaataaagaaatcaattttaaataacgccatcaatattttccaaacaatacattgcatttcaaattgtctagttggaaacattgtacttaactgactctattagagtttctgaatagaccatacaaaactaattcccttaaagtaagatggtgaatggacattgattccgaaggcaacagttcccaaacaaagacacacacaaagtgatttatttgatagcaaatg

SEQ ID NO: 12557 - DNA, 554 bp, Diabrotica virgifera
  SmartBlast Evalue=5E-32; Info=Monocarboxylate transporter 3 n=1 Tax=Culex quinquefasciatus RepID=B0WYT3_CULQU
gaggcgtaaaattgcctcgacgtatcgagagtattatttcgcgatatcatgggtggattgataattgttcgggaatttttctgtgttcgcagccctttaaaagggaccactaaggaataggtgcgtgacgtcattgcgttctttgtggatattttgttgtggaaatacaagtgcgagacgtttgctcgatcggcgcgcttttcagttcaaaagtagttttatttctggaaattttcaaaataatctaggaaaatgagttccgcggaaaccaagacaaacaatagaaaaattaataggactgatagtgaagtggcatgtgaagaagcagcccgtttaaccgcagaacaacaagaagatgaattcgaggatgagtactgctattaccacgatcttccgccccctcccgacggggggtacggatgggtcgtggtattcgcttcgttcatgtgtaacatgatcgtggacggtatagcctatacgtttggtattttcctctccgatatagtattttattatgatgaaactaaaggaagaacggcctgggtgggatccct

SEQ ID NO: 12558 - DNA, 548 bp, Diabrotica virgifera
gttaggaaaaacctataaaaatatcatattttgttttttcctattatcgaagataatcttgttgtaaaatgtgaaggtgtattttacaattaaacattgaaaacttttgtcctcaattcttccacaaaatttgttagttaatgtcaatacagctgtttcggtagagtatctttctcaagtgatgtattttataggttgtgtacactttataggttgaggagaggagagctgtttgactcaaattggtcattcacaattatatttgtatcttttaatttgttaatttccatagattctaataaaaatagcttaaccatgtaagactcgcaccttaaaatcattgaaataaaattactaaaaattcgtgtgagtgttttttaagcgactatgaacgcatcagtggggttggtatatgcaatttttgtatcaaaagtggagtttgaaaatgtaagtaacattgtacattaggggtataatgagaacgctgctcccaagcaactaagagtgtgaggttaaaatttttgtaacgtgcaaacgaaggatcacca

SEQ ID NO: 12559 - DNA, 554 bp, Diabrotica virgifera
gcctaccacctaattattttgaagattttggcgtaccaccaaacatcggtttggggggagggggtatggaatggaaggaagctccccctatctttttagaaaacatattggctatcagaaatatgtccattggcttgttttaatttataatacagtagactctctttataacgaacacgggtattacaaggtttcgcttataacgaggtacactagatgtctcataacatttctattgaactataacacctctataacgaggcatatttggttataacgaggaaaaatgaaatcgaagaatatgtttttttacctgtttttggcatggtgatggctataaataaatatcccaactacctgtatacaggaatgcccaacatctgtatgttttagtgatgtaacgaatattcgtattcgcattcgcgaatattcgcattcgcatccgcattcgcgaagtttgtgcgattgttttgcgaatatgaatatcagaaaaaaaaccatttgaagataatattaggttaataaaatcaaaatctattcacttctcaacttct

SEQ ID NO: 12560 - DNA, 554 bp, Diabrotica virgifera
  SmartBlast Evalue=7E-31; Info=Probable dynactin subunit 2 n=1 Tax=Camponotus floridanus RepID=E2AM04_9HYME
gaattgaaaatgttgtaggatcacctagtgataagttagctagattgacagctggaaactctaaaagtagtttatatgaatgggctgaacacttgagtgctacagcaagtcttttagactctgctcaattggatcacattgaaggcagactaggagcgctggcgcaaaagctggagagtatcgcaagaaaaaaagaaagaggtacagccagatgaagagaaagacagcatgattttggagctctatgatctggtaaaaaatacagaaggtattacacagttgcttccacaaactatagaacgactaaaatctttggagcagttacataataaagctgccgattttgctaagactctgacccaaatagaagtaacacaggcagaaatgatgagcaacgtgcagaacaacaaaatgcttttgcagggcgttcaagaaagttttgcagtgaatcttaatgaaattaacgctacagtagttagtttagatgctagaattaaagctctcaaaaataaataaatttttaaattactaactaaattaattacaagaaaaga

SEQ ID NO: 12561 - DNA, 546 bp, Diabrotica virgifera
attagttacttcgagttgtaatgggttgaatggcacaatccctacaattttgagaggagcatggttctcatgggaattaggcagaaatactttaacagaattagatgctacatcaatgactgatagaggaacctgcatagatgttaaaaatcagtttcatgtaaactataccttagtatttcacaaggacaattgttttacctgcgttaagctgttggtgagaacagttaatgttttggagaaattggaaacttcttgcattagtcttcctccttcagtagaagcttcagtagaaacagtttgtagaggattagatgtaaatcaacaactaattacactgttttctgaaaactacataccagttaactgtcgttcgtcactggaaggtgtctggaactttgcttaccagaatcgttttaaatttactggagaatgttccaatcctgatgcccaaattcggtcctgccaaactgcaggctcccaattcttgattaccaatcagaagttcaatattacttataagaagtgtgatggcatgactggcac

SEQ ID NO: 12562 - DNA, 554 bp, Diabrotica virgifera
gaaaaagtgcgacatgctgggagaaatctggcaacactgccttacataacaactctccatatctcttgccccaccagtttcgactaactgcgttgctcagtgtcggcctagcagtcttcgaagatggaggtcccggtcactgttgccgcaatcgttgtttttacatgcaaaatattcatcgtcagttcatatctgttaaacatgtttgcaaattgtgtagagaattcagtgaaggccgaacggaaattcacgatttagatcggagcggaaggtcttcagattcatcgtggatttccgttgttgaacaaatatgcacttttcccgtaagctttgattaaccacggttcttagacatactacggttgcccagatcgacggtggtggggagacttcaatttttgactttacgtcacaaaagtacagaatcccatatttttaaatgattttcgatcattgaatgtgtgttattgacgttattgtgtatataagcgtagtatttgtgttattattaaataataagacaaataaaacacatttattttgtggtgaatcgt

SEQ ID NO: 12563 - DNA, 552 bp, Diabrotica virgifera
  SmartBlast Evalue=2E-60; Info=Chloride channel protein 2 n=1 Tax=Harpegnathos saltator RepID=E2C3F6_9HYME
cttcaggtatgcggtacggtggtaaagtagctaaaataatccctggtggatacgccactgtaggagcagcagccttcagtggcgccgtaacgcacaccatttctgtatctgtgatagtttttgaaatgactggacaaattactcatattataccgataatgatatcagtgttgatatctaacgcaattgctagtcttttagcgccaagtatttatgacagtatcatactcattaagaaattaccgtatctaccagatttgctaccaagcagtagcggtatttataacatttacgtagaagactttatggttagggatataaaatatatttactacggaatgacatacgaacaattaaaagcaattttaaaaggaaataaaagacttcagagttttccgttagtggacaaacccgacagtatggttttactaggttcgataagaagattgcatctgatacagttaatagaaaagcaaataggaagagaacgtagaatgcaggttgctgcaataagacaaaaggagccaagaaaaagagagagaagaagagaag

SEQ ID NO: 12564 - DNA, 551 bp, Diabrotica virgifera
agatctcgtacaccaagacggaggcgtgacagaagccgttcaagagatcgacctagaagaagaagatctcttagtagagattcatcacgcagcccaagaaaatcgaggtccaacggttccttatcccgatctgaatctcccgattcgatcaaacacaatttattagtgccaccgcccatgaataatcgtccgcccagtccaccacaaaatatgcacaatccacctcctcagttgctacaacatcctccgccgtctgtaactcagaaccctcccccaaatgttttaccgcaaccatcttctcaaccgcccatttttcaaaacaataacctacagcagcgaccgccaagtgtcttgccgatgagacaaccagctcctcttctaaataatacaaatcctcctcaaagacctccacatatgcaaggtcctcctcttatgcaaggtgttccactccaacaacaaagaccaccagtagctatccccggaattccacaaagacccatgcaaggacctcctccaaatatccatttgcaaaacttacagcaacctcctcc

SEQ ID NO: 12565 - DNA, 554 bp, Diabrotica virgifera
  SmartBlast Evalue=1E-30; Info="Autocrine motility factor receptor, isoform 2 n=1 Tax=Harpegnathos saltator RepID=E2BPI8_ 9HYME"
agttcctgtgcttcttgaatttgctttgtatgtcatgaatcaataatctgagctgcatacagatgacgaggctggccatggacaagaaaatattgctcaagaaaagcatgtgaaggtggtgaatcagatcaatgagaagtgcagtgaggtcgaagccaagttcgaagtaatacgacacggggccccgtttgtctaaggctttgctgtcctcaccggtggtgggggtattgttttcgttccgcatgtcgtacagatggaaagcgtaccggatgatcacgtggagggtgcgaatggccaagaggagtacctcgtagaacataaagaagaaggtattgagtccgccgaagaatccgacgaaaatagacaccacaaacatgaagccggagagggcaaatatagcagccaatagagccatcagcttgacgtggctccaaaatggtgttctgggggaaaacgacaaatattcaaacctgtcttggctcaactgcgacagcagatgcaaaaagccgagcaaagaaagccaggaacaccagagaagcacctcgtcgatgtac

SEQ ID NO: 12566 - DNA, 553 bp, Diabrotica virgifera
  SmartBlast Evalue=1E-43; Info=Collagen alpha-1(IV) chain n=1 Tax=Camponotus floridanus RepID=E2APL4_9HYME
gtttttctggagttaacggtactaagggagaaagaggtatggacgggtttaacggacgtgcaggaagacctggtgcaccaggagatatgggttatccaggaatgataggaatgcctggtgtcagaggtcaaaaaggtaacagaggtccagccggtcgtcaagcttttggtattgcagaaaaaggagatattggtgactatggcatgactggaattcagggtctaaaaggtattcaaggagatataggatatccagggccaacaggttcaagaggtgaagttggtgcgattggtttaccaggcttatcaggagaaccaggttatcccggtctcccaggcgatagaggagacattggttttgaaggtgcgccaggtatacctggacaaaacgcagaaccaggggaaagagggcggcctggattcgatggtagtcccggacgtcccggttttcctggacaaaaaggtgctcctggaaaattcggacctgatggacaaatgggacgagctggtttaccgggattatcattaaatggtgtcaaaggagaaagaggaga

SEQ ID NO: 12567 - DNA, 553 bp, Diabrotica virgifera
  SmartBlast Evalue=2E-18; Info=PAXIP1-associated protein 1 n=1 Tax=Camponotus floridanus RepID=E2A3W1_9HYME
aacaaataataaacaacattatttttaataaataaaaataaattcaatttgttatgaaatggaagatgattgggatattgaatgttcagatgatgaacttaaggactgcaaaggtccttgggaacccaaacctgaagaaatagatcggttatacactttattggacaatggagagatacaagaattaatctggaaatgtcctggatatcgttccccttctccggaatttacggaagaaccggatcaggaagacgaaaataaagaagaagaagaaccaactgattttgattttatggacgaagtgtcatcacctaaattaaaaatacggaataagggagaggagacgcttaaaggaagtgccaaaaagaaaacaacttctctggatagcgttttaaataatatgaggagacataatttattaccaaataaaaataaatcttaagcgtgatgtactcttattatgtagttaatattggtcaattttgtataggtagtatctacaagtacatataatgttaaatcatattaatttgtaattttgatgtgaactatt

SEQ ID NO: 12568 - DNA, 548 bp, Diabrotica virgifera
  SmartBlast Evalue=3E-20; Info=Histone-lysine N- methyltransferase SETMAR (Fragment) n=2 Tax=Harpegnathos saltator RepID=E2B2J5_9HYME
aaaggcaaaaataataaaatatttacactcacaaaatgtttactgtattaaggcgcccagttttaatgtctacaaaatttacacaccatcacggtgctatagccttgggccacaatcatctcgagcattctgtgccattctgttttgtcacttgtttttcagttggcagcagattggcgtttatttttcggtccgtaaattatggatccaacgggaaaccaacttcgtaacacccagttcttcatgtaggatcttttggatcgaggtctttgaaatgctcaaaaatgcccctatcttccggtatgttacacggcggtcattcttaattaactgacgttttgggtggacctgccctggattcgtcgctgagactggagcgatcacgttgaaattcgtaataccagtggaaaatagttgcttggtgtgatgctttattcccaaagacagaaaccattttagcaaaacattgctgttgggataatcctctccgaaaattgtaaaaaattattgctcgaaaatgttctcggctaagatccatttttcgaccg

SEQ ID NO: 12569 - DNA, 553 bp, Diabrotica virgifera
  SmartBlast Evalue=1E-17; Info=Mariner transposase n=1 Tax= Bombyx mori RepID=Q1HPJ3_BOMMO
tgttaccagtttttatactttatgtttcttattatatctttttctttgggttgggaaattgaagtgcttatttgccttcgcataaaaagaaacataaaaactggtgacatcggcgaagagtaacatttggcgcccaacgtgggacccgaactatctactttggagagtaaagggaggaaaacttttcaagaatataaaaccgcgataccctgaggcccaatctgattattaaaaatcgtttctagttgtttagcgacttttaacccgtaacatcgcctttgtgtattgcttggtcggagtttcgcgataacttctggtaaacaaacggttatataccaatcagaagtaactgttcttcgatcttctaaagcaagtgttgccacatgaccagattttgacacaaaagttgcgaccattttgtttgacacacttctagaacagatcacttattggtttttccgtagcatgaaacaaccacacagcagatttgcgtttattttctagtttgtaagagtaaatcgaagtttctttgacactgacaatactgtaaacg

SEQ ID NO: 12570 - DNA, 551 bp, Diabrotica virgifera
  SmartBlast Evalue=3E-78; Info="Na[+]-driven anion exchanger 1, isoform C n=3 Tax=melanogaster group RepID=Q8IPI3_DROME"
tatgggacttccttggttcgtagcagcgactgtgctctccataacccacgtccactctttgaaattggaaacagaatgcgccgctccaggtgacaagccacaatttttgggggttagagagcagagagcgacgcatattttgatatttttgtccatgggattatcggtattcttgacaccaatgttgggacatatacctatgcctgtattatttggagtattcctgtatatgggaatatcttctctaaaaggactgcaatttttcgatagaatactgattatgtttatgccaaataaatatcaacctgattacatgtttttaagacaggtgccaataaagaaagtacacttgttcactattattcaattcacctgcttgatttgcctctggatgataaaatctttcagccaaacatcaattctctttcctttgatgttagtggttatgatcggcatcagaaatcattggactggatatttacaagaagggaactgaggattttagacgatgtcatgccggaaaacaataagagacaccaaatggaggaggt

SEQ ID NO: 12571 - DNA, 552 bp, Diabrotica virgifera
aaaagtgtgaaatgacgcatgttacatgattccggcgattgttgcgtatgtatgggcggttgtacgtaagtaataccttctgaatatggtacttcaaaaagaaaacgtattggtaatcagcaaattcaaaagtcccttataatataaaatttcaaaaattatacgtttaaaataaaaattttgaatttctttcggccatccgaaaacacttaggtactaaagtaattccgaaatatattctgaacaatatacgcttttaaaggttcatgaccaccttttcagcatctgcaccacagtgtgaaagtaaaaaatatcgataccgtttttgatgaattaaataaatgaatatgagttttgtgtataagacttaaatatttttgaagtaattaatatgcattgccaagtactggattttatacctatgtgaacacgagtacaagtattatatcgctaccttggaagaagaccgtcatacatcaaaatgttacagaaatggccctttaaaaatatcataacactttatagtaggggaggcaaggacgctaaatttgc

SEQ ID NO: 12572 - DNA, 553 bp, Diabrotica virgifera
  SmartBlast Evalue=7E-24; Info=Endonuclease-reverse transcriptase n=1 Tax=Bombyx mori RepID=D7F170_BOMMO
gttgtcttactaatgtgtttttctttcaagaatttttggtagttccaataggttttattacccagtaggatgcgtccatttatttcatccgttctatcatttctgccattcaccatcactcccaaatatttgaaacggtgtactctttcaaatgaatatactccaagcttaatttctttctcgatgttcgtattctctcttgagcacttgaggtatttcgttttgctttggtttattactagccctctcttctttgcttctttatctagtattaatattatattctgcatggtttttaaatctctagtaacgagtgcaatatcgtctgcatacgctatcagttgggctgaagattcgataattgttccccaaattttggctgctcttactgcaccctctatggcaatgttaaataatgttgttgatagggagtctccctgtctgacacctacctctatttgtacttcatctgacgggccttcccttgttaagattcgtactttggattccttcatcgtcattttcgtgagacttactaagtttttacttagaa

SEQ ID NO: 12573 - DNA, 553 bp, Diabrotica virgifera
gaaaacttcagagtaaataatatattaatacaaacaactattaataacatttgtatcatttgggaatatactaataataaaaattacatatgaaacaaatactttaaaaataatttcatagataacatatgaacaactagaaatattatatgatcactttttttaacatagtacaacgaaaattggttaacaatgctaaagatcgagttggacaatagtatttgatcaagtgactgaaggtatgagtttgaatttcgcataaaaatgtgaaatgttgtagactgtacatagggaacaaaagaaaagctataaagaacacagaaaacgtgaaaaactaaaaaagatggatgaaatctgatggttgccttcaacattgaaataatgtaatcttgggattgtacgaatactgtacaccacatctcaaagaaatcagaacaggaactgtatacgagattcgataacgtatatcgaaaaccagtcacttgacttgtcaaatatttcagagcaaacgagaaaatattcgcgaaatggaaatactctaataaacccccaa

SEQ ID NO: 12574 - DNA, 552 bp, Diabrotica virgifera
caacgcgacaacagatatccttgagcatttttttaagtcacttcaagtgataccgcgaggacaacagacatactcacataagttgcagaatattgactagagacaatctctgaaacggtattttcaagatgtgtaatttaaaagtgatggtagttcttgtttttgtgtcggctggagctatatctacaggtgcagatatggatgaagttagtgaacacatcaaaagggtttccaccagcaagtatccctgtcgataccctcaacccagagtgatgtacctcagggaaattattggggacgagctgtgggaaaacaagtacaagaatgacatgagagatatacgtccattccacacagttcttcacagatgcgaaggctccggatgttgcccgaaatacaatcaaagatgcaagcctgctgataccgaaactgtaacactgaaatatgtggtgataaccaaacagaaattcgtggagttcccagcagaaaatcacacttcgtgtcattgcgaagaaatcagcgataatcttataaaatagaagaaactacata

SEQ ID NO: 12575 - DNA, 552 bp, Diabrotica virgifera
gatagcttaggaaatagtatcaagagtaaaagtcttttggttaaggctgctcattcatttaatacactacaaaaaataaggaaatttcatgtttttagatatttcttggttaagactcacaccccttttcgaatatcacccacacattgaaagtattgtgttattaaatacacaaccataataacatacttctttttcatgtaccatgacctttcagaacattggttaccattatagctatcttaattttattcactgccaactctaaataccatgcttgtatcaatactataccaaatccatacgttctttaaccatgaagtctttcttcgtcctgaactgcgtttgtctgctattttcccttccataatatcttggagaaacctatatttgagacctatcatgacatgttcgaagtactccagctttttcttcttaatgcttttttctttctacaaaaaaaaacgcgtgtataataatgattatctcacttgtagataaaatgataggaaagtatggattttttatacaattttttaggcatacgtgttg

SEQ ID NO: 12576 - DNA, 551 bp, Diabrotica virgifera
  SmartBlast Evalue=5E-39; Info="Bullous pemphigoid antigen 1, isoforms 6/9/10 n=1 Tax=Camponotus floridanus RepID=E2AVR2_ 9HYME"
atctagaaactttagtttccattttgctcaaccaatcattaactttctgtcgtaaagcttcataattgctttgttgttctgcacgtaacttggaaagccgtgctttttcttcaagaagattgtccagttgcttccattgattttctaaagccttgacacggtctctgacattcgtggtgtcagttacatcacgtttgttgaggaggtctttaccaattttaactgtatcttcgtacatagttctgttgtcttctctattggctacaagtttcttcatttgtttggagtattcttccattggtagcctgttcatgtctttagattctataatttctatgacgctgttgtaccattcatcgaatttggttgcttgattgttaaacacggttaaatcttggttgattccttcaaggaatactcctcgctgctgtgtcttatcaaataattttcgaatctaactttaacatcgttcaatttgccttcaatttttttagctacgcgagcgttgctggttgacatttatcagttcgttggcagacatgtagacgttg

SEQ ID NO: 12577 - DNA, 553 bp, Diabrotica virgifera
  SmartBlast Evalue=3E-52; Info=BTB/POZ domain-containing protein 10 n=1 Tax=Camponotus floridanus RepID=E2A476_9HYME
tggctccttcattggatagctcatgtaacagtccacgtaagttttggcatttaacagtgttagcatcgaatggtactagtaaataatcacaggcttctcgcagctcctgcacagaaaccgacggtgggcacttaatcagacctcctttataatattccaagatagccctaaacacagaagcaggaataccatcagcaacttcgtactcgcctctttcattagtatgggtgaattccaacgaagagctgaacatcctcccgagcatggtgtttggatgggctgtaaatatcattggatctacgacgaacctagtattatccaccactaaagtgaccctgtcttcggcagtcactattccactgttcggttggggagaacattgactcttcgggttcgttggttgtaggactgctctggacctcattctattcttgaaaacccttctcctgcggtcatctgtgtagtcttcagtatcgctgcttgtatcattgttgggatatgggtgacgatcactcgctccagccattttcacttttggcagtaaacacttcac

SEQ ID NO: 12578 - DNA, 553 bp, Diabrotica virgifera
  SmartBlast Evalue=1E-69; Info=Mitochondrial translation elongation factor Tu n=1 Tax=Glossina morsitans morsitans RepID= D3TLT5_GLOMM
attttttcataacaccccgaaatattgttccaacaacaacagttcctctaccaggaactgtaaatgcattgtctatgggtagcataaaaggtgatgtaacatctctttgaggatctggtatataactatctaaacaagcaataagttctttaattgcaggtataccaaattttgtttctttatcattcatagcctctaatgcagatccaaatataaatggcgtattggtgccatcaaaaccaaaatcctcaagtagctctctaatttccagttccactagatccagtatctcttgatcaactaagtcagctttgtttacaaacacaatgacttttgttactccaacttgtttagccaataataagtgttccctagtttgtggcatttgtccatcagtcgcagctacaactaatatagcaccatccatctgagacacaccagaaatcatattttttataaaatctgcatgtcctgggcaatctgtatgagcataacttctctttttcgtactgtaaccaatgtgagctgcattaattgtaatacctcttgcttt

SEQ ID NO: 12579 - DNA, 549 bp, Diabrotica virgifera
  SmartBlast Evalue=3E-46; Info=Xanthine dehydrogenase n=1 Tax= Harpegnathos saltator RepID=E2BWN6_9HYME
actgtgtgaaaaatatgacaaacagtacttgatattcaagggtgagaatgtaacatggtttcggcctacaaccttaaatgaactcctcgatctcaaagatcgctacccagctgctaagcttgtagtaggaaatacagaagtaggtattgaaaccaagttcaagaagatggtttatcctgtaatgattcaaccagtgcagataccggaactcagtacgatagaaccaacgcttaaaggtgtccgaatagggcatcagcaacgttggtagaaaatcgagcaatatttaaaaaatcagattaaagttcaacctgaacacaaaaccagaatattcaaatctatgctagagatcatgaattggtctggtggtaaacaaatacgaagtgtaggagctttgggtagcaacatcatgactggtagtcccatatcagatatgattccaattttaatggccgccaaagcaaagctagagcttgttagcaaacaatacgggacgtagaaaagttaattttggtacaacaatttttttgttcggctatagaaaaagtattc

SEQ ID NO: 12580 - DNA, 548 bp, Diabrotica virgifera
gggttgtgattgcagatagtttttactaaatcccgaatttatcatttcgatatgttaaaagtgccatcttttggcctttataaaaacgaaaacttctataaaacctctttttacgtataaatgttgttctactgcttggtttactcgtatttttgaatatttagtgatatctttatagtattcagaagatggaaattattcattcttttcgtgttatgattatttgaatatttctcagtatttccatatttcctaaccaatctactcttcgggactttctaaagcgtctcatctttatctcgtgtaatatttttctcaccccaaattctttattaataccttaattgtagaattgcagctaaataacgttaaaaactactcttttacactttgagtgctctagtcttttgtacttagtttggattctttttggtcttgtctctttttttttcaatttttaagatttgtcttgtttacctcgttttatctttttttccattatataatcgtatttactttatttaagaaatcatttttttatcgcggcc

SEQ ID NO: 12581 - DNA, 551 bp, Diabrotica virgifera
agatacatatactggcagtgacatttagttaccttttcttgattatttaaactaaaaaataagcatagatacaataatttctttgtgatattatttattattaaatttactaattaaactaactaaatatatacaagcaaataaaaatttaggttataaagtaaaaaaaaaataacgaggatattttcatttctaagtttgttttgcaacatatgtttgcccccaaagattatattaacagtcttctatgttctgactttcttcctacttaatagtgtagtctacaaatgtgatacttgactcacgaggaaaaataatttccctttgtcgtttgtataccattaatcacataaaaatagttaaaatcctttataaaaggtacatttaatttaaaaaaaaccctttacgggttacatcacacaacgttttagaactaaagagtccatcatcagtgatgtaacaggttttacatgcttgagcgaccaacatctaggggtgaaaaccctttaaatgttatacagttgtagaaagtttaaatgtatatattaaat

SEQ ID NO: 12582 - DNA, 541 bp, Diabrotica virgifera
ctcccctcaaacagtgtcacaactaaaaaaaaacggttttattgcaccaaaagtttaataacactacaaaatcctatctcaaaaagtgttaagtctatggttaaagtatttgtcgttagacgacactagcgtcattatatggttaaccaaaattaacgatgaaccgaacagagttacatagtcacatatcggcttgcgcaaggcagttgtccatctaagatctgtataaagcgttgtttgtcgagttaagccagtatattttatgtgatggctttattcaaaacaatctgcaaatgtgtttaagaaaaatgacacagttatttttctttttgcagtaagtattttttatttcattttgttacttatatttaaagctggatcattaaaaagtataactttgttaaccagataatagtaatgatattatattctgtattgctaaaccacttttaataaataatattcgtaaatttttcgttattttatctgtatagtgtcacaactcaaaaaaaaaaatgtaaatatgtttagtaggtagact

SEQ ID NO: 12583 - DNA, 548 bp, Diabrotica virgifera
gtgcccaaatattcatatgtgactaatttgtattttacagtattgtaaaataacaaatacaaaaattacatttaatactaaaatttgaatcaaaacgtaaatttttaataaaccacaagtagtgacattaaaaatattatacaaatatggtaaattttagatttttaattataagtactgatgagcatgaaatgttttctttcacaaaaacaacatgaatgcaaaatttggtttcctctataaatttcagtattttgttataaaatacaaggaacctgtatataattttgaataaatttacacatagcaagttatcttcctattatacaaaatgaagtaattaattatactatcaagttttttgtataggagtcaaataatagatatgaaaatttctaaaaaaaatagtgttttagttatccatagagaacttgacaatatttggaatgttaagactatgattacaaagtagcctgcatcctatagaatcaccccttgaagaaaatattacaatagtgctggttgtagtcatatactaaaatgaatgc

SEQ ID NO: 12584 - DNA, 552 bp, Diabrotica virgifera
  SmartBlast Evalue=3E-49; Info=E3 ubiquitin-protein ligase listerin n=2 Tax=Gallus gallus RepID=LTN1_CHICK
tagctcgttcggaaccacttgtacaagcaagcagaatggaatttcttcttgcaagtctggcatgataactttggtagttggtacgttccttgatgcaaaacagcaaaacagatatagcattcctccacgccatcaaacttcttttctaaattgttattccacaaagagagaccattccatatttttccattctgatgtattacacatttcttaaattgtaacagccattgtttaatactggatccagcaatctgttttttacattgaagtgtcagtccaccaagagggtagttttgaggtaaacttataactaaatcttcttgtatctcgtctacagtatatattgctgtgatttctcttgccacgtgcgatactttaagcaccatatttttaaatttgctctgatatgtcattacatcgttcaactcttgtgtaataagacgaggagatacgtatatttgagttactttctccaccacttgcgctaatttgctatccaaagttgtccaccattgtcggactaatgccggtagttgtgatagagcagatgaa

SEQ ID NO: 12585 - DNA, 552 bp, Diabrotica virgifera
ctatcgtagactcctttcttccactcaatatttcttgaatttgttcttttatacaacctacttctacttgatatggatacaagtaaaagctgcttaagaattgttcatcaaattcaccagttttatcaatcaatttaaagacagaaaataattcagaatttacacttgttataaaatctctaaaatcttcaatatttcgcttctcaaactctagcttttctattttttgagctagttcaagttgataattattcagatgaataaaaaatattctactgttttcggtatagtcgataagagatttaattttttcacttgtcgtaatgttcaaataatccttctcaaattttttcagcagcgttccacattctttatctttggaaagaaagctctcggcaactataggacgatcgggcttttctattgttttaacttgtattaaaaatagctcttttttaccatcttggtatgttatatttattataatatcatcgtatacgcccaaaatcgctaaatttgaagcaatccagaagttcttgataccagaatgca

SEQ ID NO: 12586 - DNA, 550 bp, Diabrotica virgifera
ggaacacagagaacagtggtgcacacagtgcaagtggaaaaaggcttgttctaggtttggcgactgatacgcaccttccaaacgttagagacgctttttaaaagtgccccgaaatgtgttctttaaaggacaaaaagggtgcggactaccctgatctcaacacttgatggaagtacaactaatacgatatttctctagtgatggtcaaagatcaatcaaatcaagctgtatctgtgttctttcaaaaaaaaactttactcaatatactgctgcacttctttggaggctctactacagatccaactttactaaggaatatatgaaagcgatttagttttgatagatttcttggtatataaccaatagttagtttatcatgcaatatgcagtatgttaaatataattttcgggtttctcaaattgtctcaaaatgtctaattgtaggcaacaagaaaacctttgctgcagtaaaaattatttataatagacctacataacaaagtccattagagttactatgttattatagttgttaattattgttgttaag

SEQ ID NO: 12587 - DNA, 550 bp, Diabrotica virgifera
taccgcttaatcgaatatttattcaagtggacgaacaactttttattcatattttccaaaaaaattaaaattatatctggtttattatatttcatttttcagtaataaatactttattacgcaccagttggacccttttacgaaatacaacaggccataaaatacctacttttacttgtctcacaaaacttgtaaaaatttctattgcgacccacctcgttgcagtataaattttattggttaatggtttattgacttcgacaatacaatggcagacaagaatagaaatgttctcttagttattgataaccgccctgttcataaacccgacatgagtttgaatattttaacaatccgttttttgcctgccaattcatcaaaacacagaattcgacaaaataaaggacgaatatttttaagagttgtttcttttggcgataatttatcggttttcgaagatactgaagatttagaacaaaacaatgaaccacccaactcaatattaaagcgaaagatgacgcaaaagatatttagaacaaaacagtgaaac

SEQ ID NO: 12588 - DNA, 552 bp, Diabrotica virgifera
  SmartBlast Evalue=8E-33; Info=CCR4-NOT transcription complex subunit 2 n=2 Tax=Aculeata RepID=E2B1P6_9HYME
gaatttgaactttacaagaaacattggaggaaacaatcttggaagaacaagtgttagtttcggtagtaattctatgtctggacatgttactcctgttctcggacaaagaataccttcggagcgacgagcccttcctactatgggaaacgcaaatcaaatgggtcacatgagtaccttaggaggttatagttcctttaactcggtttttggttctggtgataccaacactccatctcttttagactttaacgaatttccttcacttacaaatcgaaactctggtgataacgtgccgcagccaagtccaatgcccggtggtaagccctatgtaggaatggtcaaacaacccacgtcggaatccagcgaatttacaatgtcctcggaggattttcctgcgttacctggtacgcagaatagggaaggagcgtcgcctggaagtaatgcttcgggagacaaaggagtgagtggaggtgcgggagatggtgtgaattcaagagaaggagacaagagtggttcaaaatcaggtattcagacgtcgcctgatggcagaat

SEQ ID NO: 12589 - DNA, 551 bp, Diabrotica virgifera
aaaaagagattcgttccttcgtaaattttctatttataatacaaaagagatatggtaggtaaaaagagtttgttttttggtgcatgctcaaagtgctcatgcttttgtagtgtttgaaaaggcctttaaaacgagcaccgttaaatgtcggttacattaaactaagcgagatatggtgcaaaaaatatatgactaatgtactttaaggaaaaatgagaagtacatacatttaacccctcattcaccagaatttaaatgcattgtttttcttttgcaatacctcttaatatagtgttatttctactttcaaaaagttggacgggtgaaaaaaataagatcaaattataggagcgcatttttaaattttcttaaaattcttccttttgctccatgcaattcgaaaataaaaatgttctatccccgagaagtggtgagaaccgccccatgacaaaagcgccacagtacatgggatagactttgaattaggagattaaaatttcattacaatccatgcagtaaaatgcaaatgttgtaaactattaatttctcag

SEQ ID NO: 12590 - DNA, 550 bp, Diabrotica virgifera
  SmartBlast Evalue=2E-14; Info=Endonuclease-reverse transcriptase n=1 Tax=Bombyx mori RepID=D7F158_BOMMO
cataatctggttaatggtaaatagatctttgtttttctttcataatatgctaattcatattaactacaaaatgaactaaatttagcattttgtgccattttctcccaaaaattttccttttcctctttcaacctatttcccttgcttttaggtttctactgtcagtttttaggtgttcagtttaccattctacttaaattttgaggtttttatcttcttcaggtttttatcttcttctccagcctgtttgcatccactcctggacaaaggcctccccgtgagttctccattcttctctgttttgtgctatttaatgccagtttctccccacttttgctttgagccatcgagccatcgtttttgtggtcttcctctactacgactgtgttcgcgtagtctccaatgtacaatatttctcgtccacctctcgttgttttgccgtgccacgtgtcctacccagttcatttgcacaattcttccagtacatcttccagttacatcttccaccttcatcctgcttcgcacttcttcgtttcgtgtatgttctctc

SEQ ID NO: 12591 - DNA, 546 bp, Diabrotica virgifera
  SmartBlast Evalue=2E-10; Info=Endonuclease-reverse transcriptase n=1 Tax=Schistosoma mansoni RepID=Q4QQE8_SCHMA
gtttgtgattttagttgttccgcatacttcttttgctgttttcaatatgatttccttaaattgcttccatttattttctattcctgtgttaattgcctttatagtctcgaactgtttggttaacttcttctggtattcctctttactatctatttctcttaatttgtagctttttattttttctttagttatcttctttcttttttctgttgtgttatgtgtgtacacccttagttccattataagcaagtaatggtcactgcttatttcagcctctcttttacctttacgtcttttatcatctttaggtcttttctttttattaggaaatagtctattatggatttttcttttctcgatgagatttctctagtatatttgtgtatgtctttgtgcataaattttgaattcgttataaccatatcatttgctatacatagatctatgattctgtttccgttatcatttttcatttcttctccatgttgccctaggtatcgttcaatccctttattgtctcttcccactctaccatataggtctccc

SEQ ID NO: 12592 - DNA, 552 bp, Diabrotica virgifera
tgtaacctggattttattcgtagatatttagacctactacaaaagtgaaatcgataaatcaattaagatatattggcttatcattgcagaggtcttcataacaaaaatcgcatgtgtatcctttattttcgacatgtgaacaaacatcttctccatctacctctgtgtaggtgcatcctctttcagttaacgtagtaccatacaaggtacgataaatagtataacaagctacacctgaggttgtcttattatctgggggcatatctgggcatcttactttcgtacggttagataggtccaggtcattgcacaaatctccgtcataaattgtacaggaataacatattgtgggttcttgctttgcggcggaaaaaactgccatagctccaatcgtaaacaaaagaagtactattttagacatagtcgtagtcacactatctataagcgaaaaaactcaaatgtatctacgcaattcttataaatttttataaaacaagtaaattttttataaatgtagatgaaataaattaacttattcgattgttgcaattt

SEQ ID NO: 12593 - DNA, 550 bp, Diabrotica virgifera
gcctaaggcttctactaaatctctttcagtcactcgacgattttccaattccatatcctgtattttgctacgatttctggtgttattgctgtttttgggcgtccttggcgtaaaagtgccgatcaacaaggagggtcttctgttttgacaatggatggaagtccgatggagccaaatctgtaaaattaggaggatattccaaaaagtcggaaatatctagtcacgtcttttattactctacaatttgtagtagcgaattaaacaacacctactctagcagtctgaacccgcaatgacaaaaactattcggcgacgtgtccatgacagggttaattcagaaaaaagtagatttttgacaggactaaaacaataatgttggatagttggtggaaatgaatgatactgtacttaccataaaatatttaacatatatgttgtgacatatgttacaacaaacactgcagattttcaagagcagaataaaaattatatgaaataagctaagttaaactagatttgtatttaaaattataattgtaatgttattata

SEQ ID NO: 12594 - DNA, 551 bp, Diabrotica virgifera
  SmartBlast Evalue=5E-40; Info=GTF2IRD2 (Fragment) n=2 Tax= Catarrhini RepID=Q3T499_PANTR
atttcactgtataattcaccaggaatcattggcatccaaacatttaaaaatggaccatgtcatgcaacctataattaaaatagtaaattttataaggagcagaggactaaatcaccgacagttcaggcagtttttacaagatttggacgaaaagttttctgatgtcccttatttcaccgaagttcgttggctcagtcgaggagtagttttagaaagattttttgcattacgtgaccctattcaagctttcatgttagaaaaaggcaacccaattgattatgacaatgactggtgggttgattgtgcctttttggtagatatgaataaacacttgactgatctgaatgtaaagttacagggtaaaaatctgattgtcactcaaatgtactcatgtattcaagcctttgaaacaaagttgaggctgtgggaaaatcaggtaaaaaatcaaactttggatcatttccctcatttaaaatcatttggcacagtggatcaaaaaaaaattggatcaatattctcaacttctgcaaaatcttatcacggaattcaac

SEQ ID NO: 12595 - DNA, 549 bp, Diabrotica virgifera
  SmartBlast Evalue=3E-24; Info=Probable multidrug resistance- associated protein lethal(2)03659 n=1 Tax=Harpegnathos saltator RepID=E2B3S7_9HYME
gacagagagaatttaaaattttgttggattataatattttcaatataatccagtattctaataaaaataatgaattatacggattaataagaataatgaatatggattaataagatataaataaaaggatgttacaacccatagtactcgcagaatatattaattttttcgacaaaaagcatggaatcaagcctaatgaatttgggtggctcttagcgtctggagttgtcattatggcatttttaaatgttatccttcttcataatacatttttaaatactcaacgagtgggtatgagagtgagaattgcagtgggttccttattgtatagaaaactgttaaaattaaaccacacttcccttggtaaaacggcagcagggcaactagtcaatcttttatccaacgacttgcagaggtttgattacgctgcagtattcctacattacatttgggtaatgcccattaacagtgcgatatcattttacattatgtacagaacatgcaatcttgtggctgcccttacaggaatgggtgcaattatagtggaag

SEQ ID NO: 12596 - DNA, 542 bp, Diabrotica virgifera
  SmartBlast Evalue=2E-62; Info=Mannosyl-oligosaccharide glucosidase n=1 Tax=Harpegnathos saltator RepID=E2C3D1_9HYME
aaccctttgcatttcgaggttttgattctggtttcttgttaagggtttcggcttttgtaactttacagcatcagtatggagaccgtaatctgcataaacttcagcatggtctgaccaatgtaacctgtccattaactcattatttaacaaatactgcgcagtttgttcatatttataaccatcatttcctaaaagtttagcaagacgagccatagtctttgcagcaatggccatccagcagtaaagatcgatatgtctttcatcatcagttggatgtgacgctctaggataatcatctaatcctgacgttagcgtttttggattgagttctcttttagatgtggcgtcccttccgcgccatctgtacgatcctggcacagtacctttttgagttgtgttgaaccaagcaaaccaagcctgtaatctgggataaagcctttccaacatcttaaatctctccccattcaattcattatcatatctatccaaaatactttccagcgtcaagaagaaggtgggtggattcgcgttcgtattctttt

SEQ ID NO: 12597 - DNA, 551 bp, Diabrotica virgifera
ttcaaaggaggagctattaggattccaaaatcttgttccagttacacagataagtaccacaaaacttgttaataataaacccattatcgataatgactttgctaatgtacacacttcaataacaaataacattaacaaagaagtaggaacaaaaagggaggaatttctttaccgacaaaacgacctaggacctttttacgcgtatttagaaaataattcacccgattttaaaggcagattaaacgcgttaaggataggtgacattattatcacaaattttaaagaaattgatgaaaaaattgtaagcattgacgcagtaggaagaaataaaatacgtataaaatttaaagattataaatcggctaactatatcatatctaaaaaaaaatgaagcaatatttataaaaaataatctagacatatacattcctaagtttcttttagttagacagggcgtaataaaagatatttccacagaattttcagtagagtatgttaaaaacagaataaaaatgtacgatttacactgtaaatttgaagtccttcaagtc

SEQ ID NO: 12598 - DNA, 541 bp, Diabrotica virgifera
cgctcaatatggtgtgactcccttctggacattgtgtggaccatacagaacaatttggtgttgaaggacaactttcactctggatgtctgggttatgccatcttttgaatcaactacactatactataatacatgaatttctcaagtactgtttagtttcaatattttagtcataccttctatgagagtagccagctccactgtaaagcttcctagcactgagtctgttaacctaaaattctgacaagaaaacttaagacctaattctaaaaattgtagttcttcctctgaaaagttggtgttacttagatttaggactcttgaaagggtggaattgatgatctgaaaacctatgcatagttgttgaggcattggtctgttgtttttgcaaaaccaaaaggtttagtttgctggtcaaacatttcttagtagattgtaggagagagtcttctatatctcttaaggagtcagtaacaaatgatcaaggatgatgttgcaaagttctgtcgtaagttattttgaagtcaacattaatctgatg

SEQ ID NO: 12599 - DNA, 537 bp, Diabrotica virgifera
ttcacactggtcggatcgggccggtgcactgggtccaaaggtcctcaaagtgaggactattcacagaagtgtgatgatataatagatgtttaatgttgtataaactgtttcatctcttataatcaaacccaagacataatcctcgtaagacttttgatttgatgagcgattgtctgataatttgttgaggctgatcgtaaatcgtatgccaaaaatttattatattgatgctatgtttgctattaatttttacctatattttccagaaactcctttacagtttctcgaaaatattaagcaaaaatgatcctatagccaaaacagcactcaattgcttgtatgtactgacttcttttgaattggctacttttacaaaattcttttataatatattggtataggtttttgttgttttatgtttctttatgctaccaattatgtggtagtaagatatggtgattaaattaattataatctgatgtatatatgttgaaatcagatatgaatgcacgcattcgcaagattgagagtgggcat

SEQ ID NO: 12600 - DNA, 546 bp, Diabrotica virgifera
tgcattctttcaactacaataacttgttttggtggaatagtgagcaattcctgccagggtagcccgtttcctggtgctactcttgctggttctcgttcgggaatatgtatggatttatttatccctacgtttttatcctgaactgatatctttggaggatttacgaatacattttcaatcagccctttattttctaaatatccagaatcttgcagcatttcaataacccatttgttataccccggtttttccttgacgtcatctttcatcatcttaattttatctaccaacttctccatactgtcttctatcaactgttcaccaccaacattactcgaaaaagtaataggaacgttatggatgtaggctgaattgatgttacagtctgctttctccactctagtaccttcactggaccaaatacaagagaaatgaaaggctgagtttctatgaggccttttataagacgaagggaagctatgttcttgtacttaactttggtcgatgaaggagataaaatatctttaggattaatgttgtctttgt

SEQ ID NO: 12601 - DNA, 552 bp, Diabrotica virgifera
  SmartBlast Evalue=1E-49; Info=WASH complex subunit 7 n=18 Tax= Amniota RepID=WAHS7_HUMAN
gataaaagatctacgctttttttcagagcataaactagaattgaaccaaatgtatccttatgagagagcagaaaaatttaatatggggataaggaaacttggccttaatgaacatggtgaaagctatttagatctattcagaaaagtaataactcacataggtaatgctatgggatatgttagactaatcaggtcaggaggtagaagatgtttagctgatggaacttgttttatacccaatttgaaaagtaattctctgaaagaagctgtacaaaatgaagagttgccagatctaacaaaaaaagctgcagatggtttactagaaaatttacagatgtatttggataacatcgaagatgccactgaatacttccagctgctagtaaaagtttttgttccagtattaaggaacaaagctaatattcatttaaaatatttttacgtcattgttccccctttaactgttaattacatagaacattccttgaactgtaaagaacgattaaacaaaagaaataaaacagagtatacatttactgatgatggatttgc

SEQ ID NO: 12602 - DNA, 551 bp, Diabrotica virgifera
gtggatcgacactgatgttttccttctatctttccatcttgctgctatccttccttctaaacatatatgcgttattagctgtattagtgagacatagtgcgtctcctatatttcataaattttgctggaatctcgtttgtaatcggcgctttgtgatttttcagcttatttaaagccttttggttttctttaaaagagagatttataaccggcatgtccgctataatatagatcttttctttatgctgttcttcctgtatgatgtttagaaggtccctgaaataccctttccattcttcagctagttctttatcgtccattatcatatgaccttgattgtctccatgaagaatcacaaactcaaaattaaaaattaaaaaagcacacattaaaaattacaaaaattaacaaaactcaaaattaaaacgtttctttcttaatttcgagtatataatatatccctaaaaggcatatgtatcaacactactggtttgttggaaaatatgtcactaaattggtcggtctggaacatttctctacctaaacttgat

SEQ ID NO: 12603 - DNA, 549 bp, Diabrotica virgifera
  SmartBlast Evalue=7E-13; Info=Bifunctional coenzyme A synthase n=1 Tax=Camponotus floridanus RepID=E2AXA5_9HYME
aataacattgtattcttttgtaagattttcaattctagttgttatgaattggtctatttccgccttcgtgtatttcttatcaaaaataactaagtctattggattttgtgtttgaattttagatacattaaactttattcctgaaagtagaactcttacatccaagtcactgcattgtcttgcagcctgtgaatatataccatgtattgtaggactaaacttgtgccaagtatttatagacttcgggcaaaagtttcctaagggctcgcttaaagctgataaaagttgaacatatagtgtatttttcacctgtttctttactgatcccagcagatttgctatttgttttgggttagacactataagcagaccggtttttgccaacatttttgcacacaatgatgaagaatgatgataactgtgttttaaacaaactatgttataacattatcaattagcaaatacagattagaaaataatttgatggaatgaactcaatgaactatgaactagacaaattatattattgtaggttatctgaggttatct

SEQ ID NO: 12604 - DNA, 548 bp, Diabrotica virgifera
  SmartBlast Evalue=1E-21; Info=Aminopeptidase N n=1 Tax= Leptinotarsa decemlineata RepID=D9J2F6_LEPDE
gtaaagaggtatattagtgtttcactagctcagataaatggcgataaaaactaacttgttcaatacgttcctcgttccgttaatttttttcggagcagctgttattattattaccgatgcagtggatacaactttattaaagcatatttctccaactatgtacactctatggctgaatatacctagtgcatacgatgaaaactattcaggaactgtaaatatagtttttacagcaacagaaacttctgaatacattctgttacattcatccgaagaacatattgctataagcaaaatctatttaaacggcgatacaaaaagaccgtgtcgttggaagtacgttcaaaactcactggatttactaaacattacttgcaattcccatgtagaaataaaagaagcaaattcgttgagtattgattacaaagcaaaactctctgcaagatatgatggaggactttacaacattacttacgacgataataatctcaaacaaatcgccatatttagtcaattatatccaacttttgctagacgagtatttccat

SEQ ID NO: 12605 - DNA, 551 bp, Diabrotica virgifera
  SmartBlast Evalue=6E-55; Info=Brahma n=2 Tax=Tribolium castaneum RepID=D6X4G8_TRICA
ccccgttttcatcatcctcatcatctgtatcgaccatctcccatccaggatgttggattaaccattcctgaacttgtcgcagtgtaggagcagcctctcctgttacttttttacctgttgcagtttccagaactgtaactttcctatctggttgttgcattttctgctgcttcttcttgcgtttttcctcctctttctttttattggtttgttccaacttgtgttgctttaccatctccgtgaggttagttatatactcatctgtttgcgaaagcaagaatgctagacgtttgtctttcttttgatcaatgagctttctataaccttcttcatcttctgccatcaatctgatcatacgttccttctctctcctttctgcttctttcttttgctctctttcagcattagcgtgataattaataacagctttattaatcttagctaatttcgcttgattctgcttgtggaattccttgaattcttttccattgttcaatacagcattcaaaaattcttggttcttctgtcttctctttctttctgcttctaac

SEQ ID NO: 12606 - DNA, 551 bp, Diabrotica virgifera
tccattgtgttgggattttgtatctctagccctatcctattcgcttccatatctaattttttaaatgcttttataagtgtcatcttcgtcttcgttatgatgacttttgtttgcaaggtttgtcctccttattttttcttccaacatatggttaaatagtgtcagtgagatagagtcaccttgtttctccttatatactataaaaatgctaaaactatatctttaccgctaaaactataccgtaaaaatgttaaaattgtgttttattcctcattatgcttcaattgacttgcaataaatttatggtaaatttttaaaatgtgttttaagttattttttgtattgttttaaattatagttaaaatcgcaatgctataaggccacttacgtatttttctttttctagtatttaattatttatgaaccatctactcatattgagataaaatgtaaaaatgtcagtgtttttatttactttttagcttgttccattgtattctgacctcatgaatcaactcctagtagttagactgtgatattaaaatattttc

SEQ ID NO: 12607 - DNA, 551 bp, Diabrotica virgifera
agccataattctgacaaatcggcagcagaaaagcactgaaagttttttcggcactaaattctatattgatttttattgtggatgaagttggcagccataattaaaataaaacaaaaaccattctcgatgcaaaggtttattcaagatagatagagttattccctggatttgttaatcaagagtaatttgtagttgttagaaatacatattttcgtgatttatagaaaaacgctagataaaataaagtattcagcttgcacatagaaactgaacttattgggtgaacacattatgatgttcgaatttccttttggcaatagtatgtatacctaccgctagaagtaatataataaaattggtaaagtatatcaaaggtatcctgaaatatctaatagtttatattttatgtggaacttagatttgtaaaacaaaacaagaataaagcattgtaatacaccacaatactttctaccatcactaatcacctcattaaataatgacatgcaaaacttataggctacaaaaatttgagatgtaagatgtaatcacct

SEQ ID NO: 12608 - DNA, 548 bp, Diabrotica virgifera
gacctgagaggtttcaaaaaactgtattgtccttcattgcatgccccatttttttctccaggttaggcaataaataatagtaatactagaagatattaacctgaagtcaaacagaaacaactcagaaaatcagtataaatgtagaaaatacttgttgcaagatcgatgtctatcttgctctttttttttatttaaaaagataaggagtctagtcaaatgtttttcagtctcttcatctttgacttcattatcgacgaaatactgttataaaaacggtgttgtgtcaaattttgaacgagcagaaatagaaacttaaattttgaattatatggagaagtgcattgcatattattataatattgcaggtttagacaaattttctttttctctattactatttgggtaacacattattaaaattaaatattttataattataaatttgtgaaggtattaaaatatttttactttgaggtgatactatttagaatattacacagtgatgaccgcgccaataaccggcaaagtaacgtaaaagatggaaaaca

SEQ ID NO: 12609 - DNA, 550 bp, Diabrotica virgifera
gtaattgaagaggaaagtgaaaaaagtcaactgctcgaaaaatcagaatctgaagagctagaaaaggagttaattaaagaggaagtatcctgtccaagtttaggaaaagatgatcactacgatgttgactactatattcaacatgtttctgaacaagaagcagaacaggaacatgagatggaggaagctgaaacttcaaaagagattcaattaccttcatatctcgaaggcgtttctaaagaggaacctggtgaaggtgacgatacgttggcgcccgaagtactttatgctcaacgaatgtatgaaatggaagccgaagaagaagaatatcaagatgagtccttgtatgcagcaattgccgataaggatatggaactacccgaagaggaagagcctgctgtgagagaatctattgatacggtcatcgaagaaccaagaaagatagttccagatttagaaggtgatttagaggatgaaaaaattcttttagaggatttagaacgtctaaagtcaatacaacaagaaattcctggcgaagaagatgaagaga

SEQ ID NO: 12610 - DNA, 551 bp, Diabrotica virgifera
taatattttcctcattcgtgaagttaaactagatttaaaaagatgtataaatacttgcttcttttatttgcagtttgcatagtggcagctgccgtggctaagactgacgaagatgacaaagaatacccatttaatgggtatacactacctaagactgaaaaagaaattcaagcatccttatttgattggtataaagaaatctttacaaaatatgacgaaagtccggaacagaagttacagaggatcgcgtcattcagagcgaattttcaacagcgtatcgaatgtatgatggaaagccatcaggatgtagaagccatgaattcttgcagtaataagtataaattgccagatggtatgacagaagatgacgctataaacattttttttgttaagagaacaaaaagttagcacagatagtttaaatcgatttactatgaaatctatgtatatcttatttttaatttgatcgtgtatattttaagaatattatttagaataacattttctgtttcaacacaagaaaaatcaaatcattacactttaatatatct

SEQ ID NO: 12611 - DNA, 551 bp, Diabrotica virgifera
tttgtgttgtaggtttcccacatgctgtcaaaatgcgtcggacttttatcataatattcttataaacaaagaaaaaatatgtcgtttttatgacagtttgtagactggctacatcgaaaagaggctgtcagctaattaaatatagaatatagagaccagctcttaactctttatcgcaatttgcgacattacactcttgttcagctcagagaactcttgtgtgaaaaatctcagagaatggtttggatgcagctcaactgaattttttcgggctgtagtgtcaaaagttagaatagcaatgatgattgccaaccttggtagcggagatggcacgtaaagaagaaaagaagactcttgttcacattgataatttattattctattattgtttttgcctgtcgtcctttttattaatcaataatttacttgagtttcaaattttatcgtaaatccattttaccaataattataagacacaattgtaacctcaagcagaggtaggtttatgccagtgtaaagattcacagtcttatactaaatttacaatcaag

SEQ ID NO: 12612 - DNA, 546 bp, Diabrotica virgifera
gcacctatttgatattttttattgagatcttcagtgtttctttttattcgtggtttatgataatctatagaaattatttgcatgtgttagtttattttttgttattctttgagtgtagaatggaattttagtgtaagtatataatatattaatttgttagaagtgtaaagaacaatagattttttggttgctcaagctgtcgatgtctctactccgcttatatagcggattgatgtggcgttagaactaatcttatcagaaattgttccatggtttccagattgaagacaacgggggaacttccttttataggtagtaaatatccaactgacctgtaaaccctatattatctaaaaatcatttgtgctatctttattccaaatatggacatgtctatcacttattttaaatacttatgcttcaatttataaatcacaatatttctttaatatctatccgctaaaacattttttgtagtcaaaacaaggaacgaatcttatagattaggtatacctcaattgaaccccgacaattggataatcatct

SEQ ID NO: 12613 - DNA, 547 bp, Diabrotica virgifera
aaacactcgttctaagggaatgatcaatttatttggacaaacaaaagcatagtatacgaaatgaaggcatacattttatcttgttgtcttcactacgtttctgccatagacatataatacctagactgtgtactgctatctagggttgttcccctagtgcgacaaagaaacatgtttgtgtttagggggagacatccctttctaatcgacggggtttatcacgtggtcgataaccaaacgtcattggataaaccccgcccattagaaagagatgcctaccctaaatgcaaacatttttctttgtcgcactggtcgcacagttttagattgcagagcgcagtctaggtattatgtgtctatggtatcttcatatattgttgaaaattcttgcttgagtgatccaagtactaagacaatcctttgtcgccttatgtcatatattataagttcctgctcatatctctatgtatatacctactgactttgaaaaatgaaggtaaaaatggtaaactaagcttcccttctgttgtattggtaaagaactgtg

SEQ ID NO: 12614 - DNA, 550 bp, Diabrotica virgifera
ccaaaaacatttcaaatacgacgcatatattttttactccccgtttcttataaaactatatcaagaaaaaactacaaaaaatcttaaatgataggttaatataaaggtttgacaattttttcacattgaaggtgtcgattatttcgaaggtacaataaggtagaactatttcaacactacgattccaaaaagttacatttctccataaaaaatcaaaagatccaaacttgaataatttcttcgctagattcccaaagctatatttgtctaagcaaaacctaaaaggtaatttttttttcaatgctacaacgaaagcttgcaatatttctggtacaaagtgaaatcttccaaaaacatttcaaatacgacgcttacattgtttactccccgtttcttataaaactatatcaagaaaaaactacaataaatcttaaatgatacattaatacaaaggtttgacaattttttcacattgaaggtgtgattatttcgaaggtacaataagctagaactatttcaacactacgattccaaaaagtacatttctcca

SEQ ID NO: 12615 - DNA, 548 bp, Diabrotica virgifera
  SmartBlast Evalue=6E-27; Info=Odorant binding protein 6 n=1 Tax= Tribolium castaneum RepID=D6WM82_TRICA
ccattggtgttggggattcctgagagcagtcatacactatgaaaagctttatagtttttggatttttagtttgtggggcaatggctttcacagaagaacaacaacagctgatggattctttacatgccgagtgtgtatctcaaactggagttggtgaagatgccattggcaaagcaaaaggtggagattttgttgacgatcccaaattaaaatgttacatgaaatgtgtttttaatgaaattggtgtgataactgacgatgaaaaaattgacatagaaggtgctctagctattttacccgatgagttgaaagatattgctaccccagtaatcacaaagtgtggtactcaagctggtgcagatgtatgcgaagccatatttaatacattgaaatgttattacgatatggataaaagagcattctttttaccgtagaaaaattattggatgtaagaaaatatgtaattttgtttttttgtattaagttttttaaaaagtggcatcattaaaaatgtattcgtaatgttgactttaaacgtttttttatgt

SEQ ID NO: 12616 - DNA, 551 bp, Diabrotica virgifera
  SmartBlast Evalue=6E-31; Info=Dawdle n=1 Tax=Tribolium castaneum RepID=D7EL53_TRICA
aagttaattaatttattttactactaatattttacatcatttatgtaacatattatataaaaattgcttaaatatttatctaagacttcacaacattgctactggtggattcttagttggttcatttccttcataggggaatatgatggcttgtgtggttttcccgtaaaaatcatcagagtagctactttgcagattcatgtcttggctgggtagaaggttttcgtactctttcacaggtttaggtagttcagatatagtgatagtaggtttctccttaagacgaagcttcttgagtatctgattcttgatgtattcaatacgcaacttggtaaattcatcttcaatcactgagtaatccgatttggcatctttttccggcacactattatcctgtatttcatttttcgtgttggtattcgaaaaaaacacaccgaatacggatggaacttttgcggtacacacagtcccgatacccgcaactaaaaacaacaccgttaagaccttaaaaaacttcattgtactgtgtgagatgctgcacagtaccaact

SEQ ID NO: 12617 - DNA, 549 bp, Diabrotica virgifera
  SmartBlast Evalue=2E-15; Info="Solute carrier family 2, facilitated glucose transporter member 8 n=1 Tax=Zea mays RepID= B6U615_MAIZE"
ttgaatcacagcacatccagagcataccagaaaaggcacaaacagcccatatgaagtataccagctaaataattttattgccaatgctacagcaacgtttgtaattatattaacgatgcataaagctacacttttgaggtgtgttgggaatatttctgcaatgaagatgataggaatgacgtgcagtccaacgccgtatccaacggtatatagatatacgaataccagctgcaaaaagtctaaggtacttgtgtcaatgttagtagctaacttaatatacagataaagtccgttaaagaacaaacaggcagcagtaacacccaccgataataatattaggactcgtcttccaattctgtcagttagggtaaagcacacaatggttatgagaaaaaatgatacgtggtagataatatttgcagtgcttggtaccaagaagctgttagtctccaacaaaaccgttttagtgtaatattacgaaaggtaaaagtccgcttaaaagctgcgtcaaagtacaataaaatagatagcacaaggcattgtctgtgc

SEQ ID NO: 12618 - DNA, 542 bp, Diabrotica virgifera
  SmartBlast Evalue=6E-49; Info=ATPase family AAA domain- containing protein 2B n=1 Tax=Harpegnathos saltator RepID= E2B2M3_9HYME
atcaagttcatcaaaaaatataatggaaggtttcatttcggcagcctgctcaaataactgtcgtaattgcttctccgactctccaatccatttacttaataaatctgcaccttttctaaggaaaaacgacaccttccttttcccaaaactacattcattagctaacgctctagcgattaatgttttaccggttccgggaggcccatggaagagtacaccccttggtggttgaatgctaaactgcttaaaaacttctggatacatcatgggaagaagtatcatttcttttaaacattgtatatggttatccagtccgccaatgctgttaaacttgatgttgttatccaacgtttccggcttattggaacaattttgttaaatcctccagccccagatttcattcgttcagttttagaatgatggggacttttaggtggtttacctcgtcgaacatctgatgatgacgaatcactagagctagaagatctttcccggattctgggtctaaacattcttggtctcatgtcacgtgttcgtatgtc

SEQ ID NO: 12619 - DNA, 546 bp, Diabrotica virgifera
aaaaatgattaaacaaatacaaataataataatgtttttattataataattaatacaatttatgtgaataacctggataacgtataaacaaatgtataattttaaaagtaagcatatctattatttaatgtaagtaacgtaatgtaatatttatttaaggaacaataacagggcgacaacctttaatgatatttcttgttgaaaggacacgtagactttttttatttattttaagacacaagacataattttaagaatatatttctatttctccacgaaatatgaaatgtgataaaagtgtatcttgatgctggtttccacggtacaaaagaaaacagaataattcaatttttgacgttacgaagtgtggtagttacgaattgtcgccgttacgcattgtccgttaccatttgtggggtttagggaactgtcgcgttacgagatgccttgtcacgatttaacaatgtataaattaatttagtgcaagttattttgatataaatattatagtgaggtccagcaattattatatttgtgatatattga

SEQ ID NO: 12620 - DNA, 552 bp, Diabrotica virgifera
  SmartBlast Evalue=1E-24; Info="Sugar transporter, putative n=1 Tax=Pediculus humanus corporis RepID=E0W0A9_PEDHC"
atgttccatctgtacccaaattctgtttcattgtattaaaaaactgggtaattaaaaacgacactatccagcaagaagacgatgtagttgccgaagataattttttgacattttttggaaatatttcagatgaaattgtccaaggtaacgcagccaaacctacttgaaaggcgaaagtacacattattagtgttggaattggaatccaagatattgcactcatactccaatctgttctattttttatatagaagaatacgcccagtatcaataatcctaaacctaaaccaacgtccgagaatattaataaaaccttccggtttattttatcagtgaaatatggagttggtaaggcaaagccaaaaatacaagcaccaataataagagagcatatttctgggcttagatttgtattagacgcttcaaatattggttgaagataaaaagttatagcattccaaccagataattgttgaaatgatattaacgaaattgaaataatgaaagcttttcttacaccagggttagtaaatatgttggtgaaaccaccta

SEQ ID NO: 12621 - DNA, 548 bp, Diabrotica virgifera
  SmartBlast Evalue=2E-49; Info=Solute carrier family 35 member E2 n=2 Tax=Formicidae RepID=E2B8V0_9HYME
gttaacatacagtcctagttttcgttccccctaaacaaacatcttgaaatcagcactgtaaataatggtgctgaactttttatagtttctgtgaaacttactgctacataattcaatgacactaatcctaatacaaccgtaaaaaacctaaaacttccaactaaaaccatatgtttataaaatccaggaggtttactcaaacgttgtgttggtttatacatcccacatggaaaatataactgtataaacccacatgtggcagtcattaacatttgacaggcagctagaattgctggatttccattttcataagttaaaatatatttatttaagaataatgaacagccactaaaaaaataccacagtaacaaaaatacgatagccctaatactggtaagtccatgtttatgtttctccaatggtacttcttttttaattaccattgctttcaacttcttttgtagtggaacttatcaattgatgtgtgtccatattaacataacaaactatatttactgtattaagtcacagagaaaatgtttcattcg

SEQ ID NO: 12622 - DNA, 548 bp, Diabrotica virgifera
attgtgtttcttaggttttttattgtttaatagttttattttccgaacattttgttgttgatttgataaatatagatccattttctctcaaggagtctgagttaacctacagtggagccagttttcaagcgtaactaacatgggcataattaattatctagtgcttagtaatattttatacacaagtcaacaagtgcagtgttctttttactgatcttttagatcaaatggactgatcttttaaagtgtgtgttaatgttactgacagaaatgtattagttaattttccattgtaatatctgtttgacggtttttactatttgccaaaatgttgtcttctgctatgctaacttcttcatttttcaccgtttctaaatctactgagataacaatgctttgctagtacgaagatatgtccggtttctctaaaaaatcgtcttcatacttataatggatttctgtcaaaaatgcctatttatggatatatccgctttctcttctcaccgattcttcttatacttgttgtagatctgtcgatctgttaattc

SEQ ID NO: 12623 - DNA, 535 bp, Diabrotica virgifera
aagcccaaaatgcttatcaagaactgatagaataagttttgaacttgaattaggtacttcgtaatttcaaaaatgatattttttacttcttgttttgagccttgaaaatcgtccgttttcgttccttttccagttttaaaatgtttataactcgaaaaagaccaacttgagaaaaattacacaagaccttgtttgtttggaatgatttaaaaatcaaaaatgatatctctccgggtcgaaaaatttttagaatttataaaaaatcgtttttaattattattaattatagtctggacaaaattatgtcgaacagcccttgtttcttttcataatttttgacataataaattacatatcaaataatttctatcaattaaaccgtgaccagacatctcgtaacgcgacagttcgtaacaacgagagttcgtaactatacatcttcgtaacggacaattcgtaacgtcaaaattggattattctgtttatttttgttaacgtttaaactaatttttattacagttacaattgaaattac

SEQ ID NO: 12624 - DNA, 551 bp, Diabrotica virgifera
  SmartBlast Evalue=3E-17; Info="CG9812, isoform C n=2 Tax= melanogaster subgroup RepID=Q9W1Q4_DROME"
gttggcgagagcattctgaagtataaacacggcaaatagtaacgtgcgttttaatttacaggaagcagttataaaggccgcccgtatagaagatgcatgtattagtaatcgcaactattttacttgcaattgaagcaaattcaataccagtgacaaaatcagacgatgaggcatttaaatttccaatcacgtttgaaaatggtagaataggcgtaaacttcctaggatttcacgcttcagctggtttaggaggtttattaacaggtaatagtgcagacggtggcttacatgcggaagctggaactccgtttgggcaaagagcttgggctggattaggaggagatataaatggcgcaggtagatcagggggaggcctatatgcaggagctactgcattaaatggactaggtgctgtagcgggattagatggaaatgctggtcctgagggttacaatggtagattgtattcaggaacttctagaagagggttaagagtaaagcaacggataattggacaagggctacctccaccagatgatcaaactgttgta

SEQ ID NO: 12625 - DNA, 546 bp, Diabrotica virgifera
atagccttactgttaccaaagtcgttaataatagtgagatcgatagcgcaaaaaagaaccatttgattcctgatatcacaataattaaagagaaagacgagcgaagcaactccaactcttataaagatctggagattatcactaagcatcccagtccgccaaaggttgatcccatggatgtacccgctgacctatcgatacatcccaataagagcgatgtcttcgagcttgtcagtgacgattctcaatttctagaagtcaataaagtgaaaccagaacagggaaaacctctgacttaccaaaaacaaccgaagcaaactgagatgtttaagccatacgccgacgatatttcgatcgaacggaacattccagaaaaaccgaaagtagtgtcatatgaagaacatcgtctacctcatgccgaaatcatacctcaagttgctcagcatgttgatcattcgtatccgaacaaagaaaaggccagcggacagtcgtcgtactccgaaaaaagcaaacaaggagtagaaaaagaaaagtacagcacacata

SEQ ID NO: 12626 - DNA, 552 bp, Diabrotica virgifera
  SmartBlast Evalue=7E-66; Info=S18e ribosomal protein n=5 Tax= Neoptera RepID=Q6EUY1_TIMBA
aaactgaaaagaaaagttaccaaccaagcttcttttctgataaactgtcatacaaaatgtctttggtaataccagagaagttccaacacattcttcgtatcttaggtacgaacattgatggtaaaaggaaggtacaattcgctcttacagcaattaagggtgtaggtagacgatatgccaacattgtactcaaaaaggctgacgtaaacttggacaaacgtgctggagaatgttccgacgaagaagtagagaaaattattaccattatgtccaacccacgtcaatacaaaattcctgactggttcttgaacagacaaaaagatatcattgatggtaaatacagccagttgacttcttccagtcttgactccaaacttcgtgaagatttggaaaggatgaagaaaattcgtgcccacagaggtatgagacactactggggtcttagagtaagaggtcaacacaccaaaactactggacgtcgtggacgtactgttggtgtatctaagaagaagtaaatgtaatatttataaggaaatagaaatttttttcatt

SEQ ID NO: 12627 - DNA, 550 bp, Diabrotica virgifera
  SmartBlast Evalue=4E-38; Info=BEL12_AG transposon polyprotein n= 1 Tax=Anopheles gambiae RepID=Q4JS97_ANOGA
attttaatcttccaggggaatcacagcgattttcgtaataccacgaagaaaatcaccgtgagtagtgtgaatcttgacagtacgaactagaccatccttaccaggcaatacatctattaccctggcagttggccataagagtggaggagtaccatcctccttcaacagaaccaaatccccgatcttgacagggtcagtagggtcggtccatttatttctttgctgcaggaggcaaagatagtcttttttccacaatttccaaaattgctgttgaattttactaatacgctgaaaaagattcaacctattttcaggtatctctgaaacacttggttcagggggcgcggttaaacttctttgaactaagaagtgagctggagataggaaagcgaagtcattggcgtcagacgacatcctagtgatgggtctcgaatttagaatagcctcgatttggcataatactgtgttaaacacttcaaaggtgaagtgggaatttcctataattcgatagaggtgatacttcacactctttattcctacctcatggagg

SEQ ID NO: 12628 - DNA, 547 bp, Diabrotica virgifera
  SmartBlast Evalue=2E-36; Info=Probable multidrug resistance- associated protein lethal(2)03659 n=1 Tax=Harpegnathos saltator RepID=E2B3S7_9HYME
atttcccaagctgcggagttatatgtttcctcacggagaatccaaacatttttattatacgacgaagtcgaagacgagaactatatagctttagacgaaaaatcacacaaagggaacggaattaaatcgttagaacttaccattagaaacaaagaaccaggcattcacctcaaaaacgcttcagctaaatggttaaagtcttcccccgaaaataatttggagaaaattaacatggacgtaactccaggaaatgttgtggctgttgtgggtcctgtaggtagtggtaaaactactttgttacacattattttaaaggaactggaattacagtcaggatctgtggacgtccacggggttgtttcttatgcatcacaagaaccttggttatttggtggtagtatcagacaaaatatcatttttggacaaaagttcgatcaaagtaaatacgatgaagtagttaaagtatgcgctctacaaagagattttactttatttcctcatggtgataggactttagctggggaaagaggggtgtcacttagtgggg

SEQ ID NO: 12629 - DNA, 549 bp, Diabrotica virgifera
  SmartBlast Evalue=4E-60; Info=Probable cleavage and polyadenylation specificity factor subunit 2 n=5 Tax=Sophophora RepID=CPSF2_DROME
gattatattttaattgaataattttttcaaatgtagtatcaacatcatccagtgaaaaaatgcaaaactctttcatattgtactgagattgatataaatcatacataaacatctgtcccattttgtatacaggtatagttgcataaattgggcaatttaaacccagttttccaactacatagggaagggctcccaaatgatatatgtctggataagacagtaacactgcgtctatagtatgaacatgcctttttatttccttaataaattccatgtcaaatttttcgtcccatccacagtctaaaagtattcgcacttcgtcaatttgaagaatatagcatgggggagattcatctttggctcctgacaaagcttgcagttttataattgaagtcatattaaatttgataattagcacttggtaataagtgtaaaattgtttttgatgtctatatactatttcaaaattattttaattattatattaaaatcatattaatattgattctgattgtttatcatataaataatacagcatacagctattga

SEQ ID NO: 12630 - DNA, 549 bp, Diabrotica virgifera
aaacataataaatggtgcaatattttgcgtttggtaaattctatgcatatggaaacgggtaaacccaacatcgtgatcagtttttgtaattgatttcacagtatcggtaatttccaaactcgttctttaagtaaattgtggtttagatgtgatattcattaagagaaaacctagtgaataaactgcagttagtttttcgttcatgagagagtgcaaaaaatctaatatggatgagattaaaaggacttcattccgatttatgatcaattatgcagtgaggtttttaacagcatctttgtttctttattcctgttgggtgccgtttcagtatttgggtggatggttttcatggcatgtcattttatgtacctttgggtacataccacttatggcggaagccatcatgatgtttgtcggtgatgacatctggagcaaaaacctaagcagaaaggccaagtatgctattcatggttatctcattacgttgctaccataatcacaatagttaggaacattttagttctttgtttattatacagccaggatacc

SEQ ID NO: 12631 - DNA, 547 bp, Diabrotica virgifera
gtgcgataaaagaatgttttgaagtgacagtgacggttgggaactattttgtcggactagaaattacaaaaaacttagaggctggtacaatgttaagtcaagcaaggtatacaaaacaaatagatagatttggtcaacacaatgcaaatcctgtaagtataccagaagatgtaagtgctgacttaacagccatagtgtcaagatctgacattgcacatgcggtgggagtagtcagccgctataattatagcatgtgttattacaaatacaataaagttaacattcatggatatagtgacgcagattatgcaggtgatataaaaactcgtcgttccatcactgactatgttttggacactggacaagtaagagatagacaatcagagtgcaataaagtggacatttgttatatatttttttaaaggtttgtttatgggttgaacaacttaacaaaaaggtgggagtattggaatatgtttttgtaatgttcatataaaccaccctttaggttgctatttaaaatgtttttaagtaggttgttgttgat

SEQ ID NO: 12632 - DNA, 550 bp, Diabrotica virgifera
gcgcgtgttattttgcttctgagaatgagtcacgtttcatgttctttatttggtccgaccatcatgctggagatcttcctctagatcttttgcccaaagttcatggcatgcgcaacattctacggtatactaacatttcaaatgccattatgctcttcaaatctgcttttttggtagttcacttctggactatgtttattcaaaagagcataagatctttccacatggttatccataagagctctctaacctctcggttgaagttggtcgaagtgttttttaatgggaaaataggtctgatgagaaatatctccgttcccatatcagtggttgaaacaaaactattcaatccatttccaattcctccatttttacatggagggtatttttggtatacgaaatatatacacataggttaaaggagatactcttcgtctcatcttttttgcaagacatgtctgatgaaatcttcttcttttaataggactatgtcttgtttcttctgttacagtctctgctgcaatccggagatccagctctcgtatcatcg

SEQ ID NO: 12633 - DNA, 547 bp, Diabrotica virgifera
acgtaagttaatatattattgttattggctaaatgtaataaaaatgttgataatttattcttaaagtataatcgtcaattattctgtatatttgtgttgtttttctttatattatataatatattcttttatgtattcttatttacatagttttacgtgacctttatggaagtgcttaaagaatagttgtaaaataggttatttttccaaagtgaatccaaaaaatgaagtggtccgaatctcagtgctgtgaagattctgtttcgtttaataaagtgaacttcagtgctaggccaagagtcccctccccctcgtatcttttgaacggttatacttataatggggaaatttggagggaggaaataagcggacgtgggcttctcaaatagtcataacaggtgacctaatggtcataaatgacgttgcacagccaatgtgaccgacaattttaaatgggaccttatggcaagttatatctcgtttgaaaggtattgaaaatacctatctatctaatgttgtgaggtcctgagatcgagctggccattct

SEQ ID NO: 12634 - DNA, 547 bp, Diabrotica virgifera
gtggtgatatctaagtgcaattttaataaaaaataatatttttaagttcttctagaccgtaagaaacataaaaatgacttccaaacgtaccgtccttagtagacccagaaccaaattatatgatgccaactacaatattggagaaagttactacaagggtgccttagacagactagacaggaaatattcaggcagatcactgtctccaccacgtcagccatcaccagttgcagaatccattgccgaacgccatgccagaatcttcgctgacgaagacctagaatattcaaggagaagagccgaaaaacacatcagagaagaaaatgcgttcgatgcaaggactgcccgtttcaatagagccagcgcccttctggcagattctatggacaatgacatcagcgatgagaccgccacatcaatcagacgtctaagagctaacaaaaaagtaatctatcatagacgacgctgatctagaaaacacctcaaacaacctcaaatcgatgcgcttactcgacagatcagacaagatcctcgattcagtcggcat

SEQ ID NO: 12635 - DNA, 550 bp, Diabrotica virgifera
  SmartBlast Evalue=3E-19; Info=Soldier-specific protein-1 n=1 Tax=Nasutitermes takasagoensis RepID=Q59I48_9NEOP
cggtcgcctaattgagcgtagtccaaaccatctttatttaccagcttgtagtcggatgtgtaggtaaatacggggttgtcaattgtcacattggcatctccagctccgttcagaggtagtaccaagatcttaccatccatgacgtattttcccaaaatgacaatttgagggcacttaaagactattttaacagtttgtttttttaaatcaaccgccaaatcttggatatcagcatcaggtaatccatagagctcaatatcttttaaatcgatttttaaatttccagagttcacactaactttctccaatttcatcggtttaaatgatgggattccgtatctcttgtctccatccacgatgtgaggtaaagctatgcgtgcttgttccaggcaacatttattcagttctggatcgtttcttttgcaggcagtgatgtatgacggcaaatgttttggaccagcttccacatttccaataattaacccgaagatcgaaactgtgatcaaggttgcccacattgttattcgttattcggttattttacagaacg

SEQ ID NO: 12636 - DNA, 548 bp, Diabrotica virgifera
taagtcatcagcaaattcatattgccaccgtcggaggggtgggagataatatacagatttaagagaattggagcaagaacctatccttgaggaagcccattttgaaatatccttaccctgctcttatactgtctccagttcttatttgaaaagacctatcgcacagcatattgtttagtactgttacacggtacagttgttgacaaatttaaagataggtccgttcctccatacgatgtggtacgcagcagttagatcaatataagctacctaccgtagtttttaaaccggcttcatatgtgtgataagactgaacagttgatctgtacagctgtgacaaggacgaagctcagcctgttctattcgcgatgaaaaacaaagtatctgaccaggggcggctcgtgatagtatcaggtggtgaggcacactacacctgaggaattttattattatggttagcttctctttaatggccagaaggttgattttgtgacgtcataatgctaggacgaatctaggaccaataatcccggacaaaaaatcctctc

SEQ ID NO: 12637 - DNA, 546 bp, Diabrotica virgifera
caggtttataggctgtgatctgggaaatatttcttcctgacgtttctttaactacagcaggtattaacagtagctgacaataatgtatgattacaaaacaatggccttgaaagccagtcaaattcttagtaggtgcaatttattaatattaaagatattcttaataaattttagagtttatgcgatattgcttcataacattgataaactcttagcacttagcactctagtccttttgaatgttggcattacggctaaagtccgccaaatgtggtcaaaaattttatagcggttttaatccgaaaaggttgcataccccgagctcaagaagcgattaatactcgaaagccgacagtccgcggatgcgccgttgataagtctacggaacgaaaccaaattttgctcgtttttgcattaacaaacaaaatacgactgcctatgacttgtataatatgaaatgaaactcgaagtcacagtgcaaaattctttatcgattaaaatgtagtttcgacaattttcttatcaggccaaaaataatgttaattt

SEQ ID NO: 12638 - DNA, 536 bp, Diabrotica virgifera
taaatataataattattattacagtgtagtcacaaatatttattattacatcaattttactacaactatctattaaatctaccacctattattaaagcttcctactggtcgattgaaacctggagctggcaacctctgtaaacctcttggacctggtcttggtccacctctattaaagttaggattacctgccctcggcccattaggtccactcattctaggacccataactcttggggctccaagtcctgccatcccaccatcgggaggaccgaatcccctatcaggaccgccaaagccttcaagattttcttccattctatttggccccccaaatctattggagcctccagcatcaaatctttctggtcctgtaggcatcctagccggacctcttgtatcaaatctatctggtccaggaatatcaaatttatctggaccgtcaactccgaatctcttaggtggtcctccaggtcctagtttatcttgagcgcacggtccaaatctatcagaaccgccgggcccaaatctatcgg

SEQ ID NO: 12639 - DNA, 549 bp, Diabrotica virgifera
  SmartBlast Evalue=4E-84; Info=Histidyl-tRNA synthetase n=1 Tax= Aedes aegypti RepID=Q17JC2_AEDAE
gtctctgaggttagaagttatggacaaaataacctcagtttttaagaaacatggtgcagtgactattgatacaccagtttttgaattaaaagaagtcttaactggaaagtatggtgaagattctaagcttatttatgacttaaaagaccaagggggtgagatacttgctttacgttatgatttaacagttccttttgcacgttaccttgctatgaataaagttactaacatcaaacgttaccatattgccaaagtgtatagaagagataacccatccataactaaaggaagatacagggagttttatcaatgtgatttcgacatagcaggatcttacgacccgatgattccagatgctgaatgtgtaaaaattatgtacgaaatattaacactcctggaaatgtctcccttcgtaattaaattgaatcacagaaaactgttggacggaatgctagaagtatgtggtgttcccacagatagcataagaaccatctgttcatctatcgataagttagataagtctccttgggaggaagtaagaaaggaaat

SEQ ID NO: 12640 - DNA, 549 bp, Diabrotica virgifera
ctatcatcattatccttctccagttcaaatacttttccacttttctttaacctaaaccaccctcctatcccagtttagggcaccggagatttctactttaacaattataatcattattcgaaacatcaaatagtctttcaaatttcatttcaacggtttaacaaggcttcctttaattcgtattcaatcatagcacaccaacaagctattataatacgaaattaattaaaataaataaaaaaataatgtataaataataattctctaaatataaaataaaatataatttctatgtcattaataaataaaataaacttgctattgttacagtcctatgaatgaacagtagatttaggctactggttcatttgccacgtggcatttccaggttgctaccaagcaactggcatatacctaagtatactgtatatacaaataatttggagatgatttaatcatatttctgtacatacgtgtttgctaaaacgttgtttaataaatctttgttaatagcaaataataaatttcctctaaattaattgtatataa

SEQ ID NO: 12641 - DNA, 542 bp, Diabrotica virgifera
tttggttgacatgtagacaaaatagtataataaagacaatgattttgattataaaatatttaaaaacatatagatatacataaataactatggcaggttagtaaaaaaggtaacgaccagcttcaaattagaaagaagagaagagaatatttattaaaattatctgttaccaaaaggtctagctttagctaaactaattaagattattctcgtgtgtctcaacagaaatttttataaataaattctacttctggaaacttagggaacagacttacagattggcataaagatccgtatagtccattatttcacggtttttgctctaatttttaaagaacctcttggattgacatgaaatttggcatgcacacagcttacatgtcaagaaaaaaagtgatatgtgccgatgtgtgctttcgccccgggggtgactctcaccccccttgggggtgaaaaaatatatgtccaaaataagtccggaaatgggtaaactgactaattctaagcaactctgctctacagagcctcttcgccaagtcaac

SEQ ID NO: 12642 - DNA, 549 bp, Diabrotica virgifera
aatatgaacaacaatacaccgatttcaactcaaagttataacaattcaaatgttaacgtagataggacacacagacaaaatgtaaataatcaattttgtaccaggagtggtcgaatagtaaatagaccaaaaaggttttcattttcagaatagtaatgtggcaatgtaatattgcaagtatatttaatttgtatagatagtttagttttttttaaaaaaaaaaaaaggggcatgttatgtagtgttaagttgtaaactgatctttatatttgtaaacctgccttaacattagtgacatggtgtgaactgtgaagtgaagatggcaacggacatggacaattgacagagaggtggagggggctcttcagatataatccgtatgtaataaatgagtttgtattcaataaatactaaataagaaactgtcgtcaattctataattctaacataagcccacaagaagaacataacacatattgtcatattaaatccaaaaattcggtccccaatcatattttttaatgttataatttttttgtgcgttcggat

SEQ ID NO: 12643 - DNA, 546 bp, Diabrotica virgifera
ggctgtctggcaaacgtgttaaagtcttttattaagtttggaaatttaaaaatggttaagggtgtagtaataatattccatattttgatgaaatttatgaaaggcgtttgttaagtaaggaaaagccatggatgaagaaatacttgatacttgggaatgcattgtatgctttgaaagctttgcttgtaaaattcaattgactgcccatttaagaacccatgtaggtctcaagtcttttgtatgtgtgatatgttcaaagctatttatgaagaatagtcagttagaagaacacttaaaaagtcatgaaagggaagaaaaaattaaaaaggaagttattgatgattcagattatgttgaagatattaaaggggaattacaatttgaagatgatgaagaagaaatagaacatattaagtttgaactggttgaagatgatgatcagtttggtgaaactagtgatattgaagaatattcatctcagtgtgtcgtgtgttgtaaagactttttcatctcttaatgaattatctttgcatcttaagaaacaca

SEQ ID NO: 12644 - DNA, 547 bp, Diabrotica virgifera
aaaccttttagtgcgcatgtcacgaattactgacttactcttagcaaagaggtcatggcgcgcattggtgacacaaactctttcacactaattctttcacttgacacatgtctgacgaaaatcaaaaagtggtgtagtagcgaatgagttaaccatttaaaaaccctcaaaatataatgctctcattatatgcttagggtaccttggacctatgtatgacatgaataaaacaatcctggataaatatgaaaagagtaaaaatgcttatgtaaaatttagaaaagcatcgtattttgaacacctgatggcagaagagatgcgatgtgctcgcaaaaatgtaaatatgatatgcattagaagaattttgactaacataaatacatcacaagaagaaacttcaaatttgccatataataggttcgatttatagagattactaagatatgtcgattgtctagatgtaaatttttgttgagacatccaatacaatgaagaaaatacacattattattttcaataacatgaaaacaactatttagctgtgata

SEQ ID NO: 12645 - DNA, 546 bp, Diabrotica virgifera
accatgtacagtcatgtttctcgttcagacccgataacaatgataaaaattaaaacccttcttatatttctattatttttcgggtgtgtaatgggacaatggatgacctacgaaggattttttaaagcaattagaaaaacacgcgatatagtaggtggaaatattataaggacacaccaaaactgtgataaatattctgtacagatcgctccaggtctatgtgcgcacaagtttggagtataaatagaggttgtgaggaatctgaaattattgttacaggttacagtgagtaactacactttcacttagccacaccactcgttcctccggaagaaatttaacaagagtttccctaaggcaccactaggattcgagtatggatctaccgtagtcagtcttgttgaacgccagaattcattattatttattatctccactaactttttttcaaactgaaccattagtttccagaggaagtagtttcgaatatttttgtataaaattctttatagtttgacttgaatattaaatatattttataatatt

SEQ ID NO: 12646 - DNA, 548 bp, Diabrotica virgifera
tgagtttgttgtcacatcacatgctttttgtttgtatatactttttctcgcctatctaatactcttctctttgttatgagtttttaaacgcaaataatgcagtatcccattatgaaaaatataaattattttttctagatgaaatagctactatatataactatctggacgagttgataaacacagaaaatgcgggttttatctcataactcataaattggcctagttaactgtatatttgggttccttatttaaaaaaattttaatatattagactaaacattttttaacattagcatttgtcgtgagacaaatttacagccctttctagattttggaagaaatcttctttttaacaaatattaattatattatttttaaaaaggaataatataaaaatggtattctagaatgaatggaatatttctagaaataaagaaaaacttatcaaatttgcttgaacattctgttttcatagaggttattgagaaaaaatgtttattttctgtgtatatgcaaactctaaaacgataaaacgaaaaagggcc

SEQ ID NO: 12647 - DNA, 533 bp, Diabrotica virgifera
tgtttgaaaaagtcacttagatcgagtaacaggtttaggagatatgagacatgaaaatgaccaggtttttaagtgggccgatttctatgcacctaagtttatgtaatcatttccatgaccagaacgagcataagccattctgactcagttatgctccttctcagaggcatctttcagtgcgtcacagttttttcgatttctttctaacgcattaagttgtaagtgacagaaaaaaggtacgtcgtgattaattcatttataacatttattctagttgttgatagatggcgctataatcgaacaaaaaatgatttatgtattatctatacgactataatctgtacaatttataagactatacaaatcaaagaacgttcctttttataaatgaaataaacacaattgatttgtttttataccaaattacgattacgattctgacaactgtcagatttaactaaaatgtcatgctatgattctttaaattcttaaaatcatatattacatcattaatgacactgaaagactgagaa

SEQ ID NO: 12648 - DNA, 549 bp, Diabrotica virgifera
  SmartBlast Evalue=7E-10; Info=Minus-C odorant binding protein 3 n=1 Tax=Batocera horsfieldi RepID=D4P8G4_9CUCU
ttgtgttgggcaattatttattgatttctgtgaagcacgaactatgtggatttttcaatatatcttgtgtgtttttttcttcgtctatttacctatatccgtcaaggctagtgaacgtgtagaaactcaccgacaatgtcaggctaatacaaaaacaaaactttcagatgatatagttcataaacttcacacaggagaagaagtaaatgatccaattttaggtaaacacatgctctgcatgtttacaaagatgcttataatgaacgcagatggagatataaatgcggaagtgctgaggacaaaagcaaacagagctttgaaagatgagaataaacttaatgcgttggtcaaaagatgtagcatcaaggagccaggaagtgccgaagatgctgccataaaattacttaagtgtgttgaaatagacgtcccagtgattaagcaccaatacacgtaataatgacattttaaaagatttaatttttaaataaattaattaaaataaaaattattatgtcagctgtaaaggaaaaaaataaatagttgttgatg

SEQ ID NO: 12649 - DNA, 549 bp, Diabrotica virgifera
  SmartBlast Evalue=4E-29; Info=Odorant binding protein 09 n=1 Tax=Tribolium castaneum RepID=D6X1W1_TRICA
gaagattgtggtgggattgtgcgtagttttggcagtacactatggattttgtgcgatgtctgaaaaacaaattaatgcaactaaaaaactggtccgaaatacatgcatgaataaagcaaatgtggctccagaaatcgtagatgctatgcacaaaggagattttagtcagggacagtgctatatatcatgtatcatgaacacgtacaaattgataagccctgaaggtacttttgactgggaaggaggaataagaaccatggaagcaaacgcgcccaaaagtctcgtagctactgctagtgtttccataaagaaatgcaaggatgcgatgaaaacaagtgtcaagtcaaataagtgtcaaggcgctgccgaaatagcccaatgtatctatgaagataatccacctaattatttctttccgtaaactacttaatggaggtttcgtcgtcgtcaaaaatgttcgtgtgattatttttaagtatatttattgaatacattttataatgatgccatttattacttactggagtcaataaattttgttgcagcatt

SEQ ID NO: 12650 - DNA, 548 bp, Diabrotica virgifera
  SmartBlast Evalue=1E-28; Info=Mitochondrial ribosomal protein L50 n=1 Tax=Culex quinquefasciatus RepID=B0WMS5_CULQU
cgcacatatccagtcgaaaaatatggcagcgtttctaaggcatggcgttttcaaaacaggacgagttgtctcttcaaaaaacgtacttttgaggtcctttgccacgaaagctgagaagaggaaaggaatcgacagaaaagttggcccaaaaatagactccacagctcaatctttagcttcaaaagggtttctgaggcaacaaagagattattctccacctgaagatgttaattccaagttagaagcaatcttccagaccgtcgtcggtagttcagatatatctaccgaactcacagatctgaatcaaaagtttactttattcatgcagtgtgaacagcaactaggccatagtattcctaattcgttacttcatcacatgaaaacattgaaggacgttcaaatattctataacatgcccgtacgatacaagaacgccactggaaagaatgaaatccatggacttgccggaaaatttacatgttcagtacgaatataaacgatttaatgctgatactgatacgatgtttggaggaaaaacagcattccct

SEQ ID NO: 12651 - DNA, 550 bp, Diabrotica virgifera
tgaacactgaacatattattatttctatggagagaacagacaacactcagtcactcaacactactcaacagtcgcgtgttagcagagtcgagcagaatatcgttactattttcggttataatatatataacctattttccttattctattatcgcggagggattgtgttaatgaatacattgtagaattataaactgtaagtgagtgaaatactttgcaattttgcgtttgtgtaacacataaacctggaaaactactcattcctacgtattctaccctacacgacccacgagccacatcttagattagtgttgtaagttgttgttatttttttttttaattggaagtttatacggagttttatatcaacaggttgtggatatacctatagttccctaaaaatgagcaagcgaaagaaccagccctccttggattattttttgttaagaaaactaaacaaccagaaatagaaattgaagcggggccaagtaaagaattattattgaagcaataaaaaacgttgcagtttcgcaggaatcgcaagccagtg

SEQ ID NO: 12652 - DNA, 548 bp, Diabrotica virgifera
ttgttaaacacgattcttttttattttaaacttaaagttttgtcgtttattaaaagcgttgtgggaagaacaaatctagatttacctcacaaataaatacataacctatcgtttccatttaacccattttatataaaaaaataactcgaaagtattcttaccttccgtctgaggttcaacttcacgtgctaactgcaccatcttttctcctctagacatcatctttacttataaaacacaattattatgccctaacgtcttaaacatgtgctaagtaaatattctgaatacacaaatttggaatgttaaaactaggtaagtctagattctagatagccacttcttccaaaacagtcgggtgatacggaggttgcacaaacgagccacctttagttatctacttacaacattcaaagaaggtcgcttgatatttatacctactttttacattgtccagtagatgactcttacctattatattaaggtacctactttttgtactgaaaactacatgatatttgaaataatatggtatagatatgtcaaaa

SEQ ID NO: 12653 - DNA, 542 bp, Diabrotica virgifera
  SmartBlast Evalue=5E-19; Info=Endoplasmic reticulum metallopeptidase 1 (Fragment) n=1 Tax=Harpegnathos saltator RepID=E2B4B7_9HYME
attaattaaaacagcagtgtcagtctcattaacaccatgtattttgaccacaatattttttatcttcgtataaatattgatattgtcagttttcaacagattaacatagtatgatccactagctaattgtatatctaattctaatttttgattggcatttgcattaagtttaatctgctcaatttcccgttttaaaaaatcagttgccaatacttcattttcgtatgatccaactactcttggtcctatattagtaagaacttccaaatcattaattgctctttcagcaataaatgaatcaggatgggttttctcgtcttgtacattcagtgcagtcggtaaatttttatcaatataataaacagctccagtcaacaacaaaaggtatattacggttacaataccaaaatagaatggtaaactgtgaatattattccttatttttcggaataattgggagaatcatcattccagttattgggtaaatcaactcgtttcctcattttaatttattcgggattcaactataacatttacttaac

SEQ ID NO: 12654 - DNA, 545 bp, Diabrotica virgifera
ctttttgtagtgcaagttaattaagaataaacacaataaacagtttgaaaatgattccttcaggttcatacacagtttcagataaaggcacttttcaagattatttgaaagcaattggatattctggagatgtcgtaatatttacactagatgttatacatgatggcgacagatttacgattaatgagaaacacggtgaccgtgtgaaatcaaccacctttactgtaggagaagaatttgatgaaattattatgggaaaaccagtaccgagtatggcatcaattgataatgacacccttacgattaaaaatggcgatacaactaaaacgttcactgttactcccaccggcttagaaatcctttataagactcaaaatgcttcaggaacactgatcttcaaaaaagactaaactcatcgaataatttttatatacactctgtacttattttttaagaaaattacttccaaaaatatgttttaaattttctgtttaatgcatcgaaaaataaaatatttattaataaaaaacacatactttattttt

SEQ ID NO: 12655 - DNA, 547 bp, Diabrotica virgifera
ggaatggactctactataaaatgcattattatcaatgtaccctattataaaaattaaatcataaatgtttcatagggaatatctaaaatttcttgttaatattttaaagattcttttatagcacagtttagtgtccagtgacataaacgtagatataaattcgtgttttattaatgattatttaaatatgtagatattaatataatcggtatattaaataatctaaaatcagttttctaaacggatcttttaaatattgaaagatgcaaattgagccctataacaataattattgttcactaattgaattgtatttattaacaaaataatctttgggattaccaaagatgatcagggcgaataaaaacaaattttatgtaatttaatgttttgtattttgataacttgtatgaagaaaaatttggaagtacaccgcaagaaaggctgagagaaataaatgatatggtaaagctccaggggaggatgaaattgcaccagaaatgatcaaatacttaagagaagaaagggaaagactggctatggacaa

SEQ ID NO: 12656 - DNA, 547 bp, Diabrotica virgifera
  SmartBlast Evalue=2E-56; Info=B-cell CLL/lymphoma 11A n=1 Tax= Culex quinquefasciatus RepID=B0WVG0_CULQU
agtgaagcatataaacaggctttacaagaatctagtactgccctgaaacttcagtttcataaagacagggacaacaataatacaagtttactaactcaccttaaaattaaagatgagtttgccaaaggtttgttaccagtaccacctccacaaccattacctctttttcctccatttaacgatacatttgatgcatccaagcgactgaaaatggaactagaaagaaatgactggtggttacctagtttaccaagagacagtaagggactacctggtcctagtgcactacttccaaatcctttaatcaaaaaagaatcacgacgtaacgatacttgtgaatattgtggaaaagtttttaaaaattgttcaaatttaacggtacacagaagatcacacacaggcgagaaaccttataaatgtgaactttgttcctatgcttgtgcgcagagttccaagcttacacgccacatgaagacacatggtagaatcggtaaagacgtttataggtgtcgattctgtgaaatgccgttttcggttccttcaacat

SEQ ID NO: 12657 - DNA, 536 bp, Diabrotica virgifera
gtatgagttattattattttttttattaaataaaccgcgtcaaccatgaaaggttattgccggggaagagttgtacataatatcagatgtttgcttataacaactaattacaattgagaacttaagcttatttttatattagattgtaaaatttagttttacaaacttagtcactttatcacatttactatagttcagagcacttttcagatcacttggtaaatcactttgaagtcgttccaggtgatagagtgggcaactaacaataatgtgttcgattgtcagaggaatatctcaaacatagcacagttttgttgttctttcttcattaggtactggtgggttaacctggtatgtcctattctcaagcggtgttgtttgacttgagctcgtcgtttttgtggcattatcccttttggtgacaaatttgggttgatgcgttgtagtttgttgtcatcaagctttttccatctgtttttttatttatcgttggaaggagtattttcctgtgatgcgtcagtatcttcagaggtgtc

SEQ ID NO: 12658 - DNA, 544 bp, Diabrotica virgifera
ctgcagatagcctgttgctaaacaaaatatctaggtattttccaaaacgataatcgggtatactgtgtcccctatttttatgaataaaatatgagcggcaaacaataattatttactatgtttagccgcctcaatttcattagggcgtcattggaatattatactacactctttcagcggaagaagcaacaaaaataaagattaggtactttagaaataacgacgtcgctgaaattttgaagttcaacagtttatggtgccagatttcgtttgtatgatgatttatcttcttcaagatatttgtggacttacctatattcaacacataaaattaaagtattatacgctttttggagatattaagtcacaatgacgacctctcgcggatttcagcggaatcaaaattgaggcctttttatttttattgcactgctataatggggccttttactgtcaaatcgttgtcggtattttcgaaaatcaaataagtgaaaaaatttagtagtcccatccattaatctaccagcatcttcttcttatgcaa

SEQ ID NO: 12659 - DNA, 548 bp, Diabrotica virgifera
  SmartBlast Evalue=2E-74; Info=Phospholipid scramblase 1 n=1 Tax= Culex quinquefasciatus RepID=B0WES2_CULQU
ggttgaagttcttgaagctttgactggactttgagaccaaataagtatacagttaagaatagtttaggtcaaaaagtttactacgcagctgaagactccgattgcttgacaaggaattgttgtggtcccatcagacccttcgatatgaaaattctggataattacaggaacgaagttatacatctccacagaccattggcgtgcgattcctgttgctttccatgttgcttacaaagtatggaagtatcttcaccacctggcacaattgtcggtaccgttgaacaagaatggagcattttctgtcccactttcgcaataaagaatgccagtggagacaccgttttaagaatcgaaggaccatgttgcacctggagcatttgtggagacgtggagttcaagataatgtcaggagacggtgctgtgcaagtcgggaaaatttccaagcagtggtctggattgatgagggagatgttcacggatagtgactattttggtataactttccccatggatttggatgtccgtatgaaagctgtcatgttgggcgc

SEQ ID NO: 12660 - DNA, 548 bp, Diabrotica virgifera
  SmartBlast Evalue=1E-37; Info=NEDD8-activating enzyme E1 catalytic subunit n=6 Tax=Sophophora RepID=UBA3_DROME
acacaatgatattggctcatcaaaagcagaggtagcagctgcattcataaatagaaaagtgcctggatgccaagtaactccacattttgtaaatacaagacttgacgaaagttttatagacaattcatataattgtgtgtggtttggattcgatagttgctaggaggtggatcaatggaatgttaatctcattactaaattacgaagatgatgttctagaccaacagtcagttatacccatagtagatggtggcactgaaggtttcaagggcaacgcccgtgtaatattaccaggaatgagtgcctgtgtagaatgtactttagattatatcccctcaaatttaactatcccctttgcactatagcaaacactcctaggttaccagaacactgcattgaatatgttaaagttattttgtggccaagggagaatccttttaacgtacctttagatggagacgatgctcagcatattacttggatatatgaaaaggcattagagagagcacatcagttcaacattccaggaataacgtatagacttgtgc

SEQ ID NO: 12661 - DNA, 548 bp, Diabrotica virgifera
ccaccagtgctggcggaagaattttaataagttagttaattcatataatcataaaaattccaacacaacgtctttagaccactccatagtaaaatgaccacggcactggccgtaccagtctctaaccgagtcggaagggttggataggtacgtacctgttctgtatcagcttatgacttcctttgaactgcgttcatttctcttccaccgatccatgccggtcataaatagagagtcccatcctagcccaagtatcgtaaagcacaaatttttagtgaaataattatatttcacgttacgttgattgctgtctttattttttatctttttctattacgtattttctatttctctttacctaccacgacacgttctatgggatctcagatttatatatttacatcgatattaattagatatatgaccttccattcgtaagatcagttataagttaccaagcatatgtatttatattggtgggatttaaatgtattttattatattaacaaaatataaaccttcaagacaataaagacaaaataatggtg

SEQ ID NO: 12662 - DNA, 547 bp, Diabrotica virgifera
tattcgagcaccagactcttcctgtagtgatgcaatttttgacccttgtcgacctattattcttcctacatatttcgattcaacagttaaactttcagagttttcatcagatctcctttcccttccttccctatcaggtttcctgtctcttccatccctatcaggcctcctttcccttccatccctctgtctccaattagtattttgctctctggaattaccccttctgaaattttgttgagggcggtcctgattccaaccatttgcattatattgcgtatttgtgttatattggaaagctggatttgcgggttgctcataaggatcgggattgtcgtcccagcagtcatccatgttttatctttttctttgcagttcacacaaaaacaagatgtcgcaatactactgcttgaaatactgatttaataattattttcgtacgtaaattcagtaaatatagtcaagatttaatacctttaactactgaataaacactgtgatcaaaaagtgactgaatgaaatcggaatcttgaatctacaatctacc

SEQ ID NO: 12663 - DNA, 545 bp, Diabrotica virgifera
  SmartBlast Evalue=1E-34; Info=TATA element modulatory factor n= 1 Tax=Camponotus floridanus RepID=E1ZVB1_9HYME
ctaagcagacgtgtactagaactaaaatggaaggcagcgactccttgttgggtagactaacgttaaaaaaagtcaaaaggggcacaacagagaactttcagaggcctcaagtattagtgatgacctacatccaccagaagtagatagactgttgaagaagatcgcagaaataactgagatattagaatctagggaatcgaaattaatagacgttaatcgaagaaacgctgaacttcaagaagtaaacagcagcataaaagaccagttaaatactattatgagtaagcaattagacagcgccgatctgtcacaagtaacggacgaatacacgcaacgaatatccatattagaaaagaaattccagcaagcgattagagaaaaggataattataaaaaacaattagatcaaatcaaggtagaatccgcaagtaggcttagtaaaggagaaatgaaagttaatatctgaaaaggaagaaacgatcaaagaattgattcacgaaggagaaaagttatctaagcaacagttgcagcattccaatatcatt

SEQ ID NO: 12664 - DNA, 545 bp, Diabrotica virgifera
gtcaaattttaacctaaacaataaaccgttcagctcactgtcaacaagtttaagaatcaaaacgcaaactgttgtgaacgtgtttgcatctggtgaacgcagtcactgtcattaaatatgtcaaattcagtttgttatcaagcgttaaatagatatctgagcattacgaaaacattatttgtatttttgttagatttattaataatttttaaaatgacttttactataaatacttaaatataacgttattcagagatagcataaaaagttcatacacaatggcgatatttttaccttttgccacctattggaatttctcgaaagctactataatctagggatattcgcattaccaacaaacgttcaggcgtagaacgtgtatataactgtattgaacctcagtcagttgaactatagattaacttagttatgagaaatcggccgtaagtgcgatgctctgtgatgtacactgttatttaaatgtattcaatgtttcttcatcggcaatcggcgatgtgcgtcaatataccaggcggggtgcgatg

SEQ ID NO: 12665 - DNA, 547 bp, Diabrotica virgifera
atttttaataaatattttaattcgaaaaatttaataatactaaacaaaattaatgtcccaacttgcgcagaaaatgggatctccatcaggttgcaaggtattgaaggtctttattaatacttctcctggtctcaaataactaataggttcaaaagaaattttcgcttgatatgaatatgtatttacatcttgtagtggacatgtccaagtcgtacatgtatcgctgggggatatccccaactcccaagaaatgcctcgatggacatattcagcaactgcactcacagaatccaatggcggaacatgagtttttcgactcaactcaatttcgaccgacacttcagagtatcgttcaactgtgcaaggtgtttgtatacaattaccaaatttcacatcagttacttctaatattgttccacaatcagtaaagtcaattgcacacttcgccatatccaataacacacttaaaagtaatgcatattccagcctcattttgtgtgattatttctgttcactcactcactgtggaatacaaacttatcaaaag

SEQ ID NO: 12666 - DNA, 546 bp, Diabrotica virgifera
  SmartBlast Evalue=3E-53; Info=Dynamin n=1 Tax=Culex quinquefasciatus RepID=B0X002_CULQU
tgggttatgttgttcacgtgattgtagtcgttttctttgccgttcgcattcgcattgacggcccaaggtttgtcgtcgtcgttgttcaggtgagggttgcttgaggatctagccttacgtaccatctccagggattctgcttgatgcttcccgaacatgcttttaggacgggatggtctatttccgctctctcccgccgacttaatcactgtgggaactacctggatgtctttgtaaaaatctggatgtttcgtattaatataagccagttctatcgcgacaagattctctaccattgagttagttgtgggcaggcgacgccttagaagctgcgtgacgacgtcgactatttcttcgtagagtttcggaaatcggagcatttcctgttgaacttcgttaccgcagtgctgtataatccgttgcatttcctcatgaatcagttccacacaacgcagcgatggctcctctaatcgtcttatctgtcgtttaactaacaactcgaatgaaacttcgggtacaaacaatgctggacgtggtccattagca

SEQ ID NO: 12667 - DNA, 546 bp, Diabrotica virgifera
  SmartBlast Evalue=2E-27; Info="SH2 domain-containing protein 4A, putative n=1 Tax=Pediculus humanus corporis RepID=E0VX42_PEDHC"
agcaagtaagctgtgagagtgagacgcacgcgctctagacgtacttgcacatgttttgacgtttgaatccaaagaactcttgattttttaccttatgacttttcttcgtttgttgtattatttgtttagtgctctattggaaaacggaaaaattgcggtgaagtgactcgatagtttttccttgtagggcgtaagataaaatatacaagatatatttagtgcagagtttatttagatatcaagatgctgcagcaaatcctacgcgacatgtacgttgacccagagattctagcggagctagatgaagatcagaagcagactctgttttgcaagatgcgcgaagagcaggtgagacggtggaagagttggaatgacagactggctgatgatatggtcaaagaaacgaaaggaagtaaaaagaaagttgattttttactgggagttgatggacaaccttgggtgtgggttatgggtgaacacggagacgacaaatccatagaagatattttaagagaagaagcggctgaagaggcgagaatattagcg

SEQ ID NO: 12668 - DNA, 547 bp, Diabrotica virgifera
ttaggagttttctgtttaaacatctttaatttctatactatcattattgaaggtaccgcaagtgttaccgcttgtttattattatagccagaactttccaaaaatagttttgttttcaatttttggatgtcgattaaatattttcagtttatagcccatgtttggcttgcatttactggtatacctcttataacttgtttatatgtccatacttttgtttttggcgatctgattatttttaagtagcagatctctatatatgttgctctcactagttcgtagtctctttcagggacttttacaaggtactgtcaatacatatgcaagctcaaattgaaccaatacatcacatgatgatctcatagcattagttcaggctcaacagtgaatgacaccaagtagagtagttaagatgaaaggaacagaaaaacaagaagaaatctacatattttagtattttcaaggataacatacgaaagataaactgtaattttgtatttttttcctgggaataactgcttccagcaaatcaatgcttatacgaata

SEQ ID NO: 12669 - DNA, 545 bp, Diabrotica virgifera
  SmartBlast Evalue=3E-52; Info=Probable ATP-dependent RNA helicase DDX43 n=1 Tax=Camponotus floridanus RepID=E2A0G5_9HYME
caggaagaagaaaaaagggattatttctataattttgttcgtaatatgggagaagacgacaaaattattgtattctgttgaaagaaagcagcagtaactgacattaccagtgatttacaagtatttggtgttaattgtgattgtttatacggagacaagccgcaagaagatcgagaacaggcatatttagacatcaagtctggtgtcaataggttactgatagctacagatctggcatctagaggtttagacatagatgacgtcacgcacgtcgtgaactacgatatccccaaaaatattgaagaatatgttcaccgaattggacgaactggtcgtgctggcaaatatggcgaatctataagttattttaccaggagggattggtcacacgctgcagaattgattaaaattttagaggaagcacaacagttcgtgccggaagaattgcgggaatttgcggatggatacgcagcatggaaggagaggaaagatcgggaaggaccggcgagaggtggagggtttagaggaggaagaggaggaagagg

SEQ ID NO: 12670 - DNA, 547 bp, Diabrotica virgifera
  SmartBlast Evalue=2E-18; Info=Protein 5NUC n=1 Tax=Camponotus floridanus RepID=E2A7Z9_9HYME
acatctacagtccaatcacaatattcataatacttttgtttaatgtaaaaatattgaaagtgacagttcaattatattgaaccacaatcatatcttaaaacatatttaatgttaaacaagataaggcgatgaataataactttttagaactaaatatttgaacttcaccatctgttacaaaacttattctaccttgaatctcagcaaaagctggattatagttctgaatgtaccattgtgtaacatctacgtcccccaaatcggtacttattctgtcgaaagtattttcctttaaaatataatgcccatcgttaccgtcggccagaaaatcttgcagaatgattgtgtaattcatagaaagatttatgtccttataaattggtacatcacaatttccacatcttgatttgacagaaactaccctagacatcggtggtttggatctatcgtagaccactcgaagaccagacacttgtagaaattcaccataggaagtctcaccgtcacttctaatgcctagttccaaagtttgaaccaaatctttacc

SEQ ID NO: 12671 - DNA, 547 bp, Diabrotica virgifera
  SmartBlast Evalue=1E-18; Info="39S ribosomal protein L52, mitochondrial n=1 Tax=Culex quinquefasciatus RepID=B0WM97_CULQU"
gggctattttatagatttttggaagtttttccaaatattctaattaacaatgcaggcaattaggcctgctctatgcccgaatcttttactaccaaaaaggaacttcaccacatccaatacagtaaatctaatacaaaaatggagaaaggaacgaggcttaccaatgaatcctactaaaagtggtgttttaactgattcaccagattacactttcctagatggtagaattacaccttacggacagggccaaagacagaggatcttagaacaacatcaagtaaagatggatatcataaatcttacaaaagaaatagattttgctgtagataggcacaataaaatgctagcagaggctgagaataagaaaaaagcaatattggatagaaaattaaaaccgaaaggactacagttgttaaaaaaggttaagactagtgataaatagtttttttgtattagaaagtatttgaaaactgcaggtttttgttttatttaaatgtatagatgtaattagaaaattgttataatttttaatacagtaagtttttag

SEQ ID NO: 12672 - DNA, 545 bp, Diabrotica virgifera
caaaagcgatgctacaatgatgagaagtcttttgtgctaagtgttgtggtttttacttagtgggctcaaaaagttccctttgataatggttgccacatttcagataatatatcaaaaatgaatcattctagaggacgactttttaaccccaaaaataaggaatattaagatagtatgtttaaaatcaggaaatagttgatatcacaaaaaattagcaataaaaatattaattcaattgtgtcaagttcgacaaaaagttttatagtacctatataaggttctaaattgttttagcttaataaatacactcctttaaaatatgcaaaaattattaattttcaacatttaatgaatccaaagcggcagatttcctgtgattgtcaagattgttaatctaaaatacaaaattttagaatatttttgcagtttttggcagtttgacaatcgaaaaaggtaaaagaaattaaaattataacagttattttagttaattcgatactcaaatgtgtgttaaatacttggttaaaatttcaggaggatcagtc

SEQ ID NO: 12673 - DNA, 545 bp, Diabrotica virgifera
  misc_feature (26)..(26): n is a, c, g, or t
  misc_feature (56)..(56): n is a, c, g, or t
  SmartBlast Evalue=1E-54; Info="Chromatin regulatory protein sir2, putative n=1 Tax=Pediculus humanus corporis RepID=E0VTB7_ PEDHC"
gcaaaggtccattacagacatagcancttctgaacgttttatgagaaaacctagcngtatttcagtgacatcaaagtatctccagtactctctgggtggtttacattgcttacaaacttcaactgacatattgccatgtagttctgataaagcggttctaggtagacctgatcgcaaatgaagtccatcacaattttgagaaactacatgtttcagaatgtttttgcggtacagttctgccaatgccatgtgagtgtacgttggctctgccaaggaaagatcataattccctatgtctttcccttgttgcaatctagtccatataccatttgttcccctatagtcgggtatttctgcagctgtgcttatcccagcaccagtataagctaccaaatattgtgattgggctattgcttgggcaagtatatgacatttattatcaataacatcttcagggtcttccaattcctccaacctctttttagcctcttccctttcctccatctctcacgaatttcttctactatatctttatattgattcaa

SEQ ID NO: 12674 - DNA, 547 bp, Diabrotica virgifera
  SmartBlast Evalue=2E-24; Info=Sil1 (Fragment) n=1 Tax=Aedes aegypti RepID=Q16FD5_AEDAE
aacttaaatttttgaaagaagatgaaataccattcctgcattttcattatttttcttatatttttgaaagttacttgcagtgaaaaagataacaaaggcgatgaatttgttgctacggaagaatggcaaaccataaaagaaggtcagaaagtaccaagtggcttacattatcgtataaatgtccaaacaggtcttaaagaagcaaaactaatcggaaaagatcatgacgatacaaataaagaaaccagtgttctggaagtcccttccgaaaaaacacaagatcacccaaccattgatgagctgaaagaagtgatgaagaaaattaaaaatgatgatgtaaagcctggtgggaaagtaaaatctgattttcgaacttatgaacaattgaaagaggaattaggatccttaaatttaacttctaaggtagatgctgagattctacaagacctttttaaacagcaccaaaaagaaattactaaagaaaagataaatgttagatcagtacttaatattctagaagattttgattacttgggccaccattttg

SEQ ID NO: 12675 - DNA, 543 bp, Diabrotica virgifera
tttgttgacacgggctcctcagatatttctttaccattatcatcatggtcatcatcaatattgttctgttggcagtatttattcttcagttctaaatgtaccgcctcaatatccttaggttcattaccatgaccaacacacatatcatcaaaattagttagattataaaaattcttgtgattttgagcactaaacttcattgaataatttaactcttcatcatctagtacctctatacttccttgtgaacaagtactgtggctctgactaaaatattcagcatctggaaggtcttcactatgtttcacattattctctgtagctgcatcatcttctaagtttaaaatacctaggacgtaatcggttacattcaatgactttgtagagctgaactcacacgaaatattgccagaatctctagaataagtctttgtgccaaaagattgtctagatgaatcttcaagcttttttttatttctacattgaggattgggttctgtgctaactttgtcactcacgtctccactgtctttagtgttgtcg

SEQ ID NO: 12676 - DNA, 460 bp, Diabrotica virgifera
ccagattttgaagtacgagtaaaatgtcaatgtgaaccaacaacaacatcaagagtcaccagacccacaactaaagctcttccaacagagacaactgaagaagaaactactggaactactacaagagtaacttctagacccacaagcactgttgcagaaactgaaactacggaaactgaattcggttgtcaaactggctggacttcttggattaaccaagatgttccaagcaacgaggatgaattaagagaagaagatattgaaccagttcctctactgaagtacttcaacatttgaccgattctccaagatgtgattctgacatggttgctgatattcaatgtagaactgttaaggacggtaaatcagcctataggttgctcaagagacaggtttagatattcgatgctcacttgaagaaggtttagtgtgtcaatcatctggaaatggcgcactatgt

SEQ ID NO: 12677 - DNA, 539 bp, Diabrotica virgifera
  SmartBlast Evalue=1E-61; Info=Pro-phenol oxidase subunit 1 n=1 Tax=Tribolium castaneum RepID=Q49I39_TRICA
aaccgtcccactgttggacttgtaggatcttcatggctcccagattcgacgaaagaagaaacccatggcttttcagaactcaaaaagaatatgtttatcgaattggacaaatttagagttaatctgaaacctggaagcaactcaatatccagagattcaagcttatcttcagtgaccatcccgtttgagagaacttaccgaaacttggatagtcgtagaccagttggaggagatgctttggctagattcaatctttgtggatgtggttggccggaaaatatgttgataccgaaaggaaatgatcgttttgaagcagaactgtttgttatgatttcggactacgctaacgatagaattgaccaggacgttgtgggacaaccaggagatgcgggaagcttttgtggcattaaagataagctgtatcctgatcgtcgatctatgggttatccgtttgacagacaaccaagagctggagttgatactcttcagcagttccttacaccgaacatgagagttaggaacgtgattattcagttcaa

SEQ ID NO: 12678 - DNA, 546 bp, Diabrotica virgifera
  SmartBlast Evalue=1E-30; Info=Mediator complex n=1 Tax=Culex quinquefasciatus RepID=B0W526_CULQU
agtttatcaaatagaaacaaactgcagaaaatgagaaatagaaaataaattttcatttgctaattacgtagttttgactaaagataataaatatcttttgaatagtgtttaatgattagtaagtagaaaatatggccgacgaaaattcttggaggacggctacttttcgacaaagtgtagtcgcaaaaattgaagaagctattcgtcagtctggaatgaacacctctagaaacagtatagaaatggaaaatcatgtcttcttaaaagccaagaataaagaggaatacctcggatttgtggccaggttaatcttacatgttagagaaatgaaacccaaaccaggaggaggaatgcctgttcctggacaaggacagggagggcctggtatgcctgatcctatcaatgctctccaaaacttggccagccaaggcaccagaaattccattatgacaatgggtccacaaacggcacaaatgggagggcctcaacaagcacctgctactaatttgctacagaccttaaacagggaccaggacaacaaatgat

SEQ ID NO: 12679 - DNA, 543 bp, Diabrotica virgifera
gagcaacactctcattttgacgcctgtagacacgctgacgtccatctggacctcttaggactattctgctctcatctgagaacaatatcttctttcacacaggatgtcatgaatggatttccgaaccggctccaagaaatcctataggccaaaggcggcaacacccataacattcatatttttttttaattggactatgaatttcaaaactatgtttgaatttttttcgaagatttttaaacattggatttttctaagcatcccttgataaacaacttttttttcaatagtgttatttctttttctcaagggtagttttcaccgttatctttcataaaatgtggtccagatggaaatgtggtcaagattgacactttctacaaattgaaagaaatgcagggagttcggttcattgtaccggtgagtgtatattttgaatcaaataaaaaattgtaataggtacattgatttttttggaagtgtttgtatttctggtacagagccttcaggttgctgagtaacatataattaatcaagtattta

SEQ ID NO: 12680 - DNA, 544 bp, Diabrotica virgifera
ctttgataagaatataatttttaattatttatcaagattatacacgagttataaggttgtgcactgtaacctaaaagtttaagtgttagtgacaggctgtgggttttcctgtggcactgtggttgttttttactagggaaattatttgtaaaacgcccttattgatttttgctgttgggtgcagcgagacgtgcttggcatgttcgagttttgctattttctatttaacacagacagactctttttctaatcaccaaattgtgttcatcgtaattcaacagcaatcaaggctttagtttcgcgagtgacactgcgttttgtgcttgatttcctagtgtttatgttctgatgcacccatcgctagtggttgcagaaatcggtggtgattcacatcatgtcgagacgaaattcgagcgaattctcatccaaaatacacttctttttagttaatttattcgttttaagtaaatcgcaatcatcggctatgtttacgataaggaattgataattttcattgactgcatatattacattccttgttaaa

SEQ ID NO: 12681 - DNA, 546 bp, Diabrotica virgifera
  SmartBlast Evalue=2E-15; Info=Homologous-pairing protein 2-like protein n=1 Tax=Harpegnathos saltator RepID=E2C8W9_9HYME
atttttaatttcttccgtttgttgttcaatatttgccttttggtgcaaagcggaactaaggctgatttttcctttagcgtccgaaataagttttgatttggttttgtactgttcggcgacacctttcactttaatgtttatttcgtttattgatcggtccatttctaaaagcttttctctgagagtagatgctgattcgcccgtttcttgaacaatgcaatataccttttgctttccataagctttctccctaacctgttctttcttaactaagaaatccaaggctttttgaaccgcagattttccgaaatcgccttttacaccactctggatatcatttgcagaaaatggacgattgtgttcttctaaaaatttcaaaacaacctcgttgcaagccatgatttatattttttcgggtctgatcttcactggcacttttgattaccactgctttgataaagttactcttaattatcaaattagtgaaacttggattggaactgaataaggcctgtgtttatcttactgtagtcaggattgtcctcc

SEQ ID NO: 12682 - DNA, 541 bp, Diabrotica virgifera
  SmartBlast Evalue=7E-53; Info=ATP-binding cassette sub-family D member 3 n=1 Tax=Camponotus floridanus RepID=E2AJU7_9HYME
cgttaatgagaacgtctcattggggtattaaagaactttgtggaatttaatgatgttgtttctgaaaattaattttccgccgttgatctgtaaagattctgatccggaaaccattgttcgttggtattttccagagttaagttcactcaacactgtctttaattgtgtaactctagctgtgaaacctgctaggcgggttagatcccttcctgctaggaccaatcgaccaattgcttcggctaactttactaacatcctaccgtacgtgtaatacaatcttgatctttcgtttgttccaagaagcctaaagctgtgtccacttgtcataaatggcaacgacacgacccaaaatcctactactccggcaaaatatttagcaacaatgttgtccacgacgcccattgcgactctaaaccttaagaacttccttaagtgatttaaaagcttgttgtaactggccatgagagttgccttttctctagagttaccgttgtagaaggctacttcttctgaatgggtgattagacgtgaattgatatgc

SEQ ID NO: 12683 - DNA, 537 bp, Diabrotica virgifera
aagatgctgttaacgaagaagagtaaatacttgtaggcttaaaattccctgtaggactcacagtgtcactacagcaagtgaagaaaggatggatctttggatgaatatcagtagtagtagaatgttttcattgccacacactcattttgtggcaatgactttggttcacctaaggttaggaaagtacttttgccttaaactgcaaccccaaagaaagttaagataatatttgagtttatttttaggctcctatttttgacattttttacaacaaaaacagagacacaaattttaaactttttaactgtggccacgtgtagtagattgatcttaaatatagtctgaaggcgaataataattaaacacaaataaaatgaaagaacgttatacaacaacatataactcgtgaaaaagttatttaataataaaaaaagtgtagtcatgcacagaatcaaccgatatgtgtgggcaatgaatttatgttctcaaaacctatttttaaatataacactaacagaaacagagaattcacgtttc

SEQ ID NO: 12684 - DNA, 546 bp, Diabrotica virgifera
  SmartBlast Evalue=6E-26; Info=Endonuclease-reverse transcriptase n=1 Tax=Schistosoma mansoni RepID=Q4QQE8_SCHMA
aaggaagaactggaagaagctataaacaatattaaacttggaaaagcggcaggagaggaccaaatagatccagaaatgataaaattgatgggtgaaaaaggagaggactggctattacagatatgcaaggaagcataatatggagtacagagaaaatcccagatgactggaagaagaacctagttctaccaatatacaaaaaaggacaacataatgaatgcgagaattatagagcaatatgcttgtcatcggtcgccttcaaggtatacacgagaattatagagaagcgtctaagatcagtgatagagaaaaaattggaagacgaacaggctgcattcagatcaaaccgtcaaacaaacgataacgtctacatcataagaaatataatagagagacaatgccttaaagggaatgaactatttctcatgttcgtcgatctgaaggcggcatttgatacaataaacagaaatattgtggaaaatattggagagctataatataccaaaaaagatgataaaagtcataaaatctatatatatggaagta

SEQ ID NO: 12685 - DNA, 545 bp, Diabrotica virgifera
tatttaaaaccctttcattttgattgtcctgttttggtcgatatggccctggaattatttcctaccaaactgacgttataaaaacactgaaacacttcaactgcgcatgaagccgtcatgcgcacctgacagtagtaatggtatgacgtctataggcgtcattagcattcaaagggttaagatacaaatagcgattgcataatttttgcaccaagtgtacaataaactttacaaaatttcttcttttaacaaataaaacgaaacttttacttttattaaaatcatatggatcatagatcacatactcaaataataaatacccaatatctcaacactaatagtgaaaggaaagatcgagtgaaataaaggactaggaaggaaatggctaagaaacacacgacaatggatagggctatattttgagagaagacagagaagagtttgcaattgtatgaatctctatgaagaaacaatggccaatattcggaaaaaaatatcaaatgaataaatacagaataaagacttgcctcagataaaaaaatact

SEQ ID NO: 12686 - DNA, 541 bp, Diabrotica virgifera
  SmartBlast Evalue=1E-61; Info=Liquid facets (Fragment) n=1 Tax= Aedes aegypti RepID=Q16WV9_AEDAE
tctctcacgttctgtccttgatctttaccttcctccaagtattgaaaatcctttaacgtttgaatggcaaatatgttttctttgcactgctgacctactttttcggatcctgtcttaattaggtattctaaaagaactaaagctttgtaaacatgacgccagtttctgccgtgatcattaagtctcttccatatcatttgcattatttcgctgaaggccaccacattgtatgtgagatcggcaatttccgccattatggtactgctcggaccccatggatcgttagaggtcgcttctcttactttcttttgagcatcggagtaattgtgggcgaaattcttgatgtttcgcctgatgccagcgacattcacttgcatatcgtgcgaatttcgtctcatcttttgcggcactttgggcagatatcgacgattgttaattccgacaaaccttctactgatacctttgaatataatgttccttcatgaacactttcaatcacctggtcacttttgctaagatttatcagtacgatacaaatata

SEQ ID NO: 12687 - DNA, 544 bp, Diabrotica virgifera
  SmartBlast Evalue=4E-11; Info=Insulin-like growth factor- binding protein complex acid labile chain n=1 Tax=Camponotus floridanus RepID=E2A650_9HYME
ggacgctaagattgtctttataaaaaccccaatgggtttagaagaagactttcccctttctgtgccagaacaagtcgtgcagcttaacttatcttccagtcctggattagtacatcaatttttagccgacacagctaccctaatggcatcaaaacggctgcaggaattagatgtgacatctgcgaatttagaatttgtccgacaagatttacagttctttctaccccaactcaaagtgctctatatcagaggcaataaattaaacgatagcctagttaattgggtgaaatcctggatctgccaacaggacttcggcgcgccaaggttagagcataattttgaatttgtcatccagaacacgtcggagggctctgtggagaataagagactgtccggaactgggttaatgagccaaaatgccaatggagatgcaaagaactctctggaggctcccaccggtgagatctcgatgtacaagagcgagaaaaggagccatttctttcacacaattcttctcatcacttccactgctgttatcgtgttt

SEQ ID NO: 12688 - DNA, 544 bp, Diabrotica virgifera
  SmartBlast Evalue=2E-57; Info=Protein FAM109A n=2 Tax= Formicidae RepID=E2A9V1_9HYME
tgatttgtgaggatcttatgtctgaattgtaaatattaacagatttttatttatttaaagacctattagtaatttacgtacaatatgaaaataaatgaaaagaatctgtgtgcttttgcagtatcggccactccaattgacaaagaaggctatttaaataaaaggggggaagtaaataaaaactttcaaagacggtattttgtactaaaaggaaatcttttattttattttgataagaaaggcgataaggagcccgtaggtgtaataatacttgaaggttgttcaatcgaattggcagaggacgatgctcagtttagtttcaaaatagattttcatggaacgaataataggagctacatattgggggcagagtctcaagagtccatggaacaatggatgaaggctttggcttgtgctggttatgattacatgaaactaatggttgcagaactccaaaggcaattagatgatgtagagaaactccaatgcccatttcatctccacagcctgttgggtcacctgtcccaccgcctagaacaaggca

SEQ ID NO: 12689 - DNA, 543 bp, Diabrotica virgifera
gcgattaacaattgagatattttaacgcgtgagcggtgcgagcgcgttaatgttcgagattgttaatcgccattttaattcacgagttcgttacaaaacttttccgtcgaccgtacttttcagaaataaagatatatccatcttttgatttttcaaatacacagaattttaaacaataaagtaaataatgacatacaatgacagatagtactaacagcggctacttgattttaaattttttagtgggaatataaataggtatatgtttggttgcctacaccacaggtcactgccaatcacagagcgtttaattaatttatgcaagcaatgtatgttgtgttgcctataatgaaatcgttcattaatagaaaatcattcattaataggggtcattaatcaatgattttgagggtgttaaaattgatcataaatggacggtcgacggaaaatatatattatggttccgtgtacactgtgtacagcttccggaaagaaccatggccggtgacaaacacactcacctacactttacgcagagagctg

SEQ ID NO: 12690 - DNA, 540 bp, Diabrotica virgifera
  SmartBlast Evalue=1E-19; Info=Putative transthyretin-like protein ZK697.8 n=1 Tax=Camponotus floridanus RepID=E2AIC6_9HYME
gcaaaaggacgacgtaactgtcaagtcatgagtcggagtcgaaagagtcgaaatcgtcgccatattcgctattgtttagtgtttaccactattcctagttgaaaaaccaaaatcccaactgaagtagttcccctatttagtaatttttaatttttttataattttgttggctataaacaaatggaaacagaagaagttgaagttgtggaagttaataaagttaaccaggaagacactgaatattttattcctgttttattaccaacatcttccacaaaacctacactttcaatacattctaggggaaaatattataaacaaacatatcgggcggcttgggagcacatgcccgattttaaagggtggctgaagggggtagaaggtgagcctacaagagcttactgtacatattgccacaagaacttacatgcacacatgaatagtcttttaaagcatacttgcactataagacatcaaaaagctgctcaattaaatagtgctagaaagagtaaaatagcaataaacatgaaggagtccata

SEQ ID NO: 12691 - DNA, 539 bp, Diabrotica virgifera
cttaattcaaaattaaaataggggtgtttccctacttgtattaagtgttccaatgtaataatgaaattaatagcaaaaaggtcggaaaataatcctataggccaatttctaacatcactttcggttttcgtcttagttttcagaactaaatttaaggttatgtagctgctaagaaaataaatgtatatctttcgttttaaccttaagagaatatccgtatggatactaatattatgccaattgttcctaataataatttacttctattcacaattgagacctaactcgaaaaccccccgaaaatggcgtaagattcctaaaaagtgaggatgatttaggagacactcaaatgacatatcatgtactgaaaagcaatatcatattaaaaaccgttaataccagacaaagttatattgattttaactctagtttatgttttaaaaatggtacagacttggaatccatgaagatatcccaaggaagtaaattggaaatgcacttgtcttcccggatggcatggaaacgattgtggtatacct

SEQ ID NO: 12692 - DNA, 545 bp, Diabrotica virgifera
aaatggcacatctttatgtaaacatatatgaaacagtgcagaagtagcagctaaagctaatatggtccataaactaaatactttcagtctttgctttctatatttctgcatggatattatcaaagagacaaatatcatgcccatacatattaatgaagctaatttgtaagtaggtgttgaagtaattgagtgcttgaagacagaaacaattacagaaagtggaagtaaaaattgtatccatagaccattgctgctgcttgttggtcttggttttaagttatttgttctaaaaaactctccttccattgaatttcagtttgaaaccacgaggaaatatgaataatgtgttttaattatctctactgtcgcttttatcacattttatcttgatcaatgtaaaaactttgtatttttgatgtttcattttgactttttaacccttaaccgcaacctatcaaagtatcaaattaatcaaattacaatacaaatttacaatgtttttcaaacagatttcaaaagtaaatattgtacatctctttttcgtt

SEQ ID NO: 12693 - DNA, 542 bp, Diabrotica virgifera
  SmartBlast Evalue=3E-42; Info="Polycomb protein esc, putative n= 1 Tax=Pediculus humanus corporis RepID=E0VN79_PEDHC"
tttactttgatttttgatcaaatcaatatttttacataatactatgaaggaaaaaaatatggagaagataaagtctacaccaaaagaagatttatcaaaccacgaagaagaatctggggatgaaggagacgaaacctctagcgttggaagtgcttcaactactgacaatacttcacgaagtgccacaccaactaataaattacgaaaaggtcgacgaggcaagaaacgtttaagtgcttctatacccaaagttcttaaacctatatacacattttcctgcagtattaaagaagatcatgggcaacctttgtttggagctcaatttaatcatcatctgaaagaaggacaaccacttgtatttgcagccgtaggaagtaatagagtaaccatatatgaatgtccagatggaactggaataaaactgttgcagtgttatgcagatcctgatctggatgaaaactactacacttgtgcctggtcacacgatgaggatctaggaaaaccacttttagctgttgctgggtctagaggtgtgattagaa

SEQ ID NO: 12694 - DNA, 539 bp, Diabrotica virgifera
taggaggaagacgaccgacaaagtatactaggaactaggactaggaacatacataatctgtttattttgtttgtggtgcttgaaaatattaaattcattttggtagctcaatattacttaaatagtaggtaagtacaaagtatataaattttatttatagtttagtttcactaaatattatataatatttatatttaggtattatatttataaattcagcatgtttattttgatatgcacataatacctaaatataattttaagtatatattatatactcgcctatataatatttatataaataactaaaatttgtatgtacctacttactttttaagtaatattgtaaaatgtactaattacattctcgtatgcaatttgaatatgtaaatatgatagttggtagaacctaggatgagattaggtgatgctgaaaacatacttctgagcaatatagcatttgcttggaataatcttaaaagtatattcttcctacatactaaaaagatgtgcagtagtatattctaagtatataaata

SEQ ID NO: 12695 - DNA, 520 bp, Diabrotica virgifera
ccaaaaagtgcttaattttttggatatttcacgtcgaaatattgtatttgaaatttggtgagtgtggatctgtttttcattggctataactctggttctacgagatccagagacctaacgcgtacaccttttttacttttttataagctatatttttgctaagaacgtttttttcgacaaaatacttactttttgagttatttgcgaaaaaccgtcctaaaaatgtggttattttgttgaaaaatgaacatattcactcgcaaataactcgaaaagtgttgacttggcgaaaaagctctatagaacaaaagttacttaaaattagtcagtttacccatttccggacttattttggacatatattttttcacccccaagagaggtgaaagtcacccccagggcaaaagcacacatcggcacaataacacttgttctcttgacatgtaagctatacgtatgcccaatttcatgtcaatccaagcggttctttaaaatttagagcaaaaaccgtgaaagaatg

SEQ ID NO: 12696 - DNA, 544 bp, Diabrotica virgifera
cgcgcgtgttcttcttttacttcttctgcactgtcgactttcttaggtatttcggcttttttctttcctttttgttgagtcacaatgccattctttcgttttctaacttcagtttcttgttcactggatttgttctcaaccattactacattctcgttaagttgcacattagaagtaacggttggtgatgattttgttcaattggcagtttatcttcactaatccttgtagaatcaacaacagtgtaatagtgagagacacaaattctactatatttatctaaattatattttctcttataaaatttgaagctaacaaattgagaagtttgtaatttaaaatttccggatttgaaatgaaattaacaagaaataaaattagttttctagctattattgatactaatacttgacaagggagggaattccataattctgaattgataaagtgtctcataacattcgttgtcagttgctgaacaaaataattcttaacttttggatttgtactaataatgtgtgaatatctatacaattcttcaata

SEQ ID NO: 12697 - DNA, 544 bp, Diabrotica virgifera
  SmartBlast Evalue=2E-36; Info=Transcription initiation factor TFIID subunit 10 n=2 Tax=Aculeata RepID=E2ARK6_9HYME
gtcagtagaataacaacacaagtcattagtgatattttatggttttcactttttcactaatttatataaatataaaatgaaccacgacgacaaaatgatgatagaagataacaatccaacgctcggccaacctttgagtgattttcttttgcaattagaagattacacccccactattccagacgcggtaactgcatactatttacgatcctcaggactagagcctaaagatccacgattggtgcggctgatctcgatagcagctcaaaaatttatatctgatattgctaatgatgctcttcaacactgtaaaatgaggtctactaattcttcaagccacagtggctccaagagcaaacaaggcacgaaagacagaagatactgtctaactatggaagatctgacaccagctttggcagaatttggaattacgataaagaaacctcactattatgttaaaaatacttacctataatattaaatattttgcaatttattggtttgatacattcagggtaatttttggttttaaaagtacaaatta

SEQ ID NO: 12698 - DNA, 540 bp, Diabrotica virgifera
cagcgattccacgagatattcggcagcgattccacgagctagttctgagctgcacactgctggttctgctgcacgctgctggttctgctgcacgctgctggttctgctgcacgctgttgttcctgatgctacgctgctgttcctgatgctacgctgctcttcctgatgctacgctgctgttcctgatgtaacccgatgctgttcctgatgtaacccgatgctgttcctgatgtaacccgctgctggtcctggtgctgcactctactagtcctgatcctgcatactactactcccgataccacaggctactggtctgttaagtaagccatcggtggttcaggatcggtttccaaagcgatagtccaggttgcttcacgacggtgaccttccgagaacatcctacgaacatggtccgtgacgtgcctacgactgtggtctcgaaacgataatcgatggtttcgacggttattccagattttttcgacggtcattccaggagattctcgacagcggttccacgagattttcggcatcgattcc

SEQ ID NO: 12699 - DNA, 542 bp, Diabrotica virgifera
  SmartBlast Evalue=2E-12; Info=Transposable element Tc3 transposase (Fragment) n=4 Tax=Harpegnathos saltator RepID= E2C0Z5_9HYME
tatgtcatacagcccgtgaaacaatttaattaatacattgagacatttcctgggcgtgtaatctctggttgcggcaatcagaattggccttctagatcatgtaatttaacaccattagatttctttttatggggatatttgaagtcaaaggtttatactaacaaacttactgcagacttaatagaggcttacaaccacccgtgcattgaagaaggaatgcgtatttaagtatttttgcatatttaggcaaagtagtcatggaaaatttcgacaaaagatgtgtcgtatgtgccagcaaaacggtggaggctatttgcctaacgtgctatatataaagaaaaagaaacagtgttttctattatattcaaatatttcgtaaattttgggaaacaccttataagaacaaatcggtaaattttttcttgtctacagtcgcttgtaattataaatcgcaattagtaggaaaatatagaaaaaaaaatagaaaataatttgttttctttttgttgtcaggtcttctgtggtagtcgtgatatatgtat

SEQ ID NO: 12700 - DNA, 543 bp, Diabrotica virgifera
  SmartBlast Evalue=2E-12; Info=Transposase (Fragment) n=1 Tax= Agrilus planipennis RepID=D2WLV1_AGRPL
gatttcgacgcgtaggtttttaaaacgattcattttagcggtatttgttaaccctttcagctccggtgacgcgtacgcgcgtcaaaatataaatataggttattgacgtggacgtgtaagcgcgctttttgtattatattaggttgttcaataagttttgcggttcgatgagagatagcgctgctactggcctaattttgttttgttacgttggcacactattcaaatgaacgtgtgtgaagtttcattacaatctgtcaattcgttctttgtttacaagcccatatagcatcagttttttgggatgcgagaggaattctgtttgtggcttacttacaaactgctaaaataataaattctgactattattgtaaccttttggaccaactgaaggaataacttcgtgaaaaggacccggcttgcagaagaaaaatccttttcatcaggataatgcaccgtgtcatatgagcattttaacaatggctaaaataaaaaaaggttgcaaacattaaaggggagctgaaattgttaagtaaatcgggg

SEQ ID NO: 12701 - DNA, 540 bp, Diabrotica virgifera
actgttgctgtaggtcacaccaaaagggaaacgcctgatacaaacactgtttatttagaagatactgtatagcttctgttcagatattattaattttgacagtcctatcttacctaccaatcttattgagtaggcaactgtggcaattatatcagttgaaaattaaaaattaaggtaaaaataaaaaatattcagggcaattcacgttttcattcatcatagtgcatgggtttctatcaatgcttaaaatttaatgaaacaagccacaaagatatatacaaatactttaaacgcttttcaaaaaactgggcctcgatttttgaccattcgcttcgttatcgatcattcgctatctatacactaaacagagcctcgattttttcgtttcgtatactaaacacatacgaagcgaatatgttcgataacgaagtgaaaggtcaaaaatcgaggccctggttgtttatgtgggtattgtaacaatacaagtaataaaaatactattttcttgtagcatgttgtaagttgcaacattgttttata

SEQ ID NO: 12702 - DNA, 541 bp, Diabrotica virgifera
aaaaaattatttttggaagatagactgaagaattcactaatcattttagacgatgctagtaaaacggaagtattaacatttttcgacattaaagctaagactgtaattaccacgcagaataggagcatatagtgggacgcaatgtgacttttgtagaggtcaaaacaggtttttcctccaaagaatctttggaactgttcaaaaagtcattggatgtcaaacacgatctaccggtagccgcagaagaaattcaccacatttgccgaggccatccaatgcgcatatcgctcataggatcctacctcaacgaaaatgccgaagaagccctgcacggggaccatatttggcaatacatcatagatcaattccttaacggacaatatgagatctccaattagtcccaatcactgcagcagtggactaatgtttttattttcacggtgccagtagatggcgcataaatggtttaattttcaatatttttttgtgaaaattgttttacatgtacttctttttataataaatgcttatgcaaattctc

SEQ ID NO: 12703 - DNA, 540 bp, Diabrotica virgifera
  SmartBlast Evalue=1E-18; Info="Guanine nucleotide releasing protein X, putative n=1 Tax=Pediculus humanus corporis RepID= E0VQJ2_PEDHC"
attacaatttgaccagaatgttacaaattctgttaatggaatatctgattatataattaagaaagacctttgcaatatttacgtttagatatcaataaaatgaagtacaacgatagagagcttattacatttggggagaccaaagcagatttagaaggtgttctacatcatatgaagccccagggaaatgactggttagattggtaccaacgtccacatttcaaagaaagatattttaaattaacgtctaatatattgttttactataaggtaggagaagaggaacctataggtattttaatattagaaaatgcccaagtgtcatatgagaggccccataaaggaataccttttgcattttcaattacatttaaagtgaatgacagacttaaagacgaggatgctaaacatattttttcctgtagatgtgatactgatgtcagcaaatgggtttcagctttaaaaatggcttcatatgaatattggagatctcaatacgtaattttaaagaccaaaatcagtatgaggacggggaaggat

SEQ ID NO: 12704 - DNA, 542 bp, Diabrotica virgifera
  SmartBlast Evalue=3E-44; Info=Rootletin n=1 Tax=Harpegnathos saltator RepID=E2BI77_9HYME
gacttgctgcggatgttcgttccttttgacgcttgccgttctaatgaacggttttctgtctctagttgtctgaccttgttattaagggactcaattttcgtccttagatcatttctttcccgctgtaccgaatgcagttgatttttcagttcttcttcgtgatgtgaacatactccggtatccgaaggccattgcgccaatcttagctgagattctaaaccggaacgttgcacctcgttattggctaattcattgtttagcctcgccacctgatcttgcaggatctggttgttccttctcatctcggccaagttttgttgggttgactcaaagcgctcggtgatgactcgacgctcattctcactattggcaagttgtttttgtaactgtttgagtcgttcagctcctgtatgagacgctgaagtactatccatgagagctctctgtaaactctgcatttctccttttaactcagactcgccaacagacgctttttcagtgataatgtcatctgatctatggttgattttaaagatacacat

SEQ ID NO: 12705 - DNA, 541 bp, Diabrotica virgifera
gtcaaactgtcaaacactgaacttgattttgattttgatcatattttgattgggtatgttttgaaattgaaataattcttttagtaaacaatggacaacaaaccaaaagatcctggttggaacgatccacctatgctcaattacagtgcagcgaatccacctccaaaatctaggataacaaataaaaggatagcttttcccttaagtacgaacacttcttctacagccaatcaaaatcaaacgcttccaaacctgccacctcttgcacaacctttaacgaagcctccttcaactttggacagtacttgtgaaagtgtgtgccaattattaaactctgaacaatctagacaaaattttgaaaacatatggaagggtcaattaccagaacaatttcagaaaactgttagcttaatggtaggatgcttaacaggtaataataaggaagcagcaaaacttcataaagaaacgcttctgactgaatataaaacgctttgtgacggatggatagatgaaattaatttttaatgtgcaatatattatt

SEQ ID NO: 12706 - DNA, 544 bp, Diabrotica virgifera
aatatgtccgtgctaaggacaagagtatctgtacgtttaaaaattttgtccgttgctattttaaatgattatttttaggcaaaatgttacaagatatgtataattacttgacatatagtatgataaatatatgattcggtttaaaggggaatataaagcaaaaatgtgttgaacagaagggtgtaataatatttttgcacggttttggcttgttactatcgttatgcgagttttttgtacactgccgaataaatataatctgatggaaagagtattttctccttctttagcaatctcagtttcagcaatgttatggtacaatatgcatcacagtatactttgctatgtaagatttataaagttaagttgttaagtaaattagtttttttacaattatcgagagatttgtttgccaaaattcacgattttgatttattttcctctctaaaccatcgtcccaccaaaaagtaaaataccttaagcaaaacatacagctgcgccaaaagatatttactttttcgggacacccggtataatgatggcg

SEQ ID NO: 12707 - DNA, 540 bp, Diabrotica virgifera
  SmartBlast Evalue=3E-25; Info=Glucosyl/glucuronosyl transferase n=1 Tax=Culex quinquefasciatus RepID=B0X3W5_CULQU
aggctgcccagactaaagtagatcacaccacttggtgagctttctatccatctttccagatactctggtaatggatgtggtttttcaatatgaatacctccgatctctataacattaggtacaagtggacgaggaagattcaaactaaaatgtgtattggacagcaacaagctagaattatacaaaaaatttctccaacttcgatcctttttttccaatatattttcttgccaatttcttatctctaggtagcttataaaattgaaataataatttatgaccaatggatatcacagtattttccattctttgccagaatgacattttatctgaaaacgcgagtaagttgttcggaacataagctgtgttgctgggattgcccatacgctcagcaacccagggcatcaatgtacttgaacttaatcctataataggtgcattttatctttgagatgactccaagaaaacaatccacagcaaaatattcgaatataactacatcatatttttctcctctcgtttttaggaatttctgaaaag

SEQ ID NO: 12708 - DNA, 543 bp, Diabrotica virgifera
tcggtgcacaggcgcgccaatagaaagaaaatcgatgattgtcgatttctagtttagttggtcacgaactcagaaagaggcaacacatcgtcattacttaggtgacggagtttgggcaaaattgggaaaatatataactaaaagacctcgaacatcagccaataacccatactaataataatcaagcagtagttatatctggagacttatttacaagaaaggaaaaaggttataataccgccgatgtgttgctttgctcaagtgagtatattgatatagttctctttatttcttcattataaaatcaaattcaccatcctagatatctcgttcgttatctgtagatattaatttcagttaagaaataatttaaatgtcacattataagttatattacggtaaggatattcgtttccatttgcaaaggaacagtcaaggccatatgttttagtgctaaagttaaattccaatttctcattagactttttgctctaggttttttttgaggtaataatataaaaagttttaacgaatatcagacat

SEQ ID NO: 12709 - DNA, 543 bp, Diabrotica virgifera
gcgctttattaccgcttataagaaatatgtaccgtatatggacatgttatgcataaatactttaagataagattcgatctataagggttaggtataaaactaagtattgtgccatatatgacccactatgcggtaaggggttaacttcttcttcatgtaccatgccctttcagaacgttggttaccatcatatctaccttaatcttattcactgccaccctaaatagcatgcctgtatcaacaccataccaatctcgcaagttcttcaaccatgaagtccttcttcgtcctggactatgtttgcctggtattttcctttacatagtaacttaactgtgcataaaaaatggttgtccacgttgtttcaatcaaataatgtcaccagggagcaagaatcgtataagacacaccttcctcctccaaaacatatgattttcttagttatagtcggttcgctgaactcggacacaactggctagtgattttagtctgttatttttttgtttttgtccaatattggcaaaattattaactatttagtaa

SEQ ID NO: 12710 - DNA, 545 bp, Diabrotica virgifera
gtaattaatgcttaacacgacaactgccaaaataaaataactatcaaaataaaaatcattacggataaaaataataccactgttatattataaagatacgtactttgattgttttttcttgtacaaaacgccgtttaatcgtttttgatccactgtaagcgacaaagatgcccaaatgtatttaataaacggtgtttccgaacatctttgttaaacacgatcagttgatgtgttatttttgactggacttaacagaaagttttattaaatgttaactgttacctatgtatccggggtctagaaaaagtctgggaactgtttcatctgtggagtgtttttaaagggtcatcagttggaaaagtactttttttctgtgagcttttactgttttaacttttacgtcagttagataagatagaaaaggcattttggaaaatatcggtcatgctaaaaatgttttatttagatccccttttttgagaaaattcgtaaagaatttgaagaatccttggcagctactctaattttacggtatgcaagtgcaa

SEQ ID NO: 12711 - DNA, 543 bp, Diabrotica virgifera
catatcaaaaagaaaaaagctacatgcccccaagtttaaccgtcttttataaaaaaaaatatacagggatgcttcacatcctgttttcacataggtatatgttacatttcaaaataaagatattgataacaaaaattcaatcccttattttattatagcgcatattctaacagggcaaggtgaactcgagttaagtatttacgtatcattctaaaataaaacaaaataattcttcggttaacttaaaagagaggattagaatcaaaattcaatccaagtgctgccggacattacagagagacattgattatcaaacgtcaataaataagctaaactagcacaaatccacaatttggtttaaataaaatcgttctacctattctcaatttgagttacatgtgatttttactttcactctgtgttagcagatctggcgatagctacatgtcattaatagtttttagtcgaaaatacattaaaaattagcagtttgtcagtagtcacataatacatgtatttgttaaaaagttcctaagatgtata

SEQ ID NO: 12712 - DNA, 544 bp, Diabrotica virgifera
  SmartBlast Evalue=3E-74; Info="GTP-binding nuclear protein RAN1, putative n=1 Tax=Pediculus humanus corporis RepID=E0VTS8_PEDHC"
tgcaatctctttttccaatgagatgtgcatttttattaaatattggtttaacttctcgtactcccatgcattctggtatatcttgtttatttgctaatactaacagtggaatgccttttaaatattcactggctatcattttatcaaatatatctttagattcatccattctttctctatctgaagaatccactatataaattacagcatgggattcttcataatacttatcccaaagactctgcaattcgttttgtcctcctagatcccaaaaatttaatcttattcctcctacatctactttgcctatgtttaatcctacagttgttgtaattttcgtagggtgaattgctttgtagtttttagtaagtttagtttttgcagcttctaagtaggtcgttttacctgcattgtcaaggcccaaaattaatacacaatattcatctttctgtaccatatgcttataaaatccataaactaacgtaaacatttttcatacgaagagaataattacattattaaaataaaaactattatatacata

SEQ ID NO: 12713 - DNA, 542 bp, Diabrotica virgifera
ctagacatgacatggctaacttcaagccagtcaacatggttgtcacttgtatgatttattgtatgtaagatgtttagtaagttttataaaaatatataagtttactcagtactatgattgtttgacttataacccattaaataaagtagtttaaacatggcgcagtcaaacagctagttgggttacagtttacagtcgaaaagctaaatttatagcaacttgtacacgaggtaccatacataacctacaatggcagtgatgggaataaatgtaaaattaccaccagattttgacctgcaggatcaaaatgctgcaagcgaatggaagttctggaagactagtttcgaagattatttactagcaacgggacaagaccagtcagcagataaaatgaaaatgtcaattttaagaaatataattggggctgagtctgccaaaattatgtccacattcgagatcccagaagccgaaaataacaagtatgacttgatgatattactaatcgataagtatgttaatccaaggatgaatgaatcaatttg

SEQ ID NO: 12714 - DNA, 543 bp, Diabrotica virgifera
  SmartBlast Evalue=9E-18; Info=Adenosine diphosphatase n=1 Tax= Culex quinquefasciatus RepID=B0WFF3_CULQU
gatgtcttgttgaatggtgaaataaagttcaaaaatctcactgcgcggacagagaacattgcattaagtacacgggcaaaacctcaaataatttcaaaatcaataattagaattagtatagaaaaaacatttatttccgagttaaaaatagaaaataaacatgactaactcagaattgcgtaaaagaaagaataaacaacacaatgataggccaaagaaagggccatcaaagaagaagaaagaagctggtatatctatgcatgtatcactgttgtgtttaattttaagtggaactatttttacagtatttataattttatacactgatcaattaccatggtttatggcacatagagctgttgatagctttgcgaagaaatttttaggtagtcacaagcccgtttatgcagtggtcatggatgctgggagcacagggtctagggttttagcatattcatttcacgaatcctattttggaaatcatttaatattagataaggaactatttgaatatacaaaaccggggctgtcttcatttgctaa

SEQ ID NO: 12715 - DNA, 535 bp, Diabrotica virgifera
ttctgtatccggattactttttatgtatccggatactttttaaattttgtatccggtatccgtatccgtgatcaaattttaaagtatccggcatccggatactttttttgatattcggatacttttaaatatttatcgcccgccgataatgcacctaacgtaggcacaacactgccattccttcaatccagatgtgtctaatatgttaaatcccatttttcttactcttcaccgttataatatattattatatagctaatggagctttgtttttacctaatcagttataaatcttcataagtacgttgtttaattaattacttacatttattttttatattttctatatctctctcttcaagaacccctttttgtaccctgtaaaattagaagaaattactttttcgaattataataaagcacatcttgttaagatatttggaggacaaaagaaccaatttaaacatcttaaatgaatacccaatcttaaaaagggtgtcaataaagtacaacacatgcttaccttcgtcagcac

SEQ ID NO: 12716 - DNA, 542 bp, Diabrotica virgifera
  SmartBlast Evalue=1E-12; Info=Transposase n=1 Tax=Ceratitis rosa RepID=Q95US6_CERRO
gtccatgtattgttatgctttcttggcgcttttgggcttttttattactataaattttgtctttttagtgtttagggacagtccgttttcttcgctgatttctaccactctgtcaaccctttgttgtaaatcttcaagacattctgctaataaaatggtatcggcaaaccgtatattattacgtttgttccaactccatacaaaactgttcttgaatcgttacgcgcatgcgcaataacgaataattatgcgcagtaacacatttttcgttactgcgcatactcgtaaccgttcaagaacggctttgtatcgagttggaacaaacctagtgattgccatttacttttattcccgcagttagttcttctactgcttcctagtgccgtatttggagtgaagataatcctcaagtgtatgttgagacatgattacaccagaaaaactgactgtttggtgtgctttatgggcaggtggaatcattggtccgtacttcttcaaaaacgatgctggccagaacgttacagtcaatggtgaccgcttta

SEQ ID NO: 12717 - DNA, 543 bp, Diabrotica virgifera
  SmartBlast Evalue=1E-22; Info=Bcnt (Fragment) n=2 Tax=Pecora RepID=Q7YRU5_GIRCA
tggccctacattagggtagcattttccttcgtcaatttttgcattgaaatcacccataatcactgttatgtctctagatgctgtgaactgtaatgttttttgaagttcggtataaaagttttctatttcttcttcattttagtcagcagttggcgcataaatctgaattaggttcatttttccatgagttgtcaataactgcaacattataattctgaggatcatagcaactccatatctgtgttgggtgtcgctgcttccagagtaatagattcgcccattgtctgtattgagttcgccagaactgacccatcttgtatcgcttattcctaatatatcgatatctagtcgcatcatctcttgctgtatattcctcagtttcccaggttcatacatacttcttacattccatgtagcgattttgtaggtggatttgtatatatttagggaacagggatttcgctgactaacggcctgggaagccctgtcgttactgttgtttcttcccctgccgaatcttggcatccgagaaccatgattagt

SEQ ID NO: 12718 - DNA, 542 bp, Diabrotica virgifera
aggcttgaagccaggttactgtagtaattttttccaccgtagaccaaataattgttcatcttccatttccgtctgcctttgaaacaggtacacttctcttcttcgttcctgttcctgcaacctccgtctttctctgtttgatgtaatttcggaaccgacagttaaggaaactggagccctatctctatcaccaggcgacgactcttctaacatcctttggcggcgagctaccaaccatcttggcagcggttctggtgcggtgcaggttcgcttgctcgcttgtgtgacttcttctttagtggttgtagtacacttctcggcctcctcctcggggttgtttgcgtctgttgcagcgctgatgcggagcatgaggggctgatgtgcgggcttgggactaaaggtacgtacagagttgttgcatcgttgttgacgcctggtgacggcggtataggtgttaccggcgtcgcttctcttcttatccgttcttcatttgatatctgctgtattgaatcagaagttggagacatttctggactaggctg

SEQ ID NO: 12719 - DNA, 543 bp, Diabrotica virgifera
ttaagcacgaaaaacttctctttctacagatacggtattcgatggaattgtcggaattaaacataacaaattataggcttctgtaacaatgtctttaattggttgtaattttataacaaatttcttgcaaattaccattttttaaatttctgtcagcataaaaaaggcagagctctcttttaagtcttttaattttagtaaatatttgccaaaaactcaaaataaattttgaaaagcgtcggaaggaatgatcaaactgtatgacccaaactttgttgtatctgctaagcttatttatcacaatcacaattcacaaagaattttaattcatcacaatcctgaaaatctacatccatttccattaaaatatatatattaaatagaaaaattgggtagaatttgcattcgtgctcataccatcatcacacgtcattgtgcttgctttgtcaaaaaacagaattaaaaaattattcgcttcttttatcacgtatcacgtattaattgacgagtcctttttatctagtttaaacaaaaatgaatatc

SEQ ID NO: 12720 - DNA, 542 bp, Diabrotica virgifera
ttaacaaaatatatctatcatctattcaaaaataagcgttactcggcttttatcacaaaaaaagcgttaggatatctattcaaaatgcatggttatttcacaaaatatgctatcaatattggacaaaagtttgcaattgctaaaaaatatttaaaaaaaagcattattgcactattgtgacaattagttcaatttatttttgttgctttttgtgtttatttgaaacaaatctaggttgatttgtgacaaataatttagtttttgatgtttactatcagatatattttgattagccaacttaaaacttgaatagcaaatatagagtttatagagtatttacagataccctatatagagtatctttaattcgttgcaggtaatattaggtgtgtatttataataaatatccagttccaaatgcaccacttctaatatacgagtgcaagaaatctatagttgacattaggtttacttatagttaagaaaatctctcaaaaaaaatacgagaaaatattgtattgtataggattagatacagtcgg

SEQ ID NO: 12721 - DNA, 536 bp, Diabrotica virgifera
  SmartBlast Evalue=2E-28; Info=Solute carrier family 2 n=1 Tax= Culex quinquefasciatus RepID=B0X5T8_CULQU
gtgtcaggaacaatttccgccatatccgatggcatgcaatatggctggacttccccgacaattccagttcttctctctgaacacactccactgaaggtaacacctgagcaggctgaatggctggaatctgttctaatgattggagcgtgctgtggtcttccggctacaatgtacttagtcgataaagtaggcagaaaaaaatctctaattacgtcaattattgtcactgccttggcttggattgtgatggcaacggcacctaaaattgaatatatttatgctgccagattttgttctggaatggcgggtgatatggcattcgttgcagctcccatgtacattgctgaaattgctgatcaaaagattagaggatttttggcaagtcttatatatatcatgatgttgacaggaatactgattgtatactgcgttggaccattcgtacctatatgggttccatgcttattgagtcctaataaatcttatcggattaataattttcctatttcagccagaatcaccatattatctactat

SEQ ID NO: 12722 - DNA, 541 bp, Diabrotica virgifera
aatttttaaattgttttaaactatccggtagcaaattgtataatttgggccctatgtaaccatttacagtaaccatataaccataatcatttacagtattcgttactttgattactatgattacttttgtatttgagtaccggtaatcatatcgagaatcgtatttctcagtaggtaggtattttgtatatgatttgattactatgattacttttgtatttgagtaccggtaatcatatcgagaatcgtatttctcagtaggtaggtattttgtatagatatagatctagataaaaatatagggttctcgcattcgatcttcgttaatgacatacattacatattttacctccattatagctccctctgtttcatcttctatcttctcctcgtcctcacagtgtgaggctctgaggctcacacccttaaaacgataacgatatccgatcacactcgtaaaataccggtcccgacagttactccgctgggatgcgattggtagaaagtaatcaagtgtactagttgtagatacaataatcgt

SEQ ID NO: 12723 - DNA, 539 bp, Diabrotica virgifera
tctcagtggcgtttttttttctttaaaaagatgccacttacccgtgggcgcgccaatgatgagtacaaggttgttatttctatatcaagaaatgcgcaataactacctcttaaaacccactaaatttaatttccatagcccaaacgtcttggagtaataaaaagaatttcgcagtttgaaataggaagtttcaacaccccgtgtctcggaaacgaggcatttgcggacatgcgtttgtggagcggactgtcattatttttcatgttatcccttaaagtttttcatacttatttgctaacaccctgtgtaagatttccgttcccgatttaatatgatgcatgatacttttaagttcctttattggctttgctttacccgtatgaggggttcgcttcaagttaagtttatatctttggtcatactctcctttacagacatatcctgtcgaaatctgtcgtcaggtcttcctcttctattgcttctagaaactattcttcatattggttggtttttatttcagagttcagcattttggtatc

SEQ ID NO: 12724 - DNA, 543 bp, Diabrotica virgifera
  SmartBlast Evalue=1E-78; Info=N-acetyltransferase n=2 Tax= Obtectomera RepID=Q2F5P1_BOMMO
aataaggttatgtttattttacaagaaaacttttacttttaataatttttttagaactaaaaagctccataattcattgcgatgactacattaagaccatttacgtgtaacgacatgtacaaatttaataatgttaatttagaccccttaactgagacctatggattatcgttttacatgcagtatttggctcattggcccgagtattttcaagtagcagaatcaccaagcggagaaataatgggctacataatgggaaaagccgaaggtataggagagaactggcatggacatgttacagccttaacagtatctcctgacttccgacgtttaggattagcagcctgtttgatgaattttttggaagatgtttcagaaaagaagagggcctattttgtggatctttttgttagagttagtaacaaagtagctataaatatgtacaatcatttgggatatattgtgtatcgaacagttcttgaatattattcgggtgatccagatgaagatgcctatgatatgagaaaagcttgttctagagat

SEQ ID NO: 12725 - DNA, 543 bp, Diabrotica virgifera
aactatcaattcaagatgaagtcgatgtgtgttgttttattgagcctaatttccttggcacttgtcgctggagattaccccgattattatactacgagttctgagtattatcctgttgcctctacttctatccctgggatcatgacaacggtgacggcaacgacaagcattggtgaagatgtagtttacgtacaagatcgacaagtccccgatccatcctatgagatagatgccgttgaagcgttcaaagaagccaaggcacttcatccaggtgttgacggtacacaattgttagaaacattttccaaattatttaacgccaaacatacggtaaaaggaggatggaaagttgttgaaaatttgggaccactttacaatccagatgaagactacatatatattgaattgatagttaaagatccaaagaacagcatggaattggggaggaccgttcggatatttaactcaagaaatgaacaaatttaattgttaattatccgttattatttcatctttccaaaaatagagaaaaataatttaaaa

SEQ ID NO: 12726 - DNA, 541 bp, Diabrotica virgifera
  SmartBlast Evalue=1E-23; Info=U4/U6 small nuclear ribonucleoprotein Prp4 n=2 Tax=Formicidae RepID=E2AXK2_9HYME
ccaaagaccatttcttgtcaccacccgctccaactgtcaacacatattactcgataaagtgggatagtcacgtcgtcgatattccccttaaattaaaaagagactaccgaccaaataggctcatttatctctgtcgcaaccgtcacccattttaagatctcaaggcgcaatctagagtattataaatctatgaacaaatcaaaacaaagttttaaaatctggttttagacttggatttatatttacacattatgtccgacgaagaagaagttcaatacgtgaaaaagaccaaaacaattcattatggttctttggaagattctgagaaagctagacttgaagcacaaagtgaagatagtaatgaggaaaaatcggctccagcagctgcttcacctgtacaggagccttccgagtatatggaactggaagatgctatgtccagagataaacaagctttaattgaagaatttgaaagaagaaggaaggctagatcaattaatgtgtctacagatgatgctgaagttagaagaaacttaaggca

SEQ ID NO: 12727 - DNA, 540 bp, Diabrotica virgifera
  SmartBlast Evalue=5E-32; Info=p21-activated protein kinase- interacting protein 1-like n=1 Tax=Camponotus floridanus RepID= E2ALK8_9HYME
aggaggtgcagatgatgtataattatatatgactttagaatgcgaaaagaacattgcatgttatcacatcatagttctacagttactatgtttagattttactcctaaccattcgcacatactttcgggcagtcaagatgggttgttagccatcacacgagtaggcaattggcaggttgaaaaactatgggacaaagctcacaaaggctcagcaataatagacattgcagtacacccaactggaaagttggctttgactttaggagatgattgtacattaagaacatggaatttggtaaaagggcgtcaagcttacgcagtcaacttaaaaagcaaaagtaaagatccaaaaagtatatttaaaatatgctgggctgctgatggagttaggtttatactttatggtggaaaatacacagaaatatggggcactgaatctggaggtatactccaagtgatagaacacgatgttaaagttagcagttgtatttggtattcagacaaaaaaatactagttggttatgaagatggaaatataag

SEQ ID NO: 12728 - DNA, 541 bp, Diabrotica virgifera
  SmartBlast Evalue=1E-52; Info=CG4841 n=5 Tax=melanogaster subgroup RepID=Q9VJF9_DROME
gcaacatgtcccttctgaaatctttatataccatagtttccaactcttgcaatcttctcatttccatttctatagtaccatgtgacgcacctagagacctcaaatcgttgataattttttgcttgttcgttcatttccttttcgataagttttgacctaattttgttatctatatttggatcgaacataaatgcaggtaaaatgctttcctgtgatgctcttgtaccatctccaggttcattgtcatcgctgtcatagtctaatgggattcctgtttcctcagcacctgtcagcattgttaaagtatggcccaatgccgataattgcttacctacgttggtatctaaatgaatgtcaacgccttccatctgccattgtacattgaggaaccattttgcattttcatttggctgtttggcagctatagttcgactgcatacctcatacgttccttcgcttaccacacatagattcatgattgacgaatctgtcatatctggtttccagtcatccaaagagttttcaaagtcgtcggcaaatc

SEQ ID NO: 12729 - DNA, 543 bp, Diabrotica virgifera
tgtgattggaaacagtattccctaccactagaaatgaaatatcgcaacaatatcacatacatagaattataattccatctttacttattctgtggaatgttattcagttgtttacaagccaagtgaatgtcctttctgtgcaacttaaatttgattgtttttaaacacagaaaatcgatttagaaacagtgccaatattttacaaatttcatctctctgtattagttaagtgtaatgattatataatttataactaatacaagaatattatttatatggtctaaaatgttaatttgaatttgaattttatttactacaaaaagtaagtacagtaagtgttcacaatattacccccttaaatattgagcacggggtaaatgaaaacacctgttaggggtaaatggaaacaatgttaagtaaatggaaatcaaatttttatgataagggaattatttgattacaagtcttgtcatttcaagatgctgatcaagtacatccggaagagaaaaccaacgaaatactctttgaatgatttagaaaatg

SEQ ID NO: 12730 - DNA, 540 bp, Diabrotica virgifera
ctgagagaactctttgagttcttccgatttatttgtagtggggaatcggaccgtcttaacattttgcttttacaatattagttgcgtcttctacaatatttatccattcattcttatctttgcttaggattatccattctcttaaggtctgcaattatctggttttcccatctcgttttcggtcttcaacggtctgcctgatactggtctccatttgaactcttgtataagttcatccatcaatatatattttttgtttgtacagagtatttgtctgagaccttcttttcttctatactcttccaagtcttcttctctacttgtcttctgccatttcttccgtgctaggtttttccctggttgttgtttcgtagtcttcatcgtacccttactattactgggtaaacaaacgtgagaagcaaagttacgaaatcctgtaaatagtttgttataaacccccaaatatcatgcaacataattgatgaaaggaaatggtgaagttaatttttgagaatattgattgcgatgttagaacgacag

SEQ ID NO: 12731 - DNA, 540 bp, Diabrotica virgifera
  SmartBlast Evalue=1E-12; Info=Transposable element Tc3 transposase (Fragment) n=2 Tax=Camponotus floridanus RepID= E2AKN2_9HYME
cgacgaggcatactttggatcagattttggatcacattctgcggaagattgtcacattattggtccaatatagccagccggcacatgactccgtaaacgtctcttcatctcattccaaacatgttctatggaatgggtatctggactgcaatccagccaaataaaatatgtgatttgaatatcgtcaagatactcagtagttaccctttgggaccgtacattatcatgcataaatcttgcttcgtctctaagaataaccataaactaagatacagactaactctatgcgaacgtcaaacgatatgccgcctcatgccatagctgaccctccaccaaatggatgtctctaggcaacacatgcttgagaatatctgtcgcctggacgttgccacacttgtacacgtttgcctaagcctttaagacacaatctcgactcatcggaatataatacactactagaattatgtattgtgaaagctaagtgttcttagctaaggaaagcggcagtccagttactctagttcaaaaagatgaaccagc

SEQ ID NO: 12732 - DNA, 542 bp, Diabrotica virgifera
  misc_feature (513)..(513): n is a, c, g, or t
cggtagtaactaaaattgtttgaaattttaacaatttataatgggaaataagccacaatattattaaaaatgatttttattaacgtttcgacgcccaaatcgggtgccgttgtcaaaatacaaaatactactaacataaacaaaaatggtgttgcttagtaaaaaaattcttccaataatttatttaatttgactcatttatatcggcaattcagatacatatgatacattttaaagtagaagactttaaaatgatattgccaatattgaccaaatgaccattttgctaccagactttcaccatgtaatctagtcacaccacagctcagatgttacctgggccattattttaaaatagtttaaacatccatgctctaattggcatttttaactgttgtttccttaacggaccacttatacagggctttggcccacatattttgttaaactatatcttggtgcttagcatgtaaccttcacgtaagcactgcactgatgatgactggtaaaacngtcgaaaactagttatgtgattgtgatgt

SEQ ID NO: 12733 - DNA, 542 bp, Diabrotica virgifera
attgtgttgggattaaacccaaaatgaatttttcgtcgtggatatttttctgcctgacttttgttatctgcatatcaactactttgcaagcgtatattggcgaagctcctcaatgttatggtagccagtgccctgcaggaacaacacgctgcaaaaagcatatgaaatcacaacaaaatggatatttacatataaccattaattgccttgatgcatatggtggcagcttaaaagagttctattttgaaaatccctcgactttaaatccaaatacgaagtacgaaagcacttcttattcagatatcggctctgtcaatccttacgtgcagacaaattttggaaatagcgactacagaaataatgaagcagcagacctaatgggttatggctattaattaaaaaaaagtgatttacaatggaatgtaaaaaagtttaatggtcatgatgaagtttgtatttatatcaaaagaaaattggaactgtaatttgttgctttatttttttaggctgaaagcaattgccatttagatcattaaatttcg

SEQ ID NO: 12734 - DNA, 529 bp, Diabrotica virgifera
gagagattaggtggccttgaattattggcaatcaactcaaaggaagctgcctaacttgacacgaaaatactaatacaaaattttgcaacaatgaagaatagaaaaaaggattttgtttaaatgtaatgtattttatttatttaaatgtgtatttcgtttgaactgttaacataattttggggttgtggggtagttaagactcccggtaaacaccgaaaatgcctagaattgcccatgggtgaggaggccttcatgcggtttgcagcagggcccaaaatttgtagatccgggcctgagttacccatttctacctgaatattatattgatcagtttatgtgagattcattatgtcgacacaatgctcgtgagaggtttaagagtatagtagaaggcattagccagaaatctaaataatgtattattgtgttttcaatttatcaaaggcaaaatgaaaattatattaatttttttttaaataacgcgggcacataaatttaatacaccctgtatattgatctgtaaatattt

SEQ ID NO: 12735 - DNA, 541 bp, Diabrotica virgifera
  SmartBlast Evalue=0.000000004; Info=Scarf3b n=2 Tax=Girardia tigrina RepID=Q8WSW7_DUGTI
aaataacaaagacccatgtttctcaagcgctacttgcaaatattacatatacattttcactagtgaaattgagagttaatatgggaacagggttgttttgtgtggtgcttttatttgtgacaggttcaggttattgctcaagagaatacggaactgactatgttgaaacaactgagcctccagttactcaaaattattattttagcaaaacaggggagtctttttatgaagcagttcatacatgtctagaaaaatccatgcagctggtttctattgatgacgcaaagaaaaatagggagttagccaatttaatgaaggattcgggtggcgtaaatcggtattggacatccggtaataaaatagcaaaaaatacgttcttctggagtaaaggagagcctattgaatactccaactggcaccctgatttaccagtatcacaggcaagctctaatcaaaaatgtattaaaattgccaaaagcgaagataaactatactgggagctggcgttctgcaacgagaaaaacctgtatatctgcgaaaa

SEQ ID NO: 12736 - DNA, 541 bp, Diabrotica virgifera
  SmartBlast Evalue=1E-66; Info=tRNA (Cytosine-5-)- methyltransferase CG6133 n=1 Tax=Harpegnathos saltator RepID= E2BHX7_9HYME
atcgaacaagttgagtacacaagttttccaccaacgttcagtagctcaactcctcttcttagtattctggtttgcactccatgcaagtttaaaccatttgctgcagtccatttcatccatatgtcggggttttttctcaaggttccatcaccagaacatggtacgtcacataaaattctgtcaaattgaacctgttccacagatccatcacttgcagttgtagttaaattaggcaaaatagcactgtcatgatttataacagctacacatggagaattcaagcgtttggcttgatgaactaacatataacaacgtttgttgtcaatgtcattagcaataacatatccagatggtattggatcttcattggcgtggagaagttctaataattgagctgtctttgaacctggagcagcacacatatccaaaaccttgtgatgaggttgtacatctaaaccagtgggggtatcatgctaacagtttcttgtctggaaatagtaccatttctagtttctgatattaaaaattatgaagcttgtag

SEQ ID NO: 12737 - DNA, 539 bp, Diabrotica virgifera
  SmartBlast Evalue=6E-48; Info=Mitogen-activated protein-binding protein-interacting protein n=1 Tax=Bombyx mori RepID=Q2F5P9_ BOMMO
tgtcaacaaaaataatttagcaggtatttttgtactttgttgtttttatgtttaggattaattacaatgtccaaaatgctgaaacccaaagcattaactcaagtattaagccaaaccaatactggtggtgtggaaacaacattgttactgaattcagaaggctcccttttagcatacagtggttacggagataaagatcccagagtaactgcagcaatcgcaagcaacatttggagcgcctatgagagaaatggtcgaaatgtttttcgagaggaccacccacagataatccttatggaatgccaagaaggccgaatagccataacacaagtagctaatttactgctgtgtctttatgcaaaaagtgttgttggctttggtatgttaaaacagaaagcaacagctttggcattgtatttagagggaccgttaaagcaggtggcctcgtctgagaagtaatttagatgttaaggaatactttagatttttaattgttactttagtttttgtaaataaaataaaatatatattttatattc

SEQ ID NO: 12738 - DNA, 542 bp, Diabrotica virgifera
cgccattttgctgcttttctttgcagggcaaactcaacaatcactgaacttgctggcaaagattagaaacataagatctggaaaattcttaggagttaatacaacaaaaggtggaagtaatctagtgtatgcggacgatggattacaatattatgattggatacttgaacctaattgtcattcagattccaaaaagccatcctaccgtgtgcgcctagcagacaaagtaaacttcagatgggatcacagaagcgggtgcagccataaagatactgacttggtcatttacaaccaagggtcgggaacagcctttaacaactacttcgtctacgattcagaacttcgcactatccaagtctgtaaagacaactgtatttttgtcgaacccactaccaaacaagttaaatcatcccaggaatgtagcacaaaaaagtgcgcccaaaacaaatttgacattttatttcaggatcttaaagaacccacatcgacttcaagcttaaatttagattgtttcgaataatataattacataatatacaatg

SEQ ID NO: 12739 - DNA, 538 bp, Diabrotica virgifera
cgaaattatcgcgggattcgtatttaaaatattaaatttacccccacccctctccatgggaagtcgtgtttggtatcattcgatagatttttaaaagaaatattgagcacgtatattttttagtttttcgatctgtcattcatttcgcgaaatattcgcttttttcttgtgaaactttgggactcacccatttccttacgcccgctcaaatcgtcagatttttgaaatatacactctttgcatgtacttaacttaccttatcttaatctgacaatttcgagtttttctaaagatagatttttttcggatcccccttaacgaattcccctgtgttaagagccaatatatggcagaggtacatctgcagggtacctaccacgtttctccccacatgataatctgacgcgctcgagtaactgcaaaaatccttgcttgggctcccctaccattagtaccgatgacgcatcaatatatattttagatgattttatatgacttcggtatttgcttgtgagtttatatgttttgataacatgtt

SEQ ID NO: 12740 - DNA, 542 bp, Diabrotica virgifera
  SmartBlast Evalue=9E-37; Info=Fam13b protein n=1 Tax=Mus musculus RepID=Q8K316_MOUSE
tgttggggtacccgggcagcttctgtgcctgaattactggaacaactttggaaagccagagctgagaaaaagaaactacgtaagatgctacgggagtttgaagaagcgttctatcaacaaaatggaaggaatgcccagaaggaggatcgtgttccggtgcttgaggaatataaggaatacaagagaatcaaagccaagcttagacttcttgaagttcttatcagcaaacaagactcttcaaaatccatataaaatatgttccttgaaagttgacgccataaagtgcttgtgttccctgacagttcaccatgtgtgcttggctgtacttgcgttcactttgtcaggcactcagagagtcccattgtgtgcttgtttgtggttccagtaggcaaggaaagctgttccacattcccgcagatcctctccacacttaggaaacacgcaggctccttcattgttttactgcagacacggctgttagcaaaggacaagagttttactcttttacttcaagaactttgaaataaaaagctcttctgttt

SEQ ID NO: 12741 - DNA, 540 bp, Diabrotica virgifera
tctgcggtccctcaggtcagtgccccttttaaaaagataaattaattgcacataattatacagcaagattaatttttaaaattcatttcaaaaacgtgaacgatacagaacatttcataaagaattgataagtagtaattacttacaaatttgtgggttttattttagaaatcaattgatttatcacaattatgttataaacatttacagttgtctctgcgtctaggactaaaatagtactaatactgttaaattaatttgttacatgactttttagatgtgataataatgggaagaaaatcagtaacctagtaattttcacctggagatgtttcagaaaaagtctacgaaatacgaaaccttcttcaggcaaagaaatatcatacagcaactgaagaaaacaccccaaagcgaccaaaaccgcaacaaacaacagctggaaaggctatggcctctgtattttggaacctgcaacgaattattgtcattgactatttgaaacatggagaaacaatcaacagctactactacttaagttta

SEQ ID NO: 12742 - DNA, 540 bp, Diabrotica virgifera
  SmartBlast Evalue=4E-18; Info=Chromodomain-helicase-DNA-binding protein 7 n=1 Tax=Harpegnathos saltator RepID=E2C0C5_9HYME
caagcattcctaaacctgttgaaaagtcgtctccttcgctggatatgcaaaatgaagtacaagatttctccgtcaaaaaatcatcggcgttggcatcacaatcgaaagctggaaataaattggacgatacattgtctaagttgatgaaaagaaaaaattgtcctgaaccagaaccagtgatcggcaaggaaaagaaacgcaaaaaactcgacgaaatcgtcctgggcctttcggccgccaaggaacaatccctattcactcccgaaccacccaaaaagcaaccggttgctccgagtgttaccgtaactcctacctcagctcccgtaagcaccgcacataatccctctcaaaaacctttcaccattaccgtaacttctgttccttctacagctccatctagtcgcagcagctctctctcgcagaatattctgccgtctctatctactgcaggaaaagcagtttctccacgttcctggcacaagccgagcaacagaatttgctgttgaagaacagcagcaacaacagcaacagcaacaacgg

SEQ ID NO: 12743 - DNA, 539 bp, Diabrotica virgifera
attctatctcgttattattaaatgttatgaaatgatttttctgctaattctcgaattgcacatgcgcaagtaaaattgctgcagccaacagaagaaaaaaagcatttagctaaccaagattttttttaacctggtttaaagcactaaaaaacgctagaagggttaaaatattgaggttagctaaccaaaattttaacatctcactgaaaaactggacctaacagagatacatcaaaataatatttatctgtatacgaataattctcacggtcgagacacttaacacttattctaacaatattatacgcctcctaattgtacgcaaccaattcttcagcttaatgaagtacatacatatataaaaccggaaaaatccctcaggaatggttggtgtccacctttgtaacaataccaaaaacaatatatgccaaatattggtgggactataggacattttcactaataagccataccctcaaaatatttttaaaggtgattcattcatggaaaattatacagaaacctagaagatgatatgg

SEQ ID NO: 12744 - DNA, 542 bp, Diabrotica virgifera
gggattacggcgtcatgttttggtgttatatttgtgtgtaatgtgtattcaacgtattcaataatattcaactgaagtatttagtaaacaggacatgtgttgtaaggatattctgcttacaaaatgaatctacagtcaaatgattgaatttatattttgactacatacaaatgtgtccctaataacaaatgttaagagcagaagccattccatcacagtgtctggataaatataaatggatttttggttagtaaggagtgcaggcctcatgcagtttggttttttgcttgccacaaaagcttttacgccgaagatgcaattttaagtatagacttttttatggattcatagaaataatatgcaggtatatcggatcgacactgatgaatgtagaatataagacatgataacatgattaagaagcagacattgcctcatgcgtatagaaaaaaagagacagtggcaaatagtattcaaaatcttgacctaatgtataaatgtacctcctttaattaatgtattaatattaaacataatttgtt

SEQ ID NO: 12745 - DNA, 541 bp, Diabrotica virgifera
  SmartBlast Evalue=8E-16; Info="Centromeric protein E, putative n=1 Tax=Pediculus humanus corporis RepID=E0VUT3_PEDHC"
ccatagccgctagcctcctgagaagaatgtcacttttttctctttctagcctatcgcatttggattttgttgtttctagttctttcttgagactctccaattgttccctcagttcgttttcttgtacatctacaagcgttgtgtccgtagtttcagtaccagctagacttactgcatcgtcattgtcggaattatcttgtggaggctccacattttgtttcgttttcacatcatgatttgtaggttcctccgaaatagtcttaacttcttttatttggattctatttcctcgttgtgtactaggtgaagattctttgattgcttttagtttattcgccctagttgctagactgtcgtttttgctaaacaaagatgatggcttttctttttgcaaagaaaaactgtctgaaactgttcgctggccggtatctaaaggttttatttttctctttggcaatgatatgctaactgttgtgattggttgtgcatcatcttgcatattggctaaatctggagtggatatccacgatgatggataatt

SEQ ID NO: 12746 - DNA, 541 bp, Diabrotica virgifera
taatctaggaatttgacaactttgttatgttacttattatttgaagtaaatgtttagaagagttaatttaacaaaaaatgaataataatgatagtaaatgtaaaattgacatacaaacttatgttaggtaagttggtgacacggtaaggtatattggtgatagtggcaagggcggatcaaaggagggggccacggcccattccgagaatttaaataatataaattcaaatatttgcagttcaaatgtttttaatttcaaacacatatatttgtacaaaacaggggataaatacgttttctggactagaattgaaaaaagaagtaactggagaagcttcaagaatgacttttgggttttttataaatcaaaatgttgataattttacagagtgccaattgttagaacgatcttgacagccatcaaaatcgtataaatttccatattctatacacacaaagaataacaaagaagtgaagcgttacttgggtcactagcacttagaacaaaggagttggttggtattttcgcacagtcaaaagg

SEQ ID NO: 12747 - DNA, 541 bp, Diabrotica virgifera
tctagcttgctaacttactaatctacaatgttcgcgaaggtgtttttagctgtaacattattttttgcgatcttcttaactggtacttggggagatctttctagaagccctaatcagtccgaactagttttgaaaacgggtctaagtcccgcaccgacttgtgggccttgcgaaaagttggtttttaatagatgtagacgaatctttagttcagaatgccctaaacgtacagaatgaacctatgcagatctagagaagtcaacggataaagataaacaccttagataaagatgtataatattaagatttaatggaatctacaaattagaatatatattagtcatattagggaaacgtacaaattattactttaacaatattaggttttttaacgtacatatctcctaaaattaaccaaaaaactttacatagacttgatctacctatcaatatttggttaattttttaataatattgttatggatagtattttgtaaagtaattatttattttatttacttaaaataaatttgcaatattt

SEQ ID NO: 12748 - DNA, 541 bp, Diabrotica virgifera
gtgtggtgttagtcgttatacgggctctgattgggtgttgaaatgatctgtcaataattgttcaatatggtgtttatccgtaaacaaaaatgttgtatattatattagtttttattgttgtgaggacagaaataaaatcaaatttataagtgcagtgactttttaaatagttttgaaaagccacaggtacgtaattctaaatgttttaggtgtattgcaataaaaaattatcttcatacctatttgaaaatgtaaaaaaataatgtacttttacctacatattagtaggcaatgctttaatttacataatctgattacgaacaaactttctacaaatcttcatctaatatatcgttttcttactctatattttgttgtattttaattcgacaaaaatcaaattaataatttgattaaattcatataaataaacaaaatgtcaaaaagtttatggtgtaaacgttcagtttgtgtatattcccacatgacgtatacgcgaaggtggtgcagtgggaattcgctttgactttcgatcggcggg

SEQ ID NO: 12749 - DNA, 539 bp, Diabrotica virgifera
tgcaatttttcagcacacttcaaatgaactgatggcaatattgtgccatattagatattacagatgtcaaaactgcgattgtgatgaatattaaccgattttctaaatacagatttctaattatttgattaattaaaacaaattgtttgaattcataccttcttattaaatacatttaagtaagtacctatattttttcggcttctattgttttatatacctacctattattgattactgttctttcgcgtctttttttaattgtaggtatgttttatacctataggccaacctaccccaagggctatgacaatttgcccccaatcacggggtaaattgacataggttgtagagctactcttattattttatatcagtatgttggaatacatctagagatctagaaaaaaagggaatattgaagtaatgttcactttatcttatggtaatgcgcacttttcaaaacaaataataataatctttaaaaaaatgtaataggcgaatctatgacaaccaaccccggtctcacctatgatttc

SEQ ID NO: 12750 - DNA, 537 bp, Diabrotica virgifera
acaatgacttgcattacattgtaacactgacatgtagagacgaaaaacgtaaatatatcattattaaatactggcccaaaaaggctttcttcatctatgaaaataattcttttgacaaatgcagtgtagattttactcttcacactctctcagtctcttcacactaagtgtgacaatttgggacaattatttacaaaaaaatttctcattgcacctactacctactactagcaccgtccactaccgactccagttatgtaacacctctagaacttgtttgtagcattaccagttctctaactgttgaaaactgttccaaatttgctccatagttgtgtatattagatcttgataattactgtgaacgtcacagtttttcaacagcatacaatagttttggacacattagtcattcattacctgttataccttccctgcaactgttccggctttgttgtgctaattttttcgatcattactgttaaatgtaacagtttttcaacagtcctacaacagttttggacatattacccgttc

SEQ ID NO: 12751 - DNA, 540 bp, Diabrotica virgifera
  SmartBlast Evalue=3E-27; Info=Cerebral protein 1 n=1 Tax=Culex quinquefasciatus RepID=B0XJ39_CULQU
cattattaaccaaaaattttggtcacaaaagttgaaaacacagtatgtagttctgtatattgtgattataaatttacatataagaattgatttacaaatatacctctaataatattgtgtccagtatcttttatcatattaaatacctgcgtatttacaaagctactaagtactcctgtatactttgtatgaatgttagaaattgtaaatcaggatgaaggtatttgaaagtgcaaaatgggacccggacgcagaaaacaatatctctcaagaactatttaaagccaagaacacatgttgtagcagattttggctgtggagatgcacgactgtccaagtcaataaatcaaaaagttcactcttttgaccttgtggctgtagatgaggcagtagtagcctgtgatatggcaaatgtaccacttgaaaataattcagtagatgttgctgtctactgtctctcgcttatgggtacaaatttacgtgattacttggcagaagcaaatagggttttgaaagtagggggcgtgttaaagatagccg

SEQ ID NO: 12752 - DNA, 541 bp, Diabrotica virgifera
gcctctcttgcattacaccgtccactgaatgcacaaaagtctacaactaacactttttgtcactgtttttgttgtattttatcaatattaaagctaaaacgaaaaaaaaaatggttggttgaaacaaaaaaaaaatctaattttatgattaacccatttgctgctgataacatgccagcgtgtgatatggttgcttcagtgaggtgccattcacgtgccaacgagttatatggtaacttcagtaaggtgccattcaacagaatggctcatatctgagttacatcctcttcaacaggcagcgaatgggttaacactgatcttttctactgtaaactaatgtgcatttagtttagtgctaacatgtacaaataaccaagtccctatgattttatacaaataaacgcggcattctaacactcggaattttagattatggatatttaaattatttcactaagtctgttatggtagttttgtaggatgaattattaaaataggtcaaaagttcttataaaaataaaaaatatctcaaaatgtttca

SEQ ID NO: 12753 - DNA, 536 bp, Diabrotica virgifera
ggctggataggctggtttcggcatgtccgtcacgtttcttggaggcggcttcggaggaacttctgttactttaacctcattcgataagtcgtctccgttaacaacgtcatctttgaagacaactggcaagtttgacatctcaacaacaggaatccctaattgattaacagactctgctaaaggtatactctcaattttcactacctctctgataacttctttagtttcccgaatttctttgacctccttaacgatcttgatctctctgataatctctttggttacttctttaggtttctctaacggattcataggtggcacctctggttcttcggagagatcataagcaggtgtgctgtggctcttgtcgagctttcctctgagcttggttgtagcacttctaggtggtactgccggtttaactttaccctcgggtttcggtggtacctcaggtgacttttttatttgagtacgaggtactattactggtttcttcggtgttgttcaacttttgttcatcgaattttttgataatg

SEQ ID NO: 12754 - DNA, 539 bp, Diabrotica virgifera
tttattcaatttttctcactcgataataaattgtaaaatttgattttaaaatgaattctatttttatcgcaatgcacaatcatcaaaagagttcaaaaatacatcgatgacgacatcatagacagtcgagatagattaagattaaagaacatttacttatctgcagaaatacaatggtttcaaagtaaaaaaaaatgaaaatattaatatgtaaatttttataatgtaagagttatttttatcgagaatgcagtaattaggagtgttcagatcaattaagccaatgtcaacctagttaattttggaacacagcacattagagtaatagttggttggtataacaaattaattaagttacagactcacgtttttcaaataaatgctactaaataaatggcaggaatggtatacataagtgctttaaaataagcagattttacataagttttactaatctgttctcaaaaatgtattagatttgtatctaaatacatagtgtacttctgatattctacctaaaaatatccaaaatcacccgc

SEQ ID NO: 12755 - DNA, 541 bp, Diabrotica virgifera
ttaaaatagaattttattttaatttgcaaataatgtggaaacagttaaaattaagaagtctaatgtcgaaaagtatattttctcgaaagtgtatcaaaaactttatttatctatagtgatttttatggcaaatcttcatttcttccaccgcaaccaatgaggtatattacatattcccaaccaattgcaaaaaaagcctggggctggagtgggtgttcctcccaaaatttctattatacccaaaacgacgattttatcgttggaggttgacatgattgaatgggagtcagcgttgtagtgaaaatccgatgataaagatttgtcgttcaatcctacgggtatggacagaagcacctcggccttgtctatgtcggtggatatcgtaagattcttgaaacttatggcattggctatactagctgaaggaagggcaatggcgcatatcaaagagttggtagcttggtcaagaatggttgtattcaccagtgcaacccacttatatggagctattgaatttccttcaatttcagcgctaaacgag

SEQ ID NO: 12756 - DNA, 540 bp, Diabrotica virgifera
  SmartBlast Evalue=2E-26; Info=Reticulon-4-interacting protein 1 n=1 Tax=Harpegnathos saltator RepID=E2C7P7_9HYME
ttaggagcagattgtgtcttcgattataaagacaaagattacgtacaaaaagtagcaaacgaaggaaggtatcacatagtgttagatggtgctaaaatgggtcctcaaaacataccaaaagaatggcagtatgatacttacatatcgttaaattcaccattattaaagaataccgaccagtatggtttacttccaggattagtaacgagtattaatagtttaattagtacaaacttggatcgatgccaacaaggaggtagagccacgtggggatttttcgtgccatcggctagtgggtttcagttcattcatgaactgattgtaaataagaagatacaaccagttattcagcacacatttacatttgataaactaccagaagctcttgaaaccattgagaagggtcataagaggaaaagtggttatcgattttaaaaattaagtttatttgtgagccttagtttaactgacgttttttgttttaaaataagtaagttgactgtattggcctcatactacattctgtgataaaattatttt

SEQ ID NO: 12757 - DNA, 540 bp, Diabrotica virgifera
agttcagttaggtggtaccaagaataattttaaaagaattttgtggtacatgacccaaaaacattgaaaaccactgttttagattaaatataggtaggttagaagttataggtaggcagttacaattttttctgataatgggattcaatatgcgcatcaaatacattctaaatattgtccccaaaccaatgtttttggaatcagatccgcaaagaaacctaacgaaacttaacaaaacctttttttttgttaaaatttgatcagatgtgactatggcaagtggccaatgcgatgataaagctttctaaaacatgcgttgatatgtttgctacaggaagtgcttaggaatgaaatattttgttgcaatatcatctctaatatatagctaagttttaaattatttcggaagtaaaagagtctcaaggaaataaaaatgcaagatggaggaagaaagcaatatacatgttttgtatgagaaatgcttaatgacatggggcgaatattccccagaaaaaattcttaaattcactataagaaaat

SEQ ID NO: 12758 - DNA, 540 bp, Diabrotica virgifera
ttagttagtggtgaaactaagtatccatagtacggaaaggtaacgaactctcagattcgtttaaaacaagcagacgcagacgccttcaacaaggatacctctcctttttaatataatcctgaagaaagtagtaagaacagcacaaattagaacagaactactgacagtaaatggaccaaaagtgccctcactaatgtaaaggtaacattcaataaattagagatagaggcaaaaaaggtctactaagggcaatgaagagaaaaccaaatacagggtgtttggtaatgaatgggctatagctgaaccttagatttctaagcttaaaataggtcgatttaagctaatttaccttagtacgaataaagttgagatcaaaacttttattcccctattatttttactttgcgtgtggctggcctccacaccatgtaaaactttagagcctagaaaccccaacgggcgaccatggccctccatgggctgtcagcggtcaccgatgatgatgattatttttacttaaaaaagtatactacattcata

SEQ ID NO: 12759 - DNA, 541 bp, Diabrotica virgifera
ataatgtaaaccaaacaaggtaatgacgtatttacaagatgcaattcttaacattttaacttacctactcaagtttcgaataaataattaaagaatgtcattcatacaaagtgtacattacatagtacattttatatgaggaatcagtagtgttgcccaaaatcggtcttggtcttgttattgcgttttcgcaagactaagaccaaaactgaccgtgcaagatttgagcaagaacaagactaagcttgcgagactcttgcgtcttggagttaggactgagtgtcatttcagggagtataaaggtagaaacgcattagagagtcgcgtctcgtcgcgacgagtcggacgcgactcgtcgcgaacaacacagtacaggacttgagattctcattaaagatgttgttctgaagctatttccttgtggcattttttataatcaactatttataatgggaaataagccacaattttaccaaaaaaagactttattaacgtttcgaagcccaaatcgggtttcgttgtcaaaatacaaaatactact

SEQ ID NO: 12760 - DNA, 541 bp, Diabrotica virgifera
  SmartBlast Evalue=6E-80; Info=ChLD3 n=5 Tax=melanogaster subgroup RepID=Q9VJI8_DROME
gatagcttgccaattggtgacaaaccaaacatcagtttgtttcaaaacatcagatagaaatttctgaaaagctgagagataacttgaatttttaaaccaggcggaatgaaagtatagtccaaatggagctctattgcttaaatagtgcctcctaaaattgtgcattagcagttcgtaaacttcatttccagtcatagttgatggacaggagtcaaccatagcacaagtaaattctcctgcttctaattggttcataggtagctcccaaatattatgatacgatctcgaaggacaaagttgtttagaacctacacacctatgaggcattttatagtccatcgtatatggccagagtggtggattggaaaatggcacaaccattgaactgtcatatacgaatccaaattctttcatcattagaaattgtctattccatccaattcttaggaaaggtaccctcattccttttatatcttccattctgacctttgaaaatctatttaggatgtttgcttgacccaccatttcgtcgaaccaatct

SEQ ID NO: 12761 - DNA, 540 bp, Diabrotica virgifera
ggctgcttaaatattttgtattatacgttaactatgtatataaagatatcagtcacagtcgatataccgaattttctaaggtatcttctttggattaaattgctttatagtgaagtaaaattgttacatgtataaataggcgactagtctatttaatgtaaactgtggcgccattatatcacacgtgattcatagagaaaattgttacatgaatctttattgttgaattttccaacactcactagacttaacctacgttaacagtaaagtgtgctataagtgaaaagactggaaggaagatattcatctaagtaaaacatctattaacaatacgttaacatgaaacattagggtcgtccctaaaagttgaaaaatatttaaaacgggtgatcaggcaacaaatgttaaaacaaaaagtaaattgcgatggcactatatcaatgactaatacaaaacatcagactatataaatgtttgctataggaaacgcgcatgcctttctgactagcttcgtattttaagtactataatatttaaatt

SEQ ID NO: 12762 - DNA, 539 bp, Diabrotica virgifera
atgttttgtaatggtatacagccaactacaggaaatttttcctcgtggacaaaagtaatcgttcgtgatagtattttcgcaatatcatctggtaaaatgacaattgtaatttctaggttagtatttttcagcgacgtaaatataaataaaattttatgtcattggtatattcggacattgtaggtatagtgaaatttgattttatatttatttatttttacattaaaatattttaaatattaatattctggcaaatatttgtttaaatagtgttgtttatataaatataaaaataaatattctgacaactatcagatttaagtaaaatgtcatgtaatgatttgcgacattcttaaaatcctatatgaagtcaaaattaatgacgccctgaaaagggggtttgggatgaactgtatgaagtttacagaagtcattgcgaatatgagtttattaattgaatatttccccaagcttgttgatgttcaaagagttaatgtgaaacttcgttaaaacatattgtttctgactttgttacagtt

SEQ ID NO: 12763 - DNA, 531 bp, Diabrotica virgifera
acggattggttgtttatccacgtcattctagcgtagttttttagttttctgcgtttcgcagtcttgatcgtacgtaaattacacatttaaaattgaaaaggatttataggttccaaattaactaaaagacggtgttttcaatccctgtttgtgtattatcgctccaaacccttcttggcagtagcgcacccaggggggggtttgggagttaaacccccctttccccagggcatatgaaaaatatataaataatagcaggaaaatgtaacttgtctttcacaaaatatagaaaaaatttcgacgcccaagccaacccccttcccccagagaaaaattataggtgcgctactgctgcttggatgtgtcccatttttttcaaatttatgatatggtcaccctacagtagaaacgcttcttaattcacgagagtattctacacacttgttcttaatccaggatacagttttttgtgtcaaattagaatttcataatggtagataagtttattttaattttctaatctatttcaac

SEQ ID NO: 12764 - DNA, 541 bp, Diabrotica virgifera
  SmartBlast Evalue=1E-32; Info=Putative chitin-binding protein n= 1 Tax=Lutzomyia longipalpis RepID=A8CWD0_LUTLO
ttgtaaaacagaaaattttgtatcaacaacttgtcttaagaaactaaccatgacatttaaattagttttctttgttgccgtgtacttggtacacgaaatatctggtcacggttacatgttaaatcctccaggaagaagttcaatgtggagattccatccagaggcaacaccaaattatcaagacaaccaaattttctgtgggggagcatatgttcaaaatgaattaaatggtgaactttgtggtgtttgtggtgatccttatacagatccccatcctcaagaaaacgaaaacactggaaagtacggccaaggaattatcgccgcaacttatgatgcaggttcggtgattgatgttgaaattcatctaactgcaaatcatcttggcaattttacatatagtctttgtcaacttgaagatcccaatgctcccgaaccaggtgaatattgtttcgaagacttgttactggaggatggttcagcaaattacaatgtagtcgatgaagatgaagtagtttataatagagttagattgccgggtttc

SEQ ID NO: 12765 - DNA, 541 bp, Diabrotica virgifera
agtgtttgttcatttttttaaaagtggtttttatctcttttaggttagaatatttttttccagttgtcccctagaattttcagactgcccaaagcagtctgaatgaccgcccaatgatattgggatgttcctttcatcgattgaactcgtttggaggtcccttatacgaaaaaggggtggtcttatttgtaggagactgtttagaggggcatatgtggcgcatataacccatactcgggatgctatgtacgagagtggtccgataaatcctctccacctctccgctagatagctccactatcgcaggagaaatatactatcgtgtaatacatttttatagacggcctatgtcaaaatctcagcccaaccggactagtagttttgttttgaccgcgtgtgtaagtctaaagtctaataagtctaaagtctggggactttagaaaaatgaaaaaaagagcaataactgtcggtaattcgactttttttggtaaatagaataacgcagaaaaatacaaagatcgcttggatgctgtgtatggtg

SEQ ID NO: 12766 - DNA, 539 bp, Diabrotica virgifera
  SmartBlast Evalue=4E-35; Info=Endoribonuclease Dcr-1 n=1 Tax= Camponotus floridanus RepID=E2AVZ8_9HYME
gttccaaaaccgtggaccaccgttggaattccattcaactgaaaccgcaaaggtatcatagtttttttgttttccgtgggtaccgtttttccgaatttaggatgagcggaagtccattcaaatagccttcttatcgcatttttcggaatattactagaaaataaactaatttctttccacattatcttataaaacacttcccacaccgttttcagacattttttactgtccaaataaatagcaccagctactgcttcgaaaatatcaccaagtaccttaggtacatctaccgattctgccagttggtattcatcctcctggagtaatatcaaaacttcatcatctattatatagttcttttgggccatgaagttatcgaacctatctattagttttttgcagctgcatattcatcatgagcagatacgtgtgcaaccgcaacctcacacaaagactagcaaaagtgttgttgtttaccaaagcagaccttaaatctgtcagctgtccggggatctaagttttcacaagtttcgtatatg

SEQ ID NO: 12767 - DNA, 529 bp, Diabrotica virgifera
gcgactgtggcgcggatcagaatagtcaccatctgctatcatgcacagagatgaaagagacttgcacagaagaagactttttatagattttagcaaattgcaggccatctatgcggccaacaattggaagtacaaaatttaaagttgttggtgttccggacacagaaagtaaagttagattacctcgtgaaacgctctctggtaagttgagtctaaactgattcgctattggagggttttcacctgacacataccttgaccttgagtgacgtttatgtatagtttaacagaactggctggacggatgaatagatcatttgaaaaacttcttgtgtaatgcattacttatttacattactgatacatgtgttctacgtaaaatttcatctcaaaaacattctaacaataaaacaccgaaaacccttgttttccatacctccacaaaagtcactacaaccatgcgaccacagctgcttcggcagagtgcccctctcaagtgatttagattactatgtggcaagataacaac

SEQ ID NO: 12768 - DNA, 535 bp, Diabrotica virgifera
cttggcttcttatcaggttgttcataatatcccgtcgccatcgcaccttctcaatgatgattttgaagtggcttgattcagtgtaaatcacaattacaaaacatattgcaattcgctgaagaacgttttgctttcataacagtttttgatggacagtatgcatttcgttgcacaaagaaaaacatacatgtttttttattgtcgcatggatcatgttaataaagtttatattagggtcaaccccgatttgacttgtcttttagtcatcactgtatgaaattttgttcaaataagtatttgtacctatttgagctaccaataaatactatgttttatgtattatgaaattttttatttattattaatagttaataaattacttttattattcattttattaacgtgtccaatgtaatttaaaaaacattgtttcattagttatattcattaccacaatataatatgctaaaaaaatacttcagtctactatgaagcaaagtagaactttgtatgttttaggtagttaactgaggcg

SEQ ID NO: 12769 - DNA, 534 bp, Diabrotica virgifera
cgatgatacataagttaagtggagctggactaaagtgcctcacacggttcagcaatattcggtaaatatttcatatgagggttctttatccctgcactctcacatggcaatcattttgacgattctatagcgcatcagcgtgctgtgggaggggtggaggaaagcctggggagcattggagctcgaaggagtggtccctgatttactcagaccaatccttctcaccccaatgaattgtatgcctgaatggccatatgggcatgcaagtctctacaggtgtgtttactttttgcttgcttgctcgtgagtaattccatttatcatttagtaggtcagagtcaatagatgcctaggctcaaaatgggacccatttccattgagtataacgtggatccctgcacaaggatatacgtgaagaccagaatggtagcagtcacgtatatatatctatgatatgatacttctgtaattccatacaaattttgattgctcaagtaattttataaagtattttacagaaataaataacttttt

SEQ ID NO: 12770 - DNA, 540 bp, Diabrotica virgifera
cagtttggttttgtaacgaaaagtacgttctgtaagaacaaaaagcttacctgaaaaacctgtcaaccaagatataagaaacacatgcacttgtaagaagaataaaaaattatcactgggagccttttttgcaagaaatgagatatgatttttatagtctgcaaaaggatatatggccttttatatgagatcaaaaaccagaacggagaccagaacgaaggaactaatagacccaaaatacataacaaaagattcaaggatttactatctaagaaagcattatgcagagaaagaacaaaaatgacgctagaaccagagacaccaaaaattaccacaaatgaagaagttgatatcaataaacatgaagttcgaaaaatacttctgttggaaaaaaacagaaaagctgtaggtaagtatggaataccaaacaaatcactgaaacattgtggagcggtaatgacaaaataaaatacaggatgaatggagaactagcgaactaattctaccattcaatagaggaggtaaaacaaacaaaccaaa

SEQ ID NO: 12771 - DNA, 517 bp, Diabrotica virgifera
  SmartBlast Evalue=4E-26; Info=Pol-like protein n=1 Tax= Biomphalaria glabrata RepID=A3FMR3_BIOGL
acagtttgtagttccctctttccgtggttcttagagaacggcttaaatttaatcaattaacaaatcagcattatatgtctttacaagacacaatccttcctataaaccaagatgtattacttagtgatcaatcttttaaatttaaaaataatgtcaaatatctgggactcattctggacaaaaaactaacttggaaaccacacatacaatatatgctggatagatgtagcaaaggtattaatttccttagaatgacaactagaatgtggtggggctgcgatgttgaaacatctttattgttttatagagcttatatacgatccattatagattatggtgctactctctacggttctgcttccaaaaaccttttaagaaaaattgacgttttccaaaattctgccttgagaatctgtttaggtgctatgagatctactcctatacaaccaatacatgttgaagcttctgagcctcctttggagattagaagaaatttactaagacgaaaaataggtac

SEQ ID NO: 12772 - DNA, 539 bp, Diabrotica virgifera
  SmartBlast Evalue=3E-12; Info=Novel protein similar to vertebrate ribonuclease P 14kDa subunit (RPP14) n=1 Tax=Danio rerio RepID=Q502A2_DANRE
gaaaaattcatggttaattttattctatattaattgcaaaaggctgaattcaaaattcatatccattcataagcggagaccaattattggattatgactaattactactatcttgatatttctttagtttttccatattctagtgacctagaaataacaccagtgtattttaaaaagtcaataatggatgcagggtatcaactgtttggacaaacctttaccagtgtggacgtagatctgttaaaatacaatgaaaaagagaaaagagcagttttgagagtaccacaatcacactatgtaaaactaagaagtagtctcagtttcgttcatacatatgcagatgaaaaatgttattttagggttcataaggcttctccattattattatctttgcaaggtgatagtagaagttgtggattttaatctatgagtacctgtaaaaagtttttatagataatactgaaaagactgaatagtgtttgtatttgttcataataatcagtttgttcaattttctttaataaatatttttgtatttt

SEQ ID NO: 12773 - DNA, 539 bp, Diabrotica virgifera
attcaaatcaaacattatcaaatgacgatcgataagggtctaagttctcttccttactgaggctgatcggtaacgctccaccccgtgtccattcgacgagagtgtagatacgactttgagggcagatgaaatacagtacgattgtcttcttaacttaaaggcatatattattaaattcctgatgatgaacttttcataactaataaggatttatcaggaaagctaaaaatgtaaatcaaagaacaagaaagattcatcttgttcaacactttagaagttatgagatgaagattaatatcaaattaccaaaaagtaacaaagtcttatgttaaatacacctatccaatatttttaagaatatcacaagacaccaggtttagctattattaaaatagcattaacataaccatatcaagaccattaaaaactgatctagtaattatattcatccaaaattggaggacatgtacaactaaatgtttgtctccataaatgtcatcgattctagctactgtaggccacactttagtttctggttt

SEQ ID NO: 12774 - DNA, 542 bp, Diabrotica virgifera
  SmartBlast Evalue=8E-51; Info="NADH dehydrogenase (Ubiquinone) 1 alpha subcomplex, 13 n=1 Tax=Tribolium castaneum RepID=D6WAR0_ TRICA"
gtttgctgtcttaatgttgacatttttatatattggaaaaaatgtcgaaagttgaatttaaacaagatatgcccccacaggggggctacaatccaattaactataaaagagttccagccaaaactttatttggaggatgggccttaatcgggggctaccttggcatgactgcaggagcggcgtatttatattatttaaacgttaaggcagtaaaaactcgagaacttgaattaaagggcgccagcttagcgctgtatccaatacttatggctgaaagagaccgtgaatatatgaagcaattaaggagaaatagagatgaagaacgtgaattaatgaaaaatgttgaaggatggcagacgggtacatggtatggtgaacccatctacaagactaaagacaaagatactcttattcatcccctattccatgaatattacattcacagttcttacaaggactacactgttcgtgcaaacgttggtttgatgtcttaaatttttattctattgtaatttagtagcgaaatttaaatattaaattgt

SEQ ID NO: 12775 - DNA, 537 bp, Diabrotica virgifera
tctgggatatcttggactggaaaacgagtattcaatattatagtagttacaaaattttttgaatttaatactgttatatggtacattgtcagacacaaattttcttggcaagccatgtgtagcaaatacgttttttagctgtgaaataacttcactgatactcttacttcttattctaatgagctcaatccaattactgtaataatcaaatatgactaagtatgactttccaccaaagtccaagatatctgaagcaactatctcaaaaagaagcttgggcacttcatgacacataagtggttccctttcacagtttctactataagtttccatgttcgacacttactaataaattcctgtatatccgaggacataccaagtcagtaaaaaagttttcttgcttttgctttagttttctatctctaaatgaatcttatgcagctgatttaacatatgcaatctaagagttttaggaatgcaaacacgatcattataaaaaattatgacattcttgacaagcaaatcatctttaagttt

SEQ ID NO: 12776 - DNA, 538 bp, Diabrotica virgifera
gtactaattttgcaatttctccgcttctaattattggatcaaggtttacaaacatcattttgtaggtttttttaaaggaacaaaattgcattttataaaaatgatttatatttcttagtttacgaattataatcattaaacaattaaatcctttataccaaattccccttaaaagcagtttgaaattcgaatgcagttggtcaagatacataagaatatactctgaaattgcatggactttaatcggccacgaaactgcattggtttcctgtctccattattttctttcttttatctttttaacaaaaatgaatgcactttcagctgtaatgctgcaaattttatgtaagtacatagagtggattataaaagtaacaaatgtgaataaatgggagattactataattttttacttttgtcgagtgttttagatttcttccctcttgtctcaattttttatatacttacaaatcttataatcaatgaaaaagaaaaataaaacattccagtcgggagatattacgatgataataattag

SEQ ID NO: 12777 - DNA, 534 bp, Diabrotica virgifera
  SmartBlast Evalue=3E-34; Info=Mannose-6-phosphate isomerase n=1 Tax=Camponotus floridanus RepID=E2ARN2_9HYME
catttaaaaataatattgatactttatttatcacaaattggcaaatgcttggtacattaacaaatattctgtgtatgaggatatttcagaaatctcaaatgtttcatcagctgctaagaataatactagacccggctttatttctctatttttactttttccagtaccttccataataattattatgctagcactgtccctttttattgttctgtacagtttgacagagtttggaattcgaatttctactactgcaaaatctggcactggaggtctgaacagtcttgtatattcatcttcatttactggtttgaagagtttttcctcagcaatatctcccttgtattccaacatgctcagtagagtttcgacatcaacaaactttggtgtcaatccagctctcactacattatctgaggaagccatgacttcaatacagtcaccataaatgtatgcatgtggctcattggctgctaaaaaaattgcttcagatggttttagctttatgtaatttaagatatagaccatcagcac

SEQ ID NO: 12778 - DNA, 537 bp, Diabrotica virgifera
acctattgataagggtgactagtttataagaaatagtgtgatttatgtgaatacggtttataaaactaagtaaaggcaaatcttgtggtgtgggttcgtaggaaaagatttttcatgtaaaaaggcatttttgggaaagtaaattaggaaggaatagaacaaaacatcgaaatttgaaaccctcctcgcctttagcgattttggtcaacccatcttttcctacaggactcccactgtgtttaactatagtttctattcctgcgtttattccttttatggtttttacttgtgacagccagtcaaaatgcttgttcctacggttagaattttttgagtaattttttttaatgaaagctttgtaatgatatttttagaaaaacttgtctaaacattctaaaacttctttttatggggtcttaaaaagaagtgcgaaccagaccaatgaaatttttgtatctcagtgttatatttgtaggacaaaagagaatttttaacattaagtagtattattgtattgtttttttctcaagaaattat

SEQ ID NO: 12779 - DNA, 539 bp, Diabrotica virgifera
  SmartBlast Evalue=2E-28; Info=Glutathione s-transferase n=1 Tax= Aedes aegypti RepID=Q16P79_AEDAE
ccagttcattggaagaggtgaacagattcgattgctgttgagctatggaggaattccgtttgaggatatacgcatcaaacatgcggattggccaaaaattaaacccactactcctcttggacagcttccagtattagagatagatggaaaagcaatcccccaatctacggcaatctgtagatacttagcatcactggtaaaactggatggcaaagatgtgaaagaaaatattgcactagatgttgccatcgaaactattttggatgtacaaaaccttacctacgattgtatgtttatgagtgatgcggtagcaaaagaggaaaaacttaaaaaactaaaacaagtcatatctgtcaattttggaaaattagaagaatatgcgaaaaaacacaatggctacatagcttttgaacgattgtcatgggctgatactttattcgtctgcgtctatcagttattggtcaatgttgtaggtaaggagactgttgatgcttatcctagtttactgaaagttaagaagaacgttatagctgcaaaag

SEQ ID NO: 12780 - DNA, 539 bp, Diabrotica virgifera
  SmartBlast Evalue=3E-71; Info=Amyloid protein n=1 Tax=Manduca sexta RepID=Q4ZHV6_MANSE
cggacaagaggcctaccatcccaagtacatgacggagcagggagaatgggtttccgacctctattccaaagcaacgtgttacaaagataaaatggacattctcaactactgcaaaaaggtatatcctaagagagacataacaaacatcgtagaaagcagccattacttgaagatcggagcttggtgtcgagctggatcgtcaacgggagctcaaacgaggggaaaatgtaaaacagcgagatgggtgaaaccattcagatgtttagaaggtccattccaatcagacgctcttctagtacctgaaaactgcatgtttgaccatatccataatcaaagtaactgttggacgttcgggcgctggaactccacagctggaaatgcctgtcaagagaaaggacttcagctaagatcgttcgccatgctcctaccatgtggtatctcgttattcagtggtgttgagtttgtctgttgcccaaagcattttaaagataatctaaaaccaaagaagcctgtggatctgacaattttgaagaaggaac

SEQ ID NO: 12781 - DNA, 536 bp, Diabrotica virgifera
aagttattctaagttttctgagcggttccaaaatttccacatttaaaccagctattttccaagcgtatttagatatagtagtttgaatacctcctttttctcctggtaaaacataaatattgccatcttgtagtcgcaaatgtaaacttgcttctgctattttatctattccaatttcaagtctgaatgttaatgaatttcctttttcgtctaaaccatagaaggtttgcgtatctatccactttgctgtgggtgcaaatatttctgtttctatccggtttcctattttttctagtcgtttcctgtatttttcttgatatttttttacctctttctttgctactatcaatttaacaaggtagaaccaatctcttccactataaacactacttttatgtttccttacaaataaaaaatacaccataaatggaaaggaaagcaaacttaaataataaataaaattatacaatatatccattttcaaactgttaaaatatgatccgttagacacaacagataccagccataacaccaca

SEQ ID NO: 12782 - DNA, 536 bp, Diabrotica virgifera
aaaaattctcgtagtagtaacatttttaaaaaatcgcaatggtagttccagtggaacgtaaagttggaagagttctcgagaaaccaaaacagttcgtcgggaacaacttaaccctcaacatcgatgaaacaaaagcagcatctgccttacaggaaacaactgtaaagtgacattagcagaaaacaacggaaaattgcaagttgttggtgataattgtgaaatagttgtgagaaagggcaacggaaatattaaatatgtgggcaattgtggcaaaatagttcttggtcttggagtttcttctgagaatgtgaactatattggaaaccgaggcaatgtgacatctgtgaatccaaatggaagcagtgaacttcaagatatcagttttggtgttagtgaaagtaaccacagaagaaatacaaataagtttgttaaagacggtacaagaaatttaacggttagaaatgccaatatgattcaagttacttcctctgccgtaccgaagattttgaattaccgctactttttgttagacttcc

SEQ ID NO: 12783 - DNA, 539 bp, Diabrotica virgifera
  SmartBlast Evalue=4E-35; Info=Basement membrane-specific heparan sulfate proteoglycan core protein n=1 Tax=Camponotus floridanus RepID=E2AWE3_9HYME
tccttcagtgaaatggacgaaacttggtggtgatttgggtaacaacgtacaacagttcggttccacacttaatatcagaaacgcagccattgaagatcgcggcgtttatgtttgcgtctctacgaatgcccatggaattgcgcaggcgtcagttgttgtggaggtgacacgtttggaaacaccacgattggaagtttacccctcatctagccagatcgtcattgctggaaacagtgctgtggtccaatgcagagctgtagctggaattccgtctccaacgatcacctggacaagagaaaacgggttgccattgagttcaaacgtagaagaaatgtctggaggcactttaagattcacacagataactcaacgcgaagagggagaatacatctgtactgcgatcaatgaagccggttcagccagcgtttctgcgcatatagttgttcacagtcctcctgatatcatcattactccaagacaggaagtgatcactagaggtataggcgattctttgagtctggaatgtcaaggaacgggaa

SEQ ID NO: 12784 - DNA, 537 bp, Diabrotica virgifera
acaaaaaacaagacaatcaaacagagatagaaatgaatcttgccaatagaaacgagccgaaaggagatgcctcgaaacttaggttacctcttaaaataactaatgaaccggaacctgcgaaggagcccaaggagaagtcaccgaccattgtgaaagatgtcaaaaatataataaataaggtaattccttctccgggtaaagataaacaggaaactacaaagaaagaagagaagaagcaagaaataaagaagccaatacttatgaccagaagggaattaacagatccgttcggttcggatgatgaggaaagccctccagctgataacaatgttgcagataacaagcgtacagaaatgaatggtgatattaatcataaattagatgtaagtgatagtaaggaaaataaagatagtgagaaacaagatgatatattttcggacttgccaaaaccgaatcctcaaattcttatgaggcattcggagcaaagagaaagggcgcgggcgttgctggaacaggtgaagaaggagggatcgaatc

SEQ ID NO: 12785 - DNA, 530 bp, Diabrotica virgifera
  SmartBlast Evalue=2E-13; Info=Endonuclease-reverse transcriptase n=1 Tax=Bombyx mori RepID=D7F170_BOMMO
gcatatttctgtcttgagccgtttggaagttgtaggcggttgaagtgggggagagtataagtggacacccggtatattaatgaaacgaaaaccaaatatatggaatggacagacgaaccgttctggacagtacctgacgctgattacctcaaagaataaaacttacaaatttgaaaaagtccagaaatttgagtacctgttaacgatattctcgtgtgaacctggtaaccgtaatcagacctatgcgagtaaaacatatggacactacagcagcagaacagttgaaacttcagatgtgggaacgaaaagtgttgagaaaaatatacggcggaaaaaccataaatggcacatggacacgcagaacaaactacgaattaaaagaactatacaaagagcttcacataatagcaatcataaagacacacagattaagatggatgggacacttgcagaaaatacctcaaatcaggataccaaagtgtctcctaactagtgcaatagaaggaaagaagagaataggaagaccaagg

SEQ ID NO: 12786 - DNA, 539 bp, Diabrotica virgifera
cgattgttgaaaaaactgaactgtgatatgtagttgtcacaataggtaataaattagttgcccgtataactaaaactaaaggtattacttaacgttgtaacatcgtaatgtcagtcggggtaggggacgttggccgaaacaactgagaatactcttgggcaacgttgtatacagtgcatttgtttgtactgacaaccaatgcgtcgaaaaattgctacttgggttacccttcccaaaatctacgccattagcgcaactgctattttagtacaatatttctatagttcactcttttctgggtaaataatatactctttattcgtaacgatcaatatcattagttttcgagatatttgaagttgaaaatgcaacggcacagctcttttgaagaatttattgtgccccttcatttttaacttcaagtttctcgaaaactaatgaatttgtcggtaagaatgaatagtataataattgaatagaagttggagaatcgaaaaattgtactaaaatagtaattatgccattttcttagaatgtgt

SEQ ID NO: 12787 - DNA, 537 bp, Diabrotica virgifera
  SmartBlast Evalue=0.000000001; Info=Transposase n=1 Tax=Agrilus planipennis RepID=D2WLV0_AGRPL
tggggtgacgtccactacttcgactgttccttggtctctggtttataccactcactgatacgccgacactaaaccgcctccgaaacgaagttccactgtggaaccacgtttcgtcggcggttatgtaacaacgtataaactcctttggattacacttcagattctgctcagaagtggtctcacggttgcgcttattgtccggagtgagtatgaccaaaatttcatgcagggtatgacccacgcagttttctgagatgcatactgtctcagcgatctcgcgcatcgtcagttcgcggttttccaatcagagatcatggattattttcagattattttccgtggtagccgttttcgggcccgtggacgtgatttaacaaataccgatctgtacctacgttgaaactcgttagaccaataatttttgaaggtcgccaccaaaggagaatagtcaccatacacagcctccaagagatctttgatttcactgcgttatttcccttccaaaacaagagtcgaatcaccgacagttattacctt

SEQ ID NO: 12788 - DNA, 539 bp, Diabrotica virgifera
ctgtcttttttggaatgtttattttttaaattaaaaggtaccctgttaaaatatcaattgcccctccctgtccggaaggagtgtacatggctgtgcatgtgtggttgtatgttttgtgctcgttaatggtatgtacaggttcggatgaggtcttctggggttcagatgcaccccctgaaaatggtcctggggcgcccatgcaagtgtcttgcagagttggaatcgccatcaaatcggctggcctgtttgttttctttatatttgagtgtttggatttactttcaagtcatatcaatgatattttttgtaataacaatttttgcccttttttttaaatttgggggggatttttggggagaatgaccgctgccctccggccagaccggcatttttgtgttgggctgtcatgggggagtcgcctgaaagattttcaggttgcctaaaatacctactcaaaaatgtctcacagctcttatactattagttctgcttgacaaaattgagcaataactgtcatataattaaacttgttgttattg

SEQ ID NO: 12789 - DNA, 536 bp, Diabrotica virgifera
gcaggttctgtacttatagccactttaaacaaatcattttcttttagtaaaaaactgaaagccacctactcatcttccgtttctaaataatacatttcgaatgtcagcgaacaattatcaaatatgtatgggcacgtgaactagtaactgagccctatcagtgaatacttcactgcacatttcgcacttaaagagattctgggcatttgcgttggcgtgttgcatggaaatttcggccagttcgtgcaatggactaggatcttcctgtttgatgtgctgtaaaagaggcgtagaatcggcaggatattcgttctcggattcagatttcttgttacggtttttggagattaccatgccttcctttaccattcgtactttacttcccggacctatgatgtgcctgccgggtttcaagctattactattcgccctcgacctcgtcatcattttgatttcaaccgtcgagggtgattcgctttctatggtttgttcagatgcaacttctggcggttcttcaaactggtccatataaatga

SEQ ID NO: 12790 - DNA, 539 bp, Diabrotica virgifera
gttgtcatcatcttattaatggcacacaaataggacagcatctacatcgaggtttgagagttagctcccatgacttacaaccagggttaacacattttacgccgtcacaatgggggtcgaactgcgctggtgcgcattggggacagcatttacatttcatcgtagtgagaacttcgccacgcttacactcctgcttgaagcactgaacagctgcgcaatcggtttcgcaatctcttggtaagcattcgtagcaacaggagcatgggagttttttgacgtcgaatcctggttggcacgttggctgataacaacgcaccctctcacactctttttctgtatggcacggaggtggagggggttcaacgcagtcttcctttggagggctgtgtgctagagctgctaagatgcaaacagccaggatgattatccacctcatattaatgcgtgagaaagatataactttgtgatttataagatgttcttcttagttgaactaatcctaaaatattactgaatagcttataataattgaattctct

SEQ ID NO: 12791 - DNA, 535 bp, Diabrotica virgifera
  SmartBlast Evalue=2E-20; Info=Squamous cell carcinoma antigen recognized by T-cells 3 (SART-3) (hSART-3) (Tat-interacting protein of 110 kDa) (Tip110). n=1 Tax=Gallus gallus RepID= UPI0000ECA68B
attcaggtcctgtcgaatggggctataaaaaagcaatacaaaccttagaaacatacaaacctttcgaagatagacttatatctgcagatagtgctgaactgtacgacatttataaagaatatattaaagaagttaaagatacatcaaccgtattatgtttgtatgaaagggcgatactccccttatgtctaacacctgttttgtgggaagattatattaaatattgttttaaattaagggaagttgtcttgaaggttggaactagagctattagaaattgcacttggagtgagcctttgtggattgctaggcttcgggctctggaatttcataaatcggatgaaaaagaaattatggaatgttttgaacaaggtgtgattaatataagcccgtcaccaccgttggagttttggttttcgttcttggagtattatcacagaaattcagatgaccagaaaaagcttgataagcttttctctcagctgtacagcaaattgggcatgaaaacgatccaacatataaagtaagcagatgg

SEQ ID NO: 12792 - DNA, 532 bp, Diabrotica virgifera
attaaagtaaaagtaaagtatcatgtaaattacctattacgcatttgtcgcgtgcacactttccaaaaactatcgttagaccaccccacaacaaccttttctggggacagttggcccatccctagagggttggagagaggccagtagtaatcataaaaaatcaatttaaaacaaaaaatgtcattttcaacattccaccacattaaacctaactgccgctactttaataaactacttactaagtgctacttatacaatatttgtatattaccactttttccatttctgcgatacttaccattttgtgtatcagtagatgtttctacgtactattttacattgagccatatttttctacttctttaatgttaagtgtaatgtattttgtcttatgttaaaaatctgcaatattttaatattttatgtaacgttcctaaattgaaatttgtgtttgtgaaaaatttatttgatttaggattaggtgtttataaagtaaattgtacatattatttttaaattaaatgttttaatg

SEQ ID NO: 12793 - DNA, 538 bp, Diabrotica virgifera
  SmartBlast Evalue=3E-36; Info=Chromatin modification-related protein YNG2 n=1 Tax=Harpegnathos saltator RepID=E2BEC1_9HYME
gtctccgattctcctgttacgtggttttcaggggttatcagttgtttgactggttgctttttaaatttattcttaccagtgcaattatgatagaaaaaattgtcttgttcactaaacagtttgtcacattcacagcaagctaaatagcaaggttcgttataaacattaaaaaattcatcaagtgtatttttgtaaccaggttcgagattgtgtctagactgaatatgctgacacagatcttctaaaattgaaaacattcctaaacagtataaacatatgaatcgtttgtggaactccagcatatgtatgtacaaattccagttttcatagtatgtaccacatgccgaacacaaaaatactttccttgttaacttaaagccagaataattgttatcctgtgacacttcttggacattttcttcatcgcactgaactaaatgttcctgtagacttggtaatgattcgaaaccggccctattacacttaaagcacttaaactgaacagaaggttgtaaacctagatattgagcatactcgg

SEQ ID NO: 12794 - DNA, 536 bp, Diabrotica virgifera
  SmartBlast Evalue=9E-49; Info=Isoform 3 of Cullin-associated NEDD8-dissociated protein 1 n=1 Tax=Homo sapiens RepID=Q86VP6-3
gcattcgaaagttttattaatagatgtcccaaagagatcaccaagaatattttatcaataacagatttatgtttaaaatacatggtatatgatcctaactacaattatgatgaagatgaaagtgccaacggccaaaatgacccaaatgacgatgatgaggaggatgaagagaatgatgaatatagcgacgatgatgatatgagctggaaagtgagacgatctgctgcaaaatgtttagaagctattatttcaacccgtcacgagctgctatccgaattttacaaagttttgtcaccagctttaatcgctagatttaaagaaagagaagaaaacgtgaagtccgatatcttccatgcctacatagctcttctcaagcaaactaaatcaacagtaagcgtaagcatggatccaaacgctatggttatggatgacgaggaagagtcacctatgatacttcttcagcagcaaatagaaatgcttgtcaacggtgtacagggtcaaatgcgtgagaaaagcattaaaacaagacaggactg

SEQ ID NO: 12795 - DNA, 539 bp, Diabrotica virgifera
  SmartBlast Evalue=8E-37; Info=HIF prolyl hydroxylase n=1 Tax= Tribolium castaneum RepID=UPI0000D5686A
gtttcaaggagttgtgcggtttgtggacttaaacaaaatttactgaggtgttcgcgttgtaaagtaacttgttattgtagtaaggatcatcagttacaagattggaaaaagcataagccaatctgtaagagacttcgaatatctgattccactgtggaaaataaatacggacatatagtggagaattcagaacataaagatattttaccaatagaaggcagctcagaaaatgaaatattaagctctgtagctgaacagttagcaccaaataacaattatcaactgacatctactgagaaatctttaaattttgttaatatagctatgcctattagtggaagtaatgttgttcagtccaaacataaaactcttaaagattttccagagatttccttaagtcagtctacaagtcttgaaaatgatgtatatctagaagaaacatgcagaaatgttatagaggacatgagtgactatggactttgtgttatagataattttcttggtgctgaaagaggtaagaatgtcttggctgaagtgtt

SEQ ID NO: 12796 - DNA, 537 bp, Diabrotica virgifera
aaataccttcaactgagcaggttccacagagagtcgaaaacgtacgtctcgctggtcgttcctctatgatcgttatgcgtcagcctcccaaacaacaaagtgaagaaggaagacaagatcatttcatggtttctaacacaggaaatgttaaaattgatgctgaggttatccatgttgaaaggatggtacatcttggaccaagtcatattgtcactgttttacctggccagaccaccacattagatcttactggtgttcatttccgcaattgtcttcttaaagttacaaatcatcaagaaggagaagctttattctccgctcaaggtggcactgttctaaaagatttcgaaaatactgtacagaaactcgaaaacgaagtccaagttgtacaaaaagttgagaacttccatcttgccgctcattcttcggtgctggtcatgactcaaccccctaaattgggatcagctgaaagaaaagatcacttccaagttacaaataacggaaatgttaaaattgatgctgaggttatccatgtcg

SEQ ID NO: 12797 - DNA, 535 bp, Diabrotica virgifera
  SmartBlast Evalue=6E-53; Info=CG3605 n=3 Tax=melanogaster subgroup RepID=Q9VQK7_DROME
atgacatcggagaagaccccaacattgataggtctctttggggagcattagaatcagaatctgaagaagagagcgaagaagaggaagaagagcaagaaaaagaagcacctattgttgatgagtctggtctagtaactccagctgaaggcttagttacaccgagcggtatatctagcatacctgctggtatggaaacaccagaaactattgagctaaggaaaaagaaaattgaaagtgaaatggagggaagcgagacccctgttctatatcatataatacctgagaaacgcaatgaaagaattggaaatgccatgatgggtaatgttcacacatatgatatgagtaatattggtactgtgggagctccaatcaccaagagagttgatcgagagggcatggtcgaattggcattggatccatcagaattagatatggatagcgatgcgatggctgtaagatatgaacaacaaatgagggaaaatcaaagtcagttacaaaaggaagatctaagtgatatgttggcggaacatgttgc

SEQ ID NO: 12798 - DNA, 537 bp, Diabrotica virgifera
aatagattcaataattgtttaaagacttcagaagatcgttgctcactaatgctactaacacacagtttaactcctattgcttcgtgtaaaaaccaatgatgatttaagctttttttaaaaattatatccgcacaaaaagcactagcatctttatcaaattctttcaatacacaagcaatacttttgatcaactcatctttgctttgcggtttcaacatgttgagaagattttttattgtcgtataacgttcattcttactctcattaataagacagtccttatctttaaacactgactgcaacttattcaccattattttgtttttctgtaaaatgacgccaatatattcttgtacttgtttgggttgaacattctgtacaatacccccaatataatcttgtacttgtttgagttcaacttgttgttcttttaatacacttaacacttccagtccttctttaaacggatagcgacaaaaattatcttcactacaatcttgaagtagagtagagtcaatcatttttaaatatatcttt

SEQ ID NO: 12799 - DNA, 539 bp, Diabrotica virgifera
  SmartBlast Evalue=1E-18; Info=Gamma-interferon-inducible lysosomal thiol reductase n=1 Tax=Harpegnathos saltator RepID= E2BTM9_9HYME
gagatcagtgactttcaaatctctatctgtatctggttagtttgccacgggtcatttccttaacatgtatcaaaatgcttatctacgaaacggattgatagtattggttattcttgtttgttttggtacaaattcgaatggactaaaagtatctgtctactacgaagcgctgtgcccagacagtgttagatttattggtcgtcagctctaccccaaatgggaccaaattaaggactatatcgacgagttggaatttgtaccctttggcaaagctatatacgtgcaccacgatgctgatattgtaaagcaaacatctgagcgttactcattcagttgccaacatggtcgtagagaatgccaaggaaacaagtaccaggcttgtgcactatcgcaaaataaaggcaaagatgtagaagtgcctttggtttattgtatcatgaaaagtatagatccttcttctttcgatactgttgaagaatgtgctaggagatttggattagatattccgaagctgaaatcctgttccgacagcatagaag

SEQ ID NO: 12800 - DNA, 536 bp, Diabrotica virgifera
tttcacaacaaacttgttaagtgcacttctttattaggatgaatgtttaaaaatttttctacagagtgccatttatcgtcaaaaagaaatcttttaaaaaaatatcgagggttattaatttttattgtagttctattttacacgttattttttttaatatactttgtatgctgatacctttacagcacaattcttgaaatgttggacaaggttacggcatgtaacctttgacccaaatatatatgttacagttcaagttgattgtccagttggagttgactattcctagttcgagtcaactcaggctggttttagtaaaagttgattataaatattaaatgaagatttttattcaacatttactagtaaaagtagactccaactaggaaaagtatactcttcccaatgccatttagtaagtctatcattagatcagttttcccaatcattaggtcaacacttactagtcaaagtaatagtgtcaaagtaaagtaagaacttatcttttgatagtgtcaaaatatttgcttgtgccc

SEQ ID NO: 12801 - DNA, 538 bp, Diabrotica virgifera
  SmartBlast Evalue=7E-82; Info=Gliotactin n=1 Tax=Tribolium castaneum RepID=D6W7H2_TRICA
gatttccatatctagcaaaatcagaatatgccttcatgaagaagtgactcatatttctgtcgtttctagtccactgatcacggacaaatcgttctcctgaaggtaacatttcaacatctaagaatggtgctccacataaaagatagtgttcaatatcatggggaacttttctccattctgaaaggttaaatgattccaccgtagtattcaaaacgtacatatacactgggacattttgttcaatcaatagttttaccattttatcatttggagcagtatataaaaagtcagaaagtaactgtatatattcatttcttatatgagtaacattatctggatctggccaataagtatacatgtactttattgcgtcgaatattccattgggatttaatgtgtagttgtaccgtaaaaccagctctcttactttttgatcaaaaaactcttgacttatcctgaaattgggctccaatgttttgttggaagttataaatccagctgcttcttgtaaggtaacacttgacatataacgcaatcc

SEQ ID NO: 12802 - DNA, 536 bp, Diabrotica virgifera
  SmartBlast Evalue=2E-15; Info=Selenoprotein M n=1 Tax= Litopenaeus vannamei RepID=A5J2A1_LITVA
caatcttataatcttgagaattaataaatatttaaatagagttaagatatacttaaataaaggtgccaagtggcagaaaaatacttgatgctataagttgatataaaatagaacgtgttaattaaacctaaaaaatgaaatacttaattcttttagcagtgattgtaattaatgcttgcttagtaagcagtagtaacattgtttcagctaggcttgaaagttgtccaggatgttccttaaaccgactagaccaagttaaatggtttgcctataatgacattcagacttatgaaaatgttgaatggaaaaagatttccggagctccaccagaactggtatttcttaatgaccaaggtgaagaggttgaaaggattcctttaaaaactctaaatagagttcagtgtaatgatctcttactgtccaggggatttgttaaaaaggctgaggaaaagaggctgaggaaaagagctatgaacattttaacatttttataccaaaaagtacagataataataatgtagtttaataaaatctac

SEQ ID NO: 12803 - DNA, 524 bp, Diabrotica virgifera
aaaggggctagacaagaacatgaagaggcccttctaatcaaaactggtgggaagaaatataccgacgtcttgaaggaaatgaaccaaaagatcgatataggaaaaattggaattaaagtagacaggatgaagaagacagacggggagatatcctcgtaaaattaaaggggaagggagctgctgaaaagctaagaaaggaaatggatactaggatgtccggcatgaatatggcaattaggagaaaggagcataatctcacgattactaaactgcacccaggggtcacagaagaaatattgcacgatgccattaaggtctatacgggaatacccaaagaagaggtaagtataaaaatgttaagaacaaatggacaatgggagcaggttgccaccatagctgtgcgccctacaaaagcggaggaactacgcaaatataatgcgatagtgataggctgggtgtcatgccctataatgaaaagatacacccccacaaggtgttacaagtgtcttcactatggacacaac

SEQ ID NO: 12804 - DNA, 538 bp, Diabrotica virgifera
aaaatcttcacgatgaagactttaatcgctgttgctgttttattatgcgttttagctcttgtttctccttcattgtcattatcttatggttcacaagatatggaggaaaggaatgatggaggattcatggacgtactaaaaggattttccgatatattaaagagtataataggattaattgaaggaactggaaaagtcgatgatctaacggcagcaattcaaaagctcttttatgctgttgaaaaattgataaatttgcaaaatttactgtcaaaagttccattcgttggagcatatcttgctccagttgctggcggtattggaacattaatggcagatacgcccatgttgggtggtttaatatcaaatttactaattggaccgagtgctgccgattatccatagacatttaaaatacagtggtcagtgaaaaaagaaagagagaaggcaatatgtcaacccaaaagtaaaacataggaaatacaaaactgtattaatctgttcattaattttttaataaactttaaaatttcatact

SEQ ID NO: 12805 - DNA, 535 bp, Diabrotica virgifera
aattgctggacagctgtttccaccatttcaggcttcctcaacagcattgaaattcccattgggacgcgagaagtgtttttattcctgaaaggcattttcgttggagcaggtgttttgggctttatcatacctctaataatttgattattccctttttgacattcacgttatgttgctgtttaagataatttatgaatctgttggtgtgggttggttttctgtagacttaagttatacgtcctacattctcctttgtgactctagaatgaacacatgcagaaatggtagtgagttgttattttttttccattgtgcatttgattgattctgctttatagttaatgtctaccaaaattgttcatttcttctggttcataagataaaatggagaacacatcatctacttatctccatcatacgattagtgtttgttcaagtttgagcacaatttttttccaaattcttccatagtatatttgctaatattgaagataatgaggagtccatggccaatccaaaatcttgtctagacaag

SEQ ID NO: 12806 - DNA, 538 bp, Diabrotica virgifera
  SmartBlast Evalue=7E-68; Info="Protein FAN, putative n=1 Tax= Pediculus humanus corporis RepID=E0W257_PEDHC"
tagattcgatcacccggatcgtatgttcaactctgtggcagatgcttacaagaattgtttgaataatatgtcagattttaaggaactaataccacaattttatgatataagcgaccagggaaaatttttaataaataacatgggaatcaactttggatatagatataataatctaaaagtggacaacgtggaattaccgccttgggcgagcagccccaaagactttattaacaaactaagagatgcgttggagagcgaaatcgtttcggaaaacctgcataagtggatcgatttgatcttcgggtataagcaaaaaggagaacgtgctatacaggctcacaacttattctaccatctttgctacgaaggcgcaatcgatttggacgccatttcggatctaaacgagagacatgctctagaagttcaaataatggagttcggacaaattccaaaacaagtatttcgagttcctcatccacaaagaaagactggtctcactcttatgacagaaccacttcaactgaaaccgatcgaacta

SEQ ID NO: 12807 - DNA, 537 bp, Diabrotica virgifera
  SmartBlast Evalue=9E-39; Info=Tyrosine-protein kinase Src42A n= 2 Tax=Apocrita RepID=E2B7Q6_9HYME
gaccgagggattgatatgtatacctattttttagtgaacagtagttaataataaatattaatcggtgctaaaatacattacttaatacggtaataagtgaagtgggtgatggttgactttttgtgaagtgaatcaaaaacaattgacaaaataaaaacaattgaaaatgggcaattgttttaggagcccgactaccacagatagagtagaaagaaataatactagaggcataggggttagtcaaatagaagacaatactttacaagtcaaccctataccaacccctccttcagaagttgccagagctccagtggtaaatcccaccgagccagagcaaccaagtgcccgtatttttgttgctttatacgaatacgacgcgagaactgatgaagaccttagttttagaaaaggtgaacatttagaaatattaaatgatacacaaggagattggtggttagcaagaagtaaaagaacaagacaagaggggtacattccatcaaactatgtggctaagttgaaaagtattgaagcagaacc

SEQ ID NO: 12808 - DNA, 536 bp, Diabrotica virgifera
agtattgcataattttaaatagcaataggttagaagtatatttttataacacagtttttcaatatgtaggtaatatattaggcaacaagatgttcactaggtatttgttctaacaaaacttagacgatgtacaagtcaacagcgatatctaaaaccgccaaggtcagacggatccaaaacattggctacgcgacgttgtcagatcaatcgggtttcaaaggtttttcggtttttgttacctgtttcacagtaaaattttcttctggttcctcttttgtaaattttaaaacattgtttataattttacgggattgtgtaccaatgtactatttttcacggcacttgtaataggtattcatgtttattaaaaaaatattaaatgtattctaaaaatatactactattcgacgattttatctgacaatgtcgcaaaaccactgatttcgtgcacaatgcattttaaatggatgtttactttttgcaccaaggcgtttaactgtcccctctccttgatttgctacctgagtgaccttcgc

SEQ ID NO: 12809 - DNA, 537 bp, Diabrotica virgifera
tgtgctccatctaccgtgataaatcatttctggactgaagatgaaaattaagtacgtctgtaacgacttagttaattccacatcaatcaaaggctttaaagtgactatttcgttcatatttttgggacagaaaagggatgttattggtcaaggtgatgaccaaaacgacatcaatgctactgaatatttcaagacttcaaagaagttaagaaaagatgagaatattgactcgtggtgtgtcactctttaactgaaacgtccaaataccaccctactcactaatgtgaatcaggcacttctttcttagcatgtttttaccaaattccagtagttttggataggtagggtcttttgattcaaacgattaaagcagggagatgatattattcaacctgtgtctagaatatgtgataacacagttgaatataggaaaagctaatctaacaaacaaataatcaatacatattgccgtatatgccgatgacatcagcattatgtctcgcagaacggaaagatgggagaaatatattcataatt

SEQ ID NO: 12810 - DNA, 534 bp, Diabrotica virgifera
gtcggcgccaccctgtttataaaaaaagcagcacaccatctgcggaccccgcacacctatattaataatatataggatcctacaattcgattccagcaataaaattgctggtaaataacttttccatgaattttgctaattagcccagagtacaggtaaatcttaggactttgaattggccatcgcatagtccatatcttaaccggatcgaacatttgtgggacataattggcagaagactacgacagcgtttggcacctcctagaaccttacaagaggtagaaagagtagctctcgagattttgaatgatattgatcaagaccaagtagcatacttcatttgtaatataaaagtacatatctcttttattaccgaacatatgcgaatgaatcaaaaacaaaatgttaagaaagcccaagactataattgagtgttccgaactttaagtgaaaaaacacagtatgactgctacacccggcacaaaatgacatctacctgtctagcaacagcaccattacatcgattctcccaaa

SEQ ID NO: 12811 - DNA, 534 bp, Diabrotica virgifera
  misc_feature (428)..(428): n is a, c, g, or t
tacttaaaaaatcttcaggtggcggcagtatggaaaggtctacgatgtcaaacgacccatttatctacagtctataaaatatagttgtagggattattatttcggagattttccgaaaactgctctacctacgacccattacaatatgtctgcgacagaattttggaagctgttacttccctaaaattaatattggtgggacaatttccataatcgtaaattgtgcctgttagtaatgaacgaaaaatatgtcaatttgatttattggtcttcttactgattactgcctttacatataagttgctaaaaacattagcaaaccggacagtatgcgcctagtttcataataccctcaattacaaataaataagattgccgtaaattgacctaatgtgcgcttctgctagtttacactattatctttgaangtggttatagtgaatgatttaagaactgattccaacaagaagatatgacaagggtagtctatctatagaagcttgaagttctggataagcctgaacagttttattt

SEQ ID NO: 12812 - DNA, 534 bp, Diabrotica virgifera
actggcgaatgcagcaaagatttaaggtttagttacttgtacgaagggcctgttacgatgtggaccaaacagaataaggatccttttatttacataaatattccagaaggaaattctactacctgttactttgtactattaaaagaacatcacatgaagagttgttatgtgcagacagtgtggaaagcagagcatgagagagtggtattgtttgaaacgaaaaatccttcaaagcaaggatatatcggagacatcaagaaacatctgaagcaaggctgcaccaatcaagagaagctcaacgccttttttgaacagtgcgtcaatcaccccgttctacggatagccgagtatagcgctcatatcaaacagttttctgaagacgagaagattcagtatcaactccacgccacagacagccaaccaagtctgcaacagttttgtataaagagcatatttattagtattatgtttttatcattattattttaggaagcaatttagatatgtaatacattaaaattccagtttattttc

SEQ ID NO: 12813 - DNA, 528 bp, Diabrotica virgifera
  SmartBlast Evalue=5E-14; Info=Mediator of RNA polymerase II transcription subunit 25 n=1 Tax=Harpegnathos saltator RepID= E2BJ34_9HYME
atcctgtaccgagtaatgcacctttagagaatcagcttgaagtagaacgcaggcataatttggagaaaataaatcagctaaaacagacgttggaagctgctcaacaacaagaaagacaatacaaaagtcaattggaaaaaatcagttatatgaagacttcccaattagaacaggctttacaagcagcacagcaaactgaaatgcattataaaatgctggaaaaccaacaaagacaacagatagctacccaaggcgtgcaaggagcacaacaagcagctaccgctcaacctcaacagagacttatgagaccagttatgtcgaataatcctggactacgacatcttttacagcaacaacctcagtatcgacagcttataaacgtcgccccaatgggagggaatggtcctaggaatcaaatgggccaacagatgcaaaatctggctcgcagcaaaacacatttgatgaagttggaaatttcgatttcaataacattatttaagaatgtatttatttatacgtatatacttt

SEQ ID NO: 12814 - DNA, 529 bp, Diabrotica virgifera
cttccacattgccaaacatcagaaacctcgacttttccattcgacaaacaaaacagtcattttcaaaattattccgacaatcctaattactttcgtggaaactctacaacattcactcgggttgacacaaagatattaaatttccaactttcttttaattatcaatttctagaaattgataattacctctaccctaaacaatctttttccattttaaatctaaatacatcgttcttttcactttaattattcacaaaagtctttaatggttcatcggaaagctcattaaaagagaaatctacttacatccaaactaaattctaataaattttaaaacagctcaatatacagggtgtatcaaatttatgtgcccgcgttatttaaaaaaaaatttaatttaattttattttgcttttgattgataaaattgcaaacacaataacatccccgcctcgttttgagataaaatcagtattaataagtgcaacaaaaatatgattttctctcgacaacaacacttttctcttgt

SEQ ID NO: 12815 - DNA, 532 bp, Diabrotica virgifera
acttgatggcaaagttttgttatcttgtttcaaatttctatggcctgatgatgatataaatctgataaacagagaaactgcattacactatattatattattatataaaatataatattattttatacaagattgtgagtttcttggttgtttcccaattttctgttacgatgaactcacgccaacagttgttcctttactaggcaaattacaattcatccataaactactgtcgtcttattcgttgaacattacactagtgaccaaaattctgaaaactgtacaaatccaccaattccaccaattagtatttggtgggataacctttgttttttagtacagactcaattctgccaggcatggagttcacaacatgagccaaatcttctggtgtagtaaatctaaaccagtcttaaataatagcttctctcagttctctcctgttaattaggtttcgactttggtgatattaacactttcagccttgaccatacattttctattggatttagatcggtactatttccagacc

SEQ ID NO: 12816 - DNA, 536 bp, Diabrotica virgifera
  SmartBlast Evalue=2E-30; Info="Kidney-specific Na-K-Cl cotransport protein splice isoform A, putative n=1 Tax=Aedes aegypti RepID=Q16UI2_AEDAE"
agaaaaacatggcccatttgttatcgaagtttcgattggactattacagtctgcaaatggtttcaataggagataaaccccaagactccacaatagaattcttcaacgaattgttaacgaggtttattacaacagaagaagtaaaagagagcgattgcttggtcagcacggcagaacttgctgcatcacaagacaaaacttataggcagttaagattacgagaattacttttgcaacattccagtgaggccaacttaattgttatgtctctaccgatgcccaggaaaggtacagtgtcagccccactatacatggcctggctggaagccctcacgagagacatgccaccttacttgctggtgaggggtaatcaacaatctgtgttaacgttttattcttaagtgatacaaaaaccaaattgaatttttgcctctaaacaaataattcttaatatattttatattgtacataattttacttaaagtacttatttaatttaataaatactattgtttttaataaagagaattttgatt

SEQ ID NO: 12817 - DNA, 536 bp, Diabrotica virgifera
  misc_feature (93)..(93): n is a, c, g, or t
agaattgtaagaaaaaaatattaaaacaaagtttttgttttctcttttcattgattcatatacacttacccaaatttccaagagtaaaatttntattttttatctcatttcatcagtcattaaagactgaggtaacaactgaatggtttaaatcttgaagaagaatataaaaaacacaaaaacatggttttgcatcgtaactgctacgcttctacttttcaagtatttatttacaatttttatgagacgcacctcgatagtattgttccttgactcaattaaagacactttccagcaaaaatctagtgatcatctaaaaatattcacctcaaaacagatcctgtctgaactataccacagtacaatactaacgaatcagtaaggtcactctcgattttgaaggttccaattttgcaatccactcctcagacaaaattttgaatgcgcgacgagaacgaacaatcacggcaaatgcgcgccggtagcgaccaatcacggcaaacgtggatgtcgttaactgtcattcatctgcgtgt

SEQ ID NO: 12818 - DNA, 537 bp, Diabrotica virgifera
  SmartBlast Evalue=1E-31; Info=Carbamoyl-phosphate synthase large chain n=2 Tax=Culicini RepID=B0WJ24_CULQU
gtttcgtccatatatattactctcccaccaagtctttgcatggctgcagcgaaactacaacacgttcttgtgctcacttcatagaacatagaagccattattttgcctcttaaaacgtgatccaaaggtttgtctttaacgacatacgcccttaaagtttgtgccaaattgaagatatcatttaattcatcttttgtaaatgtgtctacagttacgatgtgcttgttaaaccaaggatgatgatgggtgatgtgatgtggttgtgcctgatccgcagcaatatctgttttggactttttgtcagcagtgtttgagaaactttccgttctaattcgtggtgggataggagacaatatcctagaatcgaaagtttgtgcttcattggcaaagtggactttaccttctccagatagaagtctggagaatatctcattagtctgcttatcattatcatattcaaggctattgtttaataagtatggagataaaggtctgtccaatgccaatgttgaggaaggtcggctcatgtcgacggaa

SEQ ID NO: 12819 - DNA, 536 bp, Diabrotica virgifera
  SmartBlast Evalue=2E-28; Info=LMBR1 domain-containing protein 2- like protein n=2 Tax=Formicidae RepID=E2A7S2_9HYME
atgtaagactgcatcatgggcatcaccatccatgttaaaaactgtgtgctccaataaactgtgcgccataaattttcaaatactcttttgggtaaattagtccaaggaggttcacagtcatttacggaaatgtttgtgggatgcaatgtataatttgaattttctgttgtgatatcatcaatgtcttccttgctgcactgacgatatacagtcgaaataacatctaaaggcaaagcgaatataataagaaaactgcaataccaagctagcagcacaactaatgttacaattaaacgatgcctaaaccaattcccatatcggtacaaaactgacgacgataatataaaagataacaatattgttgataccaaaggtgtatagctcattttgaaataaaatacaatttacaaataccacaatcacttatgccttattgtgtgttattttcttcttgcactttctgtgcttcttgttgcatcttctctagtttttctaatgtatagcttttaaggggtatcagacggggtttacaaaat

SEQ ID NO: 12820 - DNA, 536 bp, Diabrotica virgifera
  SmartBlast Evalue=1E-63; Info=Cold shock domain-containing protein E1 n=2 Tax=Formicidae RepID=E2B5T4_9HYME
gatggttttggatttatagaaactatacaacatgacaaggaggttttcttccattttagcaattttgagggtgaatccactagtttagatctaggcacagaagtcgaatacaacttgggaacccgtggaaattctggttcttgttcctctgcagagaatgtcaaagtaatcccaaaaggtacaattgctcttccagaattccgtggggagattctagaaggtaccgtggtacgacctcttcgttctgtgaatcccgatcagactgaatattccggactaattagaactaaagctgaaaatcaaaatgaaaaagttcaagaatatgaatttggaattatgggacttgtaaataaacgggaattacttcagattggtgatcatgttcagtttcaagtagataccactggtagagctgcgaacataatagccgtaagaaaaaaattaaaagctactgttgacgcaattaaaggacattttggatttctcgcatacgaagtagaggaggggaaaaaactgtttttccatatgacagaagt

SEQ ID NO: 12821 - DNA, 525 bp, Diabrotica virgifera
cgaattgatattttaaattcgtttagtaatcttttatttcattgatctcttctgttaccttttcttcattaccacttttacattcccttttgtatcgattaaaagaagtttcaagttttttttccaagagattcgcatttattttcttaacattcagttctagcagtgataaatcgcctatctcgatgtcgtttacgttgaattctttttcttttatagataaaccatttattgcaggttctttcaagaatattacgtagacgtaatgttcttctgacgatgttttcacttcttgattgttaatgaatatgactgtgtcacctaaaatatcatatgcctcaactggtccagtgtaaatatttctccccctctttgcttattctaaaaaaggggttatttttgtttttgtattagagtacacaggtcttcagttattgtcccatcgtccctcgcttggttatctaaaaacacgattacgagtagagcgattatcacaaaacaacacaatactggatagctcatgat

SEQ ID NO: 12822 - DNA, 527 bp, Diabrotica virgifera
  SmartBlast Evalue=8E-64; Info=U2 small nuclear ribonucleoprotein A' n=1 Tax=Bombyx mori RepID=Q1HPT8_BOMMO
tcttggctctcttcacaatttctttctgtatatcctttccttttttgctcttgaataacctttctgcctcttccctctccttcatcttaattttacggaagtcaagtaatttcagttggggtaatttatatatcaagtataacctataatgtagttttgcggtgatagggttatacatcaaacttaaggtactgagtttttctaatggaactaatggatcaatatcgctgagttcagctaaataatttccagtcaatacaagggtttctaaattggggatgtattcctgtaactgttctccaatacgtactatgcgattattattcatcagtaaacattttatccgaggtaaataggaaacccatccaactttctgacatcattttctgaaaaatcaattgtatcaaactgatctcctgtagctcctaggttttcaatttcaggtattcgatagcctctcaaatccagttctctatctttgactggatttatgtattgcatggagttttgaattatttctgctgtta

SEQ ID NO: 12823 - DNA, 533 bp, Diabrotica virgifera
tattgtttgacaatttttttttctggtattactggcataccaataactgacagaaaagaatcccgtacgtcttggaaatcataaaacaaattaacaacaataaaacgaaaattaaaataaatattagactgggagataggctcagcccgtttctgttcaagataataagggacgaaataatagaagatgtgaaatcgttacgactagaatatagactcggacataaaagaatatactgaagacatctttaatatagacaaatatggatggcaacatttgctgaagaaatctattttagtagctaacctcaaatagatcaaatctgatttaaaatatgtactgaaagtaggatttttctctcaatacatctaagttttctttcaattgctttggtcagagtccacgtctcacacccatacatgagcaccggtctaatcacttttatatattctgatctttgatgctcgtgttaggctcttagatttaatagtattgtggaggctatacatacatctgtttgctgcctgaattct

SEQ ID NO: 12824 - DNA, 537 bp, Diabrotica virgifera
attactgaggatttaggaaactatttagctaaaacagacttttttggcgaaacatttttatggaacatactcgataatgtctctttggttacatggtggaaaggattttgtggacattcatgcctctccaaagttgcagtcaggatattgacaatgccgtgcacttctgcggcaacagagagaagctttagctcccagagcagcattcatacgaagagaagaaatcgcctaacaactcaaagggcagcaaatttaaattatatacaatataattcaaaattgctgaaacgttcacgacaacatcacatacaaagtcaatatcctatagaagagactgtacagaacaacgtttcgatagaaggtagaaacttacagaaggagatagaagtaattgaaaaccatatttccgaagaggaagaattagacgagacaatatcatcatggcattcaaatacaacaggaaatggaaattccgacgatgattttaattttgctgactttgcaatgaccgatgatgaaattgatcaaagaatggaa

SEQ ID NO: 12825 - DNA, 537 bp, Diabrotica virgifera
  SmartBlast Evalue=1E-42; Info=Ribosomal protein S27 n=5 Tax= Cucujiformia RepID=D1M7Z0_9CUCU
atttgatatgtggtttgtatttaacaaaagttgtgccaatattttagttatttagcttaataagtcttttctgttttcaacaaattcatttatacagaaacaaaatgtaagtaaacaaataacttactttattaatacaatttattagaaaacaatatatagttacagtcacaatatattcattagtttaatgttgcttgcgcctgaaactgcaaccttctgtaagtctcgctttgcctccagtggaagtgcaaaggattgtagaacaacctttgcatgggactgcggactgggcgtgcgagaatattgttgaaattgcataacagccgggacacttaacatccataaagtaactgttaggatgctgaaccaaccttttcaatttgtgggatctcctctgtttttcggcagaaggatgcaataagtcgactgctaaaggcatcttttttacttattttaggactaaaattcacaaaaattacttcagcagcacgtgttactttcggctatcaaccatgtaaaaggatttgatatttg

SEQ ID NO: 12826 - DNA, 537 bp, Diabrotica virgifera
  SmartBlast Evalue=8E-54; Info="Mitochondrial ribosomal protein, S29, putative n=1 Tax=Aedes aegypti RepID=Q171E7_AEDAE"
tcaaaaccaacagtaaggttcgttttgtatggcaaaaaaggtagcggtaaaacgctttgtttggctcatgttctccattatgctcacaaagcaggttacctcatcgtacatgtgccgtggttgggtaattggatgcgtagatgtcaagagtgtagcaacagtgaaaccaaagaagggtttgttgatttgaatatagatgcagcagcgtggttgctgcatttcaaaacccagaatgcccatatactctcaagccctgaggcacaaactactaaagaatatgcttggagtaagagagaaataactccaaaggattcttcccttttggaacttattgaacatggaataaacagggtgaaatatgcttcagatactgtagtggccttatgtgatgagattaaaacactctctgttagaggtgtattgaaaacgttcgtagcagtagatggatttaatgcctttttttatcctaacaccagagtatacacagagaagaaagaaatggttcatcctcaaaaagttactcttaccgaaggtttt

SEQ ID NO: 12827 - DNA, 531 bp, Diabrotica virgifera
atattttcgaaaattatggatatttccaaataatgcctatgtatttgcaataactgtcacaaactatgtatgacaagtgacatatgacagaaaacttttacattcttatgtaagaaagtcattactacacaccatccctgtcatattgtttttttatgttctagacaaatttttttcaaataaaatcaaattttcaagtatctgcagattatctctgtcaaaatcttagttgtcagctcttagggagaagtcaaaacttctcccacactatactaaatttacaatcaagccgcagcagaaactaaacaaaccaagacacgccaaatgctactaagagcacccccgaatcacaatttacaatgtatatattccatacactgcaaattatgattcgtcataatttacaatgtatataatatatacactgtaaattatgattcaggataattttggaaatcatgacttgggacctgcaaagcacataataatattatgcactttggaaatcccaagtcatgactccaaagttta

SEQ ID NO: 12828 - DNA, 536 bp, Diabrotica virgifera
gcggtagtagtagtgggagaggtttttaacgtttttccctttgaacttttagtaatgatttttggcattgtaggagtagaagcaggcgttacacaaggacttgaacttccttgggaagttacacttaaagcaggcgatgcaacgggttgtaagttattgtaagtcgtcactacaacaacaggggataattgtgtgtatttctgtaactgattaacgtacgtaacacttattctctgtggtgtaatttcttgattttctccggaatttgtactggtttcagaggtactaggattacttctttccttgatctgtttgtagaccatatcgaattctctcaactgttctaacgttgttgaacttaaatttggttgtggatttgcttttactacattggcaggtaattgcagttgtaccggttttacaattctagcaccttgcactagggttggtcttcccgtgacactttttatttcctcgcaatttacttgaatttcccatcagcatttttaggtcttccttgcaaagcggctgccaat

SEQ ID NO: 12829 - DNA, 537 bp, Diabrotica virgifera
  SmartBlast Evalue=2E-47; Info=Ribosomal protein L24 n=2 Tax= Cucujiformia RepID=D1M7X6_9CUCU
ggaaaaaaacttattttattaaataacgtttatacaatattaacgttttcctcctactctaggtgcagctttgggttgattcttggttactttctgtttaggagcaggtttggccttggcgggggctgtagccttcttggctgtctttgtgctctttttctgttccttagcggcacgaatggcttgctccctttgggccttccttacttcaggcctttggtttctcttggccatgatatcatttaaagaagcacctacaatagccctttggaatttctgtgtccttctggtacgttttttggtggcttcttcctcctgacccttcttatgtttacgtctgtacaagacagtccatgttactttacgggggttccttttcatcaagtgcgccctttcacattttgagttgaggaaagtgaaggtctttccatcaactttaaccattgttttgccatgtccggggtaaattttgtacccgctgtaagcacaaagtccgatcttcattttggaatgaaattactacttaaatgacagatg

SEQ ID NO: 12830 - DNA, 538 bp, Diabrotica virgifera
ccaacacagcatgttcagaaaattatcaaaaatcgaggcaaatatgaacaactagtcacacagaaagggaaatggaaatgacaatattagttatacgactatcagatagaaagagtaaatgactgggtaaaattagaaacaataatcgaggatatcacaacaaaacttaccaaactcaaatagagcttcataggctacactgtgagcaaaaaaaaacaatgtgggaacttcacgatacaacattggagaacttacaaagatagacaaccaaaacaaagatgcgatgggtagataacataaaaaataaccgaaacaaattgctcaggacagatatcgatggaaggacctggaagaggcctatgtataaaaatggacgccaaaagactgagaagaaataaataacaaatgagaggaagaagaagtgaagcagaaatcttgaaaagattgagaagaacaggaaaaggacgatgatttctatagtcatttactttcaccagattaattcgatagtctttccacttgtagtattctgacaata

SEQ ID NO: 12831 - DNA, 534 bp, Diabrotica virgifera
  SmartBlast Evalue=0.000000007; Info=Transposable element Tc3 transposase (Fragment) n=2 Tax=Camponotus floridanus RepID= E2AKN2_9HYME
ggctccttatattggtaaacattttttgctaatgcacgataatgcaagggctcacgttcacgaactgcaaccgaatatttacaacaggtaaatcttcggactttaaattggccatcgcctagtttagatcttaaccggaccgaaaatttgtgggacataattggcagaatactacgacagcatttgccacctcctagaaccttacaaaaggtagaaacagtagttctcgagatttggaatgatattgatcaaaacaaatacagtggaactccgataagtcggcccccgataaccctggagtccggctaacccagaccgactttcatcagacaaaacaaacattttttcagtttgactgagtttttaccaagaaatgaacaatactgtatacaactgtacgtaatttagatgtactgtgcatacgtatttcatgtttttgcaattattataatggaatttttctgcaaatatactgtgttttattaatttttaccatattctccggctaacccggattttcgctaacccgactta

SEQ ID NO: 12832 - DNA, 535 bp, Diabrotica virgifera
aggaaaagagtttatagtttcgagaaactataaactctattactagtcacaagagtttactagtcacaagagaacgagaaataaaaagttggaaatataggaaagataaaactaagaagcacagagacaaaaaaaataaagataaaaaccaatacagttgagtccgcgaatcttcacccgtgcatggtaatataacaataacattttcaatgccattctaagagtcacaacaaggattaggtatatatggaaaaggtatagccaagtaaaactatatataataatctgcacagacagaagaaaagcgctactagcccacaatagaccacgtgtcatattagggttagtaacggaatgtcatgagtcactagcccaagcttcggatggcctgagttggttaaaggacacaatggtaataaaagcaactgcattactgaccagttagctaggaaggcgacaggtctaaggctcttagggtctggtgatccttttggctggttaactacaacaatcgcggaaattgacaaatgtcact

SEQ ID NO: 12833 - DNA, 537 bp, Diabrotica virgifera
attttgcgtcatttatctaaatctataaatgatatcaagtcaattcaagttataaagtttagtatattttctacagaagtgtatctaatatctaccttaaaacagagtttaactacaaaatgaaacatttactaattttcatcgtttgtttaatttccactcaacttattacttgtttacctacgtcttccaatgatggccagcatgatattatagaaggaaattgtgccaatccagacccagaaaaaatagtatacagagatcacgtcgaaaaaatggccataccttttatagtaagggacaacactaatgaatggcgtggggatgccaatattttctgtgtgatggttattagtgaacaggacgaatcgaaaggttcaactgctcgcatcaccgaaggaggagtggaccatcactttataacaattgaactagaatctggccgtggaaacgccttggactacaatattaaaatatatgctgaataaatctatacttttttatatctacctttatatttttatgaaaataaattat

SEQ ID NO: 12834 - DNA, 531 bp, Diabrotica virgifera
cgtgagaggtctataaaaaaatctctacgcagttgggtcagacagatagctgtttaccacaaaatacgtgattatcattctatagaagtcaatacaaatacaagaattttgtcttccgtttcacaacagatacgaaaatgaggtactgtcacctagtactagcgacactttgtgtagttgtagtaactcttactaccgctactcctacttcgtttaatacacgtggaactatagaaaacgcaatacccactgacgaaacgtgttgctctatatctcactgtaaagaagtaccactcaacactgaaggccattcggtgttccaatgttacaaaactaaagtatgcggagaagaatgtctgcacaaacagaacaagaatatacctccattgccaacttatagaagaaaaaattattatgtgaggaagatgtgtcggggttatgactgttatgattatgcctacgattgcagaaaatgtcctgatcctagtaaaccaagttttagtccttatactattgatgcagattgtataa

SEQ ID NO: 12835 - DNA, 537 bp, Diabrotica virgifera
ggcgtgccacgtcacgttccgttggatctcagctttataagatctcagaattataaaaaataattgtataatctcaataattataattctttacaattttatgtagaaattgtgtaagggggaggatctggaatattcactactgttctttcttgcgctgcatcatatctgacggttatctcaggttgggtttttactatatcttcatattttggaggctgttctatatgtgcataaggaggtggtggggctgtcgggaaaactccggaaaaggaatcaaactcctcaacgaacgtcctgttaatataagcatctgagttttctacttgagttgaacgttgccgggctagtctctccgctcgaaatcgtgctgctataattctttccctttcatatgactgtctaatcttctgtaagaggccacaaaatgaaataatgaatataaacacaagacaaaacaagagatatacttcaacccccatcgtgaaacaatattttttagaaggtgcaccagtaccttgttatctatgtacctac

SEQ ID NO: 12836 - DNA, 537 bp, Diabrotica virgifera
gtagaaagctttttgtcacaaactttttatttaccttcgagacatcatcgtacgaaaaaaggtgtttttgttggtggatttttttattttctgaagtgatctttcaaaaattaaatatgttgatgtgtttagaagaagacaatgtgatcgtcgtttgtttgttagtgtcgtggtgagaaatgtcaaaagggagcagtgaaaaaataataaaggtaaatgtgcacttaaatgcacattcgccctaataaaaattgctgtgaaatataatagataaataagagactttttcgaatgtaaatctaatcacaatgtgttttaaaaagactaaccgagtacagtgttccacacaactatgtacgaaattggctaatactacataactcgacttctcagtattatactatgtacccttcaactgtaaataaaaatgaaacggttaataaatctaaatcctgtatatatgacagtccctgcgaccctaaggacagtgactatgaaaagttgttttgccctaataatgaactgtctgagcccccc

SEQ ID NO: 12837 - DNA, 531 bp, Diabrotica virgifera
gccgtgtccttcatgtaaaacattactgtgaatgtttttgtctattttttacagaaggcttgatatcaaagatcgtttccttgagagtatggcatcatttttccaacgttcttcatacttacaacatattgttgcacaagtattttaaacgtttaattgagattattttgatggatataattttgtctcagtaaaaacgggatgtattttaacaacttcgtacaatattaagaaatacgtcaatttgagaagtacttatctaaaaatttgcaaatcttattttattttaaaaaactcgaatttgtatgaacatttttaacctgttctaaatatgtatccaattttacaataaattctttttaagtttgtttgaacagcaaaggtcgctttttatttatagaataaaacaaataacatgaaataagtgaaataaaatataagccttaaagaatatacaacatatacttatctatagctacaaatcaagactataaaattgaaaaaaaaaatgaacgaacacatgaaagttgc

SEQ ID NO: 12838 - DNA, 527 bp, Diabrotica virgifera
gtaggttaaacttgtgttgaacattgctataactttcagactgatattcgttatcacatctttttttgccttgtcctgctgccaatgataatatgaatttcttgtgtcgtataatcatattcagtatcttgttttgaagctatttttttgtggcatcttaatgcaattttctagttgtattgtgaataggccacaatgttactttgaaataggtttatttgtcatttcgattttgacttcggaaatggttcgacggatattgttaagttgatttcgtataatcaaatgaaccatcactcaaaattattgacagtatcattttaaagtcatctactctaaaatgtataagtgtcagaattgtcaatatgaatgaatcagataaaattaaattattagacgaattttttcacccagtaacaaaaacaaattttcaaatttgttttagttatttgttttgtattttgagaacaatttccgaagtggaaatcgaaacgtcaaataaacttattttgaagtggagttgtggc

SEQ ID NO: 12839 - DNA, 534 bp, Diabrotica virgifera
ctcaagatggtgtgacttttttctgaacattatgtggaccatatagagcaatttggagttggagggtaactttcgctttggatgtctgggttcttttggatcaattgtatcatactacatatatttggaatttcataatagccaggagaagtttatagaaaatggtaattcccagtgatcggctgtaaactagagttataacaaacttacaatcacataaaaaacttttagtgtaattggcgtgctagtaaaattactaaaatagtaaaaatatcaaaaaggattacaattttcaaaacgttttcgctcctatcagaacttcctcaatgaaacctgaaagtatgtaatctcactttaatttaataaacaaaaggtgaaaaattttgactgttaatctaaaaaacatgtggtatgattagctactcgagcatttgcaaaaagacacttccaattcagtgtaaaaacttttaaatgttataaaattaaaacttaaacgacatatatcgatgatttaagatttaatcgaaatggggc

SEQ ID NO: 12840 - DNA, 531 bp, Diabrotica virgifera
cgaacgtcccttcggacgttaggtggacctccattgggcgtttggcaacgtggcatttggaccaaaattggacgtcctgttaaggtccaattcacgtcccctagaacgtccggttaaggtccaatttactccgattaaggtccaatttacgtccgattaaggtcccatttacgtccaattaaggtccaatttacgtcctattaaggtccaatttacgtccgattaaggtccaatttacgtccgattaaggtccaatttacgtccgattaaggtcccatttacgtccgattaaggtccaatttacgtcctattaaagtccaatttacgtccggttaaggtccaatttacgtccgattaaggtcccatttacgtcccattaagttccaatttacgtcctattaaggtccaatttacgtccgattaaggtccaatttacgtccgattaaggtccaatttatgtccgattaaggtccaatttacgtccgattaaggtccaatttatgtccgattaaggtccaatttacgtccgat

SEQ ID NO: 12841 - DNA, 536 bp, Diabrotica virgifera
tgtccctgggcatatcagtggaatcataaatatatagcttccataatagcatcaataataaatccaaattttaatccagatgcaagttcccaagaaatattggatttgttgcaaaatgttgccgtggaagacattgtattggcatctacaaaagttccaacagcatggtatgaacctgaaataattaatggatttcttttcacaccggtggttgaacaagaacatgaaacggcctttttaacagaaaggatgtacgcagcaatcgaagatggtcatgcgcagcgagttcctttgctaatgggaattaattcagaagagatgatttgggatggaatgaataaagatgactttaaatggaccgcatattggctcgacattaacgcccctggacttgttaatgaaaatatgcaaatacatgaccaaaaccaaatggagactgtaggtgctgctattagaaaactttatacaaacggaaaattccaagatcatcttggtgatgccattgaatttttcagtgacacctcgtttggaagagc

SEQ ID NO: 12842 - DNA, 535 bp, Diabrotica virgifera
ccaaagctaaaaatggcagcaaagttggccttcttctttacgttcttcctcgtagctgtatatattactgaagctgttaatgttcgcaacaaaactgaagctgcagttaaggaagccactgaaactgtccatctccatactgctgatattaaaaaccaaactgaaaatgcagcaaaagaagttcatgtccacacttctgacattaaaaatgaaactgaaaaagtagcaaaagaagttgcacaagctgctgaaatccctaagactcaaacaactgcagcgcaagatattgatagtaccttagacaatttgaaagctggctttgaagaattcgtcgacaaagttaagaataatgacattgttaagaaagctacacaagggatcaaagatcttggagacaccattcagcagaaaggaaaagaagcgtatgacaagataacatctgaaacgaaaacaagataaaccgtttcaaataaatacaaaaatataaaaactaatataaaaattgtttaaattaaatgtttatttatatgtaaaa

SEQ ID NO: 12843 - DNA, 536 bp, Diabrotica virgifera
cagtatattcaaagagaaaccgtccaatatttcacttaactcaagtttgcgtatgattcgttacagaatttctctaccgtatggatatgcgttcaatgttttattgaaaaatatgggacccaccacccaacttctaaaatttacaatgtgtactcaaattttagcagaataaaatgctttctaagaatacataatgtatctataagtgagaaatttatgagttcatgtattcatgttattggaatggattactaactttgggaatgacattattaaatgtttcacaattcttcattctcttaatcgtgataaatagtttttaattcttgtctgtctgtcacttcgttagggaaaaattttaattttttttcattgcagctatgtacggcgtgatgaaacaaatattgaagctttttatgattgtcgccaaaattgcagtttgttctctcgtttgctgctacatttgcttccttttctttcatctagttacaacaatatattctttactctttatactcttcctgtctaattatttt

SEQ ID NO: 12844 - DNA, 536 bp, Diabrotica virgifera
  SmartBlast Evalue=6E-21; Info=CAP-D2 condensin subunit n=1 Tax= Tribolium castaneum RepID=D2A3E3_TRICA
tttgggcattgatagttgttgttgttgtttttttgcaacattgcgtctctctagtagattaatggtttgtgtgtataaatatatcaacattttgagtaaatttgtgtatttaattttgatttcatcgtttaaactctctttgtcttcaagtaaaaagccaagggccttgttgagctcaacagtacctttatgcaaatcttcataagatttgaaaataagatccatagacactgcatccccatggtgcagtagagaatagtaactatcaaatgaacttagtataaattctgccccttcatctctaagtaactgcctgcaaacttttagttctccgggaatatctttttgaatggatacattccttacagtatactcatcgtttatacaacttctcagtaagtcttctttattcccaggaatgacaaacgtaaaatgagacataactataaatgcgttaaactgaataaatttataaaaatagagctaaaacgtgtaaaaaactaatttaatagggaagcataaaaacgataaaaact

SEQ ID NO: 12845 - DNA, 535 bp, Diabrotica virgifera
tttcgctactaaaacaatttatcgttaagccgcttctttgtcaaactcgttgttgttaataaatgtttttgtcgcttatcacttttatttctcgtgtgcacaacccttcatatcgtgttaattagtaactataaaacccgaccaaataaattctcagaaccattcgctctaaaagttcactagtttgttaatatcgaaggactctattgctttgggacatatgcgtgtggtcctaaaatattcacctatgtccaattaggcaaaaggtaataattaaacccttttcgccactgttggggtgagattcaataaaacctcacaccaccaggttgaactttaaatttccttctttaaagcctatctcacatgacacttttagtacacagaaaggcatttgggataaaatcgtggttaaacttagtattgaaatctgacagtacctacacatacttatttggttaaacataaatgatattgatattacttcacacactgtcttaatcacacatttctatacaccgctactgctagtctg

SEQ ID NO: 12846 - DNA, 536 bp, Diabrotica virgifera
  SmartBlast Evalue=2E-47; Info="NADH:ubiquinone dehydrogenase, putative n=1 Tax=Aedes aegypti RepID=Q16TI5_AEDAE"
aaagacatattaaaaagggcagtaggagaaaaatattcaaaaatataaaatgtctggttcgcttacaggcttaacaactcacacgagaaaggtgcagagtttatacaagagatctcttcgtatgttagaaaattggtacgatagaagagaagtgtaccggtatcatgcagtgctaatgaggcaaagatttgaccaaaataaagaaattggagatattagaatagcaaaagatttgattgcaaaaggagaagctgaactctttgaaaatggtcattggcatcctaggaaattccctgactcaccaggtggtgttgcctatggcagagaggttcctcctccagattgggtagttgattattggcatcctcttgaaaaagcccaatatccagattattttgctcgccgtgaacaaagaaagaaggaatatgtaaaactttgggaagaaaaatacggaaaagcttcaacctttaccccacattaaatttatttatcataatatgtagattgatagctgttatataattctttttagaacc

SEQ ID NO: 12847 - DNA, 532 bp, Diabrotica virgifera
gctaatactctaattttctctctaatttctttcgttgcagattttttcacttcttcggcgacataaagcagagcattttcgtgcagaagaataacaagcttttctggacgttttggccatattgcttgataaatattgtttaaagtttccctataaatgtttccgttaatatgcactctacgttccaaaaacttcatgagacagtgtccttcatggttgaaaaaacatgttaacatgaccttgcccgcagaaggttgaaattggtatggccgcacgctgattatatttggacggattgttaacaacaaacgccattttgaagtcactatacttaaaatagtagtcaaatacaaatataggaactatcagtgagacgtgtacaaacataactaacatttcagaacgtcagttgagcgattataataataattgtttccaaggctaacctgaccaaagatgtgattcgattgaacaagcttatattaatttttacaacagtttccggaacagaaataagtagtttatttacaac

SEQ ID NO: 12848 - DNA, 532 bp, Diabrotica virgifera
tctgagaaaaacaacattttagttttaattgttgtctaaaattcatccttataaaagtcaaggaaattaccgatgcaattttataagtctagtaatgctttgagatgtgaatacactatgttatttgaaatcaatggtatttaatggacttagtgatttctggcaagttggtaaaaggtaaatttggtgaattagttaaacacattatgaacattatttattacttaaattaaagtaactcactaaataaacatattatagaaataaaaactaaaattcaatgagtttaaatccgctgttcgtcttcgtttccctctgattcactatcgctataaatactgggctcagtatttctgtcaatgactaatctggaggttggcggagacgaataccaagcatggaactccgaaggaataacgtcggtattgcataatttctgtaaatcattaaattttgctaacgaaattggacacatacctaggtaagcctgttgaagtgatagggaggcttgtgttggaggtctttctcgtcc

SEQ ID NO: 12849 - DNA, 534 bp, Diabrotica virgifera
  misc_feature (376)..(378): n is a, c, g, or t
atttattattagttagtgttacaaagataaattaagtgaaaaggtaaatatattctcaaatatggaaaaggcaataatatttacatcagtctctctaatcctcttttctttgtttagtttaggtagttccgtacttaactgttaccagtgtaattccggtactaatcctgagtgtgcagatcttaaagttaatgatacaaatagtacattttacttgccatgtgatgaagactaccatgggaataaaccgttttgcagaatttacgtcacaaacattcagcacgtaaaagatccaaaggacgcaatcagaatttacagaagctgtggctgggaaaactccaaaggcatcaccaaagacctctgcagacacgacgannntgactttgtgaagaaagaattatgcatgtgcttcaaagatggctgcaattccgggcgacagatacattcttcatatattttaacagtcctactgatagtctttgtatactttcgtaactactttatttaggatcaaataaatgttatatatctgtt

SEQ ID NO: 12850 - DNA, 534 bp, Diabrotica virgifera
  SmartBlast Evalue=3E-28; Info=Aldehyde oxidase n=1 Tax=Culex quinquefasciatus RepID=B0WAQ5_CULQU
aaagtctcccttgatcgtatgtttaatatccttcctttattacgtggcaagactgtattcacatgatggatcctactggccacattatctgcaacaacttctctaacatccaaataatacttgttctgaggaggagtatatttaacctggaccaaactagcagccatgtgggcagcttgtgctgtttttgctataacgagacctacaggttgattgtaatattgaactatgccgctgcagaataattcttcttctactgaccaacccatagaagaatcaagtggtgtgcaggtattacgaccaggtatgtcttttttgtcgacgtagccaacatagccttcaattttcagcgcctgtgaaacatctacattggttattttagagcctgcaacgcattttgctgttacaaagctagcatgacattcatgtggtatgtccggcatatctagtatatacttaatttgaccagatgtttgcgccaacgattctacctttggaataggttgagtcaaaggccattgtttgttatctgta

SEQ ID NO: 12851 - DNA, 536 bp, Diabrotica virgifera
tattttctgaacaaaactctttaataaaaaatacgatattctatacttcgcgttaaaattataggtttctacgtatagcgaattatttttaaactttactctggctccatcttgcggttaataaatgaaaaataaatataacaaaagctatttttctgatttttaaagatttaatatgcaataatcattagacagctatttctagataatttatacaactataacttttgcagtacatgtgatactattttactgtttaaataaaaatatactagaaaatgtttttttttcaacaattctgatagcaagctttcaagatatacttgctgttagtaactgttagttaaaagtataaaaaatgggaacgaaaaaaaaaaacagaaatatcagaacgtcataaatgagccgtcaacaaaatctggcagatgtgaaatatagtcttaaagttcatttgaaaacaatattacgaagaaagaatagtggttcatcgaagagggccaagactaccgggattggaataggaattgaataaatca

SEQ ID NO: 12852 - DNA, 536 bp, Diabrotica virgifera
  SmartBlast Evalue=5E-27; Info=Protein FAM48A n=1 Tax=Camponotus floridanus RepID=E2AAK3_9HYME
accaggcctatgagtaaactggtccaatttccttttgcggttaacagttacttgggagaatttttttagataatcgtctgaatttgtggggatcccatattctacgtttattgtatattgctgtcatttcgtcgcctatagaactatcgggctctaaacataagcttggtgtgtttgccattaatatttggctctcgagttggtctttttcttcattactccagtctgatctctcttccattatgttatttatatcagccacaatactcattgacgtaggcctaagtagaacatgatgaatatcacatttgaaatgtggataagccaatctatagtctctaacttcagctatgatgcacccactgtaaaaaaggtactaaactgctgttctaaaatgtctacaataaaaggtggaagttcttcgttatctatgtatcgaagaagatcgtcctcttcataaggccacagtttggtttctatcatattggcagtatcttcagtataactaggatcggtacgagataatgacctgaatg

SEQ ID NO: 12853 - DNA, 536 bp, Diabrotica virgifera
  SmartBlast Evalue=3E-20; Info=Myosin n=1 Tax=Aedes aegypti RepID=Q17NQ0_AEDAE
gaagagaggtatgtgcaagcgttggaaataatagtactaaaacaaagaaaaacgaattttagttattttcttgcagattgttcgggtatattcgtaagtcctgttaaaattccgcttcaagaaaatgaaagtcgacggcagcgacatcccggctcctagcgaccggtacgaaatcagtgacattgtgggctatggggtgtatgggaaaatctatatagctatcgacattcaagccagtaagaagaaagtcgctattaaatgtcaaaagtatgaaaccggatgtaaagagtttgtggaagaagaatacaaaattctgaaagattttagtagtcatgtaaacgttgttgatttttatgggatatttaagaaaggcaatgagatatggtttgtattggagattttattaaaaaaaaagtaaaatagaagaatgcgtgagaagaacaataaaggatgaagccaaaaatgtatgtaaggatgggccaagtagggaaaatgtaaaatgtgaatgtaaaattagtaataaaagattgctactg

SEQ ID NO: 12854 - DNA, 536 bp, Diabrotica virgifera
  SmartBlast Evalue=3E-84; Info=DNA-directed RNA polymerase II subunit RPB7 n=2 Tax=Aculeata RepID=E2BSS5_9HYME
ttattaatcccagataatcatccattaaggttccaatggcaaatatccctgaggcgtctactctcgtacccactattttcaatctgatttctccttctgctcgtatcacaacatcttcgtctttagtcttatagcattggggattaacgttaggacaaaactccatttctgcgggtatggaatgatgagaaatgaaacaagataaaggacctatttcggcgaacatgccaactttgttgacttgtcgaaccaccgcatccaggacttcacctttgaatggacggaacacaatggctttatatttcaccgggtagactacaaagccttgtccgggtagtatcaaaccggcacctatgctatctatagtggttactgcaatcacaaatccatactttcctgtgcaagttccttcaacttcggtatacagtttagttttgactttttctaacagttgtggtccgaaatattgtggatgtagtaggatttcgtgttctagagatatgtggtaaaacattattttaatttgtctattgata

SEQ ID NO: 12855 - DNA, 534 bp, Diabrotica virgifera
  SmartBlast Evalue=0.000000002; Info=Endonuclease-reverse transcriptase n=1 Tax=Bombyx mori RepID=D7F178_BOMMO
catttaattatttcttcgtctgtcagtttcgcactttatgtaaatcatgactttattgtcatcacaaccaaaatgactatttataggacattaattagacctgtagtaacctatggcacagacaaactccaagaacagccaagaaaactctttcaaaactgcttaaatggtgccgaatttccaaaagaatggaaattatctatcatgtcaaccatccacaaaaagggcagcaaggatcaatgtgaaaattacagaggaattgcggtaaacagcacaataagtagaatgtatgggacacttattaagaacaaaatagaaaatgactagagattacgaagcagaggagcaagctggctttagagctgggcggtccacagtcgaccacctgtactctattacgcatgtgattgagaaaaaacagccgtcaataaagaagttcacctggtatacgtagacttacaaaagcatatgacagtgtgcccctcagcaaactatggtcaaccctacatcaaaccaacattaaacatggtctta

SEQ ID NO: 12856 - DNA, 515 bp, Diabrotica virgifera
  SmartBlast Evalue=2E-44; Info=Endonuclease-reverse transcriptase n=1 Tax=Bombyx mori RepID=D7F162_BOMMO
cagaaaaccatgtaatgatcatcgatagaatcagaaacaaccaacggagataagaaacttggcaggttacgaagtggtcagacaatttaattacttaggctccgttattactaacagtggaggatgcgaagacgaggtccgtagacgcatcataatggccagatcggcaacagccaaactcaaaaaaatatggaagaatactgacattacaaaaaacacaaaattacgccttgttcgagcgttaatattttcctaacgccacctacgcttcagagatttggaccatcaaaaaagcagatgcaaaacgtataatggcatttgaaatgtgggtctaccggagaatgttgcgcataccatggacagcacatcgcacaaataattcaatattagccgaacttaacataaaaactagaatcggcacaactttcaaccaaaatatactgagatattttggacatataactagaagaagagaaggcatggagcgaatgatagttgaaggcaacgtagagggc

SEQ ID NO: 12857 - DNA, 530 bp, Diabrotica virgifera
  SmartBlast Evalue=3E-40; Info="Supervillin, putative n=1 Tax= Pediculus humanus corporis RepID=E0VLV9_PEDHC"
ctctcttggccacgagtcttttttgatcggttgatttaataccattccaaattattacctgttctccttcgacatcaatgataacaaacgaagatctacttctcaaggaactcatcgctaaagaaacttccatgaggtaaatttcgttaactttttcccctctcaggatatacaaactaggcttatctgatttttcagttccatctcgtttgcctttatttataatcatatttccgttaaagagcctcaaaaatgctgctggttctgatccctgatcaaccctgatctgaggcgcgttctgcttgtccaattccactgtgaggaaagctgcagtgcctttctcattcgttgacgagttacttccctgccagcagaagaaaatacacctgtccctccctacagccaagtgtttagacggatctccacctaaccttctccccttaacagtttgcctgaaatcccaccgaaagatgtaactgtcggcgtcataaaactgacctaaagacttttcgggcagttcttcgtaactg

SEQ ID NO: 12858 - DNA, 532 bp, Diabrotica virgifera
  SmartBlast Evalue=1E-10; Info=Novel protein containing lectin C- type domains n=2 Tax=Danio rerio RepID=A5WUJ2_DANRE
ttgggaaatgattcgtttagttaagcaccccttcttgtgctatgtgtgatatggttggtgcctatttcagatgcttctgatcaatttcgaatttcaaaaataggggtttcttgggtcgaagctattcagtactgtgaatcaaatgccctgcagttagtcaacatcagggataaagaaaaaaatgacgcaattgctaaatttctgctagagagaagtgttgttcatcctggagaagccatctggacttcgggtagcaagaaaatagtgacacaacatggcgttggcttactggtcaagaagtgacattcactagctggaacactggggaaccaaacaacaagagaggcgagcggacctgcatttcagtctataggtcaaagtctggagttgctgtttgggatgatgtaccgtgcgaagcgaatgacataaaatactaccccttgtgcgaaaaaagaatatgttatctttaactttactctgtgcattaggtcaataatttaccgttttgtgtcatcaaataaaatattaaata

SEQ ID NO: 12859 - DNA, 531 bp, Diabrotica virgifera
  SmartBlast Evalue=9E-49; Info=Endonuclease-reverse transcriptase n=1 Tax=Bombyx mori RepID=D5LB38_BOMMO
cctatcgtggcgtactctgtcaaacgctttttcaaaatcgataaaacatgcatgtacttcttgattaacgtctaggcatctttgtgtaagaacattcaaaccgaagagagtttctcgagtacctagtacttttctgaactccatctgtgtattactaatatctgactccaacttttgataaactcggttgtggatgatttttagaaatatctttagtagatggctcattaaagatattgttcgatgttctgaacattcttttgcattggatttctttggcagtgtaacgaatgtagacagcagccactcttgaggtataataccagtattgtatactgtgttaaataagtgcaatattatacctattgattcatcattcaagagctttagtaattcagtaggaacctcatcgggtccatttgcctttccagttttggaatttctaagtgccatttctacttcacattttaggatttcaggtcccgtttcaccatttacctggacaatgttatttctgttgtcctcaaacaa

SEQ ID NO: 12860 - DNA, 529 bp, Diabrotica virgifera
actgaaattaaacagatggtactaagctgaagtaattaattactaatccttgaaatgtatggatttgccattgttataattttgacagtttttgttggatttcttaaaaacgaatcacatggcacttgttattcggcagacacattgaattataattggaacatcaatgttacacaatattacaatgctttttaataaccctttgcccatactacatgaagaagaggaagtagcaatggctttagccaaaaatttagaaaatctaactgtctagagaatcatgagaagtacaatttatcaaacataggaagaggttgaaaatcttgtgcatgaatactttgttaatttaaaatttagatatttaaactaatacatataacaactattagataggtatttataaaaatatcttactatctgctacaatcaatggctttgataaacttctctaaaattttgggggctggacatgtatttcattttattttgttacaattttgtctgtattttttggtccacagataccaat

SEQ ID NO: 12861 - DNA, 535 bp, Diabrotica virgifera
  SmartBlast Evalue=1E-29; Info=Probable H/ACA ribonucleoprotein complex subunit 1 n=6 Tax=melanogaster subgroup RepID=GAR1_DROME
gacaagcggtgcgagaacaaaaatttgaaaatattggaatattggagtaaatttagacaattaaaagaaaaatatatttattaaattgctgaggctacatagaaatatataagtacacaataagagcatacatttgttatagaggatgtcatttcggggtggtggcaacagatttggcggcggtggtggaggaggcagaggtcgtggtgggggcggccgaggagggggaggtagaggtggacgaggtggttttggtggtggaggaagaaattttgaccaaggaccacctgatcaagtaattccactaggatattatgagaagtcggtacaggatgatctagtatgcaaagttgaaattgaggatgtaccttactttaatgctcctatttatttagaaaacaaacagcaaataggaaaaattgatgaaatctttggtaacattagaaattactgggtgagcattagactgggggatgacatgaaagctggcagttttcaagcaaatcaaaagctattcatcgatccagccaaactt

SEQ ID NO: 12862 - DNA, 533 bp, Diabrotica virgifera
aatagcgtttatttgaaaaacaacaacttgtccaaaattaaaattttggcaaatacatatcaagaaaaacttcccagacatccgttgtttttccaaaactatccaaaagttctatgtagtttactccgtacatttgaggtttttacacaactgaatgtgtcagatagataaagaaactactattctatgagaagaatacataaagtcgaattggcgaaaaatggacatttgttgtatttcaaataaacgcttcaattggtatgtcattaggttagctgaccaaacttgtttgtatgtactttagctacttatccaggtgcgtgagaacttttaaaagaaaagacaaatctaacatttttttccacttgtaaaaaaataattgcatgaaaaagactgtgcagtgacagcattctataattttttatttttctacacaaactttataatgttgacgttatgaaagaataatattacaaatattaggtagattatgttcaaatacaatcgtgtaaattaaatcattaaaataaaat

SEQ ID NO: 12863 - DNA, 536 bp, Diabrotica virgifera
gtagatcgacgtcactaaatgattatgtcaggtccgcgacattatgaattacctatatacgtctggggtcgtctatgtttgttttgttatattaatttttagaccaccgtattggaagctgtctgcgagttcctccatcataatttgtagttcctcgaatgtgctcgctataatcacgatgtcgtcagcgaatctgagcaaataaccctattgactgctaatctgaatcttttttgtattctcagcaaaacgtcctgattagtaacgtggtcggtataagatatcttcaggattcaacgataaagcaggtggcgtctctgagagtccacgactcaactccgtacaacagtatgggaaatatataacatcgtagtaacctgtttttcaaccaattacaaaaattctagacttgattaaatagcttcttctacttccagtgcttatcctctagagccatcacataactcagctggctaccgataaaaaattacactccactgtctaaaatttttgacatgagatcgtcttctaccagg

SEQ ID NO: 12864 - DNA, 535 bp, Diabrotica virgifera
tcctctttgggatcaaatgacggtaaatctgctgacttgatctctatgttagtcactccggtgttttgaaactccgatattatagagttcccctctagttcatctctcgtattaatcaacgtttcgtttttgccgttttctacattttcagtgccgatgttgtacagtagttgtagaggtatattttcggtggtgactgtggcataatccttaagtcggttggccatttcgaactcttcttctataacagcggcgtgtttctcgggaatcacttcactgaagacgtagttattgttaagtaaagtctgtggtgtgacattggtcatgtcgtaataaacgttttcgaattgcatgttgggatcgtctggattaccaatgagggtagtttgtaccgtaggtgctaaattttcttgctgtagtccagaataataattaggattattgtccatatcttccacagccatattgatttgaatctccgtattactcctattgccatcatcattgagcacggaatcggagcctacgtacttct

SEQ ID NO: 12865 - DNA, 534 bp, Diabrotica virgifera
ggccccctcaattgtcattttacccgttgatattgcgaaagtactgttccgattgattactttgtgttaaattatctttattcgcatcatcgattgattatctattcagaacattgtaatcgccaaccaattacacatctataagaataagtcgttttaatatgcaaatacccgtcaatgaatacataattttctaagttctatgtataataatcacggaggtatgtttttttctatcacttccaacgtcagtgcgttaatgacgcactgaaaaaagggcttgggatgaattgtatgagaaacagtatagtatataggtagaaatcttgtgcataatgttctatttggtaaatagggagagggaattcggatggaactagagggagatagaggggccctccatcgacagatacacagatttattttgatccaatttaaactccaaagaaaagtttaccatcctttgctctaaatttataaattaatataaaacaccatacagaacaagtaaaaacttcgcttgtacaatggtac

SEQ ID NO: 12866 - DNA, 536 bp, Diabrotica virgifera
tcaaaatcaataacaacaatgcctaaactcctattagcgattggtatagctgtactaactatacagattgcatttatcaacaaggcatatgccgacgatatggaagagacaatagaagagtgtgtaaagtcgcttggtctacccgataattacgtggaaaaactaaaaagtcaacaattaatagatgataaatcaccctgttttactaaatgcgtaatggaaaaaaggggactaatagatggtgaaggaaaattaaatgtggacaacgcagaaaaggattcgattccgatgaaaaagccagtcagaagagcaaggaaattgcaaagaactgtgtgcgtcacatcaccactatttccagctgtgaagatactttgaaatataatgcatgtcttagccctgtatggtgttctgatggcactctcgctcacagaaaataatgttatatagatacataatcaactattgtgcttaaaattattaactttaataatttttttatatatgcgagtacaatagattataactattcaaaatgc

SEQ ID NO: 12867 - DNA, 534 bp, Diabrotica virgifera
  SmartBlast Evalue=4E-47; Info="Exportin-5, putative n=1 Tax= Pediculus humanus corporis RepID=E0VL13_PEDHC"
aaggccagtcaatcaacaaccgatccagagccgtgaaaaatgtcaggcgtcacgcggcttctctaatggtgaaaataggcaacaaataccctttgctgctactaccggtcttcgatcaaattagagccacggtagaggctctatctaggcccgagggacctgcgcatttaagctgtttggagaaggttacgttgcaggaggctctgttgttgatttccaatcattttggggattacgacaggcagagtacgtttgtgggggaagtgctaagggaagccaatgctcaatttttagaaatagtcaatttaggtgcatttagaaacgcagcaaacttcatcactttcgtcggattggacaaacctccggttccctccaacagtgaagacgcctgcggcataaacaggggcaacatcatcttttgcgtcaacctccttctaggtgccgtcaaacgttgtgcttggccagacgatcctgaacgagcgacccgtggtggatttgtggtgtcctcttacagtaatctggcaaccctgtatg

SEQ ID NO: 12868 - DNA, 534 bp, Diabrotica virgifera
  SmartBlast Evalue=3E-16; Info=Isoform 2 of Conserved oligomeric Golgi complex subunit 3 n=1 Tax=Homo sapiens RepID=Q96JB2-2
ttgttgtttctacaagtactgtattaacatagtcatatatttattaagaagattattcaataagctttcatatttcattttgtatattctagattccttataatgtaaatgattattgaggcaagttatactctcatcgatttcatctaaaattttaatacattcctcagaattcattttacttctcattctctcaacttcttcctgacgcttggtgaaattaacaaaatactttaatttgttacttaagtcttgctttttttcttttaaaattctttgatttgccattaattgttcactaaggtcgtgcaaatagttcgtcctttctgtaacactaacataatttgactttaagtcattaaggtaatctagtacattattggacagattaagaagatcttcagcattagatttataggcagacagctgctcataataatcttgatacttcttaaggttttcatgtttaatattgttttcgactgatgttgaccacttcacaaaatccttaatggtgtgtatagtttctaggtt

SEQ ID NO: 12869 - DNA, 535 bp, Diabrotica virgifera
  SmartBlast Evalue=2E-18; Info="NADH dehydrogenase [ubiquinone] 1 beta subcomplex subunit 2, mitochondrial n=1 Tax=Camponotus floridanus RepID=E2AHB0_9HYME"
tgtgttgggggttaactgtcaagtgtcattaaattaggttcagaaaaatattaattcaaaatgttaatttccaggggtctcactaccctcagggcccttaaaaatttaaaaatagccccggtacaccaatctgtaagaaacagcggacacagtgtaaattaccgaaaaggagctccagaagcctcaagaactgttatctgggctgctgaaggcgttcaaggtttcatgtggtggtggatcctttggcatttgtggacagaacctgaccatattcttggcgaatttccttatccagatccttccaaatggacagatgaagaactgggtatacaaaagtaaaatgtgtatatttgttaatagcttcagttagttgtaataaatttttaaaatattgtttcgttttaaatatgcctttagtgtttttattttcttggttttgaatgagctgaattaagaagtatcttaccaaatgtaaagctgaacataaaatacaaacctgtattattgatatatcaataaaaactaataagtctgc

SEQ ID NO: 12870 - DNA, 535 bp, Diabrotica virgifera
  SmartBlast Evalue=7E-63; Info=Stromalin n=2 Tax=Tribolium castaneum RepID=D6WLF4_TRICA
tcgctttgaaggaattggcaaaacgctttgcactgtcctttggtttggacgccgtcaaaaaccgagaagctattacagctttacacagagcaggcattatatttgccgtgacagcttcagagaatatatcagatgatcccactggtccaccgcccaacttatcatttttggaaattttaacggaatttacaaataaattgttgaagcaggacaaaagagttgtcatgggctttttggataaaagaattacaacaggaatgcctagtagtagaggcgaagactggcaacctcttcttttgtacagaaattccttattacacggagagactgatcaacttcctacaacaagtaaacgggcttacggaagaaaacgtcataagtctcccgattctgatgttgaaccagatgacttgtccgatcaagaatttcctggaaatttatatggttaagaacatgttttatttgttacgtttaatagatggatcatattataatacgaggccgagtgaataagtccgtgacttttgaatgaaac

SEQ ID NO: 12871 - DNA, 528 bp, Diabrotica virgifera
  SmartBlast Evalue=4E-36; Info=Stearoyl-coa desaturase n=1 Tax= Aedes aegypti RepID=Q17EY5_AEDAE
caactcttcacttaagtgaagctcaagaggcagaactgaaaaaaaattgatatgagtgatctcgaaaaggataaactagtaatgtggcaaaagaagtattacatagccctctacctgattgtcactcttctactgccaatcaacgctcctgtagaatattggaatgaaggactttacagttctgtatttattctaggatttttaagaggttttattaacctgaatttagcctggttaatcaacagtgccataacaatttggggattaaaaaaaggagaaaaattcccatgcgacacgaatctagtctttattcttaacaaaagcaactggctggcttatcattacatcgctccttgggactatcaggttagcgaatacggtcaatatgctaacgatactatctccaagaccatcaggatattccaagtattagaatgcgcctctttgaagacaatcgacagcgatactgtaaggagggcgttgacaaattctgttgtccagaagagggatatcacggagtgtctggaa

SEQ ID NO: 12872 - DNA, 529 bp, Diabrotica virgifera
  SmartBlast Evalue=7E-23; Info=Ovary C/EBPg transcription factor n=1 Tax=Bombyx mori RepID=Q538A4_BOMMO
aaccaagaactatatgagtcatgtgtgtgtgttcacaaagaggggatggcattagataaactttttgccacagatatctttagagttgttttgttacaacttaaaaacaacgttcttatccaatatctttttgatgttttttcactattttactgtttgtgtgcactcggctcgtccagtgttgtttcagaagaaaatgctattagtcagtaagcaccttaaaggaaggataacccaactaagtattatttcccgaagatgtagattcatctgctggatcctgtaagagtttgtttaaatctacaccttcgaatttatttttatcagtactgtttgatgcatgtgcaaggaacaattctttgagaaagcctagctccttagtgagagtctttactttttcttctagtacagtgttctcatttctgagttctgttaccctacttaatgtctcctgagttttttgcttcgattttaccctactgcgttttacagccagattattcctatctcttcgttttctgtactcgtc

SEQ ID NO: 12873 - DNA, 535 bp, Diabrotica virgifera
  SmartBlast Evalue=3E-38; Info="Cell division control protein, putative n=1 Tax=Pediculus humanus corporis RepID=E0VUH8_PEDHC"
aaatttgtcactgcatctcttcatcatcatcgactgtttctgcgttgagttctccattggtagtggaagaaacctcattagctgtattatccgcttcctttcgctgctctttttgaagctgactaaggtatgactcttgtaagtattttatttctgcttgaagatcgccgtatttcttttgcaagcctcgttctcgctctgtttgtcggctgacgtcttcagtgagagactgtattcttcttggtagagcagatttttcttgttcttgcagaaacttgaacgtattcaattctaaattagtcgaatctaggttctcataacaatcttgtaattgtttgatcaacacctgcgctctggactggtacccgcctgttaaaatcttcaattttttctccattttggcagctcgtttagcttctttcgccatgtgagatctgttctgttcgagtcttttttccgccgattccagtctgtcttttttactcgctaagttggctcgagtgtatctcgtttggttcgggaggaacagaacttg

SEQ ID NO: 12874 - DNA, 531 bp, Diabrotica virgifera
  SmartBlast Evalue=9E-33; Info=RNA-directed DNA polymerase from mobile element jockey (Fragment) n=1 Tax=Camponotus floridanus RepID=E2ANJ0_9HYME
acacactttacaaatgaaacctacattcattttaaaggatttaaagtataccataccttacatccggataatacagccagaggtggtagtgctatcataataaaagaaacaattagacatcatcaagaaatatgctacaaaacagaaatgttccaagctacttcagtatgtgttaaaacaaaatcttttgagcttatcgttaccgctgtctactctccaccaaaacataacctcaaaaaagatgaatatctagaatttttgaatagacatggcaaaagatttataattggtggtgattttaatgccaagcacacccattggggttctaggataattacaacaaaggggaaggaactcttgcaggcagttaagcaattaaaatgtgaaacactttcaacaggtaaaccgacttattggcctactgattccaacaaaattccagaacctgattgatttttttataactagaaatatttctgttaattatttacatattgaagaagcttgggacatgaactccgatcattcacc

SEQ ID NO: 12875 - DNA, 534 bp, Diabrotica virgifera
gacgagaaaatttctggagaaatatccgaaggttggaatccgctctctccttccagtgtagatgaagaaacagaagcggaacgactgttaacgtcaaggtgttgctcacgaacgagcagctccctgagaaccatcgattcgatcactaatgttactcgcatgaccgtttcttccatagacctaagcaacagtactcctagttcagatagtttttcctccgttagttccgtcaatagctcagtaagttcggaagaatccgaagaagactaccaacaccagtggaaccatttatggaaaaaacactacgaagatcaatacttagaacattacaataagtttatacagtctgtgatcgggattgtcaccgtagataaacctaaggaccttaacagaactgataaaactttaggaccacttccagataataaaaatttcaacaaaatgtcgacagaatcaaaatccgtagaaactgatgagcaagaacaaaatatttcacaatgtgattcgtcgagcgaagaaagtgaagaggagaat

SEQ ID NO: 12876 - DNA, 535 bp, Diabrotica virgifera
  SmartBlast Evalue=4E-38; Info=Tyrosine-protein phosphatase Lar (Fragment) n=1 Tax=Harpegnathos saltator RepID=E2BS15_9HYME
cagtttctccagtagtaacaacagcaggtgcactagtaggtcccctacctatgctgttaacagcaatcacaaacatttcatattctgtgtaggggctcaggttcctaacagaatagtacatggtgataataccactgatttcactgtaagcctggttggcatatttgggcttaaactggataacatagtattgcaagtcctctggaccattataagaccaagtgagtcttacagaagtagctgtgatttcagatacttttacatttgttggtggtccaggtaaagtttctgcaaaaatcactggtaatgttataaagataaaaattaatatcatgatgttaattcttggagatcactgcacacacttttcacataggtataaacgacactttaaacgtacattactggaaagtttatcacttgataagatggactttcagtaaaaataaatgcataatttcactctaagtaactttttcacaccgttttcttgatgaaattcagtcatattgtaaaatttggtcctgaaagtgat

SEQ ID NO: 12877 - DNA, 533 bp, Diabrotica virgifera
  SmartBlast Evalue=5E-47; Info=Protein DGCR14-like protein n=1 Tax=Harpegnathos saltator RepID=E2BCB6_9HYME
gaagttaataaaagaaggcaagaaatagttcattccaataccagattagccattaatccttttaatgaagtccaaagtgcagaaactattaatgagttggcaaaaagtcaagctaaggtccttgatggaaaaattggtgttgatggtaaagaacttctcaagacagacacacctaaagtaggaggatatagttttgtaagaagtccatctccttcaccaagtttgttgggaacccctttgatgacctggggtgaaatagaaggaacgccgtttaggacttgatgggagtgatacaccattaccaaagagtcaaggaccgaccttcaagatatcggagcctcccaggcgagagcaaatagcattggctttagcggaaaaggtaggagagaagaagaatatagagaagaggaaaaatattgatgcacaaagaaggcaatttgctacaccatctccgagaccgcatacatcggccatcgacaggttagcaacgatgtctcccgctgcaaggaaactagcaacatcgcggcttaaac

SEQ ID NO: 12878 - DNA, 528 bp, Diabrotica virgifera
aaattgaaaactgtgatgcactgaaagatgtctctgagaaggagtatattatgaactcaaaccagcacatccaatcaatataagagaagatcgattttcatcttactgtgtcatgctatttttgataagttatctcttgagagctttaataaataaggctaaaacatatctggtttttaaattgtaattcaaatagaaaaatagataaaaaattcaatggttttttctggaaaaaaggactaaatatatagtttaccctaaaataattaaaaacatagtaaatttaatatatatgtatagttaagtgcacttacattcataaaaattaaaattccaatgctaaaaaaaatcttcagttatgttctaataataatcacatatcacatttgtgtcataaagctattgtgtgaaattacattgtttgtaaaaaaatcctttattcctttctgaaaaactttatttagaattaataactcgacaaaatatgaggggctgtcaactgtcatgacagttaataatcaaatattg

SEQ ID NO: 12879 - DNA, 530 bp, Diabrotica virgifera
tctttttctgctgtaagtctttgtaacgttggtaggtgtactttttcgggaataatctacagtcaatggtttgcaaatgcttactaaatccttatgaggagactctaatgagataatacctggccaatcaaataatgttacaaatctactaaaaaagagttttctatccatttctatcgtttctttaaacaaaatggtactttccgaatcatcattatttatttcacacttgaatttctgtaatgagatgtcaggttcatccaaataattaccaaaaatctttccaactggatcagatcggaatttaaaatttctttccagtaaagctctcattccgtttgtcgtgtagaaatttggtgcaatgcaatctttaatgggattcgaagagaacacaacaggtttttttgcgttttctagttcttatttctgacaataatttcttgtcgagactatctatatgtggacatttcgccaaatttttaggaatgtccacgtctaccttaagaaaaattcattagatattctacata

SEQ ID NO: 12880 - DNA, 534 bp, Diabrotica virgifera
  SmartBlast Evalue=1E-27; Info=CG1662 n=5 Tax=melanogaster subgroup RepID=Q9VYD6_DROME
ctggaggccagatcatccaatctgcaacatacaatttgactgatttctctttggtttcttctaaaaattctgttttacttttaccctccaggtaacccatggtcgcaaagaatgttgcaatacatacaggcgatgcaataatttggtctaatataactttttacatactatccgaaacgtgtaacctggtaaaaacttctctagatgtttgtaccaatagtgacaaacaaaacctacagttaaccctgctacagataaatttttggtcctttcaatgctcatttcttctatctcttttgccatgatttcgtatttctgttctattatatctcctgcagctgatagggagacagatagcccaagattggttaataacaagtatttactactaaatgctttgcttaaaatattacctagttttgttttgatagtggtcatggctaaaattgatgccatcttgactaaaaccaattaaatgatacaggttaccttgtacctgacaaagtggaatgcaaaagcaggaatttgttaccc

SEQ ID NO: 12881 - DNA, 531 bp, Diabrotica virgifera
  SmartBlast Evalue=1E-31; Info=Pigeon protein n=2 Tax=Culicini RepID=B0W9W1_CULQU
agatgcagtttcaacgtcttccatatgaaccaaaagataatgtaaaatcgctatcttgttctctaaaattgtgtctgatttgaaagtttctatcattaaattttccaaaaggctcacgtctattatatctaaattcgacaaattgataatatagtcatcggcagatataagtggagccaagtaaagtagatgtggttctttgtccgatattaaggggtttgttgtaacatggcacactggttcgtgtagtagtcctacgtctagtacatgagtacatatttctggaatgaagacaatgagagagtcacctcgtaatttgaatagcggtctaatagtttttgctttattccatggtatatcgttaattacacagtgaatgacacaactttgatgtaatgctgttacagaataggcgaagtttattggagtagtatcgtcgtcatcttctaagcttaccgtggttgaatgggctgatataaataattatggcatatacagacacatcctgtaggattagtcaatacaattaaa

SEQ ID NO: 12882 - DNA, 528 bp, Diabrotica virgifera
  SmartBlast Evalue=9E-20; Info=Laminin-like protein epi-1 n=1 Tax=Camponotus floridanus RepID=E2APY5_9HYME
gtcttaattttagaaatttcgttttcgatttttcctatagtattggtaactttgtcgattttgttcattacttctttttccattttctcaaagtctttcttagacattacaggttccgtgatctgagcaggaggctcatttgctgaaatctttgaaataatttcgtttttcatctcctccataataacaggcagatttttctgtatgtcaatgaccgcctcgtacgtcctctgcaattgcattttttctctttcgttcgtttgcattaaaatcgtttcgactgccgccaatctttcatccaatctaccgacggttcctttgagcggatctaacatttttatcctcttatcgatgttcaccaggcctttctttaattgctcgccgagcaccctatcgcggtactcgtgtttttctaatttgtcacccgtcgctcgaactacattgacaatttgtaaaattgctaccctgatatcttcatttgtgacaaccgcctctgtattggtgattccaattaaaatcactaagaaa

SEQ ID NO: 12883 - DNA, 528 bp, Diabrotica virgifera
ttataataaataatacatttcctaaaaccactaatatattcttttaatggcttatttgcacggttacaggtacatacatacctatcttgaaagattagcaatgaactgcatactgtcagaactacatactgtcagtgtgcgcaggcgcgcagtcatgtacaattttaccctcaatgaattcgccgctaaagaagaatatcttcaaaaatacaagatattcagaaaagcaataacgacattttttattgtttgagatttttggtacctataagagtttttaagttaattaaaaaaaaaagtaaaaaaattttacaaaattaattttttttttaatcttattttaaaaccaattttttttaaataagcaagttgaatcgatgaaacttgcagatcataataagcgaaacataaataaagcaacctgtgaagcggtaacgattaatttcattaagttgctaattggggggtgattttctcttttttttgccaaaacagaagggtgtatgatctgacgtattttgagcgtaa

SEQ ID NO: 12884 - DNA, 532 bp, Diabrotica virgifera
ttaaaagatcaaatggttaatatcgagtattgcaaggaaaatatttctgaaaaaggtataaaaagtaacacttttaaaaaaaaccataatgaagttagagatgaaataaatgaacaagtcaatacagatgtgggttgtgacctcaaggtacaagagaatcttgcaaaattaaagccacatgaaaaaccaatacttgcagaaaaaaatgaatcgaatgtcatcaaaaactgtaagatttatatttcaaaacttagtgaggaagatatagcaactttaaaaggtgatccaacatctataccattatctgatgaggaggaagaagagataattacggttaagaaaaagaagaaaacaatactattagatgatgatgatgaggatgatgattttcatggatattctaaaagaatttaccagaaagtcaatacacagtcccccaaaaaatcaaaagagaaaaaaacgtctaacgagaaaaaaacttcacaagagaaaaggaaaatgcgaagaatttcatcaatagcaagtgtgagca

SEQ ID NO: 12885 - DNA, 534 bp, Diabrotica virgifera
gcgccacgcaacattcacatcagctcccttctagctggaacactgtgtgcgccactcactttcacagcgttcagcggctttttattcttgtatcaggagtttttcataacttttttataaattaaatatatcaacttatatgtaatctcgattacacgttaagcgttataaatggtcgcctttgtcacattattgcccaaatgatctagcggttacgacactaaacttgtgataaggtaatccgagttcatatcccagccgtcccaatactttttttttcgatataattttttgtgtgcatcaaatgtacattgtcgtaagtacatcgtatatacaattatgtacagcatcgaagtaagtcctccagtccactgaactaacgaactgattcatttatagtgatcctgattaattttgatacttcgttgtacaactagttatatgaaagccaaatttaaacataaatatgtccaaaaagtattaaaaataactaccatcgttcttttacagtgatcctgattcgttttcttcttt

SEQ ID NO: 12886 - DNA, 531 bp, Diabrotica virgifera
tatcttaatttagcaaataataagctcagcagattttccttgggtaccttttctggtttaagcagtcttacagctttagttttagcaaataactcaatcaagaacttcgaaggtaatgagttgctacctatgcagagcctactgaggttggatatcaaaggaaacaacatttactacttagacgcccaccttattttctccgcggctcctacgataaagttcataagtatagaagataatttctacagttgtagctccttggcgaacattatcagatattttaaagagaagaaagtgagaatcgagacccatactggtttctacgatattcaaaatatcaacggcgttgcctgcatcgatggtattgtcgatgaagtaaccgacaaagcaaactttttaagaagggcttccgacgaagcacaaacgtctgttatttattgtgcttagatataaatatttatttcaattataaataatattattagttttgcacacacgaatatgattttaaacgattgtctggcacatatc

SEQ ID NO: 12887 - DNA, 533 bp, Diabrotica virgifera
  SmartBlast Evalue=5E-18; Info=Eukaryotic translation elongation factor 1 epsilon-1 n=1 Tax=Camponotus floridanus RepID=E2A763_ 9HYME
ctgggttgaaaagtgaatggattttaaatctgtaaaagaaatttaaaatctaaagttttaatatactgtaattatggttgtgaatatacacaaatatttaaatcctatagctactttattgaaagtaaaattagataatcctaaagctaataaggcacccaattctacagtaataagcacagtttttactctattaaacaaatccaattcagctttaggcccaagaaacgatttggaaagagtggaaatccagcagtggatagagtatgttctagtttatgccagccatgtggataatgttcagaattcaaaaatagtcttaaaagaactcaatgacatattagcattgaagacatatttggtttcacacaggctgacgatagctgatgttttgttattttatgtactagttcaattaatgaattccttgtctacccttgaaaaggagaaatacatacatgtatgcagatggtttgataatctacaacaggatgaatctctgagacaaaaatacaaagttgttgattcagttc

SEQ ID NO: 12888 - DNA, 534 bp, Diabrotica virgifera
ctcaccatttctaactcccccgacaaagtctttccaatttcctaatcttaatttggacgaaatttcttattctaccccaatatccaccagctgcttggagcacaccctgtcttcaatatctctagaagatgacgacatcaagaagacccctacgtctaggtcttccagttcttcgtcctgtagagatttggaagtttcgacggagatagtgacttccttgaacggccacagggatttggagatcaagttcttttcaacgccctgtaatgtggatagtgtcaaatctaatgcggtgttcgataacagctcgaggaggtatcctcaaagtgaatttggtgtagtgtatgaagaatgattaggattgtatgtttattttcttctttaatggatttttttatgtatttatgagtcttgcaaagactagctacgaggtatttagatgttttttttcttgtatcaaggaatagtttgaccgtataaaatatgctgaatttattgttaatgacaattctaaatttgttattaaaatttttc

SEQ ID NO: 12889 - DNA, 533 bp, Diabrotica virgifera
  SmartBlast Evalue=9E-65; Info=IPP:DMAPP isomerase n=1 Tax= Dendroctonus jeffreyi RepID=Q56CY5_9CUCU
cgaacaacaatgttttctgttattagatcttcagtacagcgccaattacatagatcaattgctacatctttaagcaaagcaaaagaaatagaccctacacaagaagcttctttgaaagaacaatgttacctagtagatgttaatgacaaaattattggccaagcaagcaaaaaagagtgtcatctggtacagaaaaatggggacatacctttacacagagcatttagtgtatttttattcaataagaaaggagatttgctcttgcagaagaggtcttcatcaaagattacctatccagatttctacaccaactcctgctgcagtcacccaatagcagacttcccgttagaagccgaagaagaaaatgccactggaataaagagggcagctgtacgcagactaaattacgaacttggcatcccactcgaaagcctgccactcgacagcctcaactacatcactagaattcactacaaagacgaaggcaatggcaaatggggcgaacatgaaatagattatgtcattttcataca

SEQ ID NO: 12890 - DNA, 533 bp, Diabrotica virgifera
attaacttctagttatcaacttctctgagactatcttaagcctgagaaacctataaacagacataataagaatagacaaggtaaggtatggaccgctctgtgcatcgatgtataacgccaatatcaaggacgtcatattggtgaatattcattttgagtgttctagccatctttgtcatgtcacatgcgtgagatcacgcggtaaatagagatatacagaccacctaccgactgctccgtgttacactgttttgcctactatgcctagtctattcttattatgtctatgcccgataaatcccgataatcgcttttttgtactactttttattgttttatctttcaagccaatacaacggtcacatcgacggggcttaatagctcaatgttaatcgatgtttatttgcgagtctatcaatctatgcgttcgatgttttggtagacggtttatgtcatgtcgaataatcatagacttatatatttacataaactgagcagtctgtagagctgtgtcattcttacaactagtaaag

SEQ ID NO: 12891 - DNA, 532 bp, Diabrotica virgifera
tccatgagccgattaccttcgtaacgaggtgcgcaaggaacctcgatcgataagtttaattagggcctcttttattgccccaacgtctttttccgttacagatatgtctgggtattctttgggaattattgccgtctttattcccgtaagagctgctttgtagttgctgctgagctttttgaaagaggcagcagcagttctgctcttttttgttaatttctcctcaggagtgcttctatcagacacagtccgcttgacagcttgtgtgatttcggcatttccaggagttttattttgaggtctaggaggtaatttgaccttagaagtgtcaattccctgttctctcattttccgaagctttcttctctgtgccccagatatttttggccgagaaacctcatcctcagcatcttttaaaggagtccgcattgcgtcctcagtatttttattacccgatgtgatgggattattttcttccagattctgccgaacagtctcagtggaagtttgattgctttgttgggttctcctg

SEQ ID NO: 12892 - DNA, 532 bp, Diabrotica virgifera
  SmartBlast Evalue=3E-27; Info=Transposase (Fragment) n=1 Tax= Teleopsis quinqueguttata RepID=A5WZ66_9DIOP
aaaaacgtttatagcattgtcagtggcgacgaatcttggatttactcctacgaaccggaaaataaacgccgatccgccttgggtgtgtttcacgatgaagaaaaccaacaaaagtaatccgttctcgaagtgtgtcaaagacaatgatcgcaactttgtgccaaaatctggtcatgtggcaataattgttttagaccaacgaagaacggttacttctgattggtatataaccgtttgtttaccagaaattatagcgaaactccgacaaagcaacacacaacggcgaatcatcctacatcagggcaatgcaagtgctcacactgcccaaaagactagcttggagcttcaaaacatcgaattgttcaaccattgttggagactggattaactgttttagcatttggtttgaacgtatgcaaaagtgtatcgatcttgttgggacatattttggaaagcaataaagtactcaaagtctatatattttaaaagataacactcgtaaccacagttcacatttaaatttgaaattaaa

SEQ ID NO: 12893 - DNA, 525 bp, Diabrotica virgifera
tcactacacttacaaagcatttgcttttctccgtagtatttgctactatttaccagcctacatagaagaatgtactacgcttttgaagtatgtgcttgtttagtagtattttgcttcagtttaagtgaagttggtgggtggacgtcttcggcgtaggtatttttttgtttcaatatggcagcatttatgaatgtgtgtcatagaaaaatatacaaactaagaagcagattcttaatttttggggtcattcttttatcaaataaaatttaataattgtgaagaaaattaacaaataacaattgttcatttttatcctcgcgtaactcttttgtcgcttcggatctgagtcactcatttttactcatgtacaattctaataatttggtaagtaaaaaatgtgaatccacaaatcacaagcacatggaaaactaattccatcacgattggtgttatgcagacacggctgacgctaggctttgtagtatatacttctggtcagtagtaggtacttctgttgtgtagtaa

SEQ ID NO: 12894 - DNA, 533 bp, Diabrotica virgifera
agatgaagagtacagatttcgtatgaacatcgtttcgtacgtcaacagaaaaactatactgattttcatgtattttattttataatataaaaaataatacatttattacttagcgtaaacttttacgtaataatccaaactatgtcctctaccagactctactttgacggtcacaaaagaatgaccaacacctccttcctttacagtagctgtagcaccttttgattcatcttgatcggtggtgacctgtaggcagtaaatggttgtgtctccatgccattcaaccttctcatctcttttaatgaaaggaattgaagctttgtttatatgatcacgaaatactagatcatcctgagatgcgttggaacattttccatctttaatctcatgctgtgagccgaaagcaaattgtgcagcgcacaaacacattaaaactaccaaaatacttgaattcatcttgtcaacgaatagtctacaactattttgttattactctgattttattgatcaatgttatagtacctactttaacg

SEQ ID NO: 12895 - DNA, 534 bp, Diabrotica virgifera
cttagattatgtgttatatcttggatatttgattacatacctattatttttttttattgtttttatatcatgtcattggatttgccatattggaaagaagttgtggttgttaatttgttattgggttactttattgatatttgtcacaggtaccttaaatactttatattaattcggattcttacttcctccacaggatgattctggaatgaatttggaattttgatttataaatgaattcttgagtccttcatatttcttcttatgaactagtctgttaatgctcaaagttggtgaatacgtgggttcgaagttcagcaactgatcactgctatccgatttcgtaatccatgtctttcttgtcagagtaggcagatgtttatccatgataatatttctggttgggaaatggtgtacaacacttcctaaccattcttgtgcaattgttccaaatattccaggcacattttcacacgataatagggaagtctagtttgcttattttatgtctcttagttcatagtatatagatgc

SEQ ID NO: 12896 - DNA, 534 bp, Diabrotica virgifera
  SmartBlast Evalue=2E-12; Info="BTB domain transcription factor, putative n=1 Tax=Pediculus humanus corporis RepID=E0W3I6_PEDHC"
ccgagcagtattttggagcagtctttaactgcgcaagcaggaaaatcaccttcgtcccacatgttccacagcgaaaagtctgcgttacctgatttaccaccgaaaacaatctacattcttcgaaagccgccggaagcagaacaagaaaagcgtacctacaaatcgtcttcggaatcatcaacgagtccttccacattcgaatatccgtctgagtttctccaacaacgcatcaggactgaagaccatccggaaaatttcgacgtaatgattaaggagatgaatcaaagaaacgccaacgtggagatccagccgcatcatagttcgcagtgcgggaattgtccgcattgtgggaagatttactcgaatcaatcggcgttgaagtaccatgtgaggctggtgcactcagatctgacgaacatgtactgctgtcatctgtgtccggagtcttttgactatcgagaagggttcaaaaagcatatggcagaagtgcatttaatgagaaattagaatttatattttgttaatttttgtaac

SEQ ID NO: 12897 - DNA, 533 bp, Diabrotica virgifera
  SmartBlast Evalue=4E-29; Info=Protein dispatched-like protein 1 n=1 Tax=Camponotus floridanus RepID=E2A1H2_9HYME
ggccgttgtcttcagcctttactccgaagacaaatctcataggcattcgatactccatcatttccttggtgacaaaccagtattgcgttttatacacaaagtcatattgctcaaatggatgagatctcttaaaaagctgaaattcactgctatttggaaactctatttttgggtatacaaacagaacaatcaaaccagcaatcattaatataaatagcaacgaaaaccaaatatatcgatgctggataatcgactctgttaggacgttctcttggactgtaatataatctttggggttcaatttacacctgttcaccattgatctccggaacacctttttaaataagaacgttgtatacgaacttttggaaaacctagagccttcgtaaagcactacaaatgcaggaaaccatgttatcatcaatataaagtttattattacggccacaccagtaaataaactaaaacagccgacagctgtgacgtaactagcataagaacctaaaaaggacaactgcagtggttaaagtagt

SEQ ID NO: 12898 - DNA, 532 bp, Diabrotica virgifera
ttttatcacgataccactcaatctatttgtcaccgtgttgtgtaattatatccgaaacttgcgcgtcaattacaggggactcggtggtctagttgttgagcgttcggtcagagatcgaaaggtcccgggttccaatcctggatgattcattttttttattttggttgttttaataaaaattttttgaaagtggtagataagaaagttagtttaatatttaaatagaatacaaataacctgttaagtatatttacttcgttaaaattatataatagaagaataacttcttacgtgcgtacaaagtacacacacattcttttttttatttctcttctctcaatactaggggcgttcatgatatccccttcaccacggcaccgtccctcgtccataaactactattgcttctaaaaatatgaaatagtggggccgggaatgcttagccttaaatttttgcattttatagagttggagatcaacaccatatcttgcatcatatttttttttgtagaaaaaaagatgataaaaaaga

SEQ ID NO: 12899 - DNA, 527 bp, Diabrotica virgifera
tctaatgggaaaatttacttatcacaggtaacctctgtatcaaaaggattacgctctgatgaagctctttccatgttatggcccgcgtacatcagtgtatttttgcattccccgttgtcttcttatttgtatctcaagatctctgtacttagggatcttctagtagatatttttgttaggtatccgcatctcaattagtctagttattttgttaactaatagtatgagatccggtctattctgttggttttgttggttggtctgtgaacacagttctgccccagtatagcacgtagcatgtcattttcaagcatactatcggggacgtattggaaataagccggttggataccagtttgttagtttgctaaatagttctttataatcagaacaaacgtctagcagatccagtaagatgctagatggttttttggactttcatatcggcatttgtccttttggacctgatgatctttgacctcgtggtggaagagaagcacatagagctttcctatccagcgaaattc

SEQ ID NO: 12900 - DNA, 532 bp, Diabrotica virgifera
atttaacaaaaaaatgaagtttttaatttttttatggcattgactttatgtcattcagccagtcacaatatgtgtattagtgtcacgtgtagtgtgtatgttgagtaagtgtcttgttactttgcagagtcgacgtaattagcgtaaaactacttggaattatacattatagacggtattttactaaacatcaacttcagaatatattttttattcgtaaaatatagggaattttttgtatttcaaaatatgaggataaaaaaataaataaataaaataaagtcaaataaaaaaataatgagttaaaaattgaaaatacttttgaatttattaaagaaaaacatacgcaggggtcacaatttcccccgcttggtcatccgaaggttaattaactatcgaacatgaagcaacacaaaacataaatatagaagatattgtgatttcagagtttcccgctattaaagacaaaaaaaatattttaattgattcgcataatgtaaaacaaaaaataaataaactgttacattattcc

SEQ ID NO: 12901 - DNA, 527 bp, Diabrotica virgifera
ccctgtcggacagaacctccagtggatttgtcgccctttcattaaactgtcatgcaaaaatgagactggtgtttatcaccaactgcgcattttaatgagtggaacacgaagaacatgtcaaatgacaggaatcatgttggttatgtagtaattgttgcagttccgcaattttcttttaacttatggttctccccgtatagttaaaataatttctcgaaaacgttgctagctcttagacatcgtaaaaaagtatcacgtctaatatttgaacttttatgaactataaatatacgaacttttaattacaacttggtttataattattgggaacgtgtcgatatggcatcattcaaattatggtaactgcgtccacggaacggaaataatgaaaaatcggtaataaaccctaaaactaatttcttaattgagtaccaagccaatatcgaagaagagaccccctaaaaatgtgttgattaatccagtcagcgggggaaaattggccagttgtgcacagttcgttgagcgaa

SEQ ID NO: 12902 - DNA, 532 bp, Diabrotica virgifera
gttggttgtggttggagttgcgtgtggaataaagttaataccgaaaatacaaaccaattaatggataccaaaccgtcaggaccaccaccttatgatgaaggtccacatcaatatcatcagcctcaatcgcacccgtatcctggtaacgccccaccaaatttccagcaacaacaaccaaattacggctatccccctccacaacacgcacccccaccagtaataatgatgcaacctgcaactcaaacccaaacctctacatcagtgaatgttaatgttcgtggtggtgtgggctgtccagtttgccataacaattcttggactgggacctattcctgctgcgcctggtgcctggcgatagtatgttttcctattggcatattattctgctgctgcatgagaaagaagaagtgcaccaaatgtggatatactgttggataagataacttttaattcttataaatgtatacaaactatataataaatacataatgtaataataatcattttccatgtaataaaaaaataattactt

SEQ ID NO: 12903 - DNA, 531 bp, Diabrotica virgifera
  SmartBlast Evalue=8E-53; Info=Autophagy related protein Atg6 n= 1 Tax=Bombyx mori RepID=B7TYK5_BOMMO
ttcctcctcgtgttctagggcgctcaactcgtccaataatctcacttcttcagcttttaaatcacttaattctttttctaaatcagatagttttggttcgtctttatcactttgcaacattttgtaatatctactgtaatcatcataatcctcttgtgcaatttgaagttgttgatccaaaatttcgatgaggttatcagtacactcatcacacagaggatgatcaatattggaatttccagaaagtgtatcaaacagagctgcctgtaccttgaattggtgactgatcaaatctacctcattttcatcagatattagcataaacccattggctccattgccagagtctgataacctacatggaggtacataatgatcaaaactggtagcctgcgactccaaatcaacttcagggttggaatatatgggcaaatttaattctgctgaggtatgttcactaaaagagttcagtgattcatctaatcttaatgattgagaacatctttggcatgcaaaagacacaaataattt

SEQ ID NO: 12904 - DNA, 533 bp, Diabrotica virgifera
gaaagcctatgtccaaaggtggatagaaatgggctaaagaagaagaagaatctgatgaaacttcataaatacaattataataagaaaataagaatactagtaactttaatatcaagaaaataaaatgccattaacaatacttacgtcaatttacttgaaggtattaacaggttttcgattgttttgaaatgtgctgcctcttgttccataaatgtagtaacttataaattattgcctttgcttggctattcaatcccagccctttgattcctatctttttatgaggcatattgttaaataactaatgacttaacttaacgcactagagatacactaaatgtcttaataatacactaattactactactaatataccaaacactaagctaagaactattaataaaatatccaacacgatcaaaccaataagttaaacactctctgcgatacgtaatgcacttctaactacgacactggcgatcagcaaactggccgtttccatggtaacgttagtaaacaagaaccactgcgca

SEQ ID NO: 12905 - DNA, 530 bp, Diabrotica virgifera
gtttgggtttcccctacaggcaccaaagatacttcctcttgatccaaaaactgttttttgttatttatgccgcagtatttaagaagatcaggattcgacaacctctcgaagctccgcaccctcgataacacagcacccccaactttaaaatctaactcagtctttttctcgagttcctgaccttcttcttctagtatttctagttcattgaaagtagggaacatcggttctgactcagaaactgcagtacctgctgattcgcaaccactcgagagagaaccttcgtcgctttctataggtattaagtcaggtttttgacctaaggcgttgaaccatgctttttcgcaagattcgagcagatcgttttttagactattttccactaactcattcaaaatgacttcacttttttcatcaagcataagatgttctgtttcttctctcccatccgtattgactgttgcatcaccgttcttttcttttacaggtactggattgctgttggatctaatggtactcagaatgtaaag

SEQ ID NO: 12906 - DNA, 532 bp, Diabrotica virgifera
  SmartBlast Evalue=7E-28; Info=DNA polymerase alpha subunit B n= 4 Tax=melanogaster subgroup RepID=DPOA2_DROME
taaaaaatctagcgtttgtcgccgaaaaaatttatacagacgctcatttggattctcccgaaccgccactagttcaaaatggtaccatgcagatagtaatagctgcaggaccattcacgttcaaggaaaacctttcgtatgaaccattaaacgaactcatcaaatacatcacggaacacgagcctcacgtggtgatactcactggcccctttttggaaaagacccacgacagcgtcctgaacggtagtctgacccaaacgttcgactctttcttcgcagaagtcatagacgtgctgatgagctccatacagcacaaagacactcaagtggttgtggtgtccagttcgaaggacgtccaccatcatccgatttacccgacaccgccctataaaattaccgaaaaatatagtaaattgttgtttgttcctgatccggcggtgatcgatgttgatgggctggtgattgctgccactacagtcgatgtgttattccatatgagcaactatgaattacatttcgataaggaatctgt

SEQ ID NO: 12907 - DNA, 533 bp, Diabrotica virgifera
aatccgcgaatatggtttaacatcaacaaaataaagaattataatcgttaacattcaaaaccggacagttaaaaatatcaaccagagtagacactaattttcctttggatcaataatttcaaaattttgtgcttaaacctacaactgcatgacgtttagcagttctttttgagtaaagacactcataaaccgaatacatttacaaaactgttttccttcttccataagtacacatagccgcacactagtatttgattaaaaatgtacccacaaaacagaaaaattcataaagcttattttatttagaaacattacagatggaagaataattaacataatttttttaccacagtcatattggtgtcagggggttgactattatagataaaatgtataggctatttattacaacaaaaatttcaagggatgtgtagtgtttggggtttagaccccggaagctctggagatgacttcagagaggacgtcgaaagctcggctcagtgaatatcgacccagtacaaccaggaggtctg

SEQ ID NO: 12908 - DNA, 534 bp, Diabrotica virgifera
cgttgtatcgtatttagtgtttttgaagtgattggtatatattaaatttaaatatgtctaccattcaaaaaagtgcttggataaagtgttttcccgagttaaagctaagtggagacaaaatcgtaagttacattcattttcacatttcattttttaaatgaggaactgacaaacaaaagcatcatgtcccacaaaagaaatttttctggaaagagtgtttttattcgacaaattcgcttttacttctataaagacggacatagagagaagcatcaaaatacaaaaatccatcaaattgtagacaattccgcttttgttcttcagcttaagtaacgtactttgttctttaagtaacgtacaaattgctaaagaacttatgttcataaaagttaattttagttttttaccagatctaataaagtcattagaacaaaggaatttacaattaagtgattcggttaatcttgttaacactttttctgctcattgtcaaaaaattacccgtgttgagctggcccccccccccccacttgc

SEQ ID NO: 12909 - DNA, 528 bp, Diabrotica virgifera
  SmartBlast Evalue=4E-41; Info=Rho-associated protein kinase 1 n= 2 Tax=Culicini RepID=B0WWT9_CULQU
attcgtaggcaaccacctaccctttataggttttacgtacaactcggactaccagctcctcacgtcctccgattctgtggacagcaaatccaacaacataataatggacggtagtcacgccagtaatcacgtccacaagctagagctgcttctagaacaggaaaaaatcaacgtagaaaccttagaagctaaacatagacaattgttgaatcaactcgagacgattgctcaaagagagagtgatattagagaagaagtaacgaagtacgagaaagatttgacgatattgcggcataattataaggagttgcagaggaaggcggagtatgagagcgatctgaggaagaacacggagaagtacttgtcggaactgaagaaacggtacgaggaagagcagaacaagaggactcgagagatgaacaataaccaacaacataatgataagatccagtttctagaaaaacaggtgaacgaaatgcaaggaagttgaaagggagaccgagaattgccaaaagttgaggaaacaag

SEQ ID NO: 12910 - DNA, 533 bp, Diabrotica virgifera
attttaaagagaagacattaattcttatcaaaatgaatcggtggtgtctatcggccttattggttacagtcttagtggcggttgtgtatgggaagagtttccaggacaacataaaaatccttaaaaaaattgatattgagacggtgataaagaatgacagaattattaagggttatatcgattgtgtcactggtaagaagggttgtactcctgaaggtgcagcgttaaaagaaagctggaaagaaggaatcgacaaaggctgtgatgattgcgatgaagaagaaaaaagaaaaataaagaaagttgtcaagcacatttacttaaaacaccctgattggtatgaggaagtagccaatgcgttggataaagacaagaaataccgaaaaaaataccaaaaatacattgatgaactcgttgccgatccaaccttgtaaatgaatgttagtccctaagaaacatgttaccaacttgttgttaagaatttttttataactgtacctaattatatacatctgaataaaagtcagtattag

SEQ ID NO: 12911 - DNA, 532 bp, Diabrotica virgifera
cacataaccacgtattcgagtcattttgaaaaaatttataatttttgtcgtcattatttcataacttgctttggctttccttttattttccagtaattgtatgtaatgccatatttagacaatgccagttgtctgcttatcattcttttgaaaattcttttttctttattatttggaagagaggaataattttcttttaatcgttgattgagcacttctgcaaacaataaattttctttactatttctctgaaacttggagaattcaacacctgttctgttgtgctgttaggtttttcaggatttcgtaatctttgtaaccattttttgtaacatgctaatttagtttcaagtttattaatttatggtctgatctttttttcttatgaattaaatatctttgtcttctggcttggtctgatttaagtttggcagctacaacccttctatgagaattaaaactttgataattattaacatctgccatcaatggtgttgccgaaagattagatattttgaagcacaagtcgctg

SEQ ID NO: 12912 - DNA, 534 bp, Diabrotica virgifera
  SmartBlast Evalue=2E-23; Info=Nuclear pore complex protein Nup133 n=1 Tax=Harpegnathos saltator RepID=E2BNB0_9HYME
aacgaatttaagcatttgtcagtttttgttatttttaaatgattgaagtttaataaacttaaaatggataaaagttatcaaagctccatttctgtgaaaagtccatttagtcccagatcgcgaactagtcttagttcgaaacgtattttgccggcgtcgttcagaaaatcatcacgattgagtatctctggaaagtccacacaatcagtacaagtagtattaaaaatctacaaataattatgttgaaaggtttgggcaatcattacctgttcttataacagaagctttaacatttgctgataggaacactattgtttctgctcggatatcagaatgtggttatgcatgggtcgtttgtggaagaaggctattgatatggcagtatcgtcagaatatttcagctcctggaactccacaaagaaaacatggtattgtaaaccaatgttttgagctacaactacctcagagtgatttggctcatagagctgaattggtctcagtttttatcaattctggatcaaataatccttcgtg

SEQ ID NO: 12913 - DNA, 528 bp, Diabrotica virgifera
taaaatactatttattaagtttaatatcacatctttttaatttaatgaaagacaatcaatacattggtattcataaatgaaagattttgttgagatcttttgtgcttagcttttgttgataactacataaaaaatattaaagatgacatgctagaagctaaagttcagaaagacataattttgttgtagtgcattcccaacactttacacaggtcagacaagaagacatattaaacgggcaacagaccatgtacataattttgtcccaaaacaaactcaacataatatgtttgataatggcatcttatgccatctacttgattccagaagactatcagtttaaccacaatccgactttaacttttgacaagaaacaataaaaacatgatttagtaaattttgaaacatcgaacataggtaaaacatcgaacaaaaatgaatgggcacttaagagaggcttatatcctgtgatgggtggaatagctgttgatgatgatgatgagagcaagactacacggccaactataa

SEQ ID NO: 12914 - DNA, 532 bp, Diabrotica virgifera
  SmartBlast Evalue=1E-60; Info=10-formyltetrahydrofolate dehydrogenase n=1 Tax=Camponotus floridanus RepID=E2A3S4_9HYME
gtttattccaatggaagtgattaactaccccagactaaagagcatctgctaccatccatccatcttaccaagacacagaggagcaagttccatcaattggaccctcatctgcggcgacaaaaaggcaggcctttccatcttctgggctgacgacggtttagacactggaccaatcctcctacaagaggaatgcgacgtacaagaaaacgatacggtggatactatttacaaaagatttttgtacccagtaggtgtctctgcagtagctagagcagtagacatggtcgctgatggtaatgctccaaaagtagttcaaagtgaaaagggagcaacgtatgatcctatgctgaacaagccggagttacaaaagatcgactggaataaaacagctctagaactccacaacttcatccgtggtatggactctgttcctggagctagttgcttgatgaagctaccagactcagcagattaccaagaagccttgttgtttggttcatcattgtggaaaacagcaatacctatcggaaaa

SEQ ID NO: 12915 - DNA, 529 bp, Diabrotica virgifera
  SmartBlast Evalue=7E-35; Info=Vacuolar protein sorting- associated protein (Vps13) n=2 Tax=Aedes aegypti RepID=Q16SR9_ AEDAE
taaagcttccgaccagttttcgccacgttcggctgctagaatttgaacatttgtcaattcgagcttaaagttatcgtagctatgctccttcatgaaggcaaagatttcggcttgggttttgccttcttcgttgagccgtttcacttcagtagctgtacatcttctgccataagaaaacactttcactcttcccagattcaccaacaaaatgttctcgttgccggtgtatttgccagtatgtggcatcaataaaataggtgcctgaagatctacatttagatctaccagaggtcgcttttccaccgcatactgaagacccaaggaagacatctccttgaagtcggttaatctgctttgtgctacgtccgcaatctgctctaaattggagtctggtggaattttaaaaatgtccgccagtttattgactgtgttagcatcataaatgatcttaagaggcaaagcagttacgtgaactcgctgatcgcatctcttgtccaatggattggtctcgaataacacttctagcagg

SEQ ID NO: 12916 - DNA, 532 bp, Diabrotica virgifera
  SmartBlast Evalue=2E-16; Info=Pol-like protein n=1 Tax= Biomphalaria glabrata RepID=A3FMR3_BIOGL
aacagtcctacttttcatcaaattaatgacataatgtgcaatagcatatcaattaaaattcaatccggaaaaaagttaaacatttattcaatatacgtaaaaccaaatcttaaaatcactctaaatgaatggaaaagttttttaatagtctagagaagccttttataattggtggtgattttaatagccacaattatgtttggggttgtagtactgtagatactataggaaaaaatctgttagaagctattgaggactgtaatcttgtaattttaaataatggtaaagaaactttgatgcgtagaccgaatagcaataataaatctgcaatagatcttacaatatgctcagcaaatattagtcattttttcgattgggatgttgtggacgagacattaggatcaaatcattttgctattattattaagtcaaatattaatgtcaataaagcggaatgtgtaaatacaaaattccaatggaacataaataaagcggattggtctcttttctcttctatcactgataatttcat

SEQ ID NO: 12917 - DNA, 531 bp, Diabrotica virgifera
  SmartBlast Evalue=6E-34; Info=Drongo n=1 Tax=Tribolium castaneum RepID=D6WJA2_TRICA
gtaaaaacgtaccctcgcaatttactttagtgccttaaaaattaccgttcaacaaaattgtcgcgtttcctaaaaatctcatgttaatccgatccatctatacaaattgccttaactttataaataactcgacaaattaagaaagttctctatttcgaagtgcacttcattgttactgggtttggtgaaaacagaattccagcacttttaaattgcaagtcggactactgaatcatttgggttctctgtaactcaaccgtacaatttctagttagggtagtgaagtgttaaaaccatggctgcttcgcgaagaaagcaagacgaaaaaaatctaaaaactttgcgtgaactaggagtcctacttgccaataaatattgttttgattgtaaccaacgcggccctacatacgtgaacgttaccattggatcctttgtttgtacaaaatgttcaggaatgctacgtggcatcacacctccacaccgagtcaaatctatttctatggcaacattcaccaacgaagaaatagactt

SEQ ID NO: 12918 - DNA, 529 bp, Diabrotica virgifera
aaaataaatgaaacaaagaacgctgccaaatatacattttattttggagtcaaagaaaaagggcatcatacaaaaatggaattctgctattgaagatatattgtggtatgaatggaagttaccaaagaaacgcacaaaaactaatcagaagtaaaacatctgtatcaagttcgggtaaaaagttaaaatcttcggatttaaaaaaccaaatcaaaacttatacaaatgaacaaatacaatcaataaaatatagtggcctcaaaaaacatgattatggaatgtttaaaatgaagtcaactttttacattatggaacccatcgaagcacagggcctagttttcctctttgataatgtgattgtatttacagttcgtgacgaagaaactcctggaagcttccatagcattggatacataaaactcgattacttacatgtagaagattacgaaacctatctactggtattgtctgatacacaaaaatcgaagaaaaaacttgacgcagtgccaacatcttatgttctaaaggc

SEQ ID NO: 12919 - DNA, 532 bp, Diabrotica virgifera
  SmartBlast Evalue=8E-29; Info=Synaptic vesicle protein n=1 Tax= Aedes aegypti RepID=Q171X0_AEDAE
tgccatgttaactcttcctctatattctgaagaatgaaattcggtgatgtgactagtcgtagcggaaaatggaccattgataattgctccagacataaatttagctgctaaaagtacatatttgctagtagataaagctgcaactgcagcaaaaaatccagacagcaggaagccatacacgataatcctctttctacctaaagcgtcgcataagtaaccccaatagacacctgtggatatcattcctgcaaacataatagcatttataagacctttatcctctaaagtcagccccaaatcacattgtgcgaccggtaatatgtacgataattcgactgtgttcaataattgtgtcacacaaggaagagctatgacgacaattaacattatgttatatttccaaattttgtggcagctatggcatcttcgaaagttgtggcatctgttgtgggtttttctttattttgtaactccataatggactagcttcttttgctactcttcgaaaattaacattatctaacaataatta

SEQ ID NO: 12920 - DNA, 518 bp, Diabrotica virgifera
cgcacaatatgttcgcctacaccttcaggagtcattatgttgctctgtccactttgttattttacagacaagatatctgaaagcagtatccaatgagaacatctacaatcactctgaatgcagttgtgtaaagccccaagaatatttttgcacaacagtagaaggttataataacttctttgcttgcctttatcctgaaagcgttttccagtagagtaaattaatcctttttcagtttctagcatcttgtagatggctcttgcagctgctgtcaaaccttgcttttgtcgaagctttactttaaaaggtatttgaaccttattcctacttagagccgatcctatcttaaatcttttttctatttcgtcttcatttcctctcttgtcatttattgtcctagatatttaaaacctaacctaaaacttcttgtctgttttaatgtttcccatttcttgctctcttttgtaatcaaaaacttcttcatactcgctttttcacttattcatacaacccatagt

SEQ ID NO: 12921 - DNA, 528 bp, Diabrotica virgifera
gcctgcttgttgactgaaaggtggtttctagggtggattggattaggagtattttggtttgacaagtaaactctcttgcttagggattcccggattaggtcgatttgtctgcttgtggagtcaaaagggtacgttctaagggttggttggcttaaaggtgtattggcttgacgaataaactgccatctaactaggtagcctttcctggttctggatcaaaaggggtttttgtaggggttgatagggctagagatgtttcgatcaataaacacaattactgtctgttattttattttgatgtgatacaataaacacaacatcttagggatcttgatcagaccagtctaatataatagaaaagactaacaggtcagacagcagtttctcgtcggccatgatggttggatgtacacgccatgaaaacatttttaatatgtttgtaccgtttttgtggtccgtttgttttctgtttggggtttgtacagaacacaactatagttcatacatgattaactaaaaacttgtaat

SEQ ID NO: 12922 - DNA, 532 bp, Diabrotica virgifera
attttagtgtgagttttgaatagatcttcactttatttatacggtttaccagtaagttatttattgattatgttatacagatcgcaccccgacttcgttagtgccataaccccgaaatgaaatcgccaacttttcaggagagcaaaaacaagattttaggtgaactcttcattttttttctctgcaaattcactatctaagttaaccaaattctgctctcatattgattatgtgtgtagctatcgaatgctaatatttatttttagtaattgacattggtttaccctgaaattcacccttaaaatataaggcgctattgctaaggcacccatatacaaaattcgaggattagggcgtatcaacccgccttatcacaaacaaatacattatcacattagggcaatattcaaaaatgaacggtacttaccacacatccactctcgaccaccgtgtaacgcaaaatcgtttgtggcggggttgctaatgctgggagcgccaaaaccggaaaacgtaataacgacacaggcgcaat

SEQ ID NO: 12923 - DNA, 516 bp, Diabrotica virgifera
tttttctgaagtgttaccaaaaaccagatgcaaaaaatcttatttaaaaaaatgaagatatggctaaatatataattatatatatgtactcaccggcacaaagttccgccacccggggtttttgatcaagtttgacaatctataactttattatttgtacttcaattttggagattcttgcacgagtttgtaggtacatgtattggtgtcaattgctattattccgatgacaaaaattttttgcttggatggcattacacgggtgtgaatataagcgttgttttttctcctaactttaaggaattccgtggaagaattggagagctgattttgtttcatactccttttgtattgtcctggaggtataactagggtcttgttttttgaattgtctgaatatctcttttcttgtaagagctgtaattaaaacactgctttgaaggtttatttaattaaaaatatcaaacgcactaaaattaacaaaataaaacaaatttaacaaatttaataaattca

SEQ ID NO: 12924 - DNA, 530 bp, Diabrotica virgifera
agtttgtaccgttgtcattcttctagttagaagagttttcatgtttcagtgagttctttgtcttgattatcatggtgatccatccttgttagtcgttcttgacgttaaattataatgtctgaagtcgtattaatacgtaacataccggcgatgaggatgtgataaaaagaggataatgccaaagtgtcgtttttttgacagaaaagtaaacatgactgtgtgtgcaaccgtctatgtgcagccaatcaataagtgaaccaagctaaaggaacacgatattagtagttacttggagagaatggaacagttattcgtgtgcaatgcaatcaatatttggataaaatatgctgtttcctcttctaggtgacaaaatctgcataagttatcatctaccaatcccatcaacttcaactgcctattcagcttacaatgccctgctaaggcctagtatggctttgactggtttcctgtctttgcttattagatctgccgtaaattttggagaatggtgtataatgaactgtttcgtc

SEQ ID NO: 12925 - DNA, 531 bp, Diabrotica virgifera
  SmartBlast Evalue=4E-52; Info="Dock-1, putative (Fragment) n=1 Tax=Ixodes scapularis RepID=B7P9N2_IXOSC"
aggaattagcagagcaatacgaacaagagacgttcgactacgagcgtcttagcgatctccataccagaatggctgtgttttatgatgacataatgaagaaagctcgggctgagcctgagtattttagagtcgggtattacggtaaaggatttccgcagtttctcagaaacaaagtttttatctacaggggcaaggagtacgagagattggctgattttaatgctaggattttaaatgagtttcccaaagctgaactgttgaataaactgacgcagcccggggaagaaatcattggatctgataagcaatacattcaaataaataaggtggaccccgttatggatgagaaaaaacaaaggttttcaggaaagccgatttcagatcaaatagtgaaattctacagagtgaacaatatacaaaaattcacattttcgagaccgtttaccaggaaggattctctgattgaaagtacaaatgaattgccatctttggttagagagaacagacttagtaccacgtatcctctcctgg

SEQ ID NO: 12926 - DNA, 525 bp, Diabrotica virgifera
tacttagcctcgcctaacataaccaataatcaacctatcaaaacggagatacccattcttaatgcaaaaaagaaaatacaatagaaaaggaagataacagtagaaacagtagtatcaaatatacagtgatgagtgcgtcaataaacaacaaaataacggaaaagacggaaaacataataagttgcgaaataaaaagaaatgaaactagtaggggtgggaaattatcaatagacacctataaatttacgatgatagtttaacacccttagacgtacttgagtcaaactgtcacaggagaatttaaaaaaattcttaaaaaaattctcctgtcacagtggtagttgccaaactcctccaaaacgtctaaaaaattgtaaactattaatataacgtaaatttataggtttttcattgaaaaattcccacctctactagtttaattttttatttcacaacgtattatggtaatgaagcaaacaagaaaaaatagtaataaaaccatagaagaaaggtatgaagatactg

SEQ ID NO: 12927 - DNA, 532 bp, Diabrotica virgifera
gttcaagctgacaaaacagcacctttgaaataactgaaccagtaattaattcaccaaaatgaagattaccataattttgttactatttgtaactatatttggtatgtatgaaggagcattccatcacatgccacctagtgggcaatatattcgacaatatcaggtaataaacaaagatggacaactggtcaatcctaaaaacaatcgaattatagtaagcccccctacttgtcaaaagtgttacaagccagtgtatggaaaatgcaggagaatttattccgaggcttgtccccgtattccccctaaggcccattaaagtgcgaggatacatacctattaagattacaaatatcgaggaactactaatggataattgatagaaatttagtttttgataaaatatttaaacacaaatattaattttaaaatgtttgaactgtaggcgtaaaatttcgggccaatcctttttaaatgaaaatatttttttcgatgcctgagaaaactactaaatatttttcataaatttgaagca

SEQ ID NO: 12928 - DNA, 528 bp, Diabrotica virgifera
  SmartBlast Evalue=6E-56; Info=Nose resistant to fluoxetine protein 6 n=1 Tax=Camponotus floridanus RepID=E2A1E7_9HYME
gtcaaacagttgttgtactgaagttccaaaatgaacataatttgaaagctttcttgtataggaaacccagtagcgcattatggtagagaccaaagctatcgtgagtaaagccgcagttccttttctcggccatttccatattaagtagatcaaaaaatggagagacaaaaaacaactgagtgtcaattccaaggtgatgtgtatgagtgaggcacatatctttaaatccaaaataattgtgaataaatagtaaatttctccaccaatgctgcttacagatatccgaatggtgtgtgactaccaaattccacattggtcctgaatccagatgaggtaaaataaacgtacaaaaggctatgagagctgcaaatgtgggcactattctaattagccgcgtgatgtactcttcgaatatgttcagttttgtgttctctttagttccccagcagtgaataggtagtcagcattcccgatatcatgataaatggatctgtgtatagacttgccgctctcccaacgacagagaat

SEQ ID NO: 12929 - DNA, 532 bp, Diabrotica virgifera
ggattcactcgatataggttgggtgcctgatttgtgtaggtgttagatatggataatataaaatgattaaaaaattaacatttcataattacaatagacaatgaaggaacatgcaatatgtgtaggctataagtatttttaaaatttaacattcattataaagggatgttctatattctgtgatttatgtaatattgataactgatttgtttcttataatttactaagattttgtgattttatagaataattataaaattgctgaggttccagtaggttatctaccttgttcaagaaggcgaatatgtaattataaatacatttcattaatctagtagagatccccttgctgaaattgttttatgataaggaatgtagttaataaatattaaggcagttagcaaatcgtaaaataattttattcactacattcacgaataaattattaaagttttaagacacttttgtttttatcattaatagatacccatagttctagtaatgtttttatttcaatatttacactaacctg

SEQ ID NO: 12930 - DNA, 531 bp, Diabrotica virgifera
  SmartBlast Evalue=7E-34; Info=Glycolipid transfer protein domain-containing protein 1 n=1 Tax=Camponotus floridanus RepID= E2A817_9HYME
gcaggcaggcagaaaagcagctgttgtcatagagttaaaaagtacaataatattttagaaaaaaatatcaattaaaatggctcaaaatagtgaacaatttgatattaaaatagtcaaagataattttgaagcatctttactagatgacgacgatgttcgcttacaggaatatttagatagttatgatgaacttaacaaattttttaccttaatggggaggatgtttggatttgttagtaaagatttacaagcaaaaattgatattttgagaaagttcattgaagaatcccaagagaatttcatcagtgcgaaatgcatgataatttatgaaaaggacaatgacttactaaacaaaaaaaatacgtttctgggtccaggacattacttaggttacaccgaggtctggattttatcagactattcctggaaaagcttaaggacatcaagaatgaagaaggcacctcaactatatgtagagcagcatatgatcaaacgttatcgaaacatcatccttacctgatcaggtctggg

SEQ ID NO: 12931 - DNA, 527 bp, Diabrotica virgifera
  SmartBlast Evalue=2E-30; Info=Platelet-activating factor acetylhydrolase ib n=1 Tax=Aedes aegypti RepID=Q16MM3_AEDAE
tttaccaccttttcccgatatagactttcacattttcttgctgctttacttcttaggtggtacattgagcagctcacacagctttgcgtagactttggcgaacactttcgtatatccgctgttggttagatgaagatagtcgtgcatgatgtgatgggatatggtttggtcgttgccaacgatgttttcgtcgatgacgacgacgtggcagttttcggtgacttcgtcggcattggcttcgttgcagaatttgtctaggaggaaggtgttgacgtggtcgttccgttctcggtatgggttggggtgatgaccacgcggtaacagggtaggtaagattatggagacgatgcctagttgtctctttatttctctaatgatctccaaaatcccttcgtaaatttcatgaggagtgcagtcgatattatttgtaccgacgaacaggacgacggctttaatttttgaattaaattccagttccccatgtcgaactctccaaagaacattttcgactctgtcaccaccaattc

SEQ ID NO: 12932 - DNA, 530 bp, Diabrotica virgifera
  SmartBlast Evalue=3E-16; Info="CG9134, isoform A n=2 Tax= Sophophora RepID=Q9W0I2_DROME"
cttttaacatgtatgacaagtgcttaatattatatagattcacaaataactcctatttcatcggtacaaaacatgtcatcccaccaaccgctaacgtattctctaatagatactcgaagacattgctcatctttactattgggttctccatttccccaatcaaaaaatgtaatttcagctgctgttgtcatccaagtccaagtactaccatctcctaggttatttccagcggtccaaaatcgctgcatacctgttgtatgttcttccactagtgaaaaaagtgcatcattctcggctttcgtttccaaagttaccaactgcattttatttaaaatgcaaaattcgaaagctccccaatagtttgctttaatattcgtataaagaacatattccttttcctgaatcttaaacctatgttctgtcgattcattttttgtaacgtcaaaagattgtacagacagaatcaaagcaggcagtaatagatacactgaagtcatttttgttttcttttttaatatcttgaaacaaaa

SEQ ID NO: 12933 - DNA, 527 bp, Diabrotica virgifera
tacaatgttttaaaatgtttactcgtactaagactaccatactgtcgcggtttacaatctaaggaccataataagctaacaagaaaacaattatatacaaagacgacgaaatagtgttgtttagcaaaaggagtattagagcaccaaaattgtgaaactaaggaacctgaccaagcgaagaaaaagacgattataggttacaaactggaagtaatcaaaactgtgatgtagtaaatgcggaggaaattgacttaggattaatgccaggtaattttattcaattgctttatttataatatgtttgttttctagcatcttggcatctttctgtagagatcattgaatgaatatcactaagtcgcgagactacatactacacattcaacagccaagtcaattccctctttaattcgaattgacagccgcagatattttggattataatatgtatattgctaaataaagcaataaataataataatctttaggaataaagaaacaggaataaaatactaaaatccgttaca

SEQ ID NO: 12934 - DNA, 531 bp, Diabrotica virgifera
  SmartBlast Evalue=2E-17; Info=RNA-directed DNA polymerase from mobile element jockey n=1 Tax=Camponotus floridanus RepID= E2AVN7_9HYME
atattctgtcagtgcttcttgcctttctttaataattgtatcacattctgtattccaccaaggtggggaacaacgaattttatttttaaaagttttatattgcgggattgaaatgtgcgcagcatgattcatactatctattagaaagcaatatttatcagatgtactgtccatttcgtaaacactattaaaaaaattttcaactgaggttgtgtatagagtccaattggcttttctaatgttccacttacttctgggtataaactcttcagttgtagtactatctaatatttccatattgataataaaatgattagagcctagtgtgtcagaatgtatgtaccagtggattttattagctatgtcaggagtaacaaaagttacatcaattgctgaactattttgatctggtcgagtaagaacagtaggctcgccattatttattacgataaggttgagatcatctgcagtattaataagctgtgttccaactgtgtcattgtaactagatccccaaatagtatggtgagc

SEQ ID NO: 12935 - DNA, 527 bp, Diabrotica virgifera
  SmartBlast Evalue=1E-44; Info="UDP-Gal glucosylceramide beta-1, 4-galactosyltransferase n=1 Tax=Glossina morsitans morsitans RepID=D3TQM2_GLOMM"
aagcaggcggacattggcaccctccaaattgtagagctaaacaaaaactagcagtcatagttccttttcgaaacagagaaatacatttatctgtgtttcttagacacatgcatccttttctcagacaacagcaactggattatactatcttcgtgatagagcaacaaggagataagcctttcaaccgcggaatgttgatgaatattggctttgagcaggcgatgtcgatggaccaatttgactgctttattttccacgatgttgatttgttgcctgagaataatagaaatttatatatgtgcggcagtgtacctagacatatgagcgtagctgttgacgtacttaggtaccgattaccatataaaaacatattcggaggcgttacagcactcaccacgcaacattttagtcttgtaaatggcttttcaaactcgttttggggatggggagggcgaggatgatgatattttcaaccgactacaagctcataagcttgatgtgacaagatatagctctataattgctag

SEQ ID NO: 12936 - DNA, 530 bp, Diabrotica virgifera
gatgttctataaagacaatataaaggacggctaaaaagtttttttaggggaagccactaaaaagttttcaattaaacacgtcactgtcgcaagttgatcgtgtttactactttttacctagaaatttaccaaagactaactggaggagaccaaaaaacttaagaaagagaaaaagagatctggaaagttcgctgaaaataatatttcattttatttttctttgttatattcgttttcttcttttggtgataaccttttattatgcctcatgctccaagaactacgttgaagactccgttggaggtattttttagtcttatcatatactttccagataatttgttttttttttgttgtgagacgggtctatgacgtagatatcgtgtacttgtactgtttattacattcatttttaattagcaaaatcatatggaatatatactgcaaatcgtcttacttcaacataatctttagtgaagaaatgagaagtcccagatgtaaacaataaatatgaaaattttcgtggagcc

SEQ ID NO: 12937 - DNA, 515 bp, Diabrotica virgifera
ggggcctatgtagctacgtcactctgtgagtagaacagcattaaattcagtgctgtcgtatagtaaacggtgtttattttttgtttaaggtgaattttacttataatttgttaaacttttattaaaaatgaggtgtgccgtgtttggttgtaatgtggacaatcaatcacaagtttcgatacgaatattaagttttttagtttcccaaaagacaaaaaagtgcgatgtgtgtgaaaacaattatgtaaacgtaaacgtgcagaaaattttaacgttaacaaaacgcaaacaacgttaacaaacgcaaaatgcaaaaattctcctaaaaattttcgatgccttaaaaaaaagaagctatttcatcccaaaatttagccaaagcgggaaaaggcaaagtggattctggtagagcgcaaccaacattttcactgggaaacaagccacaattttaccaaaaaataattttatcaacgcttcgacgtccaaatcggatgccgctgtcaaaataccaaaaa

SEQ ID NO: 12938 - DNA, 515 bp, Diabrotica virgifera
ggtggggtcacatgaaaagaatgagaagaaacataccagtaaggaaagtatgggaagcaagaattcagaaaaaaagaaacagaggaagaccatcagaaaactgggatacaacaattgcgaagattatccaaaagaaagggaaaaccgtagcagaagcaagcagactggcgcaggatagaaaacaatggtcaaagtttgtgcacacgtgaatagacattagtcccgacactgaaaagtaaaagggacttaaaagactatatatatatatacatatatacacatatatatacatatatatatacacatatacacatatatatatatttattgtaaaaagaataacggagtccgcttatttttttattattgttttagtattttcttctttggctatttacactgttggacaaaggtttattcaaacctatctttttggctagtcccgggtggaagaaaggaaatgtttatgttaagtttgagacaccctgtatggaggacaaggtacaaaagtggaa

SEQ ID NO: 12939 - DNA, 530 bp, Diabrotica virgifera
  SmartBlast Evalue=2E-22; Info=Transposase (Fragment) n=1 Tax= Sphyracephala europaea RepID=A4ZGV4_9DIOP
gtgtcttaatagagcattgcttttgggcgaaaaagatgctgttgaagtcaaagcttggcttgataaacattattatgactctgcaccaggaaaatcaaccgttgagaaatggtttgctaaggatgtttggatgaaaacatcaaagagccgtaaagtgaagttgttcgagatagctgagacttcaaaggaatgtgtcaacttcaaagatatcaaaggaacgtgttagatatattgtggatgaatatttagatattctgagaataacgaatggatattctgcgagaagtgtttaaagctcttcaatcgtaatgaatccgattttttgaccccaaagcgtggaaagacgcaacagttagctggcaaagttatggcatcagtattttgggatgcgcatggtataatattcatcgactatcttgaaaagggaaaaaccattaacagggactattacattgcgttattggagagtttgaaggacgaaatggcgaaaacagctccatttgaagaaaaagaaagtgctacttcatcaa

SEQ ID NO: 12940 - DNA, 520 bp, Diabrotica virgifera
ctctggtattttaattgaattatttgttgggagttaatgcgttgttttatagttaaaataccaataattacggtatcatgtatggacaaccatccaaataaatagataactcaatttattgagttgcaaactcttcatacacataaaataaacaatccttgtgaaaatttcattttcatttgaacaaaaatcatgtgtactttgacaattttctcacttatgccattttcataaaatggcaacgatttaatggcgattttttaggaataacggctacaacggtcctaaaggttgaaaaagtattataaactgtcacataggccgttaaaacaacggtccaaggactagcgatagattaaccaatggcaaaaaggtatataacaactaaaaagctcttgatctcacgaaaacaacagtataaagcctacttgctctcattggatcacaattaaaacagtcaggaagcttgcaccattacgctactaacgagtacaacattccaagaactctttcaagtact

SEQ ID NO: 12941 - DNA, 532 bp, Diabrotica virgifera
cgatggagattcaaaacgaaatcggaggtagctcatatccaccttcagtgactgcacgaactcttctttagatattaagatatgtcaattggtgattttattgtggtatccaaattcatgtatgaatgcattcacttgaagggtcagtatcttgggttaatgtatcttggtcgtctttattttgtagatatcagattttcaacttctttgggtaataatttcttcattgcttaattttgtcaaatctgttaataacacgaaaacgttgataaataagtcgataagattccagacgtctattcaggtctcttatcagagtgtcgattataatatagaatgtgtggattttcatctcatcactagctgaaaagtttagttcatcatcggccccctcgtcaaattgaatttttctttttctctttcttatttctttatatgttttatttgggcacaattttttggcttccttgcggtaaagtaatttgaaagagcttcatactccttaatgacagaacccagatccatgattttt

SEQ ID NO: 12942 - DNA, 529 bp, Diabrotica virgifera
caatggacttagtcttcactcttattaaataacataagttcgttctcgttgcgagacggtattgtgtgtagtaaagtcgcattgttcgttccgttctgtaatcgttcgtaaatatattcagattttgtgtttgtaatggcaataaaacttaaaatgttgtttttgtttcaaaatgataacaaaagacagtttggacaatcggtgcaaagataagaaagctaaaaatgagactctcgacgacgctttgtatgtgtggaacgcgaacgtggtttacaagtgtctgtgtgccaattataacggagtttatctgctgcataggttcccaaacggtaaacacaatatccacttgagatatgcggaagagtttaacagtttggttactaaatttttactggaataacaattgtgaaaagtaaaaaagtgtcaataatgtatgtgttattatttataaacgtgcaaggtgaatatttttataaaatattttaatatgttgcaaatatatcgttaagaaataaaatgtgaaacaatt

SEQ ID NO: 12943 - DNA, 531 bp, Diabrotica virgifera
tcgatgttagatgtttaatttattcatcatgaaattagtggttctctttctgtgtttggttgtgtcacacgtttacagtggacctattaattgtaacaaaactgatgacaacatgacggtcatatcaccagaagttcctcctggctcaatacctgaaacaactttgagccagaatgatacgtcacaaaataagttgaatggaactaaatttggaaaaacttcacttttagatgtaaaagaaaacggttgtggaggaaaccaactgagagactttaatggagattgccgccctatagaaaattaatatataaaaattgttattaaactaattcgaattaattctattagaataagcatccagtgagttttcaatttgtattaaatttttaataaaaataaagttcataaaatcttgtgttgttctgaaggtatttgcttgtggcatttttataatcaactattttcaatgggaaataagccacaattttaccaaagaaatgattttattaacgtatttttttgtaaaattgt

SEQ ID NO: 12944 - DNA, 517 bp, Diabrotica virgifera
acaaaaattaaatttaacgccctgtgtcttttttctcggcaacattttattaaggcatatttggcccaatagccatgttttggtccaaatagcctgtccttggtctatgtcccgtagttatgactcaccatgtatatgaagcattaagatattaaaaacaaaactctgaatacaataattacaatattaactgattatctgttatgtttaaattatatagcaattgaaatttaaaattttcctagtaataaatgaaacatatttgttcttcaaattagaaaaactttttatggcatccataaaaaccaaaaaattgttcatttatttggataaagcttacataggtcttaaatataacgagcatgttgacctgttagctaaaaagccattgattaagttaattaaaactacctaatatcaatagtaaatgaaaaaatcatggcatataaatagtacacaagatatatagataaaatcccttatagaaattttaggtaaacaaaaagaaaatctgtat

SEQ ID NO: 12945 - DNA, 528 bp, Diabrotica virgifera
ttacttaattatttattctattctatttactaaatttaaataatttaatttatattttaataaaaaatttataaaaataaaataataatatataaaaataaataataacatattttaaaatatgaaaatttttaatcctaatttttatttaaaaattaaattttaataaaattttatttttaagctcatccctaaaaatatttaatattaataatataaaaatatttaattataaatatattgttaataaataaatttaatttatttcttaaaaaattagatatatttaaaaacgataacatttcattacaaaaaaattatttaaaatatttattttacaataaaaattttaattttttagctcttttaaattcgaaaataataaatatataattattaattaataatccctgatacacaaggtacaaaaaataaatttttcttttataaaaataaaatattctctcacaatactaattaactatcattaaataaaatttttctttacttttactaaaaaatatttta

SEQ ID NO: 12946 - DNA, 531 bp, Diabrotica virgifera
ttgtccctggaacataagatagaacgagttgtagaagagagcacaggtgctgattatagtgacgtaaaggctgaaaataaaaggttcatagacgacgatgatagagattcttccgatgaagcagtctctaattccaaacggaaacgttcgcaaatctggaactactttactagaaaaaaacctggcgaatatgtggcgacttgtaatctatgcaaaaaagagttaggttttagatcgacgacctctaatctgaaaaagcatttggataggaagcatcctaatattgagattaagtcggagagtgacgatgtgaaaaaggatgttccagaagttcctgtcaagacttgtttgatttgtctacagaccgatcagacagagaccagggagtttgtaccagtccaaaatttagacctaggagaaggagaaaagacctatatgactaaaatccaagaaattatgaatcaaccagtggtgatagacgaatcacacgtcctttgccagacgtgcgttgaagatatagagaaagtgatt

SEQ ID NO: 12947 - DNA, 531 bp, Diabrotica virgifera
  SmartBlast Evalue=2E-14; Info="SEC14, putative n=1 Tax=Aedes aegypti RepID=Q16T89_AEDAE"
aaagtttacaaaaatgagtgtctgtgataaaaacgttaatgttgatgcgtgtacagaaatcgtaagaaaaaagataaaagatgtcaagcatttaaaaaatataaacactgatgatatttatatacaaagatttctgtatagtactggttgtttagatacagaagaagcctttcaaagaatgctgctataccacgaaacaatagtaaaaatacccgactattatcccaaactaggccctaaagatataaaggatgtcttagatatgaatttctcagtagttttagacgattgtgataaggaagggagaccaatttattatgaaaaaatggagagacttgatccagcaagattaacttctatggacgtaatcgcagctgaagaaatttggttcgaatatatcttaagcagacatcctgaaaaagcgggaaaaggcttatgtatgcttgttgatgtcagtggatatagctggaaactttttaaatggttaacgccaagtgctctatctaatggaagacgtaaaatagacgctat

SEQ ID NO: 12948 - DNA, 526 bp, Diabrotica virgifera
  SmartBlast Evalue=8E-23; Info=Endonuclease-reverse transcriptase n=1 Tax=Bombyx mori RepID=D7F170_BOMMO
gtttgacgaacatactttaaaaaaaatattcggcaagttttttagttatgaacaaaatctaggcttacatatgctctttatcgattttaaacaggcttacgactaaatctcacgaaacgggctatacgaagcaatgagagcactaggaatatcagagaaactgatacgattagttaaaatgacgttaaccaacacagtcaataaagtcatgatagaaggcagtttttcaaatcagtttaacgtcaacagaggattaaaacaaggggaccccctgtcaacagacttattcaatctagtactagaaaagataattagaggagccaatatccagacaagcggcacgattcttaacagaagacaacagtgtataggttttgcagatgacttgatgtttctgacacgttcaagaacagaacttcaaaaaatgttcaagaagacgcaaagaaaatatggcctgactataaaccaaggaaaagccaagtatatgaaatgagaggagaaacgctgaagaaaataagtggattac

SEQ ID NO: 12949 - DNA, 532 bp, Diabrotica virgifera
gtgttggggtaaacttctagtttttacagttttggttggagtcttcaacagaaatatgaacagtattgttttattggccgtgtgcctgttgattgtcaccaattacacggcaaatggcgtgacagcaccagaattaaaaaacctctgggacgattcacttcaaaagtgtaatatagcgtcaagcgcggttgacaaaagttttgagactggctccatggatccttcattagtgaaaggcattgcttgcttatacaaaaatctgggagtcctcactgctgacaatgaatttaacaaagaattatttaaagcacatttatcgttatttgtggatgacgctgaccaaattgaagaaatagcagatgcgtgtcttataaagaaggctactccggaagaaagtggcatggagttgtttaaatgttcaactaagaagatgaaacattaagaagttatttggtactaacatataaatgaaatttcagctacttgtaatttgttacttgttcttataaataataaagtaaatgattaatga

SEQ ID NO: 12950 - DNA, 528 bp, Diabrotica virgifera
  SmartBlast Evalue=2E-13; Info=Gustatory receptor candidate 59 n= 1 Tax=Tribolium castaneum RepID=A2AXC1_TRICA
attttaaaatgttctttcggatgctggtattattctccctgtctctcatctatatagagattgccgagaccacaccggtactcgtccagacttctagacatttccgttatggagttcctggatacattcccgtctacataagaaagggagataccccactcgaagaaataaatcctaatttggctgaagctttctatgtcaatgctcagaaacacaacagaataacttatggcagatttattggggataaatctgataacgaggcgattaaacccggatatccagatggaatcaaaatttctgaagttgacaaaacttttttagatacagatcttgatgttgaagatgaagaaccatcggttagcaaacctcaggaatcaaaaactgagaaaccgtccagtaatatccaaaagataccgcgagcataacactgtgataaatagacttaaggtatttatttttgaattgtaaatacatcaaattgttacaataagtgagtctttaagtaaacaataaattatttaagtt

SEQ ID NO: 12951 - DNA, 531 bp, Diabrotica virgifera
  SmartBlast Evalue=9E-30; Info=Spermatogenesis-associated protein 20 n=1 Tax=Camponotus floridanus RepID=E2B1K9_9HYME
gtatatccaattcgatggccgcacatccctaacggtgtagacaaaaattaggcaaatttcgaaagaagaaataatctaatcacataaatattttgaaattgtcagtgctatgcctatgacccgtggggtatctaattttcaaataaacactttgtttagacgcttgtcgaaaaccaatggagatctgcgtctgtcaaacagtgttgtagctcctgctgttgttaacacctccatttcaaacgtgaatttcaagttaaccccaaatattgcatcagtaaccaatacctattgccccttgcactcgtttagagagatgtcaactcaagcagaagcaaagaaaacaaatagactagcattagaaaaatccccctatttgctccaacatgccacaaatccagtggattggtatccttggggacaggaagcgttcgacaaggcaaaggcagaaaacaagttaattttcttatcggtgggctattctacttgccattggtgccatgtgatggaaaaggagtcgttcgagaatgaatc

SEQ ID NO: 12952 - DNA, 529 bp, Diabrotica virgifera
caataaattaatgattgcgagtgcgtctgtcttttacgtcattcaaaatgaactcacatatgcaacccattcaacttttgtatattttgttttattattcttaataatttttaacgtatgaccttatttaaaaggtaatttcatatctttgatttcccatgttaaaattggctttacagtaaaacctccgttaaccgaaatattttggggggtaccgtttcggttaaaatggcattgttttttgtattcttcttgtatccaattacatagtattggagaactacagctgcaaagcatcgttgtcaaaggaaaacacaaaagaaaatagtagatatcttaaaaaacactctaaacatgttcattttccttaattttattgctttttttaaatttactttttattaacgaaattatggaaactgtcaaccatttcggttaaacgatgtttcggttaaaaaggtttcggttaacggaggtttgactgtattcatatttttatcaaatctgtgaaacttcttcttgacattgt

SEQ ID NO: 12953 - DNA, 530 bp, Diabrotica virgifera
ccatactatcgtgtaattgattttagttaataatataattttttacgtaagttcttaactgctgtgtgtcttgcgaagtccattagcgttttttattaattttcttaaaattttacgttttgttttgtataataaagtggccgcaccaactcatcctatctcggtctcgagcgttatttatttattttgttgaatatgtttatgtgcaaaaaaagaactatgtctcctcgatttttatgttagcgcgactgattttggcaactgtacacgagtccagtttttcaagcaaataatcgtggaagattgtggcaaaattatgtgtcgtcaccgaaattatggactggtgaaatcgtgaagtcacatgaggtggatggagtttgtgaaccatttcattaaagatctcagtaatcgagacatttgatttgttcttaaattctttattgttatttcttttttattattgttatttctttctgtagatcataacgctagtttctttccatctctacactcgagtactcacaacctct

SEQ ID NO: 12954 - DNA, 531 bp, Diabrotica virgifera
  SmartBlast Evalue=2E-27; Info=BEL12_AG transposon polyprotein n= 1 Tax=Anopheles gambiae RepID=Q4JS97_ANOGA
cttatgaagacttttcaactgtgctcactcaggtggaaggtatactaaattcacgccctttaagtcctatgtcctccgatccttcagaccttttacctataaccccggctcactttctgattgggaggtccatgaatttcataccagaagtagacttttctaatgtcaaccctcttcggttatcaagatttgaacatcttcagcaactccatcaacatttttggcgaagatggtctttggagtacgtttcggagatgcagcagagacaaaagtggaaggtgaatcaattccaaatcaaggttggtgctcttgtcctaattaaaagtcaggacgcacctcctctccagtggtccctgggacgtgtggaacagttgcatccaggggctgacaacatttcaagggttgtcacacttaaaacagctaaaggactcgttcgtgtagcagttgtgaacatttgcccacttccaagtgaataaaagtcgccaggtgacagtgattatttattgactgtaatatattacgtttaatttc

SEQ ID NO: 12955 - DNA, 531 bp, Diabrotica virgifera
tgaacttatacataagtatatacattttttaagacagtttcaaatgatacactatgatacactgtggtttcaaatgccgaaaaggtggtcatgatttttaaaagcgtatattgtccctacacttaggaattgctttcgtattgaaatgtttttggcatcgcttattacgaatctgacatttttttgaaaaacaaaatggcggatccaacatggaggaaagttatagaaaatatcaatcaaaacgaaaaactttttgtcagatttggtagtttaaaggtcgctgattacaaagaaagcaatttgaaaattttattttaaacgcaatttttttgaaattttatacaagggacttttgaaattgctgattgccaatacattttctttttgaagtacaacatttagaacttattactttaggtacaacggcccatacataagtaacaatcgccagaatcatgtaatatatatgcttcatttcacacttttgtattcaaacaactacaagcaatgcataggaaagtgaaataaact

SEQ ID NO: 12956 - DNA, 521 bp, Diabrotica virgifera
cgctcatctaaagtcccatctacacgggtaactcttgaaaattttattgataatcataccccaccattcgttttaaattaccaccaattgtctttacttattgataatgtccaaggctcccccgacactattagcgtcgttaaagaatttacaactgatatggctggtttactctatcttttacaaagcagctatcaatatgcaaatgatagatctacaaaaaccaagtttacaaaacttcaaaagaaactacacaactatttagggaataagatttctgacttagacagtgactcttctgtagacaattgttcagtatcatctaactccgaatctgttaacaacattcaacgcgatacttcaatggaacattgatggatttttccatcgtctccctatgctacagcttcttttatctgaatattctccagatattatttgtctacaggagacaaacttaaagaccaatcagttgtacaattcaaaacatttcacttgtttacccccagcatgtagcacat

SEQ ID NO: 12957 - DNA, 526 bp, Diabrotica virgifera
  SmartBlast Evalue=1E-14; Info=Endonuclease-reverse transcriptase n=1 Tax=Bombyx mori RepID=D5LB38_BOMMO
cttctgagtattctcattttatgtcgccaaagcccttacaatatggaaaagaaaatgcagtggaatgggcatccaaatcgacgacaacacctgcctgtacacccttcagtttgcagacgatcagataatatgtgcaaacgataaagaagatttggaatatatggttcgcaaattgaaggaagaatacgaaaaatggggattgcagatgaatgtagaaaaaacacaatatttatgcctaggtgaggattcaactgatatgatattggacaataatcagaaaataactagctgtgataaatataagtatttgggcattaatttcaacaaggaaggtactgacgatgcagaaattaagagcagaataaataaagcaagaacgataattaaatcattgaacggagttttgtggagtaccgagatagggaaacaaagaaaaatgcgaatatacaacaccatgattaagagcacattggtatacggatccgaaacatggagaataaaggaacacctaaaacgaaaattagaa

SEQ ID NO: 12958 - DNA, 530 bp, Diabrotica virgifera
  SmartBlast Evalue=2E-31; Info=Odorant binding protein 24 n=1 Tax=Tribolium castaneum RepID=D6WNH1_TRICA
aaaaaaaacactgaaataatgtttaaaacagtgggttgcttttttgcgctggtagttctagtggctggccgtatggagcttcccccagaacttcaagaatacgttaaagatcttcacaatatttgtataaaaaaagccggagtttcagaaagtgaccacgcggcgtacgatatagtaaataatcctcacgatccaaaacttatgtgttatatgaaatgccttatgttggaagcaaaatggatgtcacctgatggtgcgatccaatacgattatattattaatatggctcatccaaaaataaaagaccttttggaagccgcccttaacaaatgtaggacgattgaagaaggaggagatttgtgtgaaaaggcatccaatctaaacttttgtttatccaaagcagatccagagaattggttcttggtttgacactccaaagattcgatatggaccttaagacgttaatactataagacgtatattgtttaaattattttttctgaattgaataaaacctgtaaaaaggtatg

SEQ ID NO: 12959 - DNA, 527 bp, Diabrotica virgifera
cttaaaatccatgcaacggtcgggacgtatccatttctttatcaaattcagtagatctttcataatacacgtgttatctcttaatatctagacatacaaacgctatcaaaactttgtaaaagccgccactttagctaaacactacagcagaatgtccttcatgataatgacaaacggacaccaaaggagaagaaaggcatcacgtactatgttatgtttactgtacatttataacttatgatattatctccaattcatatcattatactttctttttcgcgtggcaatatgtttaatcccaaatattaatacttcgtaaaggaaaacggaaagtcgattacagtaaaaaagcaatgtattaattgtgaaatgtaactatatcacaaatgaaccaattttttttaaattgtccagaaaccctcgaaatctcacgaaaagtctgattttttaaatatttttatactacaccaccttgtaaccatgatgattattagaaaaattgcatgattaaaatgtttgtggtaata

SEQ ID NO: 12960 - DNA, 530 bp, Diabrotica virgifera
  SmartBlast Evalue=2E-76; Info=Ultraviolet-sensitive opsin n=2 Tax=Culicini RepID=Q1HQJ9_AEDAE
aatttctaaagtgaaggcttttttaatgatcatcatggtatggatctacactgtaccttggacgatttttcctttattagaaatttggggacgattttctccagagggctttttaactacttgtagctttgactacttgactaggacgttcaataataaagtatttgttggtaccatctttacgttctcatatgtcctcccaatgtcactgatcatctatttctacagccacatcgttagcaaagtattcagccacgaaaaagcgttaagagaacaggcaaagaaaatgaatgtagagtcccttcgagctaaccagcaacaacagaatgaatctgcggagatgaggatagctaaggctgcactgactgtatgtttcttgttcgttgcttcctggacaccttacgctgttctggctctgatcggggcgttcggggatcagtcgttgttaactcctggagtgtccatgatacctgcatgtacttgcaagctggtagcttgtatagatccttatatttatgccatcagtcatc

SEQ ID NO: 12961 - DNA, 530 bp, Diabrotica virgifera
gtttacaccatatgtgtcattgccttggcaagtcttgtagaggccgattttccaagatatggtcaacttagatctaataaaacaggaaacatcttgggcattgatgagcttaactcggtgatgcatccaatatcctcgctggaaagtccaaaatacaagtcatggatatttgaacgacgtgggtatgttcgtaatgaaccacaatttctcatcaaattaaaaggcaaggcaatatattctttacaactaccaagatgttatggctcaggtgagttggatttaaatatagctaagccatttcaccgcgttaaaggaggggctgaattttttgaattagattcaaaaaaatcgggcaaaatttatggttgtaatggaatgtgtctttacgttgaagaagcgacaaagagagtaaaagccaaaaagaattgcgatgatgaacccgatcatacattttttatagtcgaagactaatatgtcgaagaataaatacacgatattttagaccttttaatttttgaaatgtatggatt

SEQ ID NO: 12962 - DNA, 530 bp, Diabrotica virgifera
gttgttgaatggtcacattgaaaatgttgaaaattgcgctgatatttgtaatttgtgcttgcacagcacatattgttagctcagctgcagtagaaacaagtgacaaccaattggttttgcatcaactccgtcgactacaaagagacttacaagctagaggctcagtagacttgtcaatagacaacataataaacacggttataagcacggtcataaatgttgtatcaagcatacttattaaagctttttgtggtgctataacaccttatttacttctcgtatcagtctttagaagtacagttatcaaagctcttagtttaattgtgcaatttttaggtgaggtagccacatcactgttgccagctttgtctgatactgttacacaaattactagtttcatatctactgtagattccacaattggtaatgccttagattatgtaaacaaagcaggatgttctgtttcagtgtaaatgcacctttaatgtagttgtttatgtaaaatgtgaaatattaaaaattttatttgg

SEQ ID NO: 12963 - DNA, 528 bp, Diabrotica virgifera
  SmartBlast Evalue=6E-77; Info=Cleavage and polyadenylation specific factor 4 n=1 Tax=Bombyx mori RepID=Q1HQ97_BOMMO
atgtcggtgtctgcaatggggaccatgtctacaaaaacctctatcataccatggacaatctttgattttactttctgggtcgatatgaaggaatggacattctttattgtgacaagcattgaaacgtgaataaaaataacattcaggcattttagtcatatcgtattcgtggaggaactcacactgatcaccttttttgcataatcctctaagccaatgtttacatacaatggttctatctcctctaacatgtctgaaagggcattgtggaccctttttacaaccattgattgtgctaaaaaataaacaaacagctgccgttgatttgtccattccttgaaatggtaatggaagtgctccatattgttcttcaagagctacttctatgtcgaatttaatatgatcaacattggctattacacactccatttttaatcgcttatccagacaaaatattctacaattacttaaaaatctacatttgtttatgaaaactactgttaagtttaaaccacaccgcaatcccac

SEQ ID NO: 12964 - DNA, 531 bp, Diabrotica virgifera
  SmartBlast Evalue=1E-33; Info=Cysteine-rich protein 1 n=5 Tax= Endopterygota RepID=E2BVJ5_9HYME
taaaccggcagtgagagtattttgtgttttcggttctgctccgtttgtggcgtcgtcgctttagtttagaactagcagtagtagtttcgtgagtacctctacctagcaggagctgcaggaatatttaaaaatgcccaactgtccaaagtgtgagaaaccggtttacttcgccgaacgtaaaacatcccttggtaaggattggcacgcagcatgccttcgctgtgagaaatgcaacaagaccttaacccccggtagccacgcagagcacgaaggaaagccttactgcaacaacccctgctactcagccatgttcggacccggaggttttggacgtggaggagctgaaagttatgtctacaagaagtaaatcgggagtatcaggagttctagattttaagaccatttttgtaataaaagtattatatttttttcttatataaatttctgaacaggtacaatatgttgacagagcattccatgtttttgtattcttgttttcgggaataaagttttattttagttttaaaaaaa

SEQ ID NO: 12965 - DNA, 523 bp, Diabrotica virgifera
gaaagacgacctgtaaactatgaatataagatactgaaggacaaaggtacaagagaggtttgaatggaaggacatagtgaggcaggcaaacacccatccagggttatgatgccaaaagaagaagatgatgactttattgtgcaatatatacttctatattcaacagatgttttaatataatcaaaatactgttattatataagtagtagaaccaaccttccaataccaccttcactttgtgagggtgtaacttttggtttttaggcaacgtgcaattttcaaatgataattgataacgtggttattgtgtttgtaaatactattttattgttatttggttgttagtattttttactattttatttaatacgatcaaagaaatttttgacacaaacagttttaacgattttatttttattgcaacgtttaaagaagctattttttctgacagctttttgcgttgttcgggttaattattatttagataatatccattttaataataaaataaaatgtttaatcg

SEQ ID NO: 12966 - DNA, 529 bp, Diabrotica virgifera
ccagaaggtcaaaacatcaaatgagcaaattattaaacaagtaccttcaggtatcttagtaacaggttattcctgctattataaaatatcagatacaattagaggtataaagcatcgagaagagaaaggcttaaataagaatgaatggtccctcatagatttacggtcagttggtacagtccaagttggagaactatactttgctcttgctcataaccaatactatctgaaggtggataaagatatctcactcaccgattttaagtgggactttgaagaaattgcgctccctgaatggacagattttgataagattaatacgactcttaaagaactatccaacagaccaatcaggcaacttgatttccatccttatacactcgggacaaaagtgggaggtactgtcattgtaattctattaatctgtgggatagtgctaatgatagttttatggaaaagaaataggaagatatgtagtgaccattctaccgtgattttgtcgaaaatagatccaaattcttctgacctc

SEQ ID NO: 12967 - DNA, 528 bp, Diabrotica virgifera
  SmartBlast Evalue=8E-29; Info=Pol polyprotein (Fragment) n=1 Tax=Drosophila buzzatii RepID=A1BPH1_DROBU
caagggttttggatacacctaaatgacctgctgtaggttcgttgtggtacatatggaggatagattttctgtgtggggagggaacaaaaattttccaatccggagaggaatcgcagaatttggaacgagagaagacatgcttgtataagatattattttcaactttaagagaaggatacttatgtgggtcattggtaaccttctttattaaggtgttataccaattgtctctagtgagattagacagattgagaactgaaacttctgtggcattttctggaattctggaaagggaatcagcaacgacattaagagaaccgctacgatgcactatgtcaaatttataagaagataacttcattatccatctagctagacgaggagaagggtttttcatagtgaaaagccactgaagtgaagcgtggtcagaaattacgcaaaaaactgtgccttcgatataacctctaaatttttcgactgacaggaggatggccaaaagttctttctcggtcgtgctgtacttgcgtt

SEQ ID NO: 12968 - DNA, 530 bp, Diabrotica virgifera
  SmartBlast Evalue=3E-25; Info=CG2921 n=5 Tax=melanogaster subgroup RepID=Q9W298_DROME
tcgaaataatcataatctttaagatggagtttcgtttcgaatatctgtttgatccttctatacatgtaacattctgttaacagccagatagtatgaaaatgagtagtatgtccttcagcaacactttgcttcttaatatattcattataaatatttacatctggagcatcgccaattaacaattttaatggcttgtttgtttgtacctcatatttgaactctgatatttctcctataattgctttcaactcatctagagcttcatttccatatttttctttaatttctgatttatgcctcactaaattatctattagatttgttaagatcactggcattcggtgggcaactgtgtagaatgcaaaactccttttgtaaaaagcagaaagatatacatttctaggagttttcaaatccaaactaccgcttgaaccgcagtcgcaggtcactggcaaattgtcagacatattcaaattcctaacatacgttaaaactttaaactctaatgatatcaattgacctctatctct

SEQ ID NO: 12969 - DNA, 528 bp, Diabrotica virgifera
  SmartBlast Evalue=1E-24; Info=Nitrilase 1 n=2 Tax=Danio rerio RepID=Q66IE6_DANRE
taatcagattcttgcaataatatatttttttctggaatactcacatcaaacaaatgtgtttttctgtacaaagacgatatgttcccagtatcatctattaacaagtgagtgttgtacatagtattgttatcaattttttcatgaaaaccgccaactgagagccaaatttttatttttgtttgcaattttcttatattcatctaccagttcgccgtccaaactttctgctaggctcctagattcgtccttattgtttgcaatataatcacagccctcgggtaagaatacaacttttgcattatttgttactgcctcgtcaactaagcgcttcactgtaaccaaatttttggatttatcattacaagctgtaaattggcaaaccgcaactttacatttatttattgaagacattttacttaaattacgaaaagatttagttactgtcacaagtttatgacaggttggcaatttaaacattccttaattaatgcaaataaaagggaaagggattactcaaactcaaatttg

SEQ ID NO: 12970 - DNA, 529 bp, Diabrotica virgifera
  SmartBlast Evalue=3E-17; Info="General transcription factor 3C polypeptide, putative (Fragment) n=1 Tax=Ixodes scapularis RepID=B7QJM5_IXOSC"
gcaagctagttatggaagaatcaacaagtagaaatttgactgctgttgataaaagttttgtatacaaactgcccagaaaacttgtaagaatagaatatcctggtcttgtaaaaaatgtatcaaatgctattgagactgtaggaggaatagacagcatagaaacggctatagtggatgagagaaaaaaactggaactgcgatttcatccagacaacaaatataacaaaccttgtacatctgatcgatatgacaaccctagtttattaataaaaagtgaaagaaaaggatggacagtatgactatgagattattgggtatactgccacaaattttaagtttaacaggactgtagactttcagtacttacctattgtacaagatgataaaacaggatctactgaattcatttactatgacattatgccaaaaaaattggctgacttagaatacttcacatccaaagaagctgtcaaccagccactgtttctactacctcacaacttttgtcgatacgatataacacaccaaa

SEQ ID NO: 12971 - DNA, 529 bp, Diabrotica virgifera
cgaagaagagatccaaaagatctactagatatgaataaaaatgatctgcaaattattctaacaggacactgccgtctcaagaggcacataaataaaatctgtaatctgcaattcgcactttctgtcatactgaaggcaagataacggaacacttctgtgcaactgcccagggttggatagaaggctgaatacatatgagtattaccaactcgagccctacgacttagagccctagaaattacaccaaaggctgtaatagactttgttaaaaaggctgggctgaaaagaaactttaacatagggatgagctacaatagacctcttaggtcgaatggaggggtgattaagccagagacatgtaaagaggatagacttggctagggatatgccactcaatgcatcggggtgtaacgtcgacataggattgagtggtctagccatctttgtcagtcacatgcgtgggatcgtttggttaaaagagatagatagaccaccgatcgactgtttgcatgctgtttccgcgttacgc

SEQ ID NO: 12972 - DNA, 529 bp, Diabrotica virgifera
atggattttaaaatatggctactttgaaatatccttataattcaagttatgtattgcttcatcctattaaaggtgttttaatccatgtcatcaagatatcacaaactcatcgacgaaaatacctgattttggttagaattattggaataataagttttgtttattaattgagttatattcagtggcggatacagcatcgttaagagggagggccgattggctaaatttctataaattaaatgaatgtttttataatctttatatgtacacaattaaaagaaaattaaatcacttggttgcgcgccgccttgatccgccactggttatattgaagtagcatgtaacatttttatgaataatttatctagattgctgtgatagcgaaatatacatcttaacatcatattaaaatatcttcggtaattcgttaatttaaatttgaaaattggtttcgttataatataaaattatgatacaaatgaacagatttgtagtcatattgaacctagaagtggctagaacagcaaac

SEQ ID NO: 12973 - DNA, 531 bp, Diabrotica virgifera
gcactgcagtgcatattacggtttccgtgtatgcaggctcactcattactatagtgagtgatatgagacgtaatgagatataatatataagtattatagtatagctccccgtgcgttacaagctttagggaacgagtttcgtcagtatgaataacggcctgatccatacaggactaacatatttcccaacagacgtaactagttcccatttggcatattttgtttaaaaaatttaaagtttcgtcggataaacatacggctaaattatatgatctgatacgattatataatgagcgaatatttgaaacaagaacaagaaataagtgaaggaaaatctaaagtatataaagtagataaaaaatcgaccgtgtcattataatacaatactacaaaacagaaacatgaaattctaaaagcatatgtaaagaataaacagatgtatagcatgggagacagaacagtagtgagtatgcccagtgggcgagatattatgaccaccattccacatgagtaaatgtagtctcatctata

SEQ ID NO: 12974 - DNA, 527 bp, Diabrotica virgifera
  misc_feature (512)..(512): n is a, c, g, or t
  SmartBlast Evalue=6E-42; Info=Hormone receptor in 96-like protein n=1 Tax=Tribolium castaneum RepID=D6X2K2_TRICA
aaaacgtttagtcctctttggaaaggcgatgaaaatattattctaatactatgtatgattcttttgttttcgccagacaggccgaaggtcgtacatcaggatgtgataaaactagaacagaatgcatattactaccttctgagaaggtacctcgaaagcatctaccccggatgcgaagctaaatcagttttcttgaagctaatgcaaaaacttggtgacgtgagaagagtcaatgaggaactaatcagcgtctacttaaatatcaatcctacagacgtagaacccctattgattgaaatatttgatttgcatcgttagcaaagatattatactaggtaacattttctagaagaagtcgagatattgtttcatgtaactgaaacggtgagatcattcctttaaacgaatttagtctattagttttgtcaagtcgattgacgttcaggcgataggaagaaagaggtttatgtagaatgctagtcatgtggaggacttcgtctgtagaatttcgngagtcagtgaagttg

SEQ ID NO: 12975 - DNA, 518 bp, Diabrotica virgifera
caatcctatttttctatataatctaacaaattcaggcacttatcatagcggtaaactagctttgaaataccattgtctaaaattctgccgcctgagactttaaccaggtgtttaacgccgtccccatagctccggatcgttatcaaagcgctgcgttgcaagcaaggtcttcatcgcttgaaacaggtggtaggtaggaaacaaaggttcactttgttcttcatagtgcacattggttcggctatttttgaatttaatgcaccattgacgcactccaccttcagtgatcacattgttcctataagcagcacaaatttcgcgataaatttcaattgatttgctatttttagtcaacaagaaccgtagtaccgttcgcacctcacaactggcgaggttttcgatcgcggcacacatttcaaacagctgttgtaaaataaagagaagagacagtaacttcgcgctagcacggctggacagttactgaacggaggcacgccacgatgctaagacggccgcgc

SEQ ID NO: 12976 - DNA, 521 bp, Diabrotica virgifera
gttttagttaaataaaatgaaccaatagtggatactgaagttagaaaagctgtctggaagtaattgttagtgaatgaataaataactgatggttttgtacattgtgatttcataaagtgaggttaaccatgcctttagatttgtgtgcaatatgcaatcactccattgatggtgaggagaaacctttatactgcgactgctgccgggttgtgttccacttgttagaaggatgttctggcctttccagctcagaagtgagggctgtggtgttacaaaaaaggaaccttatatatctttgtgtggaatgttactgcttttaagtcagcgcccatggtggtcagaaaagtccaggaactccagcaagaggtggctggccttaaaaaagagatcaagcagttaaaatcttccccaatgctaaatacagaggaagtactttacgaggcccatgaacgatttgtacgctctaaaaaccttatggtgtataatgttcaagagtctatagatacaaagctagaagataa

SEQ ID NO: 12977 - DNA, 526 bp, Diabrotica virgifera
  SmartBlast Evalue=3E-63; Info="Myosin-2 heavy chain, non muscle, putative n=1 Tax=Pediculus humanus corporis RepID=E0VV15_PEDHC"
tggattgaatggattaattcgtgaattatgccgagaaaacgaaatggtgagattccattgcccgacggttgggattacggacgggactatgatggaaaagtttatttcatcgaccacatatcaaagaaaactacgtggattgaccccagagacagatataccaaacctcaaactttcgccgattgtatcggtaatgaattacctttaggttgggaagaagctttcgatggccatattggtcggtactatattgatcacgtaaatcaagcaacgcaactagaagacccacgacaagaatggagggcaatacaagaagccatgttaagggaatacctcataaccgctcaagatgttttagaagccaaaaaagatatatatcaagtcaaatctcagagacttctcttagctcaggatgaatataatcacctcaacaacgccttaacaaatcttaacacttccaggactagtttgtgttcgtctagcagcagcgttagcacgaagtacgatcctgaccttttaaaatcgg

SEQ ID NO: 12978 - DNA, 529 bp, Diabrotica virgifera
atttttgatctaagtgacgaaatgttagcataagatcatgaacgtgaaatgtccaaataaaatcagttcatattttataaaaaatttaataaatgaaaatctgtaaattaaaaaaatcaacttaaattaaaaatatctggcataaacttgtacgttgtattctaaaccatggtttttactggagttgaattcaaagttcacgaagttatggttaacaccaccatccttgatttcgactgttgaaccctttgaagcatccttctgactagtagctatgatgcagtagattttcttgtcaccataatacttggctgtggttgatctagtgacaaaaggtactctacttttgtgcacgtgctcctgatgaaccaaatcggctgcaactgcgtttaagcagttcccttcgcgcagttggaattgagcaaaagcatcagctagttgaaaagcgacgaaaaggcagaaaaatgcgcaaacgatttgcttcatgtttgatgttaatttggtagctttcaaatcccaacacaatgga

SEQ ID NO: 12979 - DNA, 528 bp, Diabrotica virgifera
gaaggtctggccagtatactacgaagacaaagatctaaatatttcactcaaatgtcatgtctgctctactctacggataggctattgattatattcaaaataagatagctaaaaggactacaacgttaacgggattttattgtcttaatagtcaatggacctctaaatttgaaagaatcgaggagtgctgccatttgaatgggtgcgtttttgagaaatgggtgaatggcagctatgtacgccgttgctcccgcttggcggcgctagtgtagttgggggtcaacgttttgacatttcgtgaagtttgtatatggtgtttttgtgtacgatttaataaataataaattatcgcagaaaaatacgaatattggactgtttgtgcgttgaaaaacaaattaagaaaaaggaactcgagagttactggaaaaaaggaagcccttatcgaaagataaactatgttaatcatcgttttaatgttttatttctcaaatttatgtttatcattttattttctcaaattaaattcac

SEQ ID NO: 12980 - DNA, 528 bp, Diabrotica virgifera
gtttaggcaatacgtaaagtatccttaacaatagtaacctatacttattgtacggttatagagtatattcccataggtaagctggttaagagtagataacgatttttcatatgtaatttaaagtattatctgcataaatggcacaaagaatatttgctacgagaggtatatggttcaaaatgcatacagtatcacgactaataagttatgttcacatacatgtagagtacttacagttttattccttgatgacgtgtcacatcagagctctgattgaattccataatccatttggttcatttgtaaggcactcactaatacgctaaataaatcatcgtcgataatactgagcagattgaattatctgagcggtataaaacgatagcaaaaaaagccggtaaaatgcggcctttttacgaatagcgggagcgtcgatagattagagatgattctcgttaggaagcttttgacgatctgccccggcgaggggttcaaatgcgagtctcaacaataacctggagtttccag

SEQ ID NO: 12981 - DNA, 526 bp, Diabrotica virgifera
  SmartBlast Evalue=9E-77; Info=Probable ATP-dependent RNA helicase DDX5 n=1 Tax=Salmo salar RepID=C0HB50_SALSA
agaactaatctgaaaagatgcacatatcttgtcctggatgaagctgatcgtatgttagatatggggtttgagcctcaaattagaaagatcattgagcaaattcgacctgatcggcaaactttaatgtggtccgctacttggcctaaagaagtacaaaatttagctcaagagtttttgaaagattatattcaaattaacgttggatctttacaactatctgctaatcataatattctacagattattgatgtttgtcaggagtatgagaaagagagcaaattaagtactttgctaaaggaaatcatgtctgaaaaggagaacaaaactattattttatgaaaccaaaaggaaagtggatgatattactaggaaaatgaaaagagatgggtggccagctgtgtgtatacatggagataaatctcaacaagaaagagattgggtattacaagattttagaacaggaaaggctccaattttagtagccactgatgtagctgctagaggtctagatgtcgaagatgtaaag

SEQ ID NO: 12982 - DNA, 525 bp, Diabrotica virgifera
gttgcttcaccagaagcgaagttagaaaactattgggtcttccaagttgtgcggtacctttttcgctttccggtgacacaattataatatatccgcttgtttcaactgcgttgcttcaccagaaacgaagctagaaatctataggttctttcaagttgtgcgttacctttttcgctttccggtgacaattataatattatatctgctttttccaactgtgttgcttcaccagaaacaaagtttaatttttggtttgtgaatttttttttatattttcaactcaggcgcgccaaaaccaacaaaccactcggaaacccgtccaaatacgtattgcgaaccatcaaagcttttgttgaaaaaccgacagaagttagattgtggcgcgccgtgtgcgtgccgtttgtgcgccacttgaaaacacgtactaatctgacgaatatgcagcgcgcgagcggctcgcacaccgagcagagcgcatatgtatacctccctttacgatgaattctctaacattttctgcgagtt

SEQ ID NO: 12983 - DNA, 528 bp, Diabrotica virgifera
  SmartBlast Evalue=3E-23; Info=Niemann-Pick C1 protein n=1 Tax= Harpegnathos saltator RepID=E2BH80_9HYME
gatgtatgttttatgatacctaaggtagaaaagagtcttctacaatttctggactctaacgatactcgtgcagacccaagctcccaaatgaatcctgcattatactgcagctttgtcgaatcgatgaagaaagagtgttacgtcaaaagtatactagacttgtggggatttaagaaaaagacaattatggagcttacaaaggaagatattatcaatgccattaatgttgaatctgatgaaatgtttggaaaactaaaaagccataaagatctccttggaatggttgaaaaaaacgagactggacatatcatcaaagctaaagctttatacaatttttggtatttgacaaagaacttttctgctatcgatatggataaagttggaaatatggcaggtaccagtgattgggcaacggaagaagccgtagattgggaaggtttattcctagaaatattagagaaattcagccaatcaaaagaaacgtttttactacgcaggtagaagtttcggtgatataagcaatgcagc

SEQ ID NO: 12984 - DNA, 529 bp, Diabrotica virgifera
  SmartBlast Evalue=5E-37; Info=Proteasome maturation protein n=1 Tax=Camponotus floridanus RepID=E2AY56_9HYME
tctatattaaatcgtttattggatacaaaaaaagtaataagtttacttaaacacctataaaatacctaaatacttttctacgacagcatgaggttgtcctgagaattccaaaaactctgaggtaccataaacatcttcgggtcctacatctaagtctctaccagtgagaacatcgtgcataatattagaagaaggcaagaaaggcaaccttccgattttcttagatgatttcagttccatggctaagcgtaatggtgcatgtaagccttgggtgtttgctaatatggtcatattcatctgttgtctgtttgcatgatactttgattccgaacccagcaactggtgaggtacttctgtgctacattttgctgactgtagaccatatttcattaattcctgggctccaaatgtgtctccgtgtatatcaaagttttctggagccgaggctcttggtttcactgaaggcaatgcaaaactcattttcagaattattgaagatttataatttttcaagtcacggtattgtatt

SEQ ID NO: 12985 - DNA, 530 bp, Diabrotica virgifera
atttgaacttaaaataaattatgtatagacaaatattcaatagatttttaaaggcagttaaagtaccaaacgacatcgtcagaagaaatataagttgcagttcaagagtttttaatcaagaatttcaaaatgatcgccctgttaaattttctgccagtccagctagtcattacaaagcacagtctagtagaactggagtacattacgaatctagattatggtatgaaccttatgtgattatagcaagtatttcagtttttttaatttacttcacaattctaagagaagaaaatgatatagatgaagaactgtctcgatctttgtatagccggattgaaggattagaggaatttcagctgagagaatcattaaaatacaataaagaacatgggaaagacacaaccgatattctcaaaaggcttgctgaacttgaaaatgaaaaaagagaaaaaacagaaaggttaacctgagtgttagattttttagctgttgtaaattacagtaaataatatatttataatcaatacatg

SEQ ID NO: 12986 - DNA, 529 bp, Diabrotica virgifera
ttcccttactgtacaacacgtcctatctcctcttcattaagagaaagcagacctttatatattaatttttccaactgccatccactttgtctttgaaatataaattttaaggcctcttcgataacttgctcgactgataactaatgcccggagatcttgtaaattttctgcaagaacggccatatcgtcaacgtatctgatatttcgaaaagtgtatctgttttcctcgtccaaaagtttaagtaggtcagcagtgatttgatctggtccaggcgccttatttttcccttcctgtattgcttttataacttacgatttcggtatgagacctccctctaactggttgttacaggtagtatgtgtatgcgagtttagatctaatttgaaaaacaaaacaaacaaagatttgtgcagcgattaagccaagatgtgtactactcagaaataaatttgacggatagtagataaaaggcaaatgatacgtgcagtatgttagtgacagatgacacttcaatcaacttatctaatg

SEQ ID NO: 12987 - DNA, 530 bp, Diabrotica virgifera
  SmartBlast Evalue=3E-51; Info=Leucine-rich repeat protein soc-2 homolog n=1 Tax=Drosophila willistoni RepID=SUR8_DROWI
gcagacactgtatatcatctggcaatttggttaactgatttgttcctagattcaattccaccatatttgttccatgttccaacgtcaagtggcaaggaagtgagttgattttctttcatattcaattttgtcaaaatgtttggctctcgaaaagattccataaggaattttgtcaatttggttgtgttccaaattgacagaatccacgttgacgaactgcgagggtcctcctgatggataagcagaaaaattatttctggaaagagtgatattagtaagttcacttaagctcgataacagtccttctggtaattgagaaattgcatttccttcaacattaaattcatccatatgtttacaattgctcaacgatggagggatttgggttaacctgttgtatcttaaacctagtcttgtcagttgctggagttgcccaatagtatcaggtatatctaaaagttcgttatgttgcaaatctaaagtagataaatccacacattgtccaatctccactggcaaatgctccaaat

SEQ ID NO: 12988 - DNA, 529 bp, Diabrotica virgifera
  SmartBlast Evalue=1E-41; Info=DnaJ-like protein subfamily C member 11 n=1 Tax=Camponotus floridanus RepID=E2AEG0_9HYME
ctagaacttgaaatgtaaaatgttagagagtaaggttgaagttaaataatagaagtatttatggtcaaaaattttagttatttactatacctttttaaaagataacagtccaacgaaaataataaggttcgtgatatctgtaaacgttctgtaggtattttaaagaatttcggtgtcacaagcctttgacattgaaacttaagattcatttcaaacatggatttagattctgaagatgaaaatgtaatggaagaggattattactcctttttaaacatacctagggaggcctccaaggaagaaattaataatgcttatagaagattaagtcgaatttaccaccctgataaacatgttgacccagaacttaaagaaaaagctgaaattatgtttaataaaaccaaaaaggcctatgaagttttgtcagatcctcatagaagagctatttatgactctcttggtaccaaaggcttagaaacagaaggttgggaaatagtacaaagaacgaaaactcctgcagaaatacggg

SEQ ID NO: 12989 - DNA, 524 bp, Diabrotica virgifera
taggaaattagagataacttagcagataagatttatacattatgagaaaatgcgcaaatcaaataaggttactccagataaacttaaacaatcatgtattgttgattattattctaagcaaaaaacattgaataacatgggtgatgaatctaaaaatcaacccctagaagtgccaaaaaggaaatctcttcagaaaattgacagaccaaaaagtttaccgtcaccaacaattaaaccaaaaagactaccctttgatcttccagttcatacatggccaggaacagaatcaacttcctctgatcagattaacaaagattgtgcaagccatacaaatggtacaacgtcttatccaaccgccaactcttgtaagagtataactaagggaagtcccgcaagcaagagatgtcccgaagaccaaaacagacctgcagcaacgtcccaaccgccacgtaaaaagaaaagagcggtggccaaaactgcaaatatcagaaatgctactacgagtaatcagaatgatgagaacc

SEQ ID NO: 12990 - DNA, 529 bp, Diabrotica virgifera
  SmartBlast Evalue=5E-25; Info=Dynactin subunit 4 n=1 Tax= Harpegnathos saltator RepID=E2BDW5_9HYME
tccaagtgttaaaaatacttttactctatgatcgtacttctgtggttccttcttttcgagctgtcccgtaatagcattggtgtaaatatgctgcatcacaaaaccacacactacctcggtgtttatcggcagatcaccatttggtgttatacggagttttataaaggctttattagatttcctccattttaccaactttgtatcatcttgaatattatgagtatccccagaatcatcgtactctgcagcgtcatctcttggaggaagaataaaactactggtaggaatttcaactgagcaattaacttgctcagtgatttgtcttggtttaattacaatagaaggtgatctagatgacagacttaataggctgcttggttgacttgacaatgacaaaggttgttgtttctcctgaacacttaaatgttcaacactctccgtaacttgaaccattttattttcaagtacttcctcttcttcatcaagctttaattccaaaaaactaatggtagtttgatgttgagttggg

SEQ ID NO: 12991 - DNA, 527 bp, Diabrotica virgifera
  SmartBlast Evalue=4E-18; Info=Peptidyl-trna hydrolase n=1 Tax= Aedes aegypti RepID=Q177N9_AEDAE
caaaactgttttaaaaagtaaatggtgtgatatctaaatataaaaaaaaataaaaatgggaattatagcgagcaataccttgacaattttcactgctggtaccttcgtgggaatgggagcaacgtatgccttttttattctaagatgtaagaacaagcctaagcaagaagtttggaaaaatggaatggaggaacgatatgagtttggagatgcaaaagatgaatatcggctcatattgggcgtaagaaatgacttgaaaatgcaaaaaggaaaagtagcagcccagtgtggacacgcagctgtagcagcatatgcaaaaactcaaaaggagcgacctaaaattttaccactctggctaagatacggtggcacaaaaattgctgttcgtgttgacagtgaagaagagttacttgcattacataaaagagcaaaggaacttaatgtgttaacaagtattgtaagagatgctggacaaactcaagttgcccctggaactagaactgtaattgccataggcccagcaccga

SEQ ID NO: 12992 - DNA, 528 bp, Diabrotica virgifera
  SmartBlast Evalue=1E-19; Info=Interferon-inducible double stranded RNA-dependent protein kinase activator A n=1 Tax= Harpegnathos saltator RepID=E2CA48_9HYME
atcttttttgttgtgctagtcgcaacagttttgacagaacctatgccacattcataagtgaattctctacagtgtggcggaccaacatctgatagttccttaaacactggatcttgaattttcttttcagcacaaatgtcttttaaaggagctacgaagttaacagatgaaggtatagctgcaccagcatctaattcacactgtttttgtataatagatgccttaaactccctcatgggaatttcttttggatcataaatgccgtcctcttctaacagctttaatgcattgtatgcagcatcatgtttactaatctgctttgagcaaccagtaccagttgcttccactccggctactcttactctataatcgaatctattgttatgagttcccgtgacactatgagtaatttcataatgtggtgattgaaagcctttctttattgccagctcttgaagaaccatcgccggggtcttgacatgatttgacatttttgtgtagatttacaattttcagattcttttgtat

SEQ ID NO: 12993 - DNA, 528 bp, Diabrotica virgifera
ttgtttttggaactctttagcgacgtattagtttaatataatatttatggattaccgttgagggtcgactagatcaaccaagaaagaagatgtatttggttattattctagtgactttcttgggtgtgaatctgtctttttagtttactcctcctggttaaaaaataaactttagactttgaaacgattttcctatcgtctcatcatactcatattgttcacttagtaagtcctgaaccgattttaaaatctcttttggattgtacaatttcatcagaaaaggagataaaaacagacatatcttctgtaatatgcttctggagtagaggctagtatattatttctctttgtttgataaattactgttctcgaaatagacatattaataccaaattcactgccaagagcttatatttgcccaaaaatattggtcaaagtttcatctgcattttgtcgtaactgttctaatgattctttcttttttctgcagattcaacagttaaacgaatataatactttccatcccgg

SEQ ID NO: 12994 - DNA, 519 bp, Diabrotica virgifera
ttgacaaagtgaaagaaactatagaacaaaagctgcttagaattagtcagtttatacatttccggattactcacttactttgaacgtatgttttttcacccccgagaggcggtggtgctcacccccagggcagggacacacatcgtcacaatatcacttttttctttgacatgtattttctatgtgtatgccaaatttgatgtcaatccaagtggttctttaaaatccgaagcaaaaaccgtgagtaaatggactgtaattagattgttactgtcacagtttggaataaactgttgctgatgaacgttttaccaatttttggtgtccaccgattgatctgacaaggcactctctgacgagattggcgagcaatggatagtactattttgtcaagtaataccgacgtcgatttgctaataaatgagaataaaatcaatctatttattttctttcttggtgagtttgatttaaccctttcagctccttttctatattctcaacctcagctcctgtgccggc

SEQ ID NO: 12995 - DNA, 526 bp, Diabrotica virgifera
taaggttactctaggtcctggacgtactggtattgaaggaaacgaagaagctgacctacttgcaaagggaagggaaaagatacatttttagatccagaagctgtcgttcgcatagcaacaagcattatccatttggaataaatctcactaagcaacaagtacataaatacatatacattcactatgaagcaagaacactaaataggctacagtcctgtgaaatgggatacatagaatagcatggacacagaagaaaactaacacggaagtattgcgaaaatgggcaaagaatgcgaaataataaacacaataaaaataggaaagttacatctgggacacggtaagataagaggaggaaggagtataggaagaaggagagggactggaagtcttcagagcaacggtagatagagtaaacatagttatgatgatatccaacctacgattggagacggcacttaaagaagaagaagaatgcaacaagtaatagagaaagaccttaaaggaaaacagggataacgagcag

SEQ ID NO: 12996 - DNA, 514 bp, Diabrotica virgifera
tcagactagcagtagtacccttatagttcagaatatttcaattaaaaggatgtaattacatactgaaacatagttttaattctaaataacttcatattaacaattttcgatattgtgaaaaataaacgtgttttactcttgagcgaaattcatattttccgacatacctcgcacaaaattgacaaaatttgacataagatggctgtactttcaggtcctagaacaggcagaactgtttattaagaatcacccttttttcgtaaaatcaataataaagagttatctgaattgaaataactgaaaataatgtcagttatccaaaaattttcaaaaacaatttttttcaattagaaggatgcaaccgcatactaaaacatagatatttaattccaaacaacatttcataatagcaactttcaacattgtgaaaaacaaagctaccccactcctgagtgaaattcaaactttttgacatacctcgtataagtttaaaaaaatttgatatttgatggtc

SEQ ID NO: 12997 - DNA, 519 bp, Diabrotica virgifera
gtcggttcctattgacttcatccttcgctgttttttcttgttgaagatcatcgggtttatggaagactcggtttgggattcagtgggattttcatccggttttttcggactcggtattggagtagaagcaaacttggggggaggaggaggtgctcttttatttttcctctgtttgggtgtagccttcggagaatgttgcacgctttgactaggggttgaagtcaatgaactagcattagattcaccatacagtcctggaattggaggtcttggagctggcctctttttccttgcactaccataataactttcactggaaatcgaggaattggatccaaaacgaaggtttgcactaagtagtgattctctgggcttagcatcagtagatagccttggttgcctatgtgcaggaacgggtcgaatagaaacttcttcggtttcattatcatcatcatcgctggaaaatgggttgaagcttattcttaggaacactaatttcttccttcttcttgcaggaac

SEQ ID NO: 12998 - DNA, 528 bp, Diabrotica virgifera
  SmartBlast Evalue=7E-59; Info=Guanine nucleotide-binding protein-like 1 n=1 Tax=Harpegnathos saltator RepID=E2BLP2_9HYME
tacactaacaaccttctttcccatcaaagcgttcatcactgaagacttccccacgttcggttggcctaaacatccaatagtaagtattcctttgttaaacttctcgtactggaaaaactcggtgtccacgtttttggtgtgaacgatttctcctatgtcgacatcctcgctttggtcgttgtactcaacattcatctcctccttaattttgttgctccatgaagataaatctacttgagaagcgacgatcttcttacaagattctagaatctgttgggcaccttcggctgccatgcgtattctgcctttccttcttcttacttgaagacctgcaacatttgactgcttgccctgcaaattgtatccaggaactgttgtgaacattattatgtgcaaatttgggtacttctccttaaaataatgcttccatgccactaccaaactaggaggagctagatctattttgtttattactaatataaagttcttctttagtgtatcagttacatattcgtataatgatggagg

SEQ ID NO: 12999 - DNA, 524 bp, Diabrotica virgifera
  SmartBlast Evalue=4E-33; Info=BTB/POZ domain-containing protein KCTD9 n=1 Tax=Camponotus floridanus RepID=E1ZWR2_9HYME
gagtggagaagggattgtgattttttgtaaaattccttgaattcctatagaaattattaaatatgagtgaaaaaattgtgatattaagtattaacggaaagagtatgactaaagtgcagatagatctgccagaagacattcaggatctactaaaaattgcttccagtaagttgcatatagcagcacagaaaatattcttggaagatggaacagaaatcaatgatattaagtttattcggaacaaagatttgttgtatttttcagaaggtgaagattttaaacaagcacaacttacaatttccaatgctcatagttcagactggattactttgaatgtagggggaaggtgttttactacttctaaacgaactttaacaaatagtgaaccatctagtatgctggcgagaatgttttcagaagatatagaagggtatttatttacacctagcagtattgatagagatggagcttatttaattgatagaaccccaacatactttgaacctttattgaattatcttcgg

SEQ ID NO: 13000 - DNA, 529 bp, Diabrotica virgifera
  SmartBlast Evalue=1E-25; Info=Ribosomal protein P1 (Fragment) n= 1 Tax=Chrysomela tremulae RepID=D1M7Y5_9CUCU
gtgtaggaaaatttaacctccttcctcgttcctctttcttttcaaagtcaacaagacgtgtgcttgttctcgttgagctaaggcctatttttctggcaacttgcacgaaatataacaaataataaacatgtctaccagcgctgaacttgcctgcgtttactcagccctcatcttggccgatgatgatatcgccgtaactggtgagaaaatccagaccatcttaaaagccgccaatgtagaggtagaaccttactggcctggtcttttcgccaaagcacttgagggagtaaacatcaaggatctaatcaccaacattggatctggagtaggtggaggcgctccagcaggtggtgcctcagctgctgccccagccgctgcagctgcagcagctcctgccaaggaagacaagaaggagtctgaacctgaagagtctgatgatgatatgggtcttggactcttcgactagaaaagtacaagtgtttttttaagtacatacatgacttgaggaataaagttattttttattttt

SEQ ID NO: 13001 - DNA, 525 bp, Diabrotica virgifera
attacttttggaacaacgtttccctatacagtgtaattcatttgatatagttctgcaagtaaactaagagagtcgttaatgttcaactcaacggggtacgattgatggaaatgtgtacttaaataaacaagggatcattccataaaacaggtagatcccttgttgatagaatttcacaccttgaagaatagcacccctctgagctgaacattaacgactcttagtttgcttgcagaactttaacaatattcctttatacatttacatcaaaataaatcgttttacttctgtggggatgttgttgaaattgtttgtaggtttatctaacatattttgtatattgtatagcattataaatcaaaaacagcaatcatgaggtcaaagttctattgaagatatttatacatttcaaaacaatgcaaactattgcatgtctagacgtatgtatcatcaaggtgtattattcatatcaacaaattattcagattgtttgtgttatacttcaattaaaaattgaataatgta

SEQ ID NO: 13002 - DNA, 528 bp, Diabrotica virgifera
  SmartBlast Evalue=8E-18; Info="Probable ATPase inhibitor B0546.1, mitochondrial n=1 Tax=Camponotus floridanus RepID= E2A9Q9_9HYME"
aacaagttattgtttattaagaaatcaaaattttaagcaatacactatcttagaacatacatgaatgaaaataaagagtaactaaatttgaggattcataggaactcactattccttcttgtctaattcagtgactcggttcttatggcgagaaatagcttcttggtgtctcttaatttgttcttcatggaagctgatttcatctttaagatcagttttcagcttttgcaactgttccctttgctttttgtagaagtattcctcctctcttgcggcttcttgtttgccgaaggcaccaccggcttccctaatggaaccacctccaccgcctcctttgccggcaccgcttcctaggtctcctaattgtgacatgaagcggacattctgcacaacagctggtctaagtattcttgtaacgaacatttttttcttaactacgtttcttttttaatgcgagatgtttatgaatcaaattcagaactcggcaatgtcaatgggttttataaaaaaattgaacccttcaaaatt

SEQ ID NO: 13003 - DNA, 528 bp, Diabrotica virgifera
attttaaatattaattatgaaggtatttgatttttgtgattatattacatatttatataatagatctggcgtacagatcaaagattttaacaaggtactttactccttataccttaagaactaaacaaattttcttgtttttcaatttgttctgaattatttcaattacactttccaagaaatgagaagtattatgagaagaaatgagagtacttaataatttataacgggattgatgggctaataatgcagttttcttgttttgatgctctttgtgacctcgcaatcttctcacacctcaaatactttcaacttctttatattatccacttttagtgtccagctttccattccatacagtaaagtcgagaacacgtagcatcttaaggcttttatcctcagcttcagaggaaggtctcgattaacaaacattttttcattttataaatgcttgccttgcaatttcaatgcgtatcctgatttatctagcttggtcattgtttttatttacccaggtatccagatttg

SEQ ID NO: 13004 - DNA, 528 bp, Diabrotica virgifera
  SmartBlast Evalue=1E-11; Info=Zinc finger protein 26 (Fragment) n=1 Tax=Camponotus floridanus RepID=E2A167_9HYME
ctttgcaaaaaagctgcttttgtgaaaagaatttgcaaagaaataagaaattaaaattgttaagtggaaatggtatagttctagtttaatatattgcagatattgtgtgtatgcataattctatattaatggagaaatctttagtcatggaggacagatcgaatatcttacggcggatgaaagtatgccgtttctgcctttgcaatgaagaagataatttattaaacatacaagaaaaacatccacaggaccctgatattaacatacccctaccttctctatcgttacaaattatggcttgtgtatctatagaagtgctccaaagtgatgggatgccccaattcatttgcaaagattgtcgaaatattactacacaagcatatatttttaaaacgaattgtaaaaaaatcagacgatgctcttaaactgttcctccttacgggccaaaatggcgaagccttacatgcatgatgtggttcaaattaaaagttgcaccttgcttcggaaaatgtatctctatagtacagg

SEQ ID NO: 13005 - DNA, 528 bp, Diabrotica virgifera
acaacttggaaccataaaaggatttgtaaaaggcgattcatatccagtagagaacattttaaatttacctggaaacaggtctagaactaaaggaatcagtgaccgctttcttttaaaacgagcattaaggttaatcgttatagatgaatatggaagtatatttaatataattttaaaagttctacctgaaggaaatttttcaattaaattatggatttgcacttttgagtaatgaaagaagatatcccatcaccgatatagaccttcaaatgcgccacgttggagagcacaaaacttttccagattgtataaaatctcgtgtaaaagttaatggtaagacttacaaaattgtagtctatctgaacaaacagaagataatcaaatccagcagttacactgaatacggttacgaatattacactatacctgctaaatgccatgtagatctatacagtggtaatgccttggtagaattttggtatgctaataaaggcgaggaagtatttattcctaaaccaaaattagttt

SEQ ID NO: 13006 - DNA, 527 bp, Diabrotica virgifera
  SmartBlast Evalue=6E-13; Info=Phosphatase 1 binding protein n=1 Tax=Culex quinquefasciatus RepID=B0X1D9_CULQU
ttcccaactgtcgacatgtcccacgggatctgcgttcagtccttgagttacttctgctaggaatctgtagctccatagaggtgggacgttggatggttcagtcatcacgcggacgtgagtaagggacatgcctttatcgtcggcaaatacgaccttctttttaagtctcgtggggctggtgggatcttcatcactggaacttgacgtttcttcggtaggtcgtatcactaagcaaggcctcttggggtatgcaggcatctttataggaacttttggtattgtgttaaaagaatttgaatggtgcaggggtctgcacgttgtggtgtgataagctgctcgaggaaaatctgcacctaaccttaaagctgcgtaatctgtgagaaaacccccggtgggtggactgtggctaaaaacgggcggactgtgcgacaccaacatttcgtagtccatagaacacatttgaatctttgtttaccccatttgttgaccctcctttccgtggtctggtcttgtttgattttgctctg

SEQ ID NO: 13007 - DNA, 523 bp, Diabrotica virgifera
taaaccagcggaggacaagaaaaatattctaagtactaccggtcgtcttaggagtacagaaagtattaagaaggctagagctctctttgaaaacatcaacaaggaagcagaaaaagcaaataacaaatctcctatttgtactaagaaagaaactgtcgttaggaaacttagttattcgagtgaggatgacttaaaacagactagaactacaaaatctagatctaactcacctgacaaaccaataggagatgtacctcattatatgttacctttagatagaccttccaaacccaaatcggaatctcctgaaagaaggacttcaagaccaagatcgcctgatggaagtgagtctggtggtattccccattatatgttgccattggacagacccaagactcatacacctagatcaaatctcctgacagagaaagcttaagatcctgttctccgaatgtcagacatgaaactggagaagttcctcattacatgttacctttagatagaactcctgaaccagacagag

SEQ ID NO: 13008 - DNA, 528 bp, Diabrotica virgifera
cgtgtttttagttcatggtgtaataaatataatcgctaattcatattatttgctatcagtgttattaatttaattagcgttgcattcaccaaatataaaagcagaagtttcaacttttgtaccatcagttatttttgtaacatacaaattcacaatgaaattcctcgtactttttgccttagtactttactgctgttcggaagttttatgtaataatgataaacctcaatgtgaaggtatacaatgtgatatgccaaactgcccttttggagatatattgaaatatcccggagaagaagatactgcttgttgtccctattgcgaacataatccaaactgtgaagtttgcggcgatctaccaaggtgcgctcctggatcttcattgaggcttaaacaaaattcttgttgtccctcatgcgaaccattcgctgactcataataaatcaacgaaatattgtaacggtccgaaacaatgacttacatcaaatgaaaaattaccaataaactaatgaattatggcaagactac

SEQ ID NO: 13009 - DNA, 524 bp, Diabrotica virgifera
  SmartBlast Evalue=2E-21; Info=Ran-binding protein n=1 Tax=Aedes aegypti RepID=Q16UJ4_AEDAE
ataccgaaaggaaccaaaagtcccagttaatttctgaatccaacgatacatctttctggaaccttaacaggacctcagcaaaattttctaccagtttatattgttataaaaactaggaatgtctttttcttcgatagctgatgcatgtttataagcttctttaatcatgttgttctgaaggaagtgtttaatcaatttgattctaagtttaatatcagtcggtcggacttctagttcttttagtagtagttgcgaaatttcatatggactatcttttgttgttatcaacctttctcttaaactacgtacagctgaattgtttggatcaaatgattgagctagatcacagaagtatctcgctcctgataggtccagttccacgttgtcacatgacattaactcacagacttttattactaaattattttgttttggatcaatctgcagactatgcttgaatgcatctaaggctgcatctactttccctaacttctctagcgattttcctaataattgatatccct

SEQ ID NO: 13010 - DNA, 525 bp, Diabrotica virgifera
tccagactacggcgtggactacaacatcggttctacagctagtacgtttccgactgcagtaccaggaacttacccgaacttcccagctggcaggattccaaatcccagccacgtggcagctgcctatggtcctcctgtgctctatcccggtctctacccgggactaccttatggctacggtggactcaatttacagccaggtacccttccatttatgcaagaccaacaagcgccgagcatatcaacatctgtagcgtctcatctgctcacaggccagtccgctttaagccaaaacttaggtttagaagctctaagcggtcagatattgacccaaactgcaccgcctccattcatgagagaactacctaaagatttaagcggtactaccactcacacacctaaaattactccagcaccgtcgatttttggaaaagctccgcctgtgaacgtcgttataaccacttcagaccctctacctgcacaaaacaccctaactaaccagccagtgctgtctgtgactattcc

SEQ ID NO: 13011 - DNA, 525 bp, Diabrotica virgifera
  SmartBlast Evalue=5E-41; Info=Aminopeptidase N n=1 Tax= Camponotus floridanus RepID=E2ADC8_9HYME
ctattatttaatttatttatttacaaaatagataaaacattgttagaaaaagcataatgatactttccaggataactacagctcgattaaatactctctcaaaggctttatattcgagtggagcagataaaatacccactaataaacttgaaaatgttatttcagctcatagacaggatgcaaatggagtagtttatgataaaaaaccttttaaaatacccttagaagctggtaaaaggtactcatggtgtttatgtggaagaagtaaaagtcaaccattatgtgatggaactcataaaaatgtccacatgaaaataacccaaaagccagtgagatttgtagtagaagaaacaaaagaatattggttatgcaactgtaaacacaccaaccaccgcccattttgtgatggaacccataaattaaaggaagttcaagatgccacttcgctaattagacaatgatatgtttttataatttgtaggtagtgtaaaataatggcaattttaataaacgttatttgttatc

SEQ ID NO: 13012 - DNA, 527 bp, Diabrotica virgifera
  SmartBlast Evalue=0.000000005; Info=Transposase n=1 Tax=Salmo salar RepID=A8C5I4_SALSA
cgctcatcagcgcgtctgtcgtatccacaaaatgcaaatcttactcatcagtaaaaagaatattagcccagtccttaatcttctcgtgcgaaccttaaacgtgccatacggtgtgccctaattaacagtggagtagtagcaggcattctggctctgattccaaatgcccttaatctgtttctaaccgaattgacacttattcgaacgttacgaactgtgaaaagatcattttgcagttgcctagatgtaacatgacgtgtatgcaaagtctgcagacgtaaataacggtcacctgctgggtttctgcatctgatacatcctggaactagtcttcttgtgtaacttccagtttctctataccctctgaaattctgattgatggattgctagaatatgagcaatatattgctgcaatcgtccatttccaattaaagctacaatttgggctgcttgttctgaccttaaattactcattttttataagaacgcacctccccattgaaaaatcaaacagacacagagcacag

SEQ ID NO: 13013 - DNA, 527 bp, Diabrotica virgifera
  SmartBlast Evalue=5E-10; Info=Minus-C odorant binding protein 3 n=1 Tax=Batocera horsfieldi RepID=D4P8G4_9CUCU
gctagtctcttctatttagaaatgaattggttatttttgtatattactattgtttcattgacggctgtcaatttaaaacccttgcaattggtcgacttaagtgactcgtacctgaacgaagtacagaagataatagaagaatgtcaagctaacccagctactcgtgcttctgatgaatggttaaaaacggaagatcttgcaactgcagatcaatatggaggccacattttatgtcgattaacaaaagtgggaagcttaaaaccaaatggagatgttgataaggatggaatgagacgagatatctcgaagggtatagctgatccgaagatagtaaacttgattgttgaaaaatgtggacatcgcgttcccaataagtcaccagaacagagtgctgttgaaaactttagatgtgttgtttcaacagtcaaaagcctttaacgttactaaaatactttaaatccgtagatttattcttgtatacgaaaatatgtaaatttttcaatatgtaaataaagatgtgaatattg

SEQ ID NO: 13014 - DNA, 527 bp, Diabrotica virgifera
gaagatattttcgtagataaatcaacgagtggaatctgcgcataaatgtaaaactgctactggcagcattcactagttttgtaggcctagcgggttcaaaataagattaagtgatgtgcgaaatagtttaggtttgttcttccttgttatttatagtggattatgtatgttaaggctgcatttataggaattttattcctaattagcatcgctaataccctagactgtgatattgttccagaagatataattaagccaaaaaatataaatgatatagacagatatataatctatattcaaggaaatcccaagacttacacaccaaatcaaaaatataacgtatcgttaagagtaaatcctgctagatatccaaagaaagcgtttcgtcgatttttcctgactttggaatcagtcgatggaaaatccacagcacaatcttatcaccctacaggacaatttgaatttgaaatgggagctcagattctttctcaatttagtgacagatgtccaaacacagtagtagaaat

SEQ ID NO: 13015 - DNA, 527 bp, Diabrotica virgifera
gtacatcacgttgtgcgtctataaagtgtattttttattaaacatttaatttgtttacgaatggtgattgttgttaaagttcaatttcggttcttgtttcgttttagtgacattgaaaatgatctaaacatcctagcccatctcaaaatatgaaaatgtaaacaaaaagtaggaatgtctttttcatagggtgtcttcaaatgtttcgctactcttttattttgttatgggcaatcatttgtttaatagtgtcttccttttgtcggggtaatgaaaccccactcttgctatactccactatgtacgatattcgcctagtgaataccactagagcatataaaccagaagttatcatcaaaaacaccaagaattcaacatcttacatagctacattagactaccattatgcactcaagaaaatattttgggctgatcatgaaaatgaaagtatttttagtgttgattattatgcaaaggggaatattacaaacaaaatggaaattgttactgatgtcgtaactcctgat

SEQ ID NO: 13016 - DNA, 527 bp, Diabrotica virgifera
  SmartBlast Evalue=2E-61; Info=Na[+]-dependent inorganic phosphate cotransporter n=5 Tax=melanogaster subgroup RepID= Q7JZR4_DROME
ctgtgcgaagtaggaaatctccaaacatagagaaaatatacgaaaagattattctaaaaatgtggggcatcccagaaaggaatcctgtcgatcggatgtcccatccatgtataaacttaaaataggtcggtccattaaccattaaagtaaataagccccaattggcaccgatctgggcaatacaacttgcccacatcgaaatatcggtccatatggctttccatggggtgggaggctttttagcagacaagctctttccaatactggtaataatgtaattcttttcttcatcagatattcgaggatggtcagaaggactgtcgtgtgccaaaaaccaccaagcaagaaaccaaatagtaccaagcaccccgcaagcgtaaaatgccgcttcccaaccccacatttcgataataaggccgcaaagtgggtatgtcatggcagccccaaatgaacttcccatataagctgatataaatttactcctgtcatttggaggaatccattttgagaccatgttatgcatagac

SEQ ID NO: 13017 - DNA, 525 bp, Diabrotica virgifera
  SmartBlast Evalue=2E-11; Info=Transposase n=1 Tax=Salmo salar RepID=A8C5I4_SALSA
gtaggtgattcctgacagctgatcatgggcatataagcagatgatgggtatttaagagagattcttaaaaaaaaatgtcatgccttttgttccaattggagataatttccaaattccaacactcactcgcacattgctttaataacaatgcaataacttcaaaaggttggtattcaagttatctattggccagcagtcagcccagacctaaacccaattgaacatgtttgggactacctagaaagacgcataaaagcatgtattgtcgctccatataaccttgatgaactgggaagatgcttttggaaaaacgaaaaaatttggatttgtagtacatacagtctctgataagaaggtttccacagagaatgagggacgtcactagagccagaggtagtaataccagatattaaaatgttcaatttgtccttgaaatttcttatttcatagatttgtattttcatttttttttaatattatttaaatttttttggcctgctagtctttgatttttcattgtactgg

SEQ ID NO: 13018 - DNA, 522 bp, Diabrotica virgifera
  SmartBlast Evalue=3E-13; Info="Cyclin-dependent kinase 4 inhibitor D, putative n=1 Tax=Pediculus humanus corporis RepID= E0W1Y1_PEDHC"
gcgcgcggtttggacaatgacactcctctccatgacgcagctgtcaacggacacctcaaactcgtcaagctgttggtggaaaagggtgcggatatatatgcaaaaaattctaaagggaagactccactagacgtggctcccgcctccgttaagccttatcttctaaattccgctttgcctttaccagattctacatcgaattctagagtagtttctcgcgcatcgagggatgacaaaaaaatcacctcaagctgcgacccatctacctcaacggcctccaccgcgagtggtggcagcaacgctgccggcggaaatagtggtgctgccgcctcaacatcgggtaaagcccaaaagaacgaaccgatggaagtgaagacttccacggcgtctggtactttctcagcgacggctgggacatcgtcgagaaatacctccggaacggcaaggggtgcttcgggaacgacgaccggcgatgacgtctacgagttcaaatcagctaaggagggtgacacatcaagtgct

SEQ ID NO: 13019 - DNA, 525 bp, Diabrotica virgifera
  SmartBlast Evalue=5E-23; Info=Probable E3 ubiquitin-protein ligase TRIP12 n=1 Tax=Harpegnathos saltator RepID=E2BD42_9HYME
ttagtagtcacatagcaggtatgatggcttctagtgatttacgaatcgtcgtgggagctctgcaaatggctgaaattttgatgactaagttacctgatgaatttggagtacattttagaagagagggggtcttacatcaaatcaataggttagctgatccagaagttcctctaggagtcagtccaccgaaaacaagtagtagtgccacatcgttttcttctacattgaacgaatctcaacctggaacatcccaatcttcaacaaactcttctctacaaactgctaatggttctgctgtgttaggagctacaccagtttcgtctacaatgtatacatcaacaccagatacacaaagattacaagagtcagaaacgagatcacctagtccttctcatgtgcgtcttagtgatgtactgaaacgaaaacgagtgacaaagcgagcaggaggatctagtcgatcaaaaacaaggcatgaagacatgcccctttctccatcactaatgcaggatttgtcactaaagccgc

SEQ ID NO: 13020 - DNA, 527 bp, Diabrotica virgifera
ttccttggggggtattttatggggtttccaaactgatcttctaactgcatgtattcattatccaatgctaataactttgaatctgttttgacactttccagctcctttatttgattctcagcttggaagacttgagttggtgtttcagataatattatggctagcatttgagcaccgttcttcactccttgacttcccaaagaatccagatcatttaaaactcgtcctgagcatatgagttttaatccctcagaggacacactgatttcatttctaacaaggtcctttaactcgttggtcaccatagacaacaataattcttttgaatgagccttgggggcgaatttttgtgcaaaatcttaatttttacagtagccaatccagattctttataatgattcttttgcttcaagttttccaaggcattatcctgcaaatctttaataatttcttggcaaatgtcacatggaatatttagatgcttgctaaagtcttcggacaagttcttaatgtcatcttctgaagca

SEQ ID NO: 13021 - DNA, 527 bp, Diabrotica virgifera
aaatgtttgtacctcaaaacattcttaacaatataagaaaatatttctttatttattgataatggttataattattattatgggtataattataaccataaataaatcgcctgatttaagaaaagttttttttatatttaaaaattgtcctttttccaatttaaaaaaagtccccttaacgagtatggctggataatttgcataatatccgaatgtttttatcatccatttaattaagtataactatgcatctaattaagtcgaaagacaatcgaaagacgtcattaatttttgtctaaattgtaaacaagttgactgcttatttttatcaacttttaacaacaaaaaccaactttccgagagtcgcaaacaagtatttgttttgaccaacatcatcttcgaagtgccccataaaaaatacatcaaatcaacttttttgggtggtcattactcattaaggatgttgtcaataacaccgtaatttttgctttaataaatgtcttgaattatttatgggtattataatt

SEQ ID NO: 13022 - DNA, 516 bp, Diabrotica virgifera
gattaaagaagatgacgtgaacgatttccaagatgcttctaataaaaaaaatcaaatatttgagtagaaaacgttctccagaaattttgaagctgtagaaaatacagaaagtaccgagaaacctagggtttcagttgaaaaaacggtgaaactagaaactaatattaaatatagccaaaaacccttagcagtttcccaaaaacgtgttcagttaaaggatagaagtcagatgaagaaatcttttgacgaagaatataatagagaaaataagcaacatgtcaaacaaaatatacgaaaattaatacagaaatttagacggaaaaagatgtttgatgaagaaaaagatgaggtagtagtagtagatcatcctaaagaaaatataaagaaattaattgaggagaataaaattatggaagaacgtgaagaaataagtaaaatccaacgacaaatcatagaattaatagaaagtaatcccaaaattataaacaaagaattgataaaatcgaaactagaaga

SEQ ID NO: 13023 - DNA, 520 bp, Diabrotica virgifera
ttgtatttgcttgcagtacttctattttaataactaattttatttactacatgcaattgtttaccttttaataacataacctaactcttacttttcttcttataatttttttttgggctacggccttgacaattatccagcaaccaggaccaatatgattggccaatattagtaaaagtgcgaaaaaagttaccgagctatgaaaccaggtgtcgcttttccgaacttgcacggtcccaattgacaaattttcagtttttttatggtacgcgggatccaggtctattattttaacttagtaataattcttataatacattcagtaccattcaaagctctattagcagtagcacatttctaataagtacaaaaataaagctcaaaagcgaaccttgtgttatattatcatttttatcgaaactttgctgccgtaagacgaatacttacctacttaaaattctagaaatctgtaaaaatatttggcttttgtaaaagtgtaatatttagaatcatttgattt

SEQ ID NO: 13024 - DNA, 519 bp, Diabrotica virgifera
ccaaggagtttttcttgtaatgatattgttcagaagataataattatatagaaattctgtgaaggccacatgaaggaacaatggtcttgttttcgaattattgaagaaaatcattgaaaggtgatttttgtcactacgaaaacattttactaaagtggagtcatttttggcttgaaaacaatttgaatagctttgttaatattgactgtagagtaaatttaccttggaatttcaaaagctggtatttttacgcgaattttcgaaaaaaacttttcgcctatgttaattacggtcaaagttagccacttttattatttgattcacagttacttcaatatacataaaattctcctgtaacagtgttagttaccatactactccgaaacggcttggccgatttttatgaagttttacaagtgtatcctatgggactgagaataggttttaatctattttcatatccataagttataaggggttgcccccctgaatttttttttattttattgcatccctgac

SEQ ID NO: 13025 - DNA, 524 bp, Diabrotica virgifera
  SmartBlast Evalue=4E-15; Info="Thrombospondin-3, putative n=1 Tax=Pediculus humanus corporis RepID=E0VQ35_PEDHC"
gaatcgattgacataagtcgacatcgagagcattggttattacagtgctcctcggtgggtaacggtgagttgagtagtagaagtgcgaggagtgctaaagacttaagtcatggggtgcggggtcggaactgcgatttttgtatttgctagtgtaattttactcgcagaatctacgttatttgatttaggaaaaaccaaagaattagaaggagtaatcaacgatgataaatttatagtatctttgaggcatataaagccacgaaaacggtcaagaggaatgatagaaactttatttgcagtagattttccagaaagcaatgacaagtttgcacttctgcttgatagaaaagtcaaaaaagtaaccgttgaaactgtggagaatggcaaaaagagatctcaacattttaaagtaagtaattctttagatgaggataatagtataaaatctctaatactagaggtcaaccaaaatgagcctggcgcgcatgctactctatatttagattgtacttcgtatggtatgg

SEQ ID NO: 13026 - DNA, 520 bp, Diabrotica virgifera
cccagtctcagtttattacaaaattccccattaaatagttaccttatcagaccttatgtcaataaatcaccttttaaatgcattcgaagacgcttcttaaaactacggaaaggttctcagcttttaaaacgccagatttagtaatttatcgccttttctagccatattgtagaaccgcatacatgatgacataatagttttgtggtctcgaccagtatcgtcgcagcgggcacgccgttcagtcacactgaaatttcataaagtgttataacatgataaaatggaaagaaactcatgcatatattacatgcatagctgaattagaagtattcgaattgtggtgttatcgacgaatcctaaatatatcgtgggtttcgcacacttcctatgaagatgttcttcaaatgatgaattcagaacgtctgctcataaaaatcataaagagaagagaaacagaatacttcggccatataattagaggacctaaacataccatctatttcgccttataatacaaggc

SEQ ID NO: 13027 - DNA, 527 bp, Diabrotica virgifera
aaaatattggtaatacagatgaaacaattagtacagctgtagaaatttcaatagataatccaaactttgatgcaactgaaaatgaagatgctccaaactgtacggaaattgaacaaaatccttatgaagtgaaggtgaaactaaaaaaagaaaagaaaatgaagaaaaatgtaggtaatacagaagaaacaattagtgcacatatagaaattgcgatagataatcctaactttgatgcaactgaaaatgaagatgctccaaactgtacggaaattaacaaaatccttatgaagtgaaggtgaaactaaaaaaagaaaagaaaatgaagaaaaatgtaggtaatacagaagaaacaattagtacacatatagaaattgcgatagataatcctaactttgatgcaactgaaaatgaagatgctccaaactgtgttgaaattgaagaaaatccttatgcagtgaaggtgaaaaagaagaataaaaagtcgaaaaatctagaaattgacaatccaaattttgatgatacgc

SEQ ID NO: 13028 - DNA, 517 bp, Diabrotica virgifera
  SmartBlast Evalue=1E-30; Info=DnaJ homolog subfamily C member 17 n=1 Tax=Caligus rogercresseyi RepID=C1BRV1_9MAXI
gtaaacatttgaaatttaatcgaatacaaaattaattaataagaatttaaaatgggagacataaaaattgaagaaatggatttgtatgaaatgctaaatattgatatcggcagttcaatatcagagataaaaaaagcatatagaaaacaagccttacaatgccatccagataaaaatccagatgatccaaatgctgcaaaaaagtttcatgaattatcaaaagcattagaaatcttaactgatgagtcagaagagctgcctatgatagagtacttaaagctaaaaaggaggctgctttgagacataaagagttggacagcaagaggagaaaattgaaagaagacttagaatatagagaaaaacagggatccaggcaaaaaagtgctgatgagctattaaaggctgaaatagaaagactaagaaaagaaggatcaaagcaagtgcaggaggaaatagaaatagtaaaacagcagctacagaaagaaaaatccaatccacaatactgggatgggtctaa

SEQ ID NO: 13029 - DNA, 524 bp, Diabrotica virgifera
agataccagccagttcagtctgaactacgctggcattttcccgtgtttcacatctggaatatatccggtgaaaatgcaatatgcatttgccacgtttgactccctatgttgtcttgtttcgattttgtagggttttttgaagacaaacgtaggtttaattgagtcgtatccatggcgtgcatgtagctggggcagtgccttcagctcaccccgccatcatagcgccacctctttgacatatatgtctaaaggggtgatgtcaatgagcaactccattgcaattggtgttgttttcatggtacctgttatatttatgcaagccatccgctgaatatggtttagtttgttgatcgctgttgcctgtagcacttttggtacccaagcaatagctccgtaagttagctttgacctaatgactgcaatgtagatccactcgatcacgttgggcaaaaggccccaagtgcgtccgaccgttcgccgacactgttcataggtaagctgctcttttagctctacaggctgta

SEQ ID NO: 13030 - DNA, 527 bp, Diabrotica virgifera
caaattattatttaacacttaaattatattacaagtgatctacgtatgtgataatttttttcataactactgtgtgtgtcagggttttagtgtgtctgaacatcaaacatcattgctatcagttcgattgatttttggcaggaataaaaatgttcgcacgtgctgtgtggtgtcatgggtgatgcattaagatgttcagattttgagttatagtgacagaacaataactttgatattaaaattgtatcacattttgtgccaaaagtttttatgtcagtatgaggtcctttatctgtttaacgctcctgtttctaactcttgcaatagtatccatacaagcagataaaaaagccaaaaagtatgaactagagaatgaagatactaaatccaataacgacaaagagttagatttccaaaaacaagtttgcaaagggaaagaatgtagaaaatttaaaaaaaataatgatgacgatgataatgatagtcatgaacagttgtctaaatacaacaaaaaatttaatgccggt

SEQ ID NO: 13031 - DNA, 526 bp, Diabrotica virgifera
  SmartBlast Evalue=1E-26; Info=Chloride channel protein 2 (Fragment) n=2 Tax=Aedes aegypti RepID=Q178D0_AEDAE
tggtttttatttgtggtataccagaacctgcagcttgaggagctactaaatgggttaaacccacattccatataattaaacagaacggtaaagccacccatgcaacccattttgcaaacattcctgatgctacatctgcgtaaagccatttttgaccgttattacataaccatactgccttatctactgtgtaacttataacagctacaataattcctagaaatgctaagaacacccagtcttctcctaaatgaccaaatgtgttgtgccatattttccagaataatcgtgtatattttccttgatatatttctaattctttttgtctttttttctcctcctcctttagttttttgatttcctctaattttttctttttaagctccgaatggattttttcaattgatttcgtataattatatctagcctgaactggcgagtacctggagtcgtatagctgccccaccggcagattattttgtctaaaactcatcttaacacggaaactggatacacggaacactat

SEQ ID NO: 13032 - DNA, 524 bp, Diabrotica virgifera
cctgtagagttacaaaaatctatagaatataattgcaattaaatatatgcagtagaatagcattactacttaattaaagcagaaggagattctttcttgtgtatatatgggactaaatcattcaaatatcctaggtatattaataatgggttgaatacaatttacttttttaaatgattttgagtaggtatataataattttgaattggggatatgcatgtagtacattattataaattcctcctaacatgtaaaccatggtgaaaaagagattcaactaaagatttatgtatcaaaattagtagtttttcccttaagtttaacataagagcatctgattacgttaggtactggattataatatctaaaactattaaaacattatgattccattcaataggtacctgtgaagttttacattaacagtaaattataaaaaaaatacaatttcggcgcaataaagggaattttgcccattttatatattcatttagtttataattgtttatttaaacgatcttcag

SEQ ID NO: 13033 - DNA, 527 bp, Diabrotica virgifera
gtggttcagatagtatttaaatggaatgcgtgtgaatagccaaaatttcaaatcacgtggctatatcacaacaacaaaaatcaaaaccactttctcattgatagcatcaagcattttgctgcaaaattaatgaacttctgacacaaaatgtttaagggtacaaataatttattgtggttatcaaaaaactttgacaaaaagccttgacgagagaaatttaaagatataacaaaccatgaaataagttattaacacgttcactgccacgctggtcctatataggaccaacattgatgctgccttaacagactacattcgcccgatggggccagcatctttgacagagaattcctcaaaattctgagttgttttaagaagttcacatagagacgaagctgtcttatagagtacataacatcattaaaagaagttaacatacacttatttgactcctttctcaacgatttcaagcagatgaaagaaataactataagcacttatttagttcttcaattgttcaagctcag

SEQ ID NO: 13034 - DNA, 527 bp, Diabrotica virgifera
  SmartBlast Evalue=2E-36; Info="UDP-N-acetylmuramoyl-L-alanyl-D- glutamate-2,6-dia minopimelate ligase MurE n=2 Tax=Rhodococcus equi RepID=E4WIP5_COREQ"
cgagggtgcgctccccccgacggagtgctcacgtcgaaaatcgccccggcacgcgcggcatgccatgacgtcacctgatagtcagagggctgatggattgacgtcgtcacggccttaaccccgttggcttgcatacgctcaactagctgacgaccacgcgggtcatcgacattaataacgccaacccgagccagatcgggggtgaacaaacgggccttagcgttgaaataattatcaagggtgttatggaaatccagatggtcacggcctaggttggtgaaagccacgacatcgaaacaggttccatccacccgctgcaaggccagagcgtgcgacgacacctccatcacgacgtcagaagcacctcgctcagccatcgccgcgaatagcccttgcagatctggggcctccggcgtcgtgacggtggtgcgagcactaggcaactcctcaccgtcgagccggaatccaatcgtcccgatagtcccaacatggtggccagccgcacacaatccggcctccacgaggaa

SEQ ID NO: 13035 - DNA, 525 bp, Diabrotica virgifera
  SmartBlast Evalue=2E-25; Info=Spindle E n=1 Tax=Tribolium castaneum RepID=D6WP54_TRICA
ttactagagtcaaacctattgatatattagtatttctatcgttttcatttttgtaagagactcttaatagctctaatgtaaacaggaccgggctgttgagaatccattcccgtaagatacactgaacgatatggatctcgacctccaacagctctaacgagttgcttgtcgtcgacttcatttgcgttttgttctcttataaaaaagttgggataaaatgctccagcgatgatcatcttcaatacaagaggcttttcgtcgatttgtaattccgtctgtccatggatctgttttatattcaaaaaattccaagcgctgatttatttcctttaccatttgttgccattctcttaaaccttttaaactaacaaggttttcgaacaccattgtcgttcaccatgtacatcaaaacttccatctgctttgcacgtttgccatacctgatacaaattaagcaaagcaattagatcactaaaggaatcatcagcccaaaggaacagtttctggtaagcagcaaatcttttt

SEQ ID NO: 13036 - DNA, 523 bp, Diabrotica virgifera
gcaccctgtagataccataagcatcatataatggacgatttttctctagataaaaatataagttatttcttttagaagaaagacatatcacaaacttgtacgattctggtaatttgagaaaatattttccaagtaatttttctaaacggtatataaaaaactacaaaacatcaataaatatttttaacaaactttttaaactgtcacagcctaaaattgaaaaaacccactgctactcaaggcttgtctaaatttacgataccgtttaacaaactttttggtattaatagattaatctacagctcattctactagcatatactactagcactgaaagttgtggtgtagttgacaagaagaatattcaatacaatcatgaatatcattcagaaaaatacgatcataaaaaagaaaaatgaacccattgaaaagtataaatgccttatcagttataaaaaaagtaaaagttttgtaataagtaacaacgataagaaaaacaatatacagggtgttagcaaataag

SEQ ID NO: 13037 - DNA, 526 bp, Diabrotica virgifera
ttccaaagacattgaggtatcagaaactaatacaaatacctccgaaaccagatcacttagaaaaaatcaacaataaattatacagaagtcgaagataataaagatctaattgatcaatctgaagttggagaaggtaatgaagttgaaaaagtaagtaatgacgatagatcctacatagaagtttccttaaatgtcaacagttctatgattcagtcaaagcttcttgatgaatcaagagaaagtgatgttcctataaatgataacaatactgaagaaaatgatcaaaatacaaaagatgttttaagcgaaactgggacacacatcttaaaagaaaatttgtcaaaaaataatcaatcgataaataaaaagcgtgcgaaattacggtctaaaaagggcaaaaggttaacaaaaaacaaaatatctatcactccaaatattgaagatgtaacagatccgaaagattctgaaccgatcgacacgaatatttcagaaggtatatttaaagtggatgaacagactacatttt

SEQ ID NO: 13038 - DNA, 527 bp, Diabrotica virgifera
  SmartBlast Evalue=7E-30; Info=Odorant binding protein (Subfamily minus-C) C04 n=1 Tax=Tribolium castaneum RepID= D6WS38_TRICA
acatgtaatgataaaaaatttatttgtaacaactcttcaaaaaagaagttttttatattataacaaaatcaaaatatttaaataatactaagatgaattggtgtcttttcgtgatagcattttatggtttcaaaggcagtttctggtccatttgcttgttgcttagcacaggtgccgatcaattgggcagcaagagctggatcttctaaggcagcacccactttggctttgagaacttccacttgaatttcaccggcatcgttttggaaaccgatcttcttggagacgcagaagatatgtgcttttagcttgtcgtcattggcgaaatctccttgtcttgccttttgaaccaattcgggattaactccggattccggaagacattctttgtggaaacttttgatcttctcagcttgttcgggagtaatagctgcatttgcatagtaaacagcaaagaccaagctaaaaaccaagaacttcatgatgactcttttgtattattattattacttaagcaaacaatattc

SEQ ID NO: 13039 - DNA, 526 bp, Diabrotica virgifera
aatcgtttaggtatactattaattgtcattgtcttaaaagatgaaaggtgccgctgttttagcattggctctttttgtggctgctagtattgcagatgttgatattcttgaagttaacgtaatcagcagcaacgtacccaacatagactacacagtgacagcacgggaaaccttactagaaacctaccagctgtacccaaccaaccaaaccaaaagattgaccgctttctcgctgctctttaacgaaactcacccaacttacaacggctggaaagttagccaaaattgtagcggattcttcaatccaacggaacattattgggtcaccttgaacgttacgtccagtgacggaaacttgattatcaaaatatttgattaaataacttgacgaaacatactttcctgaagcagaaatgtttaatagagtcgagtatttgtagttttgtaaagtgttctctctatttatgaataaacaatcgaaaaaagtacaatatacgataataaactggcagacataatacaaaaa

SEQ ID NO: 13040 - DNA, 523 bp, Diabrotica virgifera
acctctttctttccaaagaacgtatttcttaatgtattataaattgtccctgcttttcctattttattgtttatttctttgtctattttaccatcttcttcaataattgtacctaagtagttgtagctgtttacttgttccaaaacttgtccttctaccttaatttttatcactttttttgtagttgccataaccattgttttacttttatctgtgtttatttccatgttcattttcttagttcttttatataagtgtttattatttgttgcagtttctcttccgtgtcagctaacaataccatatcatctgcaaatagtaattcttgtatttgtacattgttcattttccattttcccaatatcatgtctttagatttctccttgcattgctttattgcgtcatctagtaccattgagaaaagtaatggacctagtacacagccttgtttagtcctatctttgcctggaattcatcagattcttgattgtgagtccttatttttattttatttatttttatt

SEQ ID NO: 13041 - DNA, 514 bp, Diabrotica virgifera
ccgatcctcattgtgatgtcctcatctgtatttgttatgattttggttttgctgtaattcatattacacctatctttccagcttctatgaccagttcttttatcatttcaaacaattcttcttttttatcagttatcaatacgatgtcatcggcgtatcttagatggttcaagcgttgtccacaatttttttatagattatcctaaaaagaatatatggaggaataaaagagcaagatttattgtgtatgcgttgcaactttgagttgtgtagaattaattgtgttgctgtaacttcagagaacctgacgctgtaaagtcaggatgtaatcaggcgagagaaaggtgcaacaatcagaaaagtttttgaccgaagagggccgatggaacaacgagccagaggaataccgagacttgggtatcaaaatatcctgcagaacgattttaaatctattgaagttggaacaagctagtaagtagttttcctagtagagccaggggtgaacggaggattg

SEQ ID NO: 13042 - DNA, 526 bp, Diabrotica virgifera
gcccggtattggtgctgaaaagaatgtgtattttaaaaactgcgcttattcccatttcaaaacaagtggtttttttttgagttgtgccagtattgcagaccatgagcgaatatatgtcgcacacaaaatgacagagagcaactattagtctttctctaaactgacatatgcactatccacttatttataacgttacacgttttccgttacaaaatctaaaaaatatcttatttcaaatctttagtaaccataaatcattttcctaatatgactgactaaccagatctaacgttgaaatgtttctatcactaacaatacacggtagtatatctggacatggacattcgatcatcattgttcatggaacattataatatttctctcgcaaaatttctagggcaatattaaattgggctacacacatgatattattcttgtaacgtaagttacaagaaattgttttgaaggaacatcctcgaattagacacactgtactgatcgaattaattggaacaaaatgtttttt

SEQ ID NO: 13043 - DNA, 521 bp, Diabrotica virgifera
tctccattagtcccaatcactgcagcagtggggccatgttttcactttaacggcgccagtagatggcgcataaatagtttaatcttcaatatttttttatgaaaactgttttacatgtacttcctttcatagcaaatgcgcatgcaaattttcaaaacaagtacagtacttcttattttagaaatttccaaaaaaagtatatcaatttcgcacccctacactaggatagccccttaacgacaagttagacttatagtaatgcttaggtacttgtaatatccagatgtttgacaagtgacaaattaacttcaaaaatgagatatgaaaggcgttgatatatgaaaggcattgatatatgaaaggctgcaaacaccaacaggccaggtaaaaaaaatattcaacgataattgttgtcttccttttaagaaaagcgaaataaatgatttaactattgctttaaaaaaaatttaattaagtaaaaaataattatatctttcaaactggtttaaacaaatctaaag

SEQ ID NO: 13044 - DNA, 524 bp, Diabrotica virgifera
  SmartBlast Evalue=2E-47; Info=UPF0378 protein KIAA0100 n=2 Tax= Formicidae RepID=E2BI45_9HYME
aatttgctgattggtgaaggtgtatcttgcacagcagtagtagattgtattgcttggatggaattattaggcggagtatttgaaggatctgtgtttcttctttttaatggggtagtggtggtattatcttttcgaaaacctttaagtgcatcagtggacagattttttttcattcgcatcgttttcataaatgtgtcaaacaatgcaaatgctacatttctattacttttagtccaggcacctctcaaatcgtatacaactaatctgtgggtgggcacatccttattcctttcatgattgggtactacagtctctctaccgtacgaaactttcgcaaccgataagcaataacatttttctacaggttgccggggagagggtaattcaagttccatttcgtcgtgtaaagcactttttagccaaatttcaaaatcgtttaactccgagttcatatatactactgaccattcggcttttgggcgatgctttaaaccatcgtcgatagcgaccaacgatagtgtatg

SEQ ID NO: 13045 - DNA, 526 bp, Diabrotica virgifera
  SmartBlast Evalue=1E-44; Info=Lipoma HMGIC fusion partner-like 4 protein n=2 Tax=Formicidae RepID=E2A1P5_9HYME
gatgtgtctcaaagctagaagaaatgctaacgttgataatataacagcatccaaacaaccaatagcagccaatatgtaagtccatcgaatgtggcaatcgcccaacatatatttatctgtagacgttccacaaactttgcgaatgttttctgagttccatccagctgggtaaacagcacaaccagcaatcatacaagcggctgaaattagttgtaaccacgctgatatatggtagacagtggtggaacgacaaaaacaaaagaacagcatgacgaagatggttaacacagccgtaagaactgccaatcctacaaacaccatagatgcctgaagagcatgagcgaggtccataaaggtatcccaaaaattctctttgcactgttcagcattttctcctatgtagcaaattgaatacagtccaattcttccgggagtttctccgctagtagtaccaatccactcagctgttataaaagaaacaatagcgatgatagcgtagcatatcgtaaaaattccccataacact

SEQ ID NO: 13046 - DNA, 523 bp, Diabrotica virgifera
atattctataacactataaaacagtagttgaaattatcgggaattgcggtctgtggcttagattgaaactacatttaattctgttgaattcgatatttcgatgagtatttattaatttttcatcttcatcaggaacaaactacaaaattaactaacagttaggtacaaacataatattacaatgctataacttacgaattgttgtaggtatgttatataaagcaatttaacttaaagctatgcatgtcgtttcacgagaacgtcgagggcggcactgagtcaggtatcttttctcacatgtgttaagggtcaaaagttccaatatcgagccatctgtttaatattctgctatttttcgaattttaaaacattgcagtaaatttcgcttaatctacttgtgtctgatttgtaattaattgaacgtttattactgtttatgtggtacatctcgaggaacaatcttttcttataattgctttctgaatctaagatcttgatatctgacaaattaaattggtgtcct

SEQ ID NO: 13047 - DNA, 518 bp, Diabrotica virgifera
  SmartBlast Evalue=1E-14; Info=Mitochondrial ATP synthase e chain n=2 Tax=Stegomyia RepID=Q5MIP8_AEDAL
caatactgaaattgatataatagtttcaccattttacgatcacataaattaagaattttttagttgtttatcataccaagaggtcttttatgtactgcctgaggatattaaagacaatattaacaaaaatggctgtatttattacactacacttgatacaaaactgtaacattaaacttagtaacctatcttgctagagcttccaattccttaatttctttgtcagctgcggctttcttttcaatggccagtttagcatcacgttctgccttaattttattttctacctccctaatgcctgcttcctttttggagagcctgttttggtggaaggctccataagcaactcccaaagcaagaaaactccatcttccgaacttgattaaaggagaaacacgaactggagctggaagggcagacattattagggcttttcttgtacttcggtaaaaaatctattgacgatgaaagtcaaaggagacgaaaaatgaagtttactttgattttgacgtacaaaa

SEQ ID NO: 13048 - DNA, 524 bp, Diabrotica virgifera
  SmartBlast Evalue=2E-14; Info=A-kinase anchor protein 9 n=1 Tax= Harpegnathos saltator RepID=E2BA35_9HYME
cgaggttatttgtccttctaaattattgttattttagaatccaaaatggcacctactggttgttttgtggttagacagaggatggcattggcttcttgttttaatttttctagacaaacgcttaactcattcttgacatcaatagaaacgtctttcgaatctgcttcttctggtgaactactctcaataatattgatcaaatcagtgaagttgggcgtcagatggactctggtgatattcaaagtactgtcactggttttactggaggtcgaagggctcgatctggtcaagttcagctcgtcgtctatttgggacatgttcttgtcgaatccttgtttcaatagttcttcgacgagagtattgttcaattcatcctcgcattgtgtaaaatattttaacagttctccgaaaaggttgtgcatggaagccactcgttgcttcaagatgtctctttctttcaaaatttccatttcgtccttgtttaaactctcatcgtctctcaacttgcgtcgcttagctccgtc

SEQ ID NO: 13049 - DNA, 524 bp, Diabrotica virgifera
gcggtcctatcgtacagacgtctttcacaagttctctcgtacaattcgcgcgtttatccagtgattggtgtttaaaaatatttttgtggtttttgttgaacctgagtttttattgaatcatggcgattccatttaacttgccgggagagcaaaccgaagtggaagttattattactcagctccagtacttgttgatgaaattgcaagatgcgattagaagatccagagctacgaattcttcctatccagttttttcgatttctaccagaactagagttcgaacaaacagttcgaatagggctcgaggtagagagcagtcgtctgtatcatcaccagagactccctccacatctgcatcaccgtccgccaatgccaatctaccagagctcctaaacaatttggcgtggttggcagttcttacccaagaggctgtcgacaataattcacaacaaactactgccatggctgtaccaaggcctaccagaaacagaacttcttcagaatcatcgtgttgccaagagacc

SEQ ID NO: 13050 - DNA, 521 bp, Diabrotica virgifera
  SmartBlast Evalue=4E-36; Info=Cytochrome P450-like protein n=1 Tax=Tribolium castaneum RepID=D6X3W8_TRICA
gatctaccacaaatgaaatatttagaaagagtagtaaaggaaacgttgaggttatttcctgctgtcccattgctagcaagaactttgcaggacgatattgatgcaggatatggtttttccaagtggaagttcagtcctagttggtaccgtatttgttcacagaaatcccgtacactggccagacccgcttaaatttgatccagatcgttttttgcctgaaaacgctgcaaaacgacatccgtgcacatatattccgttttcttatggaccaagaaattgtataggtgcaaagtacgccatgatgaatatgaaaacggttttggctgcagttgtgcgaagatataaaatctttactgaatataaaagcgttgaagagattaaactatcgacgaacctggttttgagactgaaagatggacccaaagtgtggattgaaaatagatgatttaaaactatgacataagctagggtattagttatttagttgtaggttatattaattattaataaattattaatgc

SEQ ID NO: 13051 - DNA, 525 bp, Diabrotica virgifera
tttatatacatttggtacaaatctgtacaacagaccgaaattattgtcatatatcattcttgttaggggattacagtaccatttgtaaatttctgtgagatacaaatcgaactgtgcattattttcctctttaatttaaaatgtatgttcatttcaaacttcaattcagagcccgaatgcacacattggtgctttagagagcatgaattgctgtcagactgttttagttatattagttctattgttaggtagagaaagaagagatgtggcgcaaaataacgggaccgattctctaaatcagtaaggggtaaagtatggcccgccgagggtccatagacatggatagtataaatatagctttaacacaaaatgcaattctcctttctggccctcctatagaatttcttgaactttgtggccccccattaaaaaagtttgcccaccactgctctaaataattttgttttgattgaaatagtagttattttcttccccaacaatatgtcgttactttaccactgtaat

SEQ ID NO: 13052 - DNA, 525 bp, Diabrotica virgifera
gtggaattcgataaaaaagtacttaaagccatctccgaacaaagtttgcaaaatagcaaccaaaacctacaagaaactatcatctacgtaccaacacctgttttcgtaactccacaacgaaatgtagttagtactccaaatttagcaatcgacaaaatggaaccagatgatgaaatatgttacgaagatgaacgcacaaaatcatctctagacttagcccgaaaaggcagtatcatcaaatctagcaccagtaccagcggcttatcagacgctgatgataaacctctggcctctgttcgcagttttaccggttctaccaactctaaaggagttcacttttctccggtagtatctgaggtgaactggaaagatgactcggtgtctactgttacaccggatcgggaaagtagttatagcttaggtagctcttcgcctgataggagttcgcctcccagggagttaattaaacctaaggcagtgcggttaacttcttcgcaaccggatctatctgatgatagcagcaag

SEQ ID NO: 13053 - DNA, 524 bp, Diabrotica virgifera
ttacaatttacccaaaattacagtccaagtttgcttagtagttagagggaaaacgcaatttatcatatttcgtggaacacacaattaaatgtagggctgcagccttcgcagaggaaccctcaggtctggtcccacagttggtgataattgtgtcaacatttccttggtcactgacaatatatttaataagatctgttactgtttgctgattataatctccattttcatcctgaattccgaattttttaaacatacaattaaggtaggcagacatctgatctccattaaatttttcgccccttttgagtttacctgcggcttcacggtcaatttttgtagcatcatttgagttacactcagaaaaatatttcgggaagttttcctcaatggaaatagcgcttaccactgcaataaaaaatagtaaacccaaaaagcaaacagttaaagttctcattgtcatagctaataaagctgtaaaatgtgcaaattaattattatcaatgctgaggaaaggttagttacat

SEQ ID NO: 13054 - DNA, 524 bp, Diabrotica virgifera
tcactaggtggggaatctgcaaacagacgtcggaggtaaacatttccaacagtgctgggttcctgagctgaaacctcatcagtgtcacgtcgaccagtttggccctaaatcggacctccctgccctccgtaactccgatgtggccgggaccagctaaaccccacccctctcatactagggcatcagggtggaatcgcccgttagggcatgacttttccccgatgtccttcttttgcccgattctcagtcgctcgtcatcacgcatcagcttccgtctctcccaatcatccgaccaccacgtcccttaatcctatgctatctgcacctggagttccccccaattggggaccctcccacccatatatttttaaatttaggtgacattccgtttttcaaaatattgcgacttgttatcgaaaatgggtaacattgtcgaccttctaactttagtcgaacgtatccgtctctggactcatcgccacatactttagtggaggcctcagtcaccaacttcacacagcgtt

SEQ ID NO: 13055 - DNA, 525 bp, Diabrotica virgifera
tgtaggtatatacattttatataagccaattttatctgccttattataattttctttcatgtaaaaacaagatggttggttatatgtgtataagttggacaggtttcttatgcatatttcagggcttttcgtaaatatacatgaatataaaaaacaaccgagacaaaatctacctgtagacagttgttaatggtgtctgcattttgcgaaaatatatcatacgtttgttcgtcatcttcctcaatcattatcataaaagtttcttccaaaactagtacaaactaccaaactttacactcaatatagaaaacaagtcatcattaatatatttattcttttggagaagaaatatattttttatttttgttttttgcagaaatttcagcagtaggtattctacattccaagaaatcctgaaataacgctaaaaatttttaataagaattattttaattcattgatgttacaatggacaattatctagtaatctagtggatgcacccagtgtacaaattggacacacat

SEQ ID NO: 13056 - DNA, 524 bp, Diabrotica virgifera
  SmartBlast Evalue=3E-16; Info=FABP-like protein n=1 Tax= Tribolium castaneum RepID=D6X2H6_TRICA
tgttgggcgaaaggaaatacgaaacagaagataataataatcattactacggatcaaataaaccagcatggttcaaatagaaggaatatacataaatgataggagcgagaatttggacgactactttctagaagtaggcgtgccgtttattccaagaaaactgctgtgctcgtcaaagccgacattggaaatcaagagagagaatgatgaatggacaattacggtgtctacacttttaagaacgaatattacaacgttcaaacttggtgccgaatatgaagaacatatgcctggtggagtgcttaggaatattactacattggaaaatggtaaacttattacattatcgttgggaccaggagatgttaaatcaaaacgtgaatatgagtttactgatgagggatgcgttatcacctactcgagtgaaaagacctccaaagttgcaaaaagatacttcaagagaatttaaaatagttataagaatatttttttattatgtaaaagaaataaaggttgaagcaagc

SEQ ID NO: 13057 - DNA, 520 bp, Diabrotica virgifera
ctcgcaggagatagcagcaggaaagtgattagacaagaaacgcggtcttcagacgagtttcaatcgcatggggcgagagttttcgaactgtcagttgactttcggtagtgttttttaattgtgcgtgcatgtgacttgtggaataaaaacagtgaaacataagttttaaaaggacgagttttacttgtggactttcaatttatttatatgcaatcctttttgttaggaaaccaagtccagcagttcatgaacccagaattcgctcaggtacttgggaagaaccgacatgtgaacatagagtggcgcccccgcttactcactcccgcaccctgcaacacactggttctcagaggagttctgaggacagttggtgttcggggtccgatccagaactgtcttcggacgaggaaagcgatagaagcggcgcatccagtaataggagtaatggtcagcttagaaacacgctgaacaaagcacgtacgctgtgtgacaaatggcggggaagtggaggcataggttc

SEQ ID NO: 13058 - DNA, 518 bp, Diabrotica virgifera
gcgtgaaatagatttccgacttatttcgtatgctttaagtgatgacgcacgggtaaagactcgcgggctcaactgtaaacaggtaaattttcactgtataccgggtgcaccaatgaagccgtgtccttctctaaaacttcgcatcgccctgtggagcattctaacattctacaaaacactcaaattcaaacccaaatacagcgtcatgtcctctcaacattctgctttttgagtcattcgcttatgttggaccgtcaaaaagttaggcacttcaacagtcagccatgctccttcatcaaaacagtatgtttttaaacaagcatggcaaacttcatggagccattctacatgaaaaaacaatgacggctcgcttcataaacccatgtccgcaaatgcttaatttctaagatagagggtgctgaaatcccttgttacaaaccgacgatttatttattgctttaaagcaaaatttggtgggttttaaagcaataaataaatcatcagtttgcaagaaaaac

SEQ ID NO: 13059 - DNA, 525 bp, Diabrotica virgifera
attcatggcaaggtgacatttttatttttttgcatggcttagtgcagcggttctcaactgagtcatgtaccacctacagttatttttattatatttggtaccacctatatatttagattgtattatcaagacatgctaagaactatagtatttttactacaggggcgatattacgtgggtcaggggttttgacagttctcttacgtcagaaattttgacctacgtaatatcgcttttgtagtaaaaatactatactattttaattttttagttttgtgtacccctgcaaataatatgtaccaccagtggtacatgtacacttcgcatcatataaaactgatacactttttttcccaatgtaaacctgtgttcagactgacaattattgttcgtgaatcacttcgttgttcccatcacagataacggaattgcactaaatctaaatacaaaaaataacatttaaaatgtatatttttaaattccatacttgttcactgtaaaagttattcattttgtattaatttc

SEQ ID NO: 13060 - DNA, 525 bp, Diabrotica virgifera
  SmartBlast Evalue=4E-29; Info=Reverse transcriptase n=1 Tax= Aedes aegypti RepID=Q4F8P9_AEDAE
gaagacaacaaatatccaacatgactcttctgcgttcaagagtttgtaaatttaatctctttaatatattatcataagtataatttctaactgttaaacccatcttaaaagctgcgaaacgtaaaaatttgttttgaaccttttcaatatttaggatttgatatgcataactaggtgaccagataatagaaccatattcaataattgatctcacgatactgcaatataagatttttattgtgtgaattgacaaatcttttgatgaacgcaatacaaaacccaacatcttaaatgctttcgaaacagtatggtcaatgtgagagtaaaatgttaatttacaatcaaatattatacccaaatcccgaatttcgttcacacgtgtgacaggagtattattaataaaatattgatggtgaataggcgaatgggatctagcaaaagttattaaaaagcatttattaatattaagttccatatcatttctaccacaccactcataaaaatcatttacttgtgactgaagct

SEQ ID NO: 13061 - DNA, 522 bp, Diabrotica virgifera
atctattacaatttgtgctctttgattccactttgattttggttctcactattcttaattacaaaaatattttaaatctttacaaatgcgtaaacaaggactattattattacaaatgtcttgaaatgccaattttagtggataattagtaaacttgaaaataagtattcccgaaaaaaaaaaaatgaatctcaaaaaacatgaactattttgattttacactgaattatccgacagggtcaggtttatacgtagtgttaagtacctacagctctcatatgatgttgagaatttccaacaaacacttattatgtttatctaagcttgaaaactcctcggctgaaattctatttcttaaaaaatgcctgcaattatttgcccatacctctggcgtgatttcatttatcttgatgtttgttatctcttaaacatctgctaatttaaaagtagtgtttcttgccactacttggttttttctaaataatccatatcttttcagtcgggttaagttctggatgataa

SEQ ID NO: 13062 - DNA, 525 bp, Diabrotica virgifera
  SmartBlast Evalue=2E-41; Info=Fatty acyl-CoA reductase 1 n=1 Tax=Camponotus floridanus RepID=E2AK99_9HYME
tgaaaaagtgggaaagatacctctaattatctgccgacctgcagtagttattccttcatttcaagatccaatacccggttgggcaaataatttacaaggacctatgggtctatttgttggtgctggtaaaggtgtcattagatgtatgtatatggatagcaaatcatacgcaaatcttattccagtggatgctgctgtggctggaatattggtattttcttggtattatctgaacgtaaagggcgctccatatatatttaacatctgtgtcccagaaacagagtttaaagaaaactgggaaacaattttgaaatctgctcaggaggttattgaaaccgatgtacccttcaatggaattctatggtatcctggaggtacaatgaccaaaagtaaaacttatgccaaaattaatttcttcctgtttcaactgattcctgcgatatttatcgacttaatattattttctttaggatacaaaccgattttgtacaatattcaaatgaggataaacaaaggaactgaaat

SEQ ID NO: 13063 - DNA, 523 bp, Diabrotica virgifera
  SmartBlast Evalue=2E-42; Info="Hes-B, putative n=1 Tax= Pediculus humanus corporis RepID=E0VFC4_PEDHC"
tgtgttggggggatgtataaaaattattaaaaatatacttttacaaattaatccataatttacttcggcaaaaatgtcagcaaaaactgtggccactgcaacagtgagagcagttaaaaggagaagtttgttacccactcgggcagcattacttctgaccccgtctgcagttaacaggataaaggatattttaaaggataaaaagcaatatattggactaaaaattggagtgcgacaaagaggctgtaatggattgtcatatactttagattatgctgaaaagaagggaacaatggacgaggaggtgattcaagacggtgtaagagttttcattgacaaaaaagcacagttgacactactaggtaccgaaatggatttcgtagagagcaaacttagctcagagttcgtttttaataatccaaatataaagggaacctgtgggtgtggagaatcttttagtgtatgaaaccaaaggaaattaaataaataaatatatgtgtgatatattgtagcttatagtaac

SEQ ID NO: 13064 - DNA, 521 bp, Diabrotica virgifera
attccataaaagtaacaaaatcgcccaaaatttcccaaaattatttattccatttcaaaaaaaaacaaaagctgtgacttgacttaatcttctacttctccttctccaccagtggctaaaaaacaaaccttgatcagctggttggccttgagcatatatgaaacagggcctctacaaaaaggtgtatcaccttatcagaacttgacagagaaaaaatctaagtaaaaattgaagtttgatgtccatgcttaaagttcattgaccttgattatccttgaatggaaacagctttttaaacgaatataagaaagtatttagacaagtaaatggggatcttgcaatcaaagattacactctggagttatttaaaggagagaattagcttatcattgatttcaaacttgtggagtgaaaatgtaattcttggaatttttttgatctgtagaacgtagattagaagtagatattgaaactgtgataactgaagaatagcaatgttttcaatctaatctaaacatggt

SEQ ID NO: 13065 - DNA, 524 bp, Diabrotica virgifera
gtcatcattgctctcagcctcttcgtcacacgacgcgtgataaatcagttctacgttgttgtaaaatatgtcggcgcaaagacaaatctaattctgaagctaacgttgaatgattatcttccagtttctttgcaataaatttgagcgtagcttcagcagtaatgagattggcatcttgaaggcaaaggagttcgagagcaagtttaccggcttcaagatattttttagatttactaaagcaccaaaactcacaaaagtcaccgggcgatagcgctggcgagaggtcgaatgtacgcttttttcagtcccgcaaatcccgcggatcccgcgcctgtaatcccgcatcatgcgggattggaacatgacgcgggatcccgcaataccgagatctcggtattccgggattggaagccctacttacatcctaggggaagaatttttggatctcaagtggcaagcgtccgatcctcttctttcgcgacacatgtgaatttcgataacatgctagcaaggaacaacacagg

SEQ ID NO: 13066 - DNA, 523 bp, Diabrotica virgifera
gattgaaaacttagtctatttcagatatgtttccacacaacatgagatgtttctctgatctgagcttttgcgaatcgagagtttactcttgcatgagacaagggttctctgacagcactcttaaattattgtgagttgtaaagtgattttcaagatgggcaactaataaagatgaagaaaagctgtcttctattaccttctaaaagaaactattaccttaccgttaagtttttaatagaaatagaaggactcatcgatattgggtgagggattggttaaaagaagatcatggaaacattggaagaactggaacggaaagatgcagaatgttataaaaactttattcgaatgtccgacgttgattttcaatattggtgaataaaataaagtttgaattccaatttgcagccccacaaattggaataagattcatacaactttattaacagttaacattacattctttcttttaacacccctttaatcaatcggtttactcatttttttatttttatctcacgac

SEQ ID NO: 13067 - DNA, 524 bp, Diabrotica virgifera
gaccgcagcatgcctctccacacaatcacagcaatcaactgtgaaacaactagcttcagcaaattcagtgaaatttttcagcgctgcctcttggactattatccttcatccgacttaaagctaagctcgaggtcatcgcgaccggtggatgtaaaaacgacaaaacagaaaacgtagacctactaaggattttataacaattacgttggaaatcggtccaatttttgactgagaaacctacgagggcgacgtaacatacatcactacacgagctgataaaatgtacgactagtcaaattgatgtagttttagggatttctacagtaggtacaagaggcttagtttctcttaaaggtaaggtatgataaattctcccaacagtttgacatatatctaatgccacaattccaaatctgtgatacatttcatagaagaaaacgtgtcaattctggaaaattgccaggcaataaattcctaaaaagaaatagagcgttacggccatattcgagcatatagacaaaaaa

SEQ ID NO: 13068 - DNA, 521 bp, Diabrotica virgifera
  SmartBlast Evalue=1E-34; Info=Reverse transcriptase n=1 Tax= Bombyx mori RepID=Q5KTM2_BOMMO
tgtctatttgtgagtacctttgctgtgtagtagtaagagtttgagaagcaaactgtaagggtctctctgtaccatctggaaagatatgtgaaagtactgcacctaccccatagggtgatgcatcagttgctaggactaatggtaaatttgggtcatagtgacataaaacatttctagaacaaatgagtttttttgctttgtcaaacgcagtttgacaagtattcgaccatttaaaattgacattctttttaagtaaattatttaatggttgtaaaattgtagaagtatcttttaaaaaacgtctgtaataattaattaggccacagaaactccgaacttgagttctgtttgtaggtattggagcatttgcaattgcagttaccttatctgcactagtagacacacccgttttactcatcttatatccacagtagtcaatctcgtctttgaaaaattcgcttttatccaaaattttatatgtaaattatgttcagataatttctttaaaacttgttcaagtc

SEQ ID NO: 13069 - DNA, 524 bp, Diabrotica virgifera
tttcctttcgacggatatggattaataaacaccggaatatttgtatgtattatgtacattacgttttttaaggtaatctatctcataaaaagatgaatttgttgataaattataatttttaattttatttgtgaatatgtaagttttttcttagtgtatatattcaatcaaatgtagcccgataacctaacaaaatgtgtatataatgtatatactgttgtaccatactgtaaatgtttgccaaaaaaatgttaaaacaatgttttctatattaattttcgttcgtaagttctggtattatagaaacggtgtttcataatgaatggtacgatattttgtttcgatgtttctattactttcaatatcggtatgtatcaatttaaaaaagttttcagacaagtgtaatttttttgaaggctattttagaaaattattatttccgtgaaatattttaaattatagtacacactgcttcttgcacataaaattaaccagtctttaagttgtgtaagaagaatggcaat

SEQ ID NO: 13070 - DNA, 521 bp, Diabrotica virgifera
tttgagaatactacgaaaagtgcaaacgactttgctaaccaaaagaaacaagaaattcagggtggactccaacaatttggtcagagcatagacaacaaactagcagagacggggaaattgttccagaataagatgcaggactcagctaatttcttagataatacacgacacgatttgaagcaagaagccgaagaaagtaataaaagaatgcacgcggatttggacgatgcggcagatgctgctaaaaatatatttggaaagggattattctctaaaaaataaagatattcttcagggaaaatcaagtgagagatgtgttatggtcaattaaaaataggtccaaaatgttatatttgttgttaattttataagatgtttgtgttagtatacgctacattatttattttttacacagcttacaatttgcttcccgagtaaacaaaacaggttgcaagcaaaatggcctttgtgaatcaggtaatcgatcgattatggccctaaaaagaatatctagtattgct

SEQ ID NO: 13071 - DNA, 517 bp, Diabrotica virgifera
aattattaatgttacatacatcccgccacaaatggagaaacggaaataacatagtgatattgcaattaccagaaagaaacataattaggtacatcgatttaatatttattataatttttaaactagatacatacaatttaaggcagaaaacagtcacatttaaaggcatactaggtaggtaggtataaagaatctatgaaagaactttataacaaacaataaacattacgtaaccatcagaaattttaacgatagcatttatattatagctataatagacgtatatattatgtataactgttaattttaacatccagtagtccttttagctatttagctgatctttttatttaatagtagaatttgttttaaagttctttaatttatattattttgttgaatatttttcccgacaaacaaataatcttataagttaaatttaataatagggtgacacttttttaaatactataaattaaacaacaccgtgcattcgctaataaaaactacagtttac

SEQ ID NO: 13072 - DNA, 522 bp, Diabrotica virgifera
ccgttgctttgctacgcttcgctaagacttgcttacgctttcgctataaaagttatagagtcccactgcagaaaatttacgtcttttattagttttttaaaatgtgtacgctaaatagatcgcaacaaagacatttggtctcggatgactgttcctgtccgataccaattggaaatagtgtttgtggtgaaacaaaaacgttagatattattaatgagtttaaaagactttatgaagagaaaatgcaggagatagataatactagttgtggagactgtttgcaggagaaaatgcagctacagcagaattggattggagatttgactgaacaaaatgagatgcttgtacgagccgttgaggatttagaactagaagctaccgaacgtgttaaaatgctagaagaaaagttacaaagaagtgccgaatgcatttgcgaggtaatgaagaagtaccgagaaaacgatatcgctggaagtcttctggacgaaccacggaagaggatatttaatctagagaatgata

SEQ ID NO: 13073 - DNA, 522 bp, Diabrotica virgifera
taattttacgcttaagagtgttatatcactttttagagggatttgcccaatgtttcattgtatttgctgttattaagctcatattaagtttgttatttattttgatttatttctgtcgctgtaaaacttctattgcatttttcattgcttttagagattttctatataaaagtagaaggtttgctctattccttttcaaatcagtttcaaacttgttgatattatcgtaaacgagaaagatactatacttataagatgcccctaccgtaaacagacctcttttgaggtgccaaagctgttggtggtataggtatttaaagagacacggagactggaaatcaacctctctagcagagggatgtctagaagattctttaaaaaccaaaattcacgtagcatcacagattgaaaaaggtggtaacgaattaatatttcgaaaagtagtacaaataccgatacgtctaataatactaatttcaatactgccactttagcccaatagatgaccgttttggagtgtaa

SEQ ID NO: 13074 - DNA, 523 bp, Diabrotica virgifera
  SmartBlast Evalue=1E-44; Info=Peritrophic matrix protein 5-B n= 1 Tax=Tribolium castaneum RepID=D1MAJ6_TRICA
ggtgtcgtttgcccagcagtagatggacccgattcagtttatttccctctcagcgattgtactaaattctgccaatgttccaacggtgtgccatatgaacatgattgtcctgctggtcttcactttaatccaaaattgaatgtttgcgattggccagagaaagcaggatgcgaaaattcagacctagtgacaacagaacagactgttgcaccaacaccagattgtggaaacgacataaatccaactccaggtccaaatttgtgtcaaaaagaaggtgtcgtttgcccagcagttgatggacccgattccgtttatttcccactcaccgattgttctaaattctgccaatgttccaatggtgtgcccattgaacatacatgtccagcatccctttatttcaatccaactttaaatgtttgtgattggccacagaatgcaggatgcaagaccgctacataaatttcgaatacaaaattcttgttagtatttaaaatgtgccattaaatttaataaaacataaacc

SEQ ID NO: 13075 - DNA, 522 bp, Diabrotica virgifera
  SmartBlast Evalue=2E-26; Info=Cellular retinaldehyde binding protein n=1 Tax=Culex quinquefasciatus RepID=B0WNM0_CULQU
ttcgtaagtaatggaaaacactttggctagatcagctccgttgaacttctcaagattgaattttgatacatcgtaaagaacaactcgtctaccacaggtatctctaaaggggctcacgtataaaaatccatcgccaatgatttctgatacgttaggctcacaacagtccaaattattcatgaagtatttaaacctttttctataattgagatacttcaagagggtctgttctgccataggaatgctgaacttcttgactcgaagaaatcgaagcaaaaaggtatcatcagtaagacagttttctatatcaggattctgtttaatccagtttctgagatgctcgagacactccttacggctagattcactttctctcagttccctactggctatctcatacagctctttttttagttttttgttctttatcttaatactgcaattatctgtgttgtagcggtcgttccatgaattaaccattattagctccgacgtggtcatcttaattaatttattcacacg

SEQ ID NO: 13076 - DNA, 522 bp, Diabrotica virgifera
  SmartBlast Evalue=9E-86; Info=Cell division protein kinase 9 n= 1 Tax=Culex quinquefasciatus RepID=B0WPZ6_CULQU
ctcgcccagtaataactctggtggtcggtaccagagcgttaccactcgatttgtgaacctattgggtagtccatttttcgtactactaaatgctctcgccaatccaaaatcagctaatttcaatactccattcttcgttatcagcacattagctgctttcatatccctatgaagtattttgttgctatgaatataatacagtccgttcagaagttgttgcactacttttttaatttcacccaaactaaacttaacattagagttcgatagcaaacccgccaaatcgtgttcacaaaagtcaaaaactaaataaaaagtcgaccggtatctgttgtgttgtgaggcttgagtcctacatatttctataagattcactacgttttcatgtttcagaagttgaagtatccttatttcacgaagggcagtaattggaaacccttccttttcattgtccataagaacttttttcatagctacaaactttttaggattgctcttgtcccgtgctttaaatacttcccc

SEQ ID NO: 13077 - DNA, 524 bp, Diabrotica virgifera
cattgggaataagctacaaaattagtttatttccaacctaaacagtaaacaaatatatcacaaaggattatttgtagaattgaaatattaattcttctttatttatgcgtttataaacgcgacggtaggccccatactatagtagacttcaatattttaaaatcgatttcgtattttaagttgttcaaaatcgtcaaatgttcctataagattgttgactatatgttttgtttaccagctaaatctttttttaaaaactaagtcataattgaacatatattccgttttcttgcgctttctggaaaaactaatttgttagatatactagaataaaaattaattggtagaaagctcctccattagatattgctacaaatgtgcttaacgcacattttaagacaattttccttatcagagaaactcacctcttcgtaatcttcacaattggctctttctgaacagtgttactaaaatgaaacattttgggatatcatttaatagtataatatatagtctcttaagtc

SEQ ID NO: 13078 - DNA, 524 bp, Diabrotica virgifera
  SmartBlast Evalue=3E-40; Info=Histone-lysine N- methyltransferase SETMAR (Fragment) n=12 Tax=Harpegnathos saltator RepID=E2C6C7_9HYME
tgtagaaataaacacgaagtgatttagaattgccttgccaaacatcgttatttttataaagatttacttaaaatagttgttatacgatatttgttactaaggcggttcgataagtacgtagcctacaaaaggaaaacgagaattttgtaaaagtggcgatttatttctcaacataatctcctattagtgtgatactcttgacccagccatgctccaacttctttaacccatctgaaaaatacgttttctcgaggtctgcaaagtagtttttcgtgtcgacgacgatttcctcattcaacttgaatttctgcctagccagtgcctttttcatgtttggaagcaaaaagaagtcaattggggtcaaatctggagaatatggtggatggagcaacagttcgtagcccaattcgaccaatttggtcatggcgacggtggatgtgtgagccggtgcgttgttatggtggaagagcacttttttcttcgccaaatggggtagttttttctgcacttcggcgtcgaatcgg

SEQ ID NO: 13079 - DNA, 523 bp, Diabrotica virgifera
gcacgtctaatgcgcattagacgtgcggatgttatttataaatatatgcactcaatggctgaaaatgaatctgaattaaaatgaaatggaaaaaagaccgttttagtgcaatattcacaccaaaagtacagtatctagagctacctacatctccatgaattaaaaaatcaatagaagctggttgatatattgaatcaaagcagacgtgaatgccttaagattccaaacaagatgttattatatctataaccacaactttagtaacagattatttgaatctgttaattctagagctcttaaatacacatacaatggtcagaaggttgaaaaagaatatagcaaggaattttgatcatgtaaaatactggtgatgtcatctagccatcgtttcaacatcaaagcaaaagtggggggaaactggtactaaatagcataaacagagaagagtggagagtttggcctttgtccaggagtgggtgcaaacaggctgaagaagaaaaaacactggtggcactggatagca

SEQ ID NO: 13080 - DNA, 524 bp, Diabrotica virgifera
  SmartBlast Evalue=6E-40; Info=GRAM domain-containing protein 1C n=1 Tax=Camponotus floridanus RepID=E2ARN8_9HYME
cgctgctaaagataccttcggtaggtttcttctttgccggcacactttcttcgatagcacccctaggactattgtgtcttcttttcctctttgttttccttttaacttcaggaacactttcttcggcttccgcatgcaacgctctcgataaatgttggacatagtcttctacgcccgcataacaatttctttcaatcatacctttaactaaaccccaaacagactttttgtatttcacttgtgctataatagttaaggaagaatgtgtctcagatactttactaaggcagtagtgagcgttgacacaaaaactatcggcgtaaggaactccagcgtttaatgactctatatctattgaatacaattgacctgctttgctgcagggattcatagactgtctctctgtaacttgtgcagatttgggtcccatactcgccataagagctactgttaaactgactactctacttttactgttgtctaacggattatgggtccaaggagtttgagtaaggtctgtagtt

SEQ ID NO: 13081 - DNA, 515 bp, Diabrotica virgifera
atataattacttacattctaaagtttccattgctgtggattcgaaccaatatctctgtgcactgcaatgaagtatcatggcactacaccactcaggaaataaataaaatatataataatgcccgtaggaataaaaaaacggttacatagtagtacaaaatggaaaagtaaaaaataggtagttacctatattatggtataactgttgcatctagatattttatatgacaaagaaaaatcaaatagaaataaatatgataatggttttctagtgtcatgtctaagcaattaaatattttgttgcaaatgagagagttaattaaatgccacgacgagaaagttttaacctattagtgtccactgtaaccataatatggtaacaaagatcacttgcaataaattgactaatctctgtgtagatttccttagtttatgttgactgcagtgcattttgttccactctcgttgtgtctcctgagaaataaactcagtcattgtttaatgcgcaagccaggt

SEQ ID NO: 13082 - DNA, 522 bp, Diabrotica virgifera
aggatgtttgtaagtaaaaatcgaaatttatttttatatgtacagaactttatttacttgtccaattttctaattttggaaaacacgaggcgactattttgtgataaatcttaagattaattagactaatgttaggtatattgtcgtcgggaaacttttagcaacaatgctaatgggaatatctctgaaatggtagaaaattttatgcttagaaaaagttttgttctgtattattcagtgtattaacaaaaactttattatatacaaacttactttttattagttttttcttaaccaactcgaactaactttagctgaatttgatttcgaagatattttggtagtattcctaatcctaaatgtacaacattagtgtttgtttgtttatattatttatgacatgttttgaaaatctgtgattgtattttaagcagagttaaaatagaaatgaaatagtattaaacttataattgtatatttctttcatatcaatttaaaacttgaatgtacgtacttaccctc

SEQ ID NO: 13083 - DNA, 524 bp, Diabrotica virgifera
gtgatgtgcaggcaaagatgcattttctgcgtggaaaagctctgaatattttaaagaacgtatgagctatgagacagagagtggaaaatcgatgttagtatgtaacgaacaagggagtcttagagtcaaagaccgccagccgaaccaagaattagctgagtattatgccgctttgaaagttgaaggaaacgtcgaaaaatattacaatctcgaaagattaacatacgacgagcagatcacaggaaatattgcgctattgggtgaacaacccagtcttagaaacttgcgttatcctgtttatataacgagagacaagcgagtttgttgtcagtacagcggtttagcctatatatccgttcgcaattttaaatatacatagagcttcctcttcctaacagtcgggcaataatagactttaaagtaactaatcaccccataagaactaactggctgagaggtagtgtcaaacttttacggtgattttagcacggattctatgaatttattttggtatatagtaccta

SEQ ID NO: 13084 - DNA, 523 bp, Diabrotica virgifera
agaggtgaacgtagaaactgacgaagtctctggacagtgttgtttgtttttcaaacataatattgaaagtagcaggaggacggaagttgtccagcggtttttgaaaagtgtaaatacagatccaactccaagaagacaacccagcaccgtccataaaatagtctatcccgacgatgaaatcaggcagaggaaaccagtccaaaccaaaaataaaggcaattcagaccaagatattgctactaggagacttcctcctgtagaacctactgcttcaaaaaatatcagtctaggaatgagggtgaatgtggatgttccagatacgtgtactaaaggatataagaaagacgccaatggagaatgcatggaagttttcgatgattagtaactaaaatagtggagtcactgaaggtggatatgagctattacctccgagttcgttggacctccatcgatttgcatgaaaattggtgagtggttggaggatatctcaaggaacaaaggtgacatggtgccgacttgcgtc

SEQ ID NO: 13085 - DNA, 522 bp, Diabrotica virgifera
  SmartBlast Evalue=4E-71; Info=IKK epsilon n=1 Tax=Tribolium castaneum RepID=D6WPQ6_TRICA
gctctgctatataactttgtaaatgtgtataattctctattggaagtatatatattttaattagttgggctttatttacgtgaaatatatgaaaaagtttacgagaaagaatgacatctacttcattaaaaaatttgtcaaatgaccaaatttttctatgatctgcctccaatagacccgctaataaaggagttactatctttttaagaccataacttaactgacaattcattggaagttctcttttccattctattggtccaccctcgcgatattgtataccagatattaccccactttctttttttgttagtaatttgatgcatagtttccttatttcgacgtcccccgtatggtctaaaaggtaagtttcctgtagcaacatgatacaaagttacaccaatggaccacaaatctatagttgcaccaaaagttttgttagcaggtttccgtagaaccgctctttcatacatatctgggtgcaaatactcttctgtaccatacaacgattgaaagtattgg

SEQ ID NO: 13086 - DNA, 524 bp, Diabrotica virgifera
atttcacatttcacatcatattttccgtcaaaatgtgaatttgttacaacaatttgtaacagtgacaaagtattaaatctggttctcaatcgcaacgcataatacctttttgctataattactgtgttgtttattcttcaacacccactgatttgaaatttaaaaaacaaatcgttaaagacaagataaattttattgcaatacattacattccaattttcgaaagcatcaaatttaagactgcagttttacttgaaacagtctctaaataaacattaatcctaaagtgagttgtaacgaataaggcgataaaatttcagggtatcatccgcatttcgtcgacattattagctatattgtgttgctgtgcatttaacgttattccatcgatatgtgtgtgatacttttagttataattacagagtgcttttgaatctttcttgcgaatgttgcaaaactcgacgaaattgtcgtactgtagcactctttcgtgcctgtctcatatgaaagcatagcgttcaata

SEQ ID NO: 13087 - DNA, 521 bp, Diabrotica virgifera
atgcagtatatggtattagcaactgagaatccatgagtccaattatggtaaggtactcttcgataatttttcttcaccgtaagagcaaatcgtaaaagacaagtctggtcaaatagactagcatcaaataagtcattaaacatatgaatcgcttgattggttttttccaagtcttggatatcgaatgaattaaagtagtagttatcgatgccaaccattttgccgtgctgtttggttttaagtgcagcattatattcttcttccgtgcaagtattgtggtagcttagaacatctaatgctaccttatatttttgttgtgattttctaattttgtcgtacaactttgcatgatggagtgctaaaccacagtatacggcaaacgtttcaaacgcttcttcgtctttctttgtaaaattgcctttgtgtttattaaccatttgaacaacaccaataatatggccttgaatataaataggcatacaaaggatggtttgtgtccgatatcctgttagctgatctac

SEQ ID NO: 13088 - DNA, 516 bp, Diabrotica virgifera
  SmartBlast Evalue=2E-26; Info=Endonuclease-reverse transcriptase n=1 Tax=Schistosoma mansoni RepID=Q4QQE8_SCHMA
cccgtataagtttctctggtatttttatgtttttcagacttttccataattttaatctaggtactttatcgaatactttttccatgtcacggaaactgaggtacgtttttttcttcctagataatcttttatttattatatcgtttaacgtaaaaatgtgatcttgtgtgcatctaccaggtctaaaaccactttgcgattcttctaaagtttgttctcttatttttctcagtctcctctctactattagctcataaactttcatcactgtacttaatagagttattcctctatagttgctgcaattcttgttggcacccttcttatgtataggtacaatcagaccaatttcctagtctgtgggtatttgttcgtctctccaaatcatatgaaatagttctaatgacttttgtagtcccatatcacccatgtttttgatcatttccgccgtaatttgatcatgacctgggtgcttccattttttaagcttcctaatcgcgtcagttaattcatcca

SEQ ID NO: 13089 - DNA, 519 bp, Diabrotica virgifera
gttatctggggttcgtgagtattcgtgtgtgtatttttatttgcaggtaagtgttggcttgtttcaggtgaggttgattttttgtttgggtattagaggatgactcagacgatgtaggtgttgcgattgtagtgttaactgaagaagtggtcacatgtgtaggtttgttttgtagtgaaagttgttgggatgggtttattgataaatgtgggatgactaccgtttgtgatgtggtttgagaaggcttagtaagtgtggagggagtggtatttgaaattgtcggagtattttgtaaattatcttgttgagtatgatttattgatgaattttgtcttatctctgtttgcactgcattatcattgtaaggatggttatgaagggaaatatttggacaattagctgcctggtgtccagttaatttgcatttgaaacatgtttcgttttgggttataaatatgcgggtatgatgttttgttctacctcgatgataaaagattccggtaatacatggttgtctgg

SEQ ID NO: 13090 - DNA, 520 bp, Diabrotica virgifera
  SmartBlast Evalue=5E-29; Info=Sorting nexin-29 n=1 Tax= Camponotus floridanus RepID=E2ACM0_9HYME
ctttggtagtgtcaatatttggataccgtcggcgtttttgacaggtaccgggtcaaattcgcatcacgtatatcaaatatttttgagagccggaaacgatgagtggaacatttatagaagatacgctcaattccatgcgttacatacggatctcaagaaactagatcctattgtaggcacttttgattttcctccaaagaaaagtcttcggaaaaaggattctacattggttgaagatagaagaaaacggctacaaatatatctaaggcgagttattgctcactggccagaactagctcaatgcaattgcaggttcctcctagaacagcatttatcattttttaaggaccaacgagaagacctccatcacaaaaacgcaaatcctattcgaagaaatacagctcctaataccaataatcactcaggtctttaataataattccattaactaagtttatatttatttgagattatttgagattagtttaattagagcgataaagtaatatttactgaataa

SEQ ID NO: 13091 - DNA, 521 bp, Diabrotica virgifera
attacaaggcctcatattttaagaaagaacacgtcgaggagaatccaaaaatgtaaaatatacagggtgtcccatttaaaggaacgaagttgtaagcaacttccggtataaccggaggtagcaagtggatggaagtagtttcattaaatagataagtcctcaaaaccccttcattcaaattttcatgattctgttgcctttggttctggagatatttctaataggccctttatttgcctcaccctgtatagtcattttggttcttttgtctaataatttcgatgccgtcaatcttatgttagcatagtatgtacgatttccactggaaatacgtgtattagtttcgatatttacggaattcttctgattgatttctgtgccaagatatgtgaaggcatccatacgttcaatagtgtagttgtctattaccatattattttcattgtcaggtgttaatgtcgcttgtgactagcaataaacaggaagaaataactccattgcatataagcccgtaaaacaat

SEQ ID NO: 13092 - DNA, 521 bp, Diabrotica virgifera
cagctactgttaaatatttccaagtcatagatgcttgatcaaatgttaagcattgtagcatatttgacagttccatggtttagtttctgtttctcgtttgacctattaaatgtatagcgttttttataaagatatatatcatgatcctcacgtataaattgatatttagaagatatttcttttgtattttgcttttttgccttacttctaatgtaagactgacagtctacatggtgtcacgttgataattgaaaacaaaacagttactgtattttaagaacaaaatatgacattttggacgaagataaacatgatcaaattcacttgatatatcatatcactgtatggttattatttgaggctatcagagcaacagtggtctaagaccaaaaacgaagttttcagacaaatgcaaccctggcattcgtatttccagtatatttgttaaggcaacaataaattatgtatgcagtgccatctagcctgatatagagtagattgtgtaggcccctgttaaaccg

SEQ ID NO: 13093 - DNA, 523 bp, Diabrotica virgifera
  SmartBlast Evalue=7E-30; Info=Transposase (Fragment) n=1 Tax= Teleopsis quinqueguttata RepID=A5WZ66_9DIOP
atatacggtggatggtttaacaattcgatgttttgaagctccaaaaactctattgtcttttgggcagtgtgagcacttgcattgtcctgatgtaggatgattcgccgtcgtgtacttctggtaaacaaacggttatataccaatcagaaataaccgttctacgatcttctaaagcaattgttgccacatgaccagattttgacacaaaagttgcgaccattttctttaatacatttcgagaacgggtgacttttgttggtttttccccatcgcgaaataaccacacagcgaattgatgttaagtttccggttcgtaaatccaagattcatcgccactaacaatacaataaaagtttttgagcttcctttgttgaaccgttacaaacaattggtgtttttcgacaccaattgacgcaaaccgtttttgctcttttgtgagcaaatgggggaacctacacgacttgttgtatcacaatgaaactatggatttatgtcaacaagagtttaaggttacatttatgtc

SEQ ID NO: 13094 - DNA, 522 bp, Diabrotica virgifera
agccatggttagttttggtttctttctcagattacaaactcaaagaggcgtctttgatctaaaataataaacatttatgtcgttggtatcttatctcacaagactgttgtttacttatttgagagtttgtgaaaaagttaattctgtcttgtttagtgtcaatgcctcacattataaaaatcagtattatatatttggaattttctttatttcttttaatcacagttcttaccccctttttcaactgttgttctgatacatgttgtactcatacatgattattttgatcaaattttgataattattctcatagtaggtagtaagtctgttcaactttttgttatgtatgaatgtaattgtaatctcagtgagccccaaagaatacacaagttataatttgacaatgctttatatattattcgctaaagttattatttattgatttgtacttattctaggagtagtttatgtatttactgtgccatacataggttaatattgtaatttatgtaaataaatatt

SEQ ID NO: 13095 - DNA, 521 bp, Diabrotica virgifera
  SmartBlast Evalue=2E-60; Info=Ankyrin repeat-rich membrane spanning protein n=1 Tax=Camponotus floridanus RepID=E2AU14_ 9HYME
cttcgtacatatcaaaatggtgaatgatccaggacgtcctgaatggccattgctctgtaatattgatccacgaagctaatcgataccagttaaaatctatttggaatgatttaagtaatcggcctgaaacatacacaacattcatcagtcttctcatcgaacgtgggttcacatcgctgaaatagtcatcagtaagtaacatcttagtaagatcctgagcgccacctatccgattcagattggaaccgatcgaacttgctacagattcggacatttttagtttcctcgacccttttcttccggggaactttcctagattttctgtactggacatcaaagctttttcgttggacaatcgtctgctcgatgccgatcgagccagaaaactgttgagattctcatcgttctcggtccaatttccgacttgtttcctatgcgcaagcgcagtctgctgggcaactttcacttttctcaaaccggaattttgtagatagaagggtagatgtaccatattgcttaga

SEQ ID NO: 13096 - DNA, 518 bp, Diabrotica virgifera
tggtaaatagtaaaccagaaatattagtttttttcttaaaattttcacaatatgaatgattttttaaaaactcttgctattagaagctatatttatgtgaagaatatctgtaagcatgaaacgggtgagagacatcttaattacaggagttggcaagtaatcgatagatctaaaatgtctagaatgtagaagaatatactgttgttaacttctcaagccaaaaaagtgttcagtaaggagaagaggcaggcccagagcacgatttaaggatctggtggaagacgagttgcgggtgttataaatgcgaaattggaaaaccaaggcgaaggatatagacggagaggcagcgttgaaaaatctctttcaatttaccaaagctaaacttttcacggttgaccactgtgactatgcagagaaacacactgcggtcggtcaagcgaaacgtagtacaggggtactgagagtccatcaaagccgcttccctacgaaggcaattaaatccatccacaaggctgaaa

SEQ ID NO: 13097 - DNA, 523 bp, Diabrotica virgifera
  SmartBlast Evalue=2E-46; Info=Glutaredoxin n=1 Tax=Harpegnathos saltator RepID=E2C8H9_9HYME
ttaatcgtgatagaaaattgtaaatacaaaatgaattttataaatcgcacgatctccatcagaccaaatctaaaattaatttctaggttctattgtgcgaaagcaaaggatgagattgacaaactagtgaagaataataaggtggtggtttttatgaaaggggtaccagagcagccccagtgcggcttcagtaatgcagttgtacaaatattaagaatgcatggtgttacttatgatgcacacaatgttttagcagatagtgatcttagacagggtattaaagactattcaaactggccaactatacctcaaatcttcataaatggagaatttgtaggtggatgtgatataatgcttcaaatgcatcagtctggtgatttaattgaagaattaaagaaggctggtataaaaagcgtgctacttgataaacccaaggaagagagtggaaaatgatcataataattattgtatataaaatttgactgttatgtttagtttagatgataataaataataaagtttt

SEQ ID NO: 13098 - DNA, 523 bp, Diabrotica virgifera
  SmartBlast Evalue=4E-27; Info=Translation initiation factor eIF- 2B subunit epsilon n=1 Tax=Camponotus floridanus RepID=E1ZZ86_ 9HYME
tctttactgaagtaattgatagtcttaccagaggtttcgacgacaatctattttgcgataatcttattctggaattaactcttcccgatacgcctataatgttactgtgaaagaggtaaacttcaacgttgtaaaagctatcttatgtatttccttaagggagcctattggtgttcagtattactctcacttggcacgtttgctgtcatactttgctcctgtcctgaagaattacatccgtaacgagaacgccatggtggattgcttgcaagcattacaggaagtggccacatcgaatgaaaatattaaagaaaagtgggtgattgcaatattacagcacatgtacgataaagattacataagcgaagaagttatactggattggtttaacaaattagaacataatagcacctttagtaagcaagttaaaccatttgccgattggctcaaagaagcagaagaggcatccagcgacgatgacgatgaggatgaaagcgattaaatagtttaagtttatattaat

SEQ ID NO: 13099 - DNA, 522 bp, Diabrotica virgifera
  SmartBlast Evalue=3E-20; Info="Gpi inositol deacylase pgap1, putative n=1 Tax=Pediculus humanus corporis RepID=E0VHG5_PEDHC"
tatgaaggaatatttgacgaggatttcagtgcaaccactgtcgtcagtttagcaggaggatataaagatattttgatgcatccacattttactaaaaggacaaaataacgagataatccatgtttcgacatcacacattccaatgtcttggactgagagcaaccatgtacagatactatggtgtaaacaggttgttatggctctcaatagagctttgttcgatagcgttgacatgaaaacacgactgatctcaacaaataccacataccgtaacgaggcgttcaaacatcatctcatcaagaatagcggaacaaaggttaaaaaccacgaacagtattctaaactggtcactatcaatacaaaaggcaaatggatagatgatatacgcaaagtatactcgatagaatacccacgcggactccatgaacctcactggaatatggtagggctgtctgaccttcctggttacgagattttgaccgtattggccgttaacttggaagttactgattggatcttcgc

SEQ ID NO: 13100 - DNA, 520 bp, Diabrotica virgifera
tacatggaacgattcgtgggaacaattatatccctaaatatgactaacttatgttatcatattgttcttttaccaatcttgtaaaaactttttggtatacaaatctccaatgtaataagttttattttggatcgaaatacaaatttaaaacgttcggtgcccacttgaacaagcgccacttggctggtaccacgtacttaaatcgttcgtttagtaactactgacgacactcatgcgtcgtcggtacgccctttgtaccaaaaaactttggttttgtgcggtccgtccgtccatccgaagattaatgtagcaaaaactgcaaaatatacagaaaaactgacgaaaaacagcgaattcagattcagtaccaaaagttatgtggaggaaaattatgaaaccagaagtactacaaaaaaactaaaaaaaaagtactcaaatactcacagttttctgtatgatattcgctattataaacaatcttacgtcaagatgcggtattcaggttggttaactctgtccg

SEQ ID NO: 13101 - DNA, 522 bp, Diabrotica virgifera
atagtcaaaacatgaatttttggttacggtactattcttatgtgagtgcgatacgcatgctacagcgcatactccgtgtgcaaacattttagaggcgggttttcttcaccattcttgcataggtttcaaaattaattggtaattattgaatctacgattggtcccttcaactcggatgaccaaaaataatgaattaagaacgtctgctcataaacataataaaaggaagaactttagccatataattagaggacataaataccatcgacgaagaacagaatactttagccatataattagaggacataaataccatcgactgcctaataatacaagaaaaagtggaagaaaagagatggattggtcgaaagaaacttcgatgattgcgtaatattagacaatggtttagttccacagtaaaataattatttcgttcagcaaccgatagagaaaggttttaggtctggattccgcgcatgaaaaaaaagttgatcaatagcaagctgaaaatttgtcaatagc

SEQ ID NO: 13102 - DNA, 523 bp, Diabrotica virgifera
tgtgttggggaattcccaataacaaaacaacatatataaaattctccacgcttcttgtgtttttaaaagacttcaatttgtttggtgaatgtatatataaaaatgtttcacctcagattcattacttttgttgttttcctgatatgcggtttcggtgtaatggggctagaagaacatgacatatgtaccacaaaagctggtcttcaaggtgagtgtcttaaagactttgaatgtaaatctgcaatagagagtattcgcaagggtattgtaccgacagatgtatcattatgtggtttttcaaatcaccagcccattgtatgttgtgtagatagtcctacagacagtacagacatacctattccaacttcttcgctagtacagaatgaaaataaatctgacagaactggaccaggtcctggaaataaagcaaataaaatgtgccaggtctacagtgcatatgcttacgttattgtaacagtatctctttttggaaggcctcatcggtatcttgattgtcgaatat

SEQ ID NO: 13103 - DNA, 516 bp, Diabrotica virgifera
tcattattttagtttgaattttgtatttttattggaaacttatttgtgtatttagaatgagtatacatgactgacattatgttctattattatagatttttagtccttctaccaatggtagtatgtttgcacgtacaattaattattgactatgcatatatttttttctagtgtggttatattttatacataactagaaatcattttcagtatttaggtattttatttactttattgatttgattatttatatattttgctggcattttgatttgttggtgtgtcgctaatattttctccatatgtatctttgtcttacaaactttagattatattttatatttgttatttttgatatttgggttgtttggtaagacaggcacacaccacaaagcacaatcagtccacaacattagcttctacacatgatacgttgaattcgcatggttcggatgattacagatggtcatccaaattattttctttaattggtagtgttaaacataacaattataa

SEQ ID NO: 13104 - DNA, 522 bp, Diabrotica virgifera
catgggcgaaggtaggtgggtgggaggagctacgaaacctccagaagttggtatactggtaggtatattctgcgagctaggtggtaaagccaaactttgtggaggctgaacaggaggcccaggatttagagcagactgtgtgaaactgctcaaaccacttaaatggttcggtggcatagatgaactctgactttgtggtaactctggaatttcttgtttgattttcaagttttgaggttcactttgctggtgttgtggctggttcttttctaaattacgtggactttgtggatgtgaaaatggtagtccggtcataaaactataatggttcatctgtggtggctgagatccacctattgtaaccaagtttccagattgcattagacttggaagaggaggttgaccaataggtgcagaattaatttggactatatctggtctttctggtctatcgattctttcaggcctatctactctttcgggtctttctaatttttccagtctcttttcttcttcatagtg

SEQ ID NO: 13105 - DNA, 522 bp, Diabrotica virgifera
  SmartBlast Evalue=4E-14; Info=Cathepsin L protease inhibitor 2 n=1 Tax=Diaprepes abbreviatus RepID=A7LFV3_DIAAB
cttatcgctacagtaggtataaaatatacacttcaccgatttagttatcaactttattcgtgtatctcaagctgaatttaaaatgatttataaatattttcttgttttctttgcagtttacgtaatggcgaacgcaattgctttaaatgatcaagaacagtttgctgagtttaaacaaaagttccagaaagcttacgaatcttcagacgaggaaaacaataggtttaagatattccaagacaatttgcgaaaaatagaagagcacaataaaaaatatgaaaagggtgaaactacatataccatgggtgtaaatcaattttctgatttgtctcctgaagaatgggctaatagaaaccatggatataggccaagaccaaatcatcaataatacaaaatgttattaaaaatgaaaaaaaattctcttatttgaaatgaaatcttctgttcctactttaaaccaaaaaccaattttattattgatgtactccaaatacttttaataaaatagtaagatgcaaaaaa

SEQ ID NO: 13106 - DNA, 521 bp, Diabrotica virgifera
  SmartBlast Evalue=1E-38; Info=Ribose 5-phosphate isomerase A (Ribose 5-phosphate epimerase) n=4 Tax=Clupeocephala RepID= B8JI15_DANRE
cccaacttctcagaatccttggtataatcagcaataacaacaagtttttttgagcaactggccacaatttttcttgtagcaaacaacctcctccaccttttatcaaaaccatgttggcatcaacctcatcagctccatcaatgcaaacatccaattgggggcaaacatctaaatctgccaagggaagttcattttgcagtaccaattgtctcgattgaaaagatgtaggaacgcattttattttgatgttttctttgtgataacgttctgcaagtctatcaactgcaaacacagccgtggatccactaccgaccccaacaatgtaaccatctttgacatgttcatctactgctttatatgctgctagtcttttagcttcttttaaagacgacatactggaatatggtctcagtcttgacgttactgtgtttaaaaatagtttgaatagcatttacattcactatccaatcataataaaacgattaccaaatattaaccataaaaccttattacttatcact

SEQ ID NO: 13107 - DNA, 522 bp, Diabrotica virgifera
  SmartBlast Evalue=2E-41; Info=Dynactin subunit 6 n=2 Tax=Culex quinquefasciatus RepID=B0WWZ7_CULQU
gtgaatttgtaaatatttatatttatacttaactaaaaactgctaaaaattggataatcacaacaatggccagaaacagcattaaaattctgccaggtgcattagtttgtgaagattgcaaattaaggggtgatataaccattggttcagggactataattcatccaggagctactattattgctgaagcagggcccattatcattggagataactgtcttattgaggagcaagtgaaaatagtgcacaggataccatttgatcaaaaagacaaagagaacactacaccagtgcttataattggtccttttaatgtttttgaagtagactgtagtgtggaatctccaaaaataggcagcaacaatgtttttgagtctaaatgctttgttggaaataaagtgactgtatccaatggttgcactataggagcaggttgtaaaattacagaagaacaggttctaaaagataatataattatttatggtaataattgccacttaagagaagggctggataaaccag

SEQ ID NO: 13108 - DNA, 521 bp, Diabrotica virgifera
  SmartBlast Evalue=2E-27; Info=Reverse transcriptase n=1 Tax= Aedes aegypti RepID=Q4F8P9_AEDAE
gggagaaaatatagaaaattacagaggtatatctaaacaatcgaccattcctaaactacttgataagttgatttataaccatattagttttacttgtcaacaattaataaataattatcaacatggctttatgcacaagaaatccacaactacaaacttactatcttatgaaacatctattatcagagatctggaaagaaaatgtcaggtagattgtgtatacacagacttttcaaaagcctttgataggattgaccactacttactgttacataaatttaaggtatatggtttcagcgatcagcttttaaagtggtttgctaggtattttaataggtcgcacacaaaaagtcaaactgggttcatttatgtcagatgcaatacaaataaaatctggagttccacaaggtgctcattgctcgtcccttctgttcaatctgtttattaacgacataggtgaatgttttaatcactctaagtacttgctatttgctgatgatttgaagatttacagatctatc

SEQ ID NO: 13109 - DNA, 522 bp, Diabrotica virgifera
  SmartBlast Evalue=2E-22; Info=Minus-C odorant binding protein 3 n=1 Tax=Batocera horsfieldi RepID=D4P8G4_9CUCU
gttgcggctgtggctagtaacctgcccaaccaagtatttcattttgttggaaacagaactaaataacaaattaacaaaatgaaatacttggttgttcttgcttgtgttgttgttgcggctgtggctagtaacctgcccaacctacccgaaggcgaaagacttaaactagctcaagtccacagagactgccaagccgacccaaaaacgcacgtcgacgaagacaaacttaggaaactcccaaactttgttgaagataaacaagttggtgttcatatgcgatgcatggtagtaaaagcaggattaatgaagcaaaacggaaaattggacgttcccagtattaccgaaaaattccgtttggtgatcaaggatgcttccaaggttaacgcattagtccaacagtgtgctgttgattctgaaactcccgaaaagacatctattctgttcaccctttgctgtgtcaaaaatgacattcagtattaccacaaattgtaaagaaatataggtcaataaacatattatttt

SEQ ID NO: 13110 - DNA, 518 bp, Diabrotica virgifera
aggacgctagtaatcgtggcaactctgtaatttaagcctcaaatgaattctgcatccctcctacggttcgcgcgcagctcacgtctattcctattttggttgtagtgtaaagattgcgatatgatatagaaaaacaatgaaattcgtaggatgttaaattatcgcctaccgatttcccgtaatgtattaaaaggttgtagaattgaattaaaataatacaacgagccacactccagtaaaggagcatttcaacatattaaaaaagtatttggctttatataaaaagtaaaaacattaatattataaagaaaatatgttacactttttaaaatatagataatatagataaaatatagattaaattaaataaagtactagctgaaaaaatattaattagcaaaatcaagcagcagacaatcatatgtgctgcaatatttaagctttcctctataaaaaatatttagaaataaagaaaataccttattctttaaaataagaacattaaataatatatcatc

SEQ ID NO: 13111 - DNA, 518 bp, Diabrotica virgifera
  SmartBlast Evalue=0.000000002; Info="Slender lobes, putative n= 2 Tax=Aedes aegypti RepID=Q17H17_AEDAE"
agccagaacttcacatttttccttaagaaaactgttttggtccgttaattttctatttcattgtttttggcttcgatatcttcgggggacacagccgctttcaattgcacttccaaattttatattttcggcttcagctatcagcacttggttcagtttttggatttcgttgtggtaagtaacattttcctggtgtttcatggtgaccatgttgatgagttcattgcgggaatttgtgatttcttggagttgattttggagcaccgagattttttctgtagtttcttttagctgtgactgaatttgggttagtttgttcagctctgcctgcaaatttgctttttctaaaacagtttggtctaatattagctttaagttgttataatctatattctctgatatatcttcagttacattctgtactttttgcaaactttcagtcttggcaacttccaactgttttctaaatctgtcaccaagtgctctagttcttctatcctctgttgatcattatcctt

SEQ ID NO: 13112 - DNA, 521 bp, Diabrotica virgifera
gtggaggagagggtagggtgggaaaccctgcagactagcaggcactgtttcttctaccaaacggcttctacattagcgacttattctcacaacataggctttctatgtgaacaaaagtatgcagcgtaatgtagtttgatacgtattgatacgtacttttatggtattgcgtgatatttgaatttcttaacataatatgatttatttttagttttctttaattctaattattatttttcgttttggctctgcgaggccccctttggggccgaggcccctaggcaaccgcctactttgcctaatggttaatccggcactgcctaggagagattgatcaaaagtgatacaaactcaagtatccagactaaattatatggaaaaacaaacaaagtttattgcaactgaattatcctaattagtaaacattcaaaaacaacactgaaaattatatgaggttataaaggctcaggaagctttttcattgttgaacttaatttccagtgaaaacaaagcactggaaa

SEQ ID NO: 13113 - DNA, 516 bp, Diabrotica virgifera
  SmartBlast Evalue=0.000000001; Info="Lysosomal acid lipase, putative n=1 Tax=Aedes aegypti RepID=Q16MC7_AEDAE"
tggttggctctttcgattcattttggttgattcattttggttccaggtagctcagcatgtcaagcctgtaagaacactgatgatgctccccctagagagcgaaaacgtctgtgaaatttgtagatctttttgggatttttacaaaataaatatacctttcataaagagcatgttgtttcatcaatttttttaaataagtagtatataaaatttacacggaatgttcatttcatgagcctgtatggtttattactttggctacagagaagcattcatagcaggttcatgaaaacaatcttgatttccttaacctagaatcactttctgtgtagttacttagaaattttattagaggttggtaaaccaaagtctcagcatctttcccaaaaatataatctacatggttgaaagaatccatcttaatcttgtacagacctactgaattttttaaagcactagcaaaacggaatacgtccactggattggataaccaatcattcatagcgtacatgagat

SEQ ID NO: 13114 - DNA, 520 bp, Diabrotica virgifera
ctgtagatcttgggcgtggtcccctcaaatccattgggacagtttgccaaggtttttctacagcagatggtcacatttttcttgctggtttcatctttgacggttccatcaacaatgtcgtatttttcggtgattcgtaaattggtctcggatgactggctagaaggtgcttccttctgtagatcttgggcgtgatcccctcaactccattgggacagtatgccaaggtttttctacagcgaacggtcgcaactcttcctgctcgttgcatcggcgacgtttattttcggttccttctcggtttcggttccttaagaatctgaaaacaaagaagcttaatcatctttgaacgggttctatttatttatccacgacgtggacctggtactgagtctgtgtctttgtatggttctaattattgctcgggtgccaatttgtaacgggtagttacaaactgcgtagcttttattttgctcgggcgccattttgtaacgggtagttgttttaaggacgacagact

SEQ ID NO: 13115 - DNA, 522 bp, Diabrotica virgifera
  SmartBlast Evalue=1E-59; Info=Probable ubiquitin carboxyl- terminal hydrolase FAF-X n=2 Tax=Formicidae RepID=E2A416_9HYME
gttctaataagttcttcttgattgggtactctagatgccaaattcttagacgattttataatagccgagacgatatcgcttttttgttcatttttcgcttccttcttcaattcttcgtccgataatttatctaatataccaggaatcatttctaatataggcaatatatacttgttgatactgtgaaccgtcaaaaattcaaagcaaaacccaaaaggcctcagtaaagcgaacactatagaaatacttaaattttccccgattggaatctatctaataaaacttggaaaccgcccaactctccgaatttgttgataaggtccaccaaccaccctctgggattcctcaagtcgctcgatggtctagcgaagagctcctcttccgataaattacaattcggaccggccgtttcgctctgtctagaagaattgaagctgtggaacttgttattcggattaagaaccatggcgagtaaatccaatagagggtaccagtcttgaggcagcttcaccacgcacagct

SEQ ID NO: 13116 - DNA, 510 bp, Diabrotica virgifera
gttttctaccggtggtgtatcaagtggagacgatatttcagaatgagaacgttttgggatagtaatttctgtagggagttcttgggagtccattacttcaccagtgttttctgtttgattctggacagagtgattttgtcttcagctgttgcattacaggaagaaatagagtcttggtcagtttgggatgtaggtatagacggatttgactggatggccgtataggtacatgttgaggcgatatgaccagattgatgacagagatagcaagtgagtccatcagaaagaaagattcggtaagatgtattatcgaagtcaatgagaattgattcaggaataacaagattgtcggcaggtgtatagtccacctgccttaatacgtgactatattgaggatcttgaattccctttcttaagaaagacatcggtgaaagaagatgaaagcccttctcggcaagatatttttcgaggatgtgatgaggaatagacggacagacactagatagcagt

SEQ ID NO: 13117 - DNA, 518 bp, Diabrotica virgifera
cgccgtctctttttcgaatttatttcttgactaaattgcttccaatcttccagccatattttcaagcttttgactgccagcgcatttccaatgatgtcattggaacacttaggcttgtatttttcggtccacatgctatactcaacagactctgtgtcagttttctgatccaaaacttctacagtttgatttacttctttttctttcttctttttgttccgttttcgctttctttcgtgagttttggtgtcgtcttctgttatatccagtttccgtccacttttctcatgaatctgtctaaacgacttgtatactggatagttgggattttccgccttgattttattgagcaacaccttcaacttatctacttttttcatttcagtgtcgatatttatacttcttatgatgttgctctttgtcagttgctcacatctgatgttgtagtctactgctaaaggtgacacttcgactaactgcaattcagaatgaggcaaagcccaaaaagcactgtcaca

SEQ ID NO: 13118 - DNA, 521 bp, Diabrotica virgifera
  SmartBlast Evalue=1E-67; Info=Contactin n=1 Tax=Harpegnathos saltator RepID=E2BBG0_9HYME
actatcagtgaggtaccttaatcatccattaaatccccaactaaaaacttgatcatgcaacatatcactgcaaagtcttccaatagatttggaacagttatatcagaaagtgttcagttaaactttggatttatacttgaattcgtcctgaaacgttcacctgaatctggtgatcagaactggggaaagtcaatttactgtgatccaccgaatcatttcccttctgtcagatactcttggtcacgtgactactttcccaattttgttgaggaagataaacgtgttttttcatccaatgatggagccttatacttttctgcgttggaaacgattgacagagccaattacagttgcagtgttgattcagagttttccgattctggtaggaacggaccattctttccactgagggttaatccacattccaactaccaacaactgaaatttcccaacaattttcccaaggctttcccagaagctcccactgcaggaaaggatgttaaattagaatgtattgcttt

SEQ ID NO: 13119 - DNA, 522 bp, Diabrotica virgifera
atttaatttctgtaatagagctgcatctggttgatgtctacatgctgatggcaagttctaatgctttctcaattgtaagatatttgtattccaggagtctttgaatattttagttccgtagactaaatacatcctttgtttaaataatctaataatctaatctattcattgatacatatttgagaagctgttgagatgagcgtgcgcataggtctatgttggaattttattttattttactattgacttttgaaacctgagttcatcaaacgaatttaatgtgttaatggattaataggctgaatggaacagaattggtaagatttcgtatcaattatttctaaatcttgtttgtgtagaaccaaagaataacaaaaaatttaattttataagctagtttaactaaataatcacccaatgtacttttcttcgtacacaccacataaactaaagcgaatattaattttggtttccagctcttttttcttttgcttttcgtgcgaagctgcttctgtagcattg

SEQ ID NO: 13120 - DNA, 522 bp, Diabrotica virgifera
  misc_feature (429)..(429): n is a, c, g, or t
  SmartBlast Evalue=3E-39; Info=Mitochondrial intermediate peptidase n=1 Tax=Aedes aegypti RepID=Q17F93_AEDAE
atacatcttccagacaatgagagaaataaagttgtcaacctcactaacaatatatttagcttaggacagcattttgttactaattcttctacacctagggttataaagaaatctgttttgccaaaaaatgtcaggaacattttggatagtgatggtgattctattttagtatctggtttatacactgattctactgatcctcttgctagagaaatggcatatagaatatttttgcatccagatagggaccaagatcaaatattaaatgctttgttagaagcaagaaatgaattagctcatatttgtggatttcaaacatatgcccacagagctttaagaggttccatctctgaacatcctgaacatgtcatggcatttttaaaaatactttctgaagatatttatcaaaaatctcaggctgattttacngtgatggggaaaatgaaagttcttgaaaatggtaacattggaccactgatggcatgggatgtgccatattttacacaaaaggctaaaaaggac

SEQ ID NO: 13121 - DNA, 521 bp, Diabrotica virgifera
  SmartBlast Evalue=8E-29; Info=Protein Hook homolog n=1 Tax= Branchiostoma floridae RepID=HOOK_BRAFL
ccgaatgtgacgtgtgctgtttatttatattttaatctttaaattacctaagaactaagatgattcctactgtataaataataaataacacagcatagatagattctcaaatatggaccctagcgaagacatgtgcaaaagtctagccaaatggttacaaaaaatcgtccccaacaaaacgaggaccattcctgaaatatgtgatggagttggaatggttgatgctctgcttcaaatctcgcctgagcattttagtaaacttgaatcaaagattaagagggatgttggagcaaacaactggcgtttaagaataagcaatttaaagaagattgtggaagctgtgatagaattttaccaagatgttcttacactacaagtattagatataggagttcctgatgtcaatcagatcggggagaataacgatcctgttcaattagctaaacttttgagattaattttgggttgtgcaataaattgtgagaggaaacaagaatatattactatgataatggacatgg

SEQ ID NO: 13122 - DNA, 519 bp, Diabrotica virgifera
gccaaccgcatttctctagattatccgctcgaaaaatatccgatttgtcacgaaaagatacgctcataggcgtaagggttgaaagttataacccccccatttggatgtaccttgagctcgctacgcttaacaccattactattccatacctcccagagaccatccagtacttgtagcccccccttaggatcatcctggttacaacgttggatacgctacctttaaaaattattctgtaattaaaatcactattgccaatgttattctttaatcagactacttattacagaataattatttttaatctgctggattttctgttttaccgtttattttaaaaattttcgtttatagattgaaatctcgaatcctagcttattaattcatgtaattacctacaattattatattgtacgtactttgtattactgtaagtgttaaattatctaaatatttcagtatttggatcttttttttaaactatctaaaactaggtactagaatcaatacaaaatatat

SEQ ID NO: 13123 - DNA, 521 bp, Diabrotica virgifera
  SmartBlast Evalue=6E-42; Info=Four wheel drive n=1 Tax= Tribolium castaneum RepID=D6X462_TRICA
agacatgtttgagtatttcaaaattttgatattgcaagggttgattgctgccaggaaacaccatgcaatgatagttaccttggtggagattatgcgatcaggatcccagttaccctgctttaaatcgggagcttcaacggtgcaaaatctcaagaaccgcttccacatgagcatgacggaggaacaactcagactcgaagtaaatcgtatggtagagggcagcatccactccctctctacaaaattatacgacggcttccaatatttcaccaacggcatcctataactgtgtcactgttcctcaactctaggtggtaatttgttactagatatatgattgtacagagtgtcgtattgtttttatagttcggtatgcacgagtaagaatagatttaaaatggaatcgagaggctttattttattgtatatataaagatttatttaaaagctaaatcggaagacttaccggaagttggctgtataccatttagttaaagaaatttaacattgaagtaagacct

SEQ ID NO: 13124 - DNA, 517 bp, Diabrotica virgifera
gagttccgtagaagccatcatcatgttcagttgagttccgtagaagtcaccatcaagtgaagttgagtgatgagttccaccagggccatcatcgagttaagttgagttttggttcccttagggccatcgtcatgtgagttgagttccattgagtgtttcggaatgtagttttccagtttcccagccggctaggttgattccagcccggcgaaggtgatggagtatcgtgaaccccggcgattttctcgctgtttctaagcaaatcgtcgttatcatttcataccaattttcgtatccactaatttctttaagcagtcagaaccagaagtaggagagaagagtttcaattttcgcattactatgtttaacagtgcagttaaaacatgtagtatgctcacatactttattttggtcaaagttaatgaactttcaataatcacgttcgagtctaactaaataattttattcgagtaaaagtaaaatttgatccagtttaacgaacttttaaactatttat

SEQ ID NO: 13125 - DNA, 521 bp, Diabrotica virgifera
agaatatatagacgattatgtcgacaataactactttataccaataactgattacaaatttgtagatctacctttacttaatatcggaatacaaaagtctataatgaatgacatgctaaaactgccgaaactttttgatggcataagtttttacattactggacatgtggatatggtgaatatgaatggatgtaacgttcaaaaggataatttggcaacgataataaaagcaggtggtggacaaatattacaaagagctcctacgccttctacttgtgaaaaaaaaagtttactttccattccatgctgctaaatccaacgcaaaatgttgtaattatatagtgtatgaagaatctaatccacctgtgttaatgtatcatatgccagagttaaagcacaaatcctctaaatggcttatcgattgtgttgttaattttgctattcttgattaggttgttattgtaaatttaaatttgtatttaacataaagacaatttgtttttactattattattaatgtt

SEQ ID NO: 13126 - DNA, 519 bp, Diabrotica virgifera
  SmartBlast Evalue=0.000000002; Info=Antennal binding protein 3 n=1 Tax=Manduca sexta RepID=Q8WRX0_MANSE
agtttattgtcgacaaaatgtcaaagcctatattatatacaggtatattgtgtttaatagtaggtattgaattagcaataacaaaagctgctccacaatcggatctgaaagatttagaaaacttgttgcaagtgctaaaggaaaattgtgtaaagaaatccaaaatttcaaagaacttattggccaatattaaaaatggtatatttgaagacgatgctaagtcaaaagcttatgttgcttgcaactggttggactcaactgtgatagacgagcagggaaatttaaatgtggatctagttgaccagattcttccaccctccaagaaacctcaattgtcgaacttgattataaggtgtcataaagcacaaccaaaaaatcaatctgccgaagatattatatacggaatggcaaaatgtatataccctgaagactcatcattggtatttgaaataaaataatcaaacgttcccatttctacgataatgaacgttccaatttctatgaagatgaatttatttt

SEQ ID NO: 13127 - DNA, 520 bp, Diabrotica virgifera
  SmartBlast Evalue=4E-41; Info="39S ribosomal protein L22, mitochondrial n=2 Tax=pseudoobscura subgroup RepID=RM22_DROPS"
ctttaatgccagcccccttccccacaaacgattcagcaacccacaagttactggcaaactctacgttatgttccttaacagctaactccttggcttcttccaggacttctctaacatcttttgccccctttttaaccacaaactttaactgtttgatggcctcatctactggcatacccctaattaaacaagctatgtaccacatcttccatggactgtatttaatatttgtcctttgatggcaaacaaatgcctttcttggttcctcatcaggttgttgaggtggatacactttgtcattatattttaaccatttttttgtgtttctttcctggtttttccatgcatggttcgtcgacgaactgtgaatatgattacattgtattacgacaggttgaaataatttttgaaaattaacagagttgcaaagtattttccgtagagccatttattttacttataaaatatttaaaatatctattcgacaaatactataacctaacttttcgtcttctttttg

SEQ ID NO: 13128 - DNA, 520 bp, Diabrotica virgifera
  SmartBlast Evalue=1E-15; Info=Putative uncharacterized transposon-derived protein F52C9.6 (Fragment) n=1 Tax= Camponotus floridanus RepID=E2AL50_9HYME
tttctccacatttttattttgatgtcgtctagccatcgttttcgtgatcttcctcttcagagatactcctaacatagctcgttagatcgccctctgtgtcgttctcaatctattggccgatacctctgtaagtgtcaccgtctccattccataggtcataattgttagaatacaactgttaaatacctttttctttagatttattggtatctttttgttttcaacacatcgccgagtcttcctacttactgctgcccaagtcattcggattctttttctgccgtttgatgctgtttacctagtttgatcgtgtgacctaactatacagggtgtccccgaaaatagttcgttccttaaaggtataggtagaaggcaccatgtagagcaaaaaagtctataacattttttctaattgtaaacttttaaggacctcctcgtttgtgacctggtcagtcacgggattttaagaattctccgatatagccacatctcaaatgcttccaattttcggctacatatc

SEQ ID NO: 13129 - DNA, 521 bp, Diabrotica virgifera
  SmartBlast Evalue=2E-22; Info=Rab3 GTPase-activating protein non-catalytic subunit n=1 Tax=Camponotus floridanus RepID= E2AI71_9HYME
agtaaacaaagagtaatgacgaattttatttttataaaatgtcctgcgaaatccgtgtgacagcatgtatacaagaaattaataaaataaggaaatgtttattcccaactgacgaccaaagaggtactgacagctggcttcaatcttgtaaaatatctgcatgtcctactggggatttgtttgtcattgcaaatgaaagaaaacttgtggttcttactccaaaatgggatcctcaatcctccctgaatctgtttcaagtatcttactcaggacccatccatgactatgataaagtaaaagctgttttatgtttacctgtagtaggtcaaaatggtaacactagtttaggtcctgagtggacatgcattgtgataggatttgattccggacatgtacgattttactctgagaattgtgaattgttatttgaagaacaatttcatgctgaaaacataacaaccataaaatgtagatcccaacataatccaagacctgatttatcaccatatctacacccagaa

SEQ ID NO: 13130 - DNA, 519 bp, Diabrotica virgifera
atataaattgactctggcccttttagcattaagccacattatgtttcttgatgttaaaatgggcaatttcaattttttgcattttgtttggtcaatattaaattcaaaagaaagctgtaacaaaaaaacaaaaatttaacattggcccttttagaaccaagccacagaattaatattcaaatgatatatatttaatatcgtataaatatctttcttcatagtacctatctatgaattatttaaaaataataaaacccacagattttcaaatcaagatgttttggacttctggaatattctatttagacggactttaagttcgtctgcttaaaaccggcaacactgagctgcaaggttccataagttttatattgggatatgctgcccacactgcaaactgactgcggaacacagaatagaatcattgctggtaatccagaagacattcaacaactaaaccagctaattcacgatacagatctattgggtttcaaaataaatatgtactatcaaaaggaa

SEQ ID NO: 13131 - DNA, 519 bp, Diabrotica virgifera
cggtataatttatatatctatgcaatatgtcattagaaattatatttttgtgtatcaacgcaatttgcttagtgttcgttcatctccacagtttcacatgaccgtggtgatgcacagaacgtagtacttgcggatacaggagcattacctactatattacataaaaacattttcacttagtaattactaatccttgccttagaaaattcctaattttattataaaatttacataatgaagttagcctcaaatttggaaatttcatttgccatgagtaattactaaaaattattaactatttacctaaattaacatttggaatgacaagataacttttttaatagttacttttccatactagttaaccagactgatccgccagattaggttaggttataaattatcagaatatttagacaatttaaaaacttctgaaaaagaatcatgtgagatctaatttatctttataacaaaaaattgtttacattaaacccaacaaatttcctaatgaacgattta

SEQ ID NO: 13132 - DNA, 521 bp, Diabrotica virgifera
  SmartBlast Evalue=2E-30; Info=Sulfiredoxin-1 n=1 Tax=Camponotus floridanus RepID=E2AJN1_9HYME
ttctaattaaatattaaataaaatcgtgaagagattttattgaatgatacaaaccatgaagtggttgcaagaatcatctgaagaatgactagcatacatgcaggaaatattcaggaaatttacgaaatgcctctttctgcaattataagaccgatcccacctgagttagacaacaagaaagtaaggtctttaatggatgccctctcagatccagagcaagttcacaaggtgcctcctattgatgttttgtggattactggacgtgaagggggtaattactattatagttttgggggttgtcatagatatgcagcacataaacgacttaatatggatatgatacgagttaaacttataaaatctaatattgaaaatttaaggtattatttagggtctagtacacctgatctaaagtgaaatctattgtgatatttattaatttattgtgagagcacttactattctttgtacatattgttattatctatatttttaaactaataaatgttaaactaattgtc

SEQ ID NO: 13133 - DNA, 513 bp, Diabrotica virgifera
gtggactaataattacgaaatcacctcatagaattttttaaaatcaactttgaccaagaatactatgtacttaatttgatacaagaagaatacaaaaaacagtgttacatacttttaaccgaaattcttgttatccgaaacggccttcccccagttatttcggttaacggaggttttactgtatttgtttatcccaaagaccttttttgcaagtcagaaaataataaagatacggtaattatacgcatgtcaaataaaagtttaagagttaaaaagtcaatatgcatcaaaaagtgttaaaaacatcgtttttataacaaaaaatcgctttgcaaaattattgttatttttaacgtataaacaattattagaataacccatgagctattatttgtagacgaaatattttaccatatctatttaaaaagttgacaattttttcacgcatttaaactacaatacaaactcaccctagaacgattagggaaaagtagggatgagataatattcagt

SEQ ID NO: 13134 - DNA, 520 bp, Diabrotica virgifera
  SmartBlast Evalue=2E-58; Info=Acetyl-coenzyme A synthetase n=15 Tax=Drosophila RepID=ACSA_DROME
tgttgtatggagtacacctttggttttcctgttgagccgcttgtgtacaacataaacagaggatcctctgactccatccactccggataacaactagtagaggcttggggtacaatgtcgtgccagaagatatctcgccctggtgtcataggtgtcttattgctactatactgcacgcctgttggtgacgtaactcttcctaaatgtgatactactatacaagtttcaacgttgtgtcctttttgtgcacatttagccatagcttgatcgcagatggctttaagctgaagaagtttctcacctctccatgctccatctgatgtaaccaaaactttggcttcgcagtctagtattctttcggcaaaagagtcggccgaaaatccggcaaacactaaagaatgtacagcgcctatcctagtacaagctaacatagtaactactgcttctaatatcatgggcatatacacagctactctatctcctttttgaattcctttacttttaagtacatttgcgaatc

SEQ ID NO: 13135 - DNA, 521 bp, Diabrotica virgifera
tcgccactgtgtgctcttaaaaatagcaacaaaaggagaactagcaatttcatgtgggggttatagtcatccattggtgtcttcctagaaggctgtattaaaacttactaccacagcatagtggcatacacaaaaaattatatttgcaaagcgaatgtaaggggaggccaccatattatttttccccaataaaaaccataatcgcgttagttaaataataagaaaacgttaccgatcatgatgaatccaaagtttaaaagttcaaattccaaaaaagtttaaatgcgtcagtgaaattgagactaaaaaggtaatacatacagaagatttattgctcttatgaccataatatatcagatcatgataaaaggaagaagaagatgaaccagaagatatatttgccagaagtaaaaaatacagtgcacaccagatacgaacaaaaacaaaaataaatgaaataaataacaacaatgaaataaacgaattaacaaggcaactagtagatgccaacaaaaggaaaa

SEQ ID NO: 13136 - DNA, 520 bp, Diabrotica virgifera
  SmartBlast Evalue=9E-25; Info=Lysosomal/prostatic acid phosphatase n=1 Tax=Glossina morsitans morsitans RepID=D3TNZ8_ GLOMM
agacgatatacttttgggaagcaactgtccgaagtattcggaactttataaaaaatacactagtcgaccgtctgttcaagaaaagtttatgaagcacggtgaaacccttaagtacatatctgaacatactggtttgaacatcacaacctttaaagacatttacaatttacatttcggtctatctactgaagaggaattcggtctgaaattacctgattggacaaaatctgtatggccggaaccgatgaccaaactctttcccgaagagtactatatagcgatgggcacagcagatatgcgaagaattgccatcggaaacttcttgaagaaactcctcgacgataccaaagctaagatcgccgatcaccgcaaactgggcagaaagatgtacctctactcggcccacgaaagtacgctgtcgtatctgatgatagctttgaggatattcgagaaacacatccctacatatggcgcctacgtcgccatggagctacaccagatcagaggcgtgtatgggttc

SEQ ID NO: 13137 - DNA, 521 bp, Diabrotica virgifera
tcggttcttcttctgtgacgtttttttctgttattttggtttgtttgttttgttttttcttctggtgctgctgggttgtccattcagcattgttgttttccatttcaatcaagttttctttatttggactattagcagaagttttacgtcttcccttttcatgaatatttgttggttcttctaccgtcgctttcttctgcgtttgtttttcagcttgcgttggtttttcgttcgattttgaaatcagcttttccttttccgcatgtttgtctatcatctcaagtagcttttgagttagtttctgtatttcttgatctttgccggttattttctcttctagtttgaccatttggaacttgttttcttcttgcatttgatggatttgattcattaggcgcttattttccgcctccatttttttcatctgttcagttaatgtgtccaatgatcgaactagttctttgtggtatgtgtccatttctttggctcacgtttaatttctcctttgtctgagccgcttc

SEQ ID NO: 13138 - DNA, 519 bp, Diabrotica virgifera
aagacaacttcattagcttcaaatcaaatttgtattttttaatttcaagttctcaacaattaaatattaattttttttatagtttaaagtgcgattttcttactatctgttacctaactttgaatttgacgttgacatcggggagtgatgatttttttaaattgtagtgttaaatatagtcaaaattaataagaactatgaacaactttagacaacttatatttaatgcatttcgagtaaataagttaagaaactccgcgatagtaaaaaatgtctgcttcagagagaatcccagaacttttacagctatcacaaaattcccatttgtacacaacctccaaaaaaatactttattcagtattcataaaagtgtcttagctgtgagtttactaacttggctagggtttgcaaaagaggacgaagaaaaggaatcagaactaataatgaccttaaagagacgctgtgctttgtatgcaaagagaacagttcgagaaagccgagcaaatgcttcatcttgca

SEQ ID NO: 13139 - DNA, 519 bp, Diabrotica virgifera
ccccctgtaacctgctttatttacagaattagaaaaaaatgtaaaatacaaaagttattcgatttttaaattatgatttttttgacatatgtatatcgtactagtgacgtcatccgtctgggcgtgataacgtaatcgactataaacagcttctacacgcttataaatgtcgataggtgtttaaaaaccgaatcacacttcttactacttcatatttggcggtaatgcgcaatgcgcaatcattctcttctttctgaacgacttcgtagatatttagaatatctaagatattttataaagattcgcagagggaacatgtttcgttagtattagtacaaatcgacatatattcgttagtattgtagcgactggtataaagaatataaggctgtgaatgtacccgtgcgggtcttttttctgcatattttattacaattattattttatttacatgcaaataatttcaaactttactaatttcttaaaaactgggagactacatatttattcatttgggag

SEQ ID NO: 13140 - DNA, 512 bp, Diabrotica virgifera
  SmartBlast Evalue=4E-31; Info=Gap-Pol polyprotein n=1 Tax= Schistosoma japonicum RepID=C7C1Z1_SCHJA
tggagcatttcaatttaccagattaccttttggattaaatgtaagcccaaatagtttttcaaggatgatgtcaatagcattttcgggattaacaccggacaaagcatttctttacatggacgatatagtagtaataggaatatccgaaaaacatcacctagacaacctgaaaaagacattcgagacatgtcgaaaattcaatttgaaacttaacccaggaaaatgtcaattttttagaagggaagtaacatatttaggacatgatctttctcagagggagtatcaccagacaaagcgaaatatgcaacgattgaacaatatccgacacctaagacagcggaagaaacaaagagattcgtagcattttgtaactattatagacgttttattaaaaattttgcggaaatatgcagaccactcaacaaattatcgaggaaaggagtagaattttcgtggaccgaggagtgtgaaaaagcattacaaaaagcttaaaagcatctctgacgaaacca

SEQ ID NO: 13141 - DNA, 513 bp, Diabrotica virgifera
  misc_feature (53)..(53): n is a, c, g, or t
ggtcgaaatttattagaatagaatctggaattaatgatgttatagggcatatntaaacttgcctccgaaagctcaatatgtgactatattcgggaagagtcgagctaattttagaaatgttattggggaaataagccttaaaccgatattctgtaattcttcaactcatacttgatgaggaattgacgggcaaacaccagacaagactagtctttctgctggagagacaagtctccgtgctgttacaacttcgccgagtacttttatagagccatgttgtgtcatgaaattatctactacggttttgtttgctaaatacatgcagattctattatgagataatctagatgaaaatataatattttttgggttgatgattgtgcccaaaggaattaaataatcctgcagtttagcattatcgatacaactaaatacaattgcttgggtcttactcggaaaagactgtgaagcggctgaagcataactgtttgtgatatttgaacgttgatttac

SEQ ID NO: 13142 - DNA, 520 bp, Diabrotica virgifera
tttcggaattcatatcgaagacatgcaaaatgtagatgttattgattccattgcttcattggcggatctactggggaagggggaattcccacctcccaacaaggtccaaaatttaaagaaaatattgttgaaaaaccccgctagttagaagtattaaagaagcttaatgcatataagttattatttatgtcttttatgtagtcctgcattgctttaacatgcaaagctacacaaaggaagtgaaaggtagaaactacaggagaaagttcaacttgacaaaaaagcctcttgcacaacaaaacttcgaattttttcaagggtaaatattttttctatggatgctaaacaatgtgcaacttctctcactacttacacacattcaaaacgtacaatttctcaggcagtgagaaaagtcggccattgcagtaagaactattttttcttcacgggttctccgccggtttcaatagatatgatcgccgtttccatggtaacatgcacaatacaaacacaattaatg

SEQ ID NO: 13143 - DNA, 519 bp, Diabrotica virgifera
tttaacaagcttttgatagtgtgaaaagagacaaaatgctgtaagaccttcgtaacctagatatacctaagaaatatatcagcctcataaaaatgacgttgcagggttcaaaagccgcagtcagaatagatgcagaactgactccctgtttgatatcaacaagggagtgagacaggcagacgctctatcaaccatgctattcaaccaagttcttgagtcagacatcagaaaagccaatggaaggacatagccaaacaaagaaccatccagggttatgatgccaaaagaagaagaagaaagaaatacttgaaataaaataatatatacaataacagaaagaaaaaaggaagagcataaaagaaaagggaagaataagagcaaaatcacataaaaaatactatcgaagaatagtaaaaaaaatgaaaacatggcaaatacaatcgaagatggaacaagatggaataagaatacatgtatacaaattgaagatatatgcaatcgattgttaagtatgaagac

SEQ ID NO: 13144 - DNA, 515 bp, Diabrotica virgifera
aagaaaaatagtgcttgccaataactgttacaatggctcgagaagacaggtggcctcaaaactatctagaaaaattaaagtggccgtctataaaacacgccgtcgatgaatggaaaactaacgcagtttataccagtacaaagcggagtcagacaaggtaactcattaagcccactactctttaatataacaatggacgaaataatagaagcagtacgtaaaggtcacggttacagaatggggaataaagaaatccaaatattatgttacgcagacgacgccgcaataatcgccgagacagaagacgatctccaaagattaacacacatattcaatacaacagccaagaaatacaatatgataatatcagcagaaaaaaccaaatgtatgacaacatctaaataatcactacgatgtaaaatcgaaattgatgggaaaatataaagcaggaagcaaggtttagatatctgggaatagatataaccagttacggagatgatgaagaggaagtacga

SEQ ID NO: 13145 - DNA, 518 bp, Diabrotica virgifera
acaatattattatattatgtgattcagtttctgtaattgtaacagattataccaataatgcaagctttattaaagacgtaatgagtttggcaaaaacattgtcatttgatttttcgtgtagagatggcaatttgtacatgagaatatattttactcaactaccactgccacagttttacccaaagctaggaaactgtctgaaagatctttttatacagctttttggacaaatttgttccaatatatatgaaaattttgaaaatacttccaaaaaattccactgcaagtcagagattcagaaattgtatgataaattaacagaaaaaaggaagactgataaatttaattataatgttgaggaaaatgtgcagcatcacaatttaaaatctaagttgaagccttatcaacaagagtcagtgaagtggatgctatatcgagaaagaatggaggatagtaaaacagatttcttggacccattttacatcctaatcaaattaacatcaaataacgagatatat

SEQ ID NO: 13146 - DNA, 520 bp, Diabrotica virgifera
  SmartBlast Evalue=2E-50; Info=Glutathione S-transferase n=2 Tax= Blattella germanica RepID=A7E1B7_BLAGE
ctttgatcttttccaacttgtcgggatcgtaactggctccaccgaagatcacgggataataataatcagcaagtcttccatacatagtgctcatatcaaagtacagtctctggtcaacaatagccctcttcttaggatcttttggataaaggttgtcatctttaccatattgatctgcaaggtaggtcatgattgctcggctctcgaacaaaacaaaaccattgtcgttgattgtggggacagtatgcagagggttcagtttaaggaactcaggggacatttgctctccgctcatcaagtccatgtatttgagattaagttcaactccgcatgctttggcagctagaaggacgtttcttgatggggctccaccaggaacgtagtagcaatcaataggcatattggcggtgaaaggagacagtcgatctggaacttacacacttcttggtttagccacaactaccggcggaatgcggtctacggtctggtaatatgtgaatggaaaatataagttggacga

SEQ ID NO: 13147 - DNA, 516 bp, Diabrotica virgifera
ctccgcttgtgtcttcttactttggtttaggctagttttgttctgattatatatttccccaatcagatttctagctattattttgtgttccccctgtatgggacctttattgtttaatatttccaatacttgttttagctttctcaggatcctttcattttctgtctcctcggggtattcggcggtctcttcctcttctctttttgaatctctcattttcctctaggctatccccttttcttttttttggactgttgtattgcttcgtaatcctcgtcgtcaaacaataaggcttgaagaatgctatctccagttttttgccagtgtgtctccgtttgctcttctcttttattttcctctccttcacttctattgcttccgccgagggttccctctcctctgcatcttcttctttctcttcctcttctctattagtttcttctagcatgttgtccaataatgtcgagtgtgttatgggacccgacctattttatttttggctgattctgatgcctc

SEQ ID NO: 13148 - DNA, 519 bp, Diabrotica virgifera
ccaccgaatattacaacaaataacaaaatgatgttgaaaattgctgttcttttaagctgtgcagctttaaccatcagctatcctgttggaacgtgcccaagtactttttccggcgatccagtatatcttccggattcagtggattgtgcagtgtactatgaatgttcttctaacggagttccaattagatatgtttgttccaatggaacatactttttgaaaaatgtgaagaagtgtagtccaaatcataataattgtccatatttctaataatagaaataataaacataaaacaagatacttcttattgttgtcaacatattattttattttattttattaggccagtaaatgactattgatgtttttactattacgcgagtttacttttctgatttaatttatgttctttaaggcactaatgttttttaattgacttgatttatttttaataacttacatttaacaaatgaaaaacactgaatttattattaaataaataaatacttacttcataaa

SEQ ID NO: 13149 - DNA, 520 bp, Diabrotica virgifera
  SmartBlast Evalue=2E-43; Info=UPF0047 protein yjbQ n=1 Tax= Camponotus floridanus RepID=E2APY6_9HYME
gttctgctgataaccgctcgtactgcggcaagatcttgtaaccttttattttattgaaactgttttatacaattaaaaaatcactcatgatttgctcatgataataatgatttttctgcgatataagtgtgtatcagtagtgtttgtttgttgtgattgcctgtgagtacaatacaaaacagcaaactggcgagcgacagtggtgatagcaagtcaaacatggcttcttctgcaagatttatccaaagccccaccgcatggtgtcagcggaaggtgaatttaaggccccagcatcggggcgtacatttggttacggaggaaattttaagacagttaccggagttaaattcatttgtcattgggttgtgtcatattcaaatattgcacacgagtgctagtttagctttaaatgaaagttgggatccagatgtacgagatgatatggagatgatgttaaataaaattgttcctgaaggtttaccatacagacattcttgtgaaggtcctgatgacatgcccg

SEQ ID NO: 13150 - DNA, 518 bp, Diabrotica virgifera
caagctcgtgaaataatacagtcagtgttgaaagttgctcaataagaagcagaggctaataaacctattattgattttaaaaaagtgcaagaatgtgtggctattatagcaggtaattttgagcatagcaatgattcattgacatttctgtacatacaaagaaatcattcaatatttcgtcgtcgttacggcaaaagtcactaagtccaaaataacaaatctgagaaaacgaacatttagtgacttctgcctgacaacaaaatggtaattttggacttatgcatattcagtgacctaggcaaacaactttacctactttataggacttcgttatttctgccagactatgaaaattcatattgttgacaaaattggacttggtgagttttgccgtgacgacgacgatttgtaggaaccgtggcaacgctgtactttaacctacaaataaattctgcatctctcctacgtttgcgcgcagcttacgtctattgctatcctggccatgtaccgtttgtcct

SEQ ID NO: 13151 - DNA, 520 bp, Diabrotica virgifera
  SmartBlast Evalue=2E-44; Info=Mitochondrial 28S ribosomal protein S28 n=1 Tax=Culex quinquefasciatus RepID=B0WEG4_CULQU
gtatggttgtattttgttatttattttattacatagaaatgagtattgtaaaagtttcaagtatatttaacttgatatttaaaccaaaatatcagctatcaatatttacgagaccgtgttcaagaaatgttacatcagagacgccagatacaaatgcatcaggaggttatgccaaagcctttgaaaaatttgaaactattaaaaatgctgaagacaaaacaccacaaacatttgcttctttattaaggaattcaagacttatagatttgggagatccagaaggcaaagtagtaacaggaaaaattttccacattgtagaagatgatttatatatagattttggatggaaatttcactgtgtgtgctctaggccaaaaaagaacggcagtagttacattagaggatccaaagtacggctgttggttaaagatttggagttatcttcaaagttcttaggattcgaaaaggatttaactctattggaagctgattgtcatatactaggactaatgcaagaaag

SEQ ID NO: 13152 - DNA, 517 bp, Diabrotica virgifera
aaaagatagtgccttccctgaaaatagttcgaaaaacgtaatagccagtcaatcacaaagtcccacagaaagtaccatcaacaaatgtgatatagaagtgatagatttaacaaattgtgatgatgatgatgttaaagttattagtataaaggaaccaagtcctaccaaaacagatagttacgaaagttgtagtaaaagtttgaaagatgatcgtaatagtaaaattcgaaagcttaaaaagtctaggtctagtaaaaatgaaacccaaagtgaaactaaagaaaaacaagatatgtctcttttcaaagaccagaagcagaaggttccagtcagagtgacatagaaaacgaacaaggtcctgttgatccagaaatcgaagagttatccaagctccgctgtacgtcagaaatgactgaagtggtagctgaaagggaaaaacgcagaaggaggtgtgctgattatccaggtctagcatttgccagttccatatttagttcggataccttaatgaagtttt

SEQ ID NO: 13153 - DNA, 517 bp, Diabrotica virgifera
ctatgttcttgatatccagaaccacatcttatatgtttaggtttctagtaatatagttttaactagtcctaataaattaggccctcagtgaactcttgggtgattaatagaatctggtcattctagtgtcattgttgggtatattgataggattcgttttaggttagttgttgtaaatggttcttggtagtagtattttaaagggttgttaatatacaaccataatgtagttttaatgaggtttatactaacacttgagaatggatgataagtagtgtaaatagttaactttctctataagattatagtattgtagttaaaacgtaggtgattaagatgtaatttatttttttttcttttgtatcttcttcctttcttaacctgtagtcgtactaaattaaattacattatctcgtttgataactctggtcagttacacatcccctctctgttatgtcttatgaaaaacgtaattcaatgtatcttgcgtattctctatctctctcttactgcgtca

SEQ ID NO: 13154 - DNA, 519 bp, Diabrotica virgifera
  SmartBlast Evalue=1E-36; Info=Ras-related protein Rac1 n=24 Tax= Metazoa RepID=RAC1_DROME
tattaacaatgaatgaaatagtatgtgttacagttggtgataaatcagttggattaaaaagccttcttataacatatacaacgaaagtatatcctgcagattatgtacctagtgttttcgatagttatacacaaaatattgttctggatggtgaatttataaatttatcattaaatactgtggcgtgtcaagacgattataaaaaaattccgacaactcacttatcagaaagctaatgtattcctcttaggattttctattgggcatccaggaagtttggagaatcttcagaaagtttgggtaccggaaataagggaaacatgcccaagtacacctatagtgatagttggactacaaaaagatcttcgaaatgacccttattatattaaggcattagagcagaaacatcttaaatctatatcttattctgatggggtagaaacagctaaacgattaggggcagctagttatattgaatgttctgctttaaaacaggaaggagttaagaagtatttgagg

SEQ ID NO: 13155 - DNA, 516 bp, Diabrotica virgifera
tgagtggataaaagccgtagttttaaggaaaatcaaaaaagtaacatatattgttaaaattcctgaactaaatgatgttaactggaaacgtcattagaaccaaattaaaaaatttcatatagtggaatcttcactactgagtggttcaaatgaagtttctcctattgtagatactgatgtaaatattgtaaataaagagaatttaagtaaagaaagtactgaacggcctaaaagagtggtcaaacccatagatcgtttaacgtatgagtaatttcttttttattattttgtaaatacttatatttgttttactagtaaaaaataattttttttaagggggagatgttggatattgtaaagatagttttagtagaccactctgtaaaacctaacaactgttatcagagtaacacatttcttattattgtaaaaagtacattcgccaaatgagtattaagtgagccttctttgtagaaagatgtgttttattttagtaaattatagtttgtaatattc

SEQ ID NO: 13156 - DNA, 514 bp, Diabrotica virgifera
gcattgcgcattagttaaacttttagtctttgtttgtatacttcactgtcattttttattttcaaacagtattgttggagcgactaatttttgctcccttatttgactacttccgatatttatttatttatttacgggccttacccattattaacaagtttatttatttttaagctaatgagacaagcaatatttgtaacctacaaattgtcattatactacatgagtctggctatagttcggacggaaacttattcatttattttcgagattactgtttaactttttgttttttttttagtatttatttattaccgttctatatttatctttatattattagtatcaagctgtttaatgttaactccatcaatctcctcaatagtgaaaacagatcaaacacttgaataaaataactttataaagtatgttcacccggataatacccatttccgaataattacattgacagtacatgccgacgtacttttcacttaatgttttgatttaactt

SEQ ID NO: 13157 - DNA, 516 bp, Diabrotica virgifera
  SmartBlast Evalue=3E-69; Info=Chondroitin sulfate synthase 1 n= 1 Tax=Harpegnathos saltator RepID=E2C9U3_9HYME
ggttagaggagttgctaaaatctgtcgacagtaagaaagcctggttcataggtcaaacaggtcgtggcaacaccgaagaattcggccttctatctctcgacaacgacgaaaacttttgcatgggcggtcccggcgtcatcctttccagggaaacactcaagaggatggcaccttcagtagaagagtgcctgcaacacctctacacgacgcacgaggacgtagaactgggacgctgcgtcaggaaattcgctgggatatcgtgtacgtggtcctatgagatgcaagtaattctctaccacaaccaaagcggcgaaaaagcttttagtggtgatttgaagcaaaaggaagttcatagagcgataactctacatccaataaagcagccccaattgatgtaccggcttcacaaatacgttaagggactgaaaattcaaaagttagaacaagaaagtattcaactgcatcgagacatcgcatcatctatgcaggaaatgggataccgagtcagtagcgtac

SEQ ID NO: 13158 - DNA, 518 bp, Diabrotica virgifera
  SmartBlast Evalue=1E-28; Info=RNA-binding protein 28 n=1 Tax= Camponotus floridanus RepID=E2AFK0_9HYME
tttcaaattttcgtgatgaagcttagcttgcacattcaatttgtatctgctcctcattttttctttggttccaggttttgtcgctactcctccaaatttgggtatatcctcttcttgtgtctgtacattttctattcttggcctcttatttaagtcttttctagaaattttgccgccgttatggaatacttttgccttctcttctggattgaatgatttacttactggattgtactgtttagatttctctaaccttttctgtctagcctttattatcgatttgttttctatactgaaagttataataggacgtttattggtggaaaaaatctcaggattgttatttaagtttctcaaagccataagggcgttttcatgttttgaaaatgttacaaaaccatattcttttgattttcctaaaccattagactctatatttttcatatctctcataatcctagcttctctaataaatgcacctggtccactgtatttttggaacaatattttcaattttt

SEQ ID NO: 13159 - DNA, 519 bp, Diabrotica virgifera
  SmartBlast Evalue=1E-44; Info="Protein farnesyltransferase subunit beta, putative n=1 Tax=Pediculus humanus corporis RepID= E0VV79_PEDHC"
cattaaacactgaacattgtccaacgaaaacctcttccgaacagattgatgtagaaaaaacggttctaaagaagtacgaagatttacatactaagttaaaagtaaatagagaattaccagaacttctaaaagacaaacacagaaactttttatatgatagtattacttatctatcctccgcctatgaggtattagatgctagtcgaccttggttatgctattggatattgcatcctttatctttaataaatattcaattagatgctagaaggaaaaaagttattgctaagtttctagcaaaatgccagagtcctaatggtggttttggcggaggacctggtcagatacctcatttggctactacatatgcagccgtaaatgccttagtcattttaggaacagaagaagctttaaatgtaataaataggaaaaaattacaagaatttctatggagggtacggcaggttgatggatcttttcaaatgcatgaaaatggggaggttgatatacgaggagctt

SEQ ID NO: 13160 - DNA, 518 bp, Diabrotica virgifera
  SmartBlast Evalue=6E-15; Info="Solute carrier family 2, facilitated glucose transporter member 8 n=1 Tax=Zea mays RepID= B6U615_MAIZE"
aatctggtatatttgaagagcaataataccacccagtataaacataccatcagctatagtcataccaatagctttcatattgctggggaatatttctgccgttaatataataggtactaaccctgcaccagctttaaagaaagcggcatataccattaccgatactaagggaatccaactgaaacttgacacatcgatttgtaaatatttaaatgaaaatagacggccagtgctacaagacataatccggaaacgattgctgataccattattaacattcttcttccatacttatctacttgaagtgatgcgaaagtaaccgaaaccaacattatagccgcaaatactatagctgtttgtgcagaatccatataaattgatccagcagacgccaaaattaaatgtaagttcattaaaattacagtataggcacatagatgttgaccggtgttaagtactgtcataatagtgattgcttttctattacttttgaccaaaattaaatcctgtggatttgc

SEQ ID NO: 13161 - DNA, 517 bp, Diabrotica virgifera
  SmartBlast Evalue=3E-12; Info=Mutagen-sensitive 312 n=2 Tax= Tribolium castaneum RepID=D6WRQ7_TRICA
tagaatctatggttatgaaaatttttgtaaaacaattttgttatggcagataaagcggattggagaattaacgataagtttcgaaaacctagacgaaccaaaggtactccagcctttcagttaagaaactattttgcctttggagggttagcttttggagccgtttcttggtatctttgggaacattggtccgctacacagaaagttaaaagaggtctccttgagggtaaatttgatctgccggatggttttaagacaaaaattagccatatacaagcttcgacaaggggtggtggagtggatgaactgttagcgaaagccagggagagagagattcaaaaatatgccccggacaagccagaagacatcccatggttcatcaaaatctttacttcaacacctgatacataaaaatgggtttgtctgttttatatttgttatattataatgtgtagtagttgtaaagctatagaggatacaaagatatatttatttgtttcaaatttaggtgttaaat

SEQ ID NO: 13162 - DNA, 519 bp, Diabrotica virgifera
gagcaactgtcgcttccggtggggaagcctgttgaacattgttattggaatttggttttaaaatagacgctggaggaatttgttgcggttctgatttgcttggaattgatgttggcgttgtggttaagttgcttatgggttgtggaggcataagctgaggggagccttgaggagttggactctccttttcggtatcctcatctccttcctctgctgcttccatagcccttctttggaactctctttccaactgaagtactcttagttgttcttcttgctgtgctgtccggtaaggtagcgccactaggtctctaatctgttgctcctgccattgcctggccgcctcccttctcgcttcctgttgcctctcttgttcctctcttgcccaagggtctcttggcggttttgaagaagaaggtccagaggtaggataaaatgccattttggtgggtcttgactactcgctaagtagagagggtgagtagaagatggaggtagatcaggtggaacttcatcctt

SEQ ID NO: 13163 - DNA, 515 bp, Diabrotica virgifera
aaacggtatgaactcgaataatccatttttatgaggagaagtttttaatttgacgcagttgtaccctaagaatataaaaagatgttttagctccactaatttttaatagatgtatatatcattaaaaacacacgttacctctctatccacctctctaacgtttatttcatcaactggcgcggtcaagaacaaagtcttcaaatcaaaatagtttttaatgtttatcgaactaacaggttttttgaaagttggatatattgatcacgttttaaaaaagcaaatgtgttttggaatgttgtttatttcgaataaaatggtaaattgtgaaaaattgtcacttgcaaccattaatcttaattttgttttttatattttttgacacaaatattcagttttttaatcaatttgtgtaattaactaattttattgcaaatgatgctgctagatcaatgagttttctagtatagactctgtgagtttggcaacaattcacaccaaaagtgttgcagtcttgc

SEQ ID NO: 13164 - DNA, 515 bp, Diabrotica virgifera
aaaattgtaatacagttaacccaataaataccgtcttttacttggtgatcggattttttgtcatgtacttatattctctattttatcattaattagtctaaaatatttaaaagacaatctctaatttttggtactatatattcatcctagcagtttcatattttcatttcctagaaggctattactaccatctcagatgccatgaaagagatacgcgaaattcgttgtctgaatagtttagagcgtaggcgcaaaatttcgggccaatgctttttaaatgcattcatttttttttcaaagcctgagaaaactaataaatatttttcaaaaatttaaacgcagaatgaaagattacattattacaatgttcaactattaaactataaaataatagtcatactgatagtatcgttcgatgtgaaccattctgatagtatggaaatggcctctattgtataggaaatggaattatgcacaatatattaagctcatttaaaatcaaacaataaattggc

SEQ ID NO: 13165 - DNA, 513 bp, Diabrotica virgifera
gtgccattgtgtgtaaggatcgtttcaaacggtatgatactgtaaaaatattgatttaatgtatgcaatttaaaattttgaaactgaataaacataagttactcaggttatattatacagtattgctagaaaatagcgtttattttgtttttacacttcaataaaaaaacattttaatgctctctaaacttttaaatcaacaaaaaaaaataaatttctaataacatatacacaaactatcgcatcacaatttccacaaaagctacttgcgggaaaacacattcaaatatttttaccactgtatactgggagacgagtatgatgagttttcttgtcaaaggtattatgcctgcataacgaacccgaaaaggaagggttaacgccaagtgtataaatatatatatattgaatttttaaagagaatggttcgtattcctataaaaaaatttcattcaattttattcatattcaaatttataacaacacatccaatagacttatctatttttaatc

SEQ ID NO: 13166 - DNA, 509 bp, Diabrotica virgifera
agatttactatttttggattttcgctaggtggaaggagttctttagagattttaacgaaacctacgttaacaggtttgctctcattaagcgcttttgtcatttcttttgttgggaatggccaaatcagcttctacctttccaccaaccttcctcttaactatttcagcagccactttggcctggaattcttcttttgccttgttgaaagctagcaacttattttgttcttcggcaaaatggcgcttccaagcagcagggccgttaccgggcttcaatttgtatatagatgggaaagtaggctttgccaggttcatcaaaatttcctgttgtagagctgctccttgcttaaacaatccttccaaaactgagtctggtgtgcttttgaaagttgggagaggttccatgctatctagcatgtccttaagcttttggttctccagttttgattctttggttacgctcttgatggaatacttttcgaagactgtcaatttcctgcataagcaat

SEQ ID NO: 13167 - DNA, 514 bp, Diabrotica virgifera
ttgttgataaaaaaaccaaataaaaataaatgcctcaaatcttttttttttcaagagaacaaatttaaaactaaacttcagaaactctaccttcttgttcggtgacgaaatttacgcatataatctgccttttttccaatattgtcgccaatattaaggcagtcgtcttatcatacaagtttttttggtctttttggcgttaccttcgacttagtgatgataataagctattcaaatttaaaaacagattttagtcactgggtgctagatcgggacatttcaacggttttgatgatttctttataatcctaaattttgaatttttccagttgcactgagacattagatactatacatctttttgtttgtacttttacattaaacaatacttactacagattgattatgtcaccatgacagtacttgaacaaacgctattcaatttttatatttagaaagagtataaagttgagggaccaggttgaaaggtacagtgttgaatagtataacagcc

SEQ ID NO: 13168 - DNA, 518 bp, Diabrotica virgifera
tcagaattatttttcgtaatccttgagaatttttgggaattgttaaatgacttgctgaacatactttcttgtggtcttttgcttaagatttccgttatttcgttttcaaaaggacagtgtctctttttgcttccgtacttgtcaagtttttccaacttatttctgtagttcctttttaaggtcttccacttgttttcacactgagctcctgtataatagtaacccttcctgttcatgtctttcgaaactagctcccatagttttttctgtgtggtaattataccagaatctaacatatcacatttttcgtcatataccttcaacaattcacgcgtagcatcatgattccactctattcgctgctcctctgttatataaataacgtttgagggactaccctcaagatcttcagtcttgatattttccatgcagaactaattctttaacgaatttcaaattggttttaaattcgaacacttctgttctagagctgaaaataggtccaaaatctgctcaac

SEQ ID NO: 13169 - DNA, 519 bp, Diabrotica virgifera
  SmartBlast Evalue=3E-61; Info=Gamma-glutamyl phosphate reductase n=1 Tax=Xanthomonas albilineans GPE PC73 RepID=D2UEA6_ XANAP
tcctcttccgtggccgccttcatgtccggcacgatcgctcttgcacgctcgtcgccgcgcaattccacaccgcgttcgcgcaaggcctcggccacacgcggcaaccaggtttccgccacggcggcatgcacgagcaggttctcgatcgaattgcaggccgccggccgcgaacacttgccatccaccgccaggttgacggccttgtccagatcagccgccttgtccacatacaggtggcacacgcccttgtagtgcttgatcaccggtacacgcgcatgctcggtgacaaagcggatcaggccttctccaccgcgcggaatgatcaggtcgacgatatccgacagctgcatcagttccagcatggcttcacgaccgagatcttccatcagtaccacggcgtgctcggacaaaccggcattgcgcagcgcctcgtgcaggcaggccgcgatggccttgttggaacggatggccttggagccgccacgcaggatgacgccgttgccggccttcagacacaac

SEQ ID NO: 13170 - DNA, 517 bp, Diabrotica virgifera
ttagttatattaatatcgactcattcactatacacattgtttaatttaccatgttgatatttgtttaagaatttcatgggttaagacaaggtaaatgagagtatcctacctggtggttagtaacaggtcgtgagataaacaaaataatttattgcccgatatttttattggtgcaggtgtaatttttaaatatataaatttgcgatagttgacatttcaatatttagatttactccagttataccaattttttttttgtgtttgaacatgtaaggttgccaaaatatacattgcaacatttttttcaaaatctgtacattttatgtattcttatgttattattttgtcttatggcaaacgatgagatgtgtatttgtatgctgctattctatgctatatctcagatatgcagacgacaccgtactgattgcttccaatgaaagagttgcaacgacatatgaacagggtgaccgaaacatatgttgaatatggattaaaacttaatacttctaagata

SEQ ID NO: 13171 - DNA, 515 bp, Diabrotica virgifera
  SmartBlast Evalue=3E-41; Info=Probable RNA-directed DNA polymerase from transposon X-element n=1 Tax=Drosophila melanogaster RepID=RTXE_DROME
tttaacgcaatgctaaggctgagctactttccaaatcagtggaaagtagcagaaataataatgcttcccaaaccaggtaaaaaccctaatgaaatatgctcgtacagacccatcagtctcttgccaatcttatcaaaaatatttgagaaacttctactcaagcgaatgcagccaatattaacggaaaaaaagctcataccagatcatcagtttggctttagagcaaaacatggcacaatagaacaagtccacagagtcgttaaacaaattagcaatgacttagaaaagaaaaggtattgttcagccgcattcatagatattagccaagcttttgataaggtgtggcatcctggactattgtataaaataaaaaaaggtttacctcacaacttctatccattattaaaatcatacctaactaacagattttcttagtaaaacagcagtctgaatatactaacatctaccacatagaatctggagtaccacagggtagtaccttgggcccaatatta

SEQ ID NO: 13172 - DNA, 516 bp, Diabrotica virgifera
ttttatggttttatttcgtttattttataatcacacaaactcttttaaacacctcaataacattatttagcataaatggtaacgttgtattccaagccatgccctctaccagattccagttcgattgcgatgtaggtgtggttaactccaccatctgagatccaagcagttgaacctttttcggcgctcttaagactgatggctgttacgcagtaaattttttgatcaccgtgccattcaactgtttcgtctcttttgacaaaaggaatgctagtcttgtggacataatctttcaatactgcctgttttggatttggactggtgcaattgccctctatgatatcaagtgtacccttttggagactaacggaacttacaaaatggactgcaagtacgcacacaattgaaagaataagtatttgcttcatttttatactttgcagttacctctaggttttctgtaatttgtaatacaatgtggaatcatttgggagcatttatagcacttgcacaggt

SEQ ID NO: 13173 - DNA, 517 bp, Diabrotica virgifera
acccgtcactgtaccaacggagcagaaatcgatttggattgagcttaatattctcaagcttggcagcatttgttagcagccctgtttcttaacgaaaataaagtgttcccctaaaatatctacaaaatttgaaagcagtaattcctgggtgatgtatattgaataataacttttaaaatgactacagaaggtttgtatttgcattgtataatatgcaatggagcttgggacccctctgctgactacatagaaatatttgctccagatacgaacagagaatcagacttacatatagtgtctttagtgtcaacactgttagataaagatattaaggaagatccagaaaatgtccaattaatttgcaataagtgtttttcctatataactgaactagaagaattacaaacaagagtagctgaaattaaaaatgaaatttttgaatcaaatggacaagaagaaagtgaatatacagaaactgcacaaagtgaaatcacacataaaaaaaatatttctccta

SEQ ID NO: 13174 - DNA, 518 bp, Diabrotica virgifera
  SmartBlast Evalue=3E-31; Info=CAP-D2 condensin subunit n=1 Tax= Tribolium castaneum RepID=D2A3E3_TRICA
ctagcatcaaaggaaccattttggtgcatctttcagatttgttaacaaggtttcctaatatcgttgagccttggacggacagactcttccatagccttaacgatccacttgccgaagttcgtcgctcctcgttcttcatattatcaaaacttattttgagcgatatgattcgagcacacagccacataccaaagatggccgcttgtctagctaaccaagatgaagatctacgcgccatgtgcaagacgttcttcctcaagctgtcacataaagagaataatctatacaacgcccttccagatatattttcccattttgtagaattaaatatagacgaagatgaaatgaagagcacattaaaggtactgttcgatatgttggaaaccctaaacatatggaaaacatagtcgctaggttctgcacgaaattccagtgtacagaagacaatcatgagcatataaacatatcttattgcctcacgttaattaagtacaatgacaaagcactgagaaggttga

SEQ ID NO: 13175 - DNA, 514 bp, Diabrotica virgifera
gtccttattttggtcaaaaaatattgatctaatttcttctattcgcttagtttccttctgacttaattggctgacaattgttgatctacttcctgctgaattagtttcattcttagtcaactctgttttcttctgtttttccttattcggatcttccacatcggaattaagcaaggcatctggtgaagtttttgcgcctttattccccaatttaggtaacttgaacacttttctcgaaggctgagaattgtttagtggcttattcaaatcgtcattgcaattatcaaatgtaatttttgggatttatgcagtctattttgaaccgaagtgtatactgcattggacaaagcttctccagttctctttagcctattcgtattttgacgggaaattttcactttttctcttgatggagaatttagatttgtagtatcttttttgatcaattgaaccatctctagaactgttttacgcttttcgcaagattgctgtaactgaaatgaatctatacttg

SEQ ID NO: 13176 - DNA, 518 bp, Diabrotica virgifera
gtggtctagccatatttgtctgtcacatgctcgggatcgcttggttaaaagagatagatagaccaccgatcgattgtccgcgttacgcttttttgctcagtatgccttgtttgcggttagtatgtctatggtcttgacacaagataatgagtgacgtagaagtttcaggacgctgagggcatgacccacttttgtttctcgaatgtattaccgtaaaggtattcgaatagtgtttcttacttactttttgatcattcaaatgtaattttagtactttttttggttaatgttattttaaatattgtaactctcttatttagttatgttgaattctgttttcggctgtcttttctcaatttatcacatttagtatttgctattcaaagcactggtaatggtcaaacactgcgatgcggttcattgttaagacagaattgaacaaaacgttagtaatcttgaacaggtatttatttcctatcttatttttaattttagtgtttaataaaattatgtattgt

SEQ ID NO: 13177 - DNA, 518 bp, Diabrotica virgifera
  SmartBlast Evalue=3E-88; Info=ATP-dependent helicase brm n=2 Tax=Aculeata RepID=E2B391_9HYME
ggaagctgggattctacttctttcttgagacgtctcaggaggaacggcctgaggactttgtgcaaacgacggataataaggattgtttcttcttcgtttaactcaaccttttctcctgttgttgcgaatggcgcattgaaccattgttcaaaagtggagcaactcttgaaaatcgaaggcaacaagaaattcaacaaggcccataattctggtaatttattttgtaggggagtaccagtaagcaggagtctgtagggcgccaaatagtgcgtattcaggacttgagtcaatttgcagtggtggtttttcatacgatgaccctcatctatgatcatatatttaaatgggatttttgctaatacacccttgtccttaataatgtactcgtaggtagtgagaagcacattgaatttagcagcttttaactggctctggatcacttttctaaccacaggagagcctttgtatgaaatgacaactacagtaggggcccacttttgaaattccaacatccaatt

SEQ ID NO: 13178 - DNA, 515 bp, Diabrotica virgifera
gttgaatatatcacaatagttatatttcttggttatttttaattgttcacaatgttcacgacaaactaccatcattctaaaacccatcttgttaaggtgcaagtattaaacagataagtttattcgaacaaaatatgttaaaaaactaagaaaaaaaaattaatgtgcatattcgccttttgtgctgcttgcacgttttgatatttccctaagcccatttgacatgacaaacatttcaaaatgtgagagagtcttacgcccagttccaccaacgtgatttaagtgaaaatttgatcttaagaaatactttttacctaagtccgttgagtttcgttccaccaactaaaaatatttacttaagtacaaatatttttgctcaagctcaagtctactatgatgacttcaaaaattttaacttggagcatgcattaagtgcgttcgcgggtgcctgtcggcgacaaattagcagcaaaacgcatgcgcactttaaaatgatataaaaagtatcgttaata

SEQ ID NO: 13179 - DNA, 518 bp, Diabrotica virgifera
  SmartBlast Evalue=5E-78; Info=FKBP12-rapamycin complex- associated protein n=3 Tax=Aculeata RepID=E2AX71_9HYME
atccactgacggtagccacaaaaagtaactcaagtgttaggagaactgcagctaataaaattttgaaaagcatgagtgaacattctccaactctagtcagacaagcgctaatggcatcggaagagttgattagggtggccatattatggcatgaaatttggcacgaaggtttggaagaagcttcacggctttactttggagaacgaaatgtggagggaatgttgaggatattagagcctcttcatacaatgatgcatagaggtgcagagacgttgaaagaaacaagcttcactcaagcttatggaagagatttgggcgaagcatatgaatggtgtcgaaaatacaggatatctggtaacattcgtgacttaaatcaggcttgggacttgtactaccatgtgttcagaagaatatctaggcaattaccgcaattgacatctttagaactacagtacgtctctccgaacctgctggtatgccaagacttggaactagcggtgcctggtagttattccccg

SEQ ID NO: 13180 - DNA, 514 bp, Diabrotica virgifera
gagaggtcgaagttctgattgtgcagtttccagtgatgtcttcgtaaaacactgggagagtttgcacttaggtgcaattatggagatcttcgatttagctacaaagtttgatggtcggtagtcaacgaccttcatttcggtctggaggacgcccctgttccttttggaacacatttcatattggtcaagcagttcttattaataatcatgatgaaataaagtcgtgtttttacgtcacaacaagttatataaattacaaaaacaagtaaagcattgctgaacttttcaaactaaatactcctgtaaattcgagattgtaccacatcagtattgtatttttgtagtagtaaagtgaaaagtgctacgaccgtatatctggactttgcgttggaagctgcagaacattaaagcagagacacaaaggtacctacttaatattgtatttatttgtatttgtggacaatacctcttaaaaatgtaaaaaccagaaagaggtcaaccttaatttcttttt

SEQ ID NO: 13181 - DNA, 518 bp, Diabrotica virgifera
tagttagtattatctttgatattttatattacaaagatatgttatatgatggataagaaaactctgttattatcagctgcttccattgcaacatttcttaaaagaaaagttaaccttaaaagaaccaatgtgacagtatgacgaaaataacctaactgcgcatgccggtgtactaaaaattgttataaaaattgttatcaaataggacatgttctaatttgtgtaacatttcctattaacatattttgtttcctgttttacattgtgacaaaacttagtataccattttcttatatcattttatgttgaattcatagtctaaaacagacttaagatggaaatataagtttcaaatgatcagaagcacttgtctcagaacaaagaacgaaaatatgctcgatgatatatttctacgtcttatattagttaagggttttgtaacttccagtattatatcaaaacaataccagaaactcactcaataccgcaaaccgtgaccagaaatctcgtaacgcgac

SEQ ID NO: 13182 - DNA, 517 bp, Diabrotica virgifera
  SmartBlast Evalue=7E-35; Info=Islet cell autoantigen 1 n=1 Tax= Culex quinquefasciatus RepID=B0WVZ2_CULQU
cattcaatagatcagctacttcagccgtatcggattttttcattattcacatctttactttcttcttcatcttttttctgactcttgggtggatcatcagaataatccgaattaaagaaggtctttttagatttgtctgtgtcaaagggactaaacaactccataatggttgtattatcggttggtttaatcgtatccaatttgcctgcagctgtacctaaagtttcagaagactttgtggaaaaattcaaaattgcactttggtatggaactaagctatgggaaaacatattgcatcttgcagcagctaataaatcaaccttctgtaaacaagctagagtcaatctatcgaattttgttttggttttcttaacataagactgggcttttctaaacttttcaagaccatgtccagtgtcaggatctaattctgatgatactgacttcatccaactcagagctgctctgtactctgtcctggttttctccatttcagatattgtgactcttgtatcag

SEQ ID NO: 13183 - DNA, 515 bp, Diabrotica virgifera
ttgcgcacacgctagcgtgcacccagacacagcgaaaaaatatactgacattgttacagttaaaattcatttaaaaatttttcgaagttaattattggtataaattacaataattattgtattaaataaacaagtttaagtaattttatttgcagtttatatacgattaatattaaaagtggcatgcgctacttgaatctaacttcagcccgtgagtaatgacccgtgagtaatgaattattactcacgggtacagtaatgggtgctattgtctatggaaaaatagcgaataatgagcatgttattaaacggtcgtagaaaaatatctttatttctaaatattgactggatcattaatatttatataacaatgaaaatataacttgttctatacagttacatgttctatacttctatacagtatacatgttctatatagtttttaagtggctcttctaagatggtttataaaaacaattttaatttggaaaaaaacttacactgatgtaaaaaac

SEQ ID NO: 13184 - DNA, 515 bp, Diabrotica virgifera
  SmartBlast Evalue=3E-20; Info=p20-CGGBP n=1 Tax=Culex quinquefasciatus RepID=B0X802_CULQU
tagacatactattgtgaagacataaattttgagcctctaattttgtaattgaactttcaatgatatcgaaattcgattttatatacaacaattgatttttaatagacttttctttaaaaatattttgacagttatcaatagcggtacaagtcggatcaaaacttgaaataacgcttttgatgtcgtcgtagtgttcagataaaaatatagcacttttaagccaagttccccatctggttaatactggttctggtggtaaaggaatatcgggaagcatctccctatatacctgtacacgtagtggtgctttcagaaatactttttttacattatttattaaggtgtttacattgggaaattcaattctaactttctctgcaactctgtttaggccgtgcgccaaacatgtacagtgaattaaattagggaaaaagattttaagattggatgcagctttcatcatatatgaggcggcatcactaagcattaataatatttttcaaatggtacttgat

SEQ ID NO: 13185 - DNA, 517 bp, Diabrotica virgifera
  SmartBlast Evalue=7E-72; Info=HEAT repeat-containing protein 5B n=2 Tax=Formicidae RepID=E2C319_9HYME
acttgcagcgagaacctagcagcatactaatgatggtgtcatgaatatcttttattaagagcaagatctgtttcagtatcaagcatactaaaaaatactcccggtagtcctgactccgttattaacagaccttccactttattattatctctactttcattagccaaattcaaagcatgctcacaaacttccttggcttctctttgaactaactgtcgtagacaggatatagctgcttttcttagcaagagatgattgcttgataatgttctacataaagttggtacgagtgaagataaattaacatgttttggggcaaacagatgcagctgctgaagacatcctgtcgcttctgcttgtactagaggatcgtaatgatcttgcatcacagcacatgcgcctaagaaggaagaacgagctgtgcaaacacttgaaatatttccttgtagttcagggccaacagttgtgataagtgcagatagtacttttccaatgcattgatgtacgtcaatgtatg

SEQ ID NO: 13186 - DNA, 514 bp, Diabrotica virgifera
  SmartBlast Evalue=5E-55; Info=Z9 acyl-CoA desaturase B n=1 Tax= Tribolium castaneum RepID=D7EIY6_TRICA
cagaggattctttttctcccatgtgggatggttgttaatgaaaaagcatccagaagttaaacataaagggaagaccattgacatgagcgatgttgcagccgatcccgtagtaaaatttcagaaaaagtattatttgcccctggccctatttttaggattgattgttccaacagtattttcgaggtatatcctcggcgaatcgttgattgactcctgtttaaatacacttatgaaaaatatatttttattaaatgcgacttggtctgtcaacagtgttgctcatatctggggatggaagccctatgacagaactatcaaaccagccgaaaatccaaccgtttccatccttacatggggggaaggctggcataactatcaccatactttcccatgggactaagccgcagaacttggtaactaccgtatgaacccaagtaccggatttttggatctcatggcgtatttaggacaagcatatgatcttaaaacagcgtcgccggagatggttaggaaa

SEQ ID NO: 13187 - DNA, 515 bp, Diabrotica virgifera
  SmartBlast Evalue=4E-12; Info=Gag-like protein n=1 Tax= Drosophila melanogaster RepID=Q9N9Z2_DROME
ttcaataaataaaagcggtttagtaaaattgaaataatagagtaaaatagaataaataaaataaataaaatagataaaataaattttaaagatataaaataacacctaggtgggctgtatatgggcccaccttcgttttccagggagtctattttatgtttggtcagttcgttttaggggttcccctctcctcccctaccgtatacaagggctcggtacgacggacaggccatcctgtccatcctatgcccttcttctttgcataccgagcagtacggtttattaccgcagcttgcaacggtatgtcccgtttggagacaattatagcagcacgccgccctgctctcttccttgcattcgtaagtgttgtgcccgaactttaggcacttaaaacacctaactgggttgtgtctctccattattggacacacaacccacctattttattgagccgtacctcctcagctcttccgctatggaggggcgtacggctatcgtagctacctgctcccata

SEQ ID NO: 13188 - DNA, 510 bp, Diabrotica virgifera
ggaagaaggtatagttttgtaaccaaatagttttcttaggtttcgctcagttgtaataatttttttaactccagtgaattaaacttttcaaaattatgaagcttcttggaaaaattatcttaatcttattgataggtttcgcttacacccagtattttgaattattccttggtaagcagatcctagaaaaacttgaacgtaaatgtgaacaagctgggttatctgaagtatttcagtctcttcaggaaatgtctcgtcaagttacaacatgcctggatggcaaacaacttaatttaaatccagatacaatcgttgaagaattttctcgtgctgaacgaacttacgagcttcttaacttttttaagaaatactgtaaagtttggcctgaagttcatgggtgtattcagcctatggtgacttctactgaaaaatgtttgactagcgatgaaaagcgcaccgttgaaaaaacactttccctcgtcggtgacacaaatactttcttatgcgaaa

SEQ ID NO: 13189 - DNA, 517 bp, Diabrotica virgifera
  SmartBlast Evalue=2E-32; Info=Ligand-gated ion channel subunit n=1 Tax=Tribolium castaneum RepID=A8DMV1_TRICA
gcatattctttaatcttcacaaattaactattgccaaatagttttgcactaacgtagcagtaaaatttttttcatatatataccgtctactagattgaactaccaaaaattaggattgtccagtacataagtgagaaaaagaagaaaaaagacggaaacactattctagctatcctgtctatttctttccacattatcttttctttacctccttccgttttccaataaagaggaataaacctgtgcttagccatatttttatatctgaaagtatgggcatattttggtgacggtggagcagcccattgtgctatgatagtatcctttttggcaagtttggcttctttcgcttttaaaatattaaattttccatgtaaaactttgactatgacaaattcccctagagctgcgaaaactgatatcatgcaaccggccatccacagatccaaagccttaacatatgctacagctggaatatcagacctcaaaccggtaaacatagtgaccaaagtcagta

SEQ ID NO: 13190 - DNA, 514 bp, Diabrotica virgifera
gaccgcgcaaaagatggagtgataagataccttccatagaggtatcaatccaccgataaacaagcagaattgcttataaagacgaagaatctatagagaagtctacaacttgagaaagcttagcaaataaaaataaaccatcaggaatgtgtgttaaaaaataaaactatttgaatagtacactacataccggaattacttgtattaccgttgtagcagaatatatgaaatgagtggagatataagtttttaattaaatgtgatatgcagagcgaaaaaacgaaagggtaagaaataaaggacctacgattatttaaaccaaaagaagagtaattctcaattatttatttcaatcaattttattttccctacgtgcgaaagtacaggattaaactgaccaactttaacaactagaatcaaattctcaaaacttccaatatataataatcaaacacgataatagaaaacctaatttaatttaaaagtttaaaattgtttaatatatgtatatttc

SEQ ID NO: 13191 - DNA, 517 bp, Diabrotica virgifera
gccacataatgagagaggggaagtactccctgctaagggagtactaaggagtccctgctaagtacgtacgaggatttcctggttacgaaatttaagggagtggtacgggtgcagttcaatataattgttcaaagctgcagccaataaagttaagattgctgtgatggtacccaacctccgataggagtcagtactgcaagaagaagaaagttaagtcaggttctagttagatttgggtgggataacaaagggtaggtttcaatatctaattcatttcatttttatctcccccaaagtggaggtgaatgaataaacgaacagagttcaaatttaatatattttaattttcgatatcttggtatccagaaaccgattcacaaaaatttacacagattcgaaaatagcataatcaaattgaccagaaaattgtgtattttgaaaatttttacatttatgccatttttcagcttgaatcatccatgaaatgaagaaaactacttctacatgagaaatcact

SEQ ID NO: 13192 - DNA, 513 bp, Diabrotica virgifera
tacctagacacagcggttaaaaacatgagagaaagttggatgccatattaagggaagtttactgtaccacttcataatttgaaaatattattcaatagaatttgctttgtatttactattccagtcaattaaatatgaaaataaactatgtatcaaggaatatgtacaaaaagcatttatccgtttgatacaatagcttttcttcatgttgaatagttaaacagtatgataaactgtaaacgaaccattgaaaactcaaagaaagaaaaacgttaaatttagactgtatcagactattaatttgtacaataatactaatacaaaagtccaaaggggcatgcttagagcctataagcattatttattttgtaaatgtaagaaattagtaactgtaaaagttaagatagccatgatgataacaaacatccggaacaagaagaaaaacgaggaagctaaagataggtgatatattgcaatatgacttaactcagtctcagtgatttattatatgta

SEQ ID NO: 13193 - DNA, 515 bp, Diabrotica virgifera
taaataaataatgaatttagtttattcaatcttaaaatattatttaaaatttaaaaatacacaaaatatagtatgaagcttcgcattagtctacaccgcttgctgtacccctttttatattttcagcgacttttggaaaattttattctgaatacatatattgaatggaaagaagaaaatacaaatactattacaattttgtgtttatcggttggtcaaaagaataaaatatgtcccgttggcaaatattttgttattaatattctagatgttaataatataatgtatattaataaagtcacaattaattcattttaacatttctccacatattttggcggatttggcaactttttcttcctttacgttaccaataacttgctacttctgctggtattattatcttaacgctatttatttttgtaggctgttcatttgtgactcttcccgtctgtcctcaaatagttattcagtttctgatatttgaaaattaacagcttggttaacgtcgtttt

SEQ ID NO: 13194 - DNA, 517 bp, Diabrotica virgifera
  SmartBlast Evalue=1E-17; Info=E3 ubiquitin-protein ligase HUWE1 n=1 Tax=Harpegnathos saltator RepID=E2BHC6_9HYME
gtcaaagtgtacaaatttctgcatttttgataatatttcgctaaacaaagacttctagttgataaagtgctcaaatttgagtccgggggtgtatgattgaaataattcgtcttttaaggtaaaaaaaggtgtacagtttgctgcacatgaagcacaaaagaccgttagttacataaaatcaggaaattagtgcgatcccattgagtagctgattatttataggaaaggaatccaaacaacaacaatccatgtaatgaattatatttcttcatttaattcgtacaataaggcttgtagtattacctatagtatgaagtaaatatattcagtgctcaaaatgaagatcgacaggtctcgtgtacgtaaaagtacatcggaagttcccttggagtgtcaggaactcatagatagattgcagcaatgctcccgtacagagttattagaggagctgtcaaagattcagtcctggacatttggcaaatgtgaactactgcattgggcccaaatactggatgtg

SEQ ID NO: 13195 - DNA, 514 bp, Diabrotica virgifera
  SmartBlast Evalue=4E-22; Info=Protein FAM38A n=1 Tax=Camponotus floridanus RepID=E2AY04_9HYME
gatatcgactgttccggtttcactttgtacaaccacttcttctacaggattgatctttctcaaagcaaagaaaacagccaacagagtgatcatcattagaaattctggtccaatccatactagaatataagctacactaaggttatttaacttaactaatcctatatagaatagaatgtcttctgtcgtcggactgtcatctaaaaactgggcgtatggttttgctacaactaaggcgatttgaaatgccgtttgtactagcgttaacaagcctgtgatgcccagtgtaaccttgaggaatattcccgtcgagcctgttaaagtggtcgacgatggcactggaagaaaaggtatcaggaacatgtatagtaggtatatgaacgaaaacaggcatggtcggaacagtatacataatgtgatgattactggtagtagtagtctaaacaaaaatacgtttaatacatagcgaaccattatatccaattagatgacctgtaggttaataacagttcag

SEQ ID NO: 13196 - DNA, 516 bp, Diabrotica virgifera
cttacggctcagtaatactttcctatagatccctacggaagggcgctgacgacaaataaaccggtgtataaatataccgaaaagaaaataagatcacatattgttaaatgttaagaaaacagtgaaatagaagagtattttgtcaggcgcccaacaaaaagtaaaaaaaactgacaagaatagatataaaaagataagaacgcaagacataaagaagattcagctcctaatgtacaaataacttccctacgtaagaacaattaataagaaaaagaaaataagatcacataatgttgttcagtgataaaaaaacagtgaaataaaagaatattttgccatgaatacaacaaaaattaaaaaaactgttagcaagagatataaagagttatagaaatcaagaagattcagctccttatgtgcaaataacttccctgcataagtagaactaataaggaaaacaaaataatatggcataaggttgttcaatgttaaaaaaacagtgaaatatttcgccac

SEQ ID NO: 13197 - DNA, 512 bp, Diabrotica virgifera
gtcgctcaaacgttatacgggatctgattgggtgttaaaatcatctgtcaataattgttcaatatggagattatggataaaaaaatgttgtgtatattagtttttattgttgtgatggcagagaaaaaagcaagtttataattgtagtgactttttaaatagttttttaaagcgacaggtacgtaataattgtaaatgtttcagtatcctaataaaaaattacataggtacctacctatttggaaaatttaaaatgaacctaccaaaatagtatgtaatgctttgatttacataatttgattacctatcaaaatttctaccgatattcaactaatatattgttattccacaaaatattcctttaattccacaaaaatcaaactaatttgattaaattcatataagtaataaacaactgtcaaaaagtttatggtgtaaacgttcagttggtgtatattcccacatgacagatacgcgaaggtggcgcatgggaaagcactttcgattttcga

SEQ ID NO: 13198 - DNA, 515 bp, Diabrotica virgifera
aagcccttcaaatggtagtgaaattaggtaccttggcaccaatatgtataataattataaaacaaaaaatgtaacatcaaaaataaaaacaaataacgaagcattgttaaatttctgaattggatgtattattgtcctaaatgttttgcaacgttgtatttctgaaaaacaataattcctttttacacaacatacacaaaactcttcaattttttccatttttttaaagtgatttcacaggaatgatttttttcttctggatttattaatgataaaatataagcttactctcgtttgtgtcggtatagcctctctatacaattacatatattacaactatgcagactgcacagatgattgatactaatatctcttttagctaggattccccaattcaataaacaagaggtgctaattttcaagttcatcaaaacagccaattcagcttatcacatttcttaaacatattattttagtgagttataactagggttaccataatttattaaggccaa

SEQ ID NO: 13199 - DNA, 515 bp, Diabrotica virgifera
atcaaattctgatttttgtgggcttatgtagtcgattgtagatgatgtgtctttgcccgtctccattaatccattaatgttggtatatttttattgctgaattcttcttttagtattggtgaccagagcctgctacattctgttgataggtgtgccatacatttttctcattaagtaagatgagggctgctctttgatttgctctctgttttgtcagcattttgctgtatgtttctttttgattagtggtgtatctttccattgtactctgtgcttgttgttccagacatgtttgcatatctggtatctctctgttttgatgtaggaaatctgattcatgctcatttaacagtggttttatcatatgtttctcccacataaaattggtggattcacaagttgttttatatatgcaattctttgatctctcctgttgttttttggttggttttggaggggatagatttgtgtgttggttgtttaaatggtgtgatgttatatttacgagaaattaa

SEQ ID NO: 13200 - DNA, 516 bp, Diabrotica virgifera
ctgatagcggaatgcctctaatatctacagatcccagtaaatcgagttgtggaaccgagttgtcgatacaatgaacagacttttgaggtgttacgtgttctctgagccactgtagagagtggaagcaaggacattaaagaaacagatcatcgatacataggaggctattgaaatgcgggcttatagaagaatgcttaaaataggctggaaggacatagttcttctatgtccaaaaaagactactcaagactatcacattagaaagaacaatgtaggaacctattttaactgcagttatacagaactgctcagaggagcggcatcgaagagtcgaatcgctatgatgaatgcaaaccgtaaaggacatgtagaggagaagatgaaagtgccaattgtccataaataatgtgttttacacgataataaaaatctctcataaatattaataatacatctcttagatagttggtcagactataacttctattcttaagccgtcacatttagctctataaa

SEQ ID NO: 13201 - DNA, 516 bp, Diabrotica virgifera
gtgcttttatgaaaacgtgaaagccgcgtgtcattttcgataaagtgaaaagttataacttttaatttgtatagtataaattgacattttgtacatacaactgaaaaacaaacattcagtgtttttacttctttcccttaaataaatttaaggtgaaatgaacaaggacgtagagtgaaaatatgtttttggtttaatactccgccattttggaatattcttaaccttcttccatacatagtttaaactgtttagtgttatatttttttaagttcgtattaatcagcgcgaaagtaagtacgctgttagtgaaaatgccaacaagtagaatatgtactttcgtagaattgcaataatgtgtcaatgctgaacatatgcagattaagtcaagaatcggtctgccaccgctgctgtaagggactttgggccctccaaggctgaaatgagcagtaatcaaaagcaaacggcggcaggtgggccgcagactcaaagatacacttcgtcaccgtaccaacc

SEQ ID NO: 13202 - DNA, 516 bp, Diabrotica virgifera
atattttaataatataaaaacgtctacaactctcttttaaaatgtataattaaaagtaacttagtactactgtaacaataatcattggagttaatatagttggtgcaataatagagacagaagaagactgagtgttacataagttggtagtacaacttttacaccatttaaatccagttgttttgattgtctcattcagattgcatgtattgttgtatccgcaatacctatagatagttgtatttgttaaaagcgttatgcaagcgagtgtcttggttctgtcttgtggagttgtgcaggtatgactcaaagtagaacttatattcttcccggtttcgcagctagatccatttccaacctttgcatggcacccatagcagtttagtgcgctaccctcttcagtacagtacataaagtatagcaatccaacgataccaaaaattattgatttcatattgaaatctgaacttcgaaaataaaataaaatcaataggtactaaaccaacacagtgtaat

SEQ ID NO: 13203 - DNA, 513 bp, Diabrotica virgifera
  SmartBlast Evalue=2E-57; Info=Zinc finger protein ubi-d4 A n=1 Tax=Harpegnathos saltator RepID=E2C4M4_9HYME
gccggagaaagcgttggaagataaagctgctgcttcgaacgctactactactcctgtagatagtcctgctcctgcgggaagcgctgagggagggaaaaaaccttcgccgagtccgtattgcgacttttgcttgggcgataacagggagaataaaaagacgggaactcaagaggagttggtgtcttgctccgattgtggtagatcaggacatcccacttgtctacaatttaccaacaatatgaaaattttcgtgaaaacctatcgctggcagtgtatcgaatgcaagtgttgttcgatgtgtggaaattcagacaatgatgaccagttactgttttgtgacgattgtgatagaggctatcacatgtactgcttaagtcctgccttggtaaacccaccagaaggatcttggtcgtgtaagctatgtatcgaccattttaataaatagggttattctgattttacttactctttttatcgattcattcttttaactttttaattatatattttacg

SEQ ID NO: 13204 - DNA, 514 bp, Diabrotica virgifera
  SmartBlast Evalue=4E-29; Info=Two pore potassium channel protein sup-9 n=1 Tax=Harpegnathos saltator RepID=E2C7D1_9HYME
tttggactctctaaaggatggacgaacttcaccacgattaagaccaagaaaatcgacgcccttaagaagaaccgggtctccaaatcgtagtggtcgttctgcacggtcacgttcaccaatgccaccgatgaatccaagtccaagaatgatgacacccttaggttatggtctgcgctctccacgatacgtagatgacgattccgacatagacttctactatagcgacgatccttatgatgtaggaaagccaagaatacgtccagtgcccatttggctctgtgttttcctcgtagttagctacattctagctggagcttatttgttcatgacgtgggagggctgggagtacctggattccgcatacttttgttttataactttaactaccatcggatttggcgatttggttcctgctaaagaagttagccgggataatgacagagctgctataagtatagctctttgttcgctgtatttattgtttggtatttctttattggctatgagttttaac

SEQ ID NO: 13205 - DNA, 515 bp, Diabrotica virgifera
ggaaatagctccctggatagaatagtatattgtacaacaagtgagaaaaagacatatttcttacgagcgcagaagtttgttggcacgagccggggcacgaggcgagtgccgcaaatcaagcgagggagtaatatgccattttctcatgtgttgtacactgtacttttcctatggatgcggttttgtcaagagttcaaattttaaaattaaataatttaggtgcttttacctgtaggtatttaatattcttaaaatttatatacgttatttatttaaaattctaattgacagttatttttgaacagttttgaaaggttatttattcctgctaagtttggcttcaacacatattatttgacaacattaattgtgtttgtattgtgcatgttaccatggaaacggcgatcatatctattgaaaaccggcggagaacccgtgagaaaaaatagttcttactgcaatggccgacttttctcactgcctgagaaattgtacgttttgaatgtgtgtaagta

SEQ ID NO: 13206 - DNA, 515 bp, Diabrotica virgifera
  SmartBlast Evalue=2E-33; Info=ACR136Cp n=1 Tax=Eremothecium gossypii RepID=Q75BY4_ASHGS
aattaaattatcagtgggattattgtaatgtgttatataccatgtaacatcttcagctttttccaacattcttctataatctcctgaaagattgtatgttttgactgactgtttggacatgcttaaatctaagccaagctcttctactacttctttataatgctccttcatattttcaggataagtactatcaaatcctggtaaaggcattactatatcatatatattatacttctctaaatcttcttcagttaaagctctgacttgttttcttgatttaacttcagtttcttcttctttgtcattagtgttgctctcctcactctcaacagtgttcaaattactttcactgttatttactaatattaaatctcctacaacaggtttcattccatagatctgtagacgtttagataccattctattccaaaccaagctttggaaagcatgaaggtacagtaggcgcattgatttaggaactttttccagcgcattcacatagtcattttcattgg

SEQ ID NO: 13207 - DNA, 515 bp, Diabrotica virgifera
gttgtgtatggtctccaggttagaattgttctgtgccatttgtttagatcgctcgtagctacatgtccagcgtattcccatttcaattttaatgatttttgtaccacatcagtgactttggttttctgtcatttatggttatatttaggtatattcttcttctccttctttagtttattggcctccacctacttgggtatttggccagctcatcgtcgcggaataagggaaaaatatttatattctaatgacatttatcgtatgtcattgtaataatatataccagtttgttgagattggagtttgatacagtttttgaaggaaaggaaagaaggtttactatggaaaataaaaccatttgtaaaagtacaagttttctatgaatagttcaaacggtcgaaacacttccgacgtcacataactgttttttctactgacttatatataactttgtttactttgttgatgcagaatgtaaacattaaccatatgacgtcacgacgcgtcttgggcta

SEQ ID NO: 13208 - DNA, 509 bp, Diabrotica virgifera
ccgatttcgttgaacctccatcgattttcatgaaagttggtgagtggttggagaatacctcagggaacaggggtgacatgacgccaacttgcgcttttgccctgtgggtggatgccaccccttttctggggtgaaaattgttttattaaaaatgataccataaatcgatagagagacaggttctaagcaaaatttgttatattgagttattggcatgaatcagtactttttgagttattaaagatcgaagattttattttttcgtaaaaaaatgcatgttttaaagctgtttttcacgtataactcaaaaactattagcttttacaaaaaagttattcttaccaaaattgaagacaataaaagaattgaatacactattcactcaaagtactaaactaatgttaattcaaagtgagttaaggtaattgaatgtatattttttcgatgagtgctcaaatctaagtattcaagcttaaataccgagaaaacgatacattttataagatata

SEQ ID NO: 13209 - DNA, 510 bp, Diabrotica virgifera
tgtcgactgacaatgactggcaatgtatacttgataaaaataaaaattatcgttcctaggccaaaaaaataatatcgttactgcaagtagttagtagtatgtagttattatagacaagtactatttaattgccgtaagtgattatagtttgtgatatgatgtcatgtggttagtgttgaagtgacgatcagcttaaaagacaatgtttattccttacataatttttgctttggatattgcaaattttgtttgctttaattccgtatatgttccacaagtcctaggtcttgatggaccctacacattctttggtatcactggaactgccacagcgttttttagtttcttatggaagcctatagcgggccgactcagtgacgaaaaaggccccactctactcttattctggtgtatggttggaggattggttggtacgatattatcctatttaagtggatctctatactttttattttcgccagaataatagcatcaattggaagccctagt

SEQ ID NO: 13210 - DNA, 513 bp, Diabrotica virgifera
attcaagatgaaagctgtatctttgtgcctttttgtaatttcattagttacttacatctcagctgtggaacagaaacttcaaagacaacaagaactcgcagtatcgaaactgatgaataacatggactacttaaaactcttccccaattctatcggcttaagaaaatatgcggaacagaagcttcaaaaagaacaaacattcacaataccgaaatcgattaataaaatggaaaagttcaaaactttgctcgatgctataagttcaggaaaaaggagattcatcttcgaggaatgctataacacgtctgcagattgcagctattgcaccgccgcatgtgaggcgtgctgcgcgccctattggccgctaagtggtagatgtttccaatctgacggacaagttaaccaaatttgtgtttgtgggttttttaaactgaaactactatgtactatatttaagtacaaacaattttgttactaggaatcctgaacttatctagatatacttaagtgaat

SEQ ID NO: 13211 - DNA, 515 bp, Diabrotica virgifera
tcaacctgtgagtaatgaaccattactcacgggtaaagtaatgggtgttattatctattcaaaaacagcgaataatgagcatattattaaacggtcgtagaaaataataatttatccatttttactcttttcaaaaccacggttgaaagacacaagatgaggtttcgttagaaactggaggggtcgggtactaattatattgaaaaattttaaaatgttttatcaccataacgtgaatcgtcacattttgtgagacgttgatatttgatgtgagacgtgacgtgatatgtcaaaaaatcacgtttcacgtcaaatgtcagtatttttaaactactccacttggatcaaagtacatcccgagtgtttgaacaaaaatttgtagtatcggagtcaaaaatgtgttctggaaggatatataggtaaataataatcagtcaatgatatccttcctcagaaatcaaaacgaccacaagaaaaaaactaacgcattctgaaccacatactgaatgcaagaa

SEQ ID NO: 13212 - DNA, 516 bp, Diabrotica virgifera
aattcacaagggcgtttgtttctagggtcacgtcgaggatccagaggaagcagtaacgtctccgctgcatccaccaagtccaacaagagcccgccacaggccggcaacatgaattcggccacgacgcccatgttggaaagcgttacagtcgaaatacaggaacccaaagcttaacagcgaggcttcgcgaattattttaagttaattttaagtgtgccaacctccagccgacaaaatcacctgattttgttcgttgtcacccgaaatcggtcggtattctgttggataatttccggatgcttcgaaccgagaacagattgattttgttgagggtggttgttggatagtgtagagtactttttcagattctatatattacttcggtagtaacaagtgatgttagggaccagaaaggtaactaatttgcccagtcatcacattcttttaaaaatcaaaattattctctgtacaatacctgtaaaaattctctctcattcttcattcgaagttcacaat

SEQ ID NO: 13213 - DNA, 514 bp, Diabrotica virgifera
  SmartBlast Evalue=5E-20; Info="CG1213, isoform A n=6 Tax= melanogaster group RepID=Q7JVN6_DROME"
gacctgccgtcagtagaaccgagttaagcatactagttcttcctctcatgtatgtgggggatatttctccaatgtaggacggaatcacagaaaatacacatccagttccaattccaagtaaaaatcttgaaatataaaaatgtgtaacgttatatgcaaatataagaataatgctggaggcaacctgtggaatagaaaatattatcaaggttaacttttttcccagttttctggacaccactcctgtgaataaaggtccacataaagatcctagagcatggagagatgtgatccaagatatttcctgtaaggtagctggtcgtcctagggggttacggtcagaatcaacgctgccgtttaactttgggatacatggcgatgaccaagaataaccaattccagtgatcagtgccatcaagttaacggatactgatgaccaaaacactttcctatgaccataactctccatttttaccaactcactgacctacaaattcgcgaaagaatattccat

SEQ ID NO: 13214 - DNA, 515 bp, Diabrotica virgifera
gatgaatgttgtatttgtgttggtaaaaattaaacaataacggcagttctcatttatgaattgtagaattaatattatgtgactattatatttagttaaaactaattttttccgtaatttccatatggtgattgatatatatttgtaaaatgtctaatataccagcctttgctcaaatgtccccacaagaaaaagtgatagatcgaaagaaaaaagaactacaagctaaactggctattcatctaaacaaactccaagcaaaaataagtcgacatgaccgttttgctcaaatgtcccaacaagaaaaagtgatagagcaaaagaaaagagaaattcaagcaaaactcgaagccaaacaggcttctaaagttgatacaaaagtaaaagcggattcttccagcaatgaacatagacgtatacatgcgttggataagtataaggatgagacaggacagtatgtattcgttgcttccagtaaaccagcgagtaaacagattgcgaaaagtactgatttg

SEQ ID NO: 13215 - DNA, 512 bp, Diabrotica virgifera
  SmartBlast Evalue=3E-14; Info=Hemocyte protein-glutamine gamma- glutamyltransferase n=2 Tax=Formicidae RepID=E2AYU1_9HYME
agaaaccaacaacagtaggtctgaaattcgtcaatccgttgaagaaagctctgaccaacggcaagttccacatttctggagcatcgcttcttaaaaaccaagtcattggcgttcctgatgttaaacctggtaccgtgatcagaatcgaaaccagtattgttccaaaatacgaaggagaacagaaattggtggccactttcacttcgagagaattgcttgacatcaccggaacagctaaagtggaagtcgtgtctgaagaagagtaaaagattacatccatgacacaataagtacttatttggatttccggtatagggcttttcatcgattgtcatttgtttcgagcttctgtcatgtgtcacataatattaatgtatctacgtcatacgtcttcggtttgtatcattggtaataccaataacgtacggcgtagatatattaatattgagtgtcacatggcggaggctcgaaacaaatgactgtgatgaaaagccctatagagcgctctagaa

SEQ ID NO: 13216 - DNA, 510 bp, Diabrotica virgifera
atcttaagggccggtttttcagtgctgggttaacccagatttttcggtcaccgaaatttttatggttaatcagtttttcagtactaggttatcgcttaaacccgtttaagttgaccaagattttaaccgatactcgctatcataggtggtttaactccgaattttccgacagacgtttatctatatttgctgacagaagaggttagttaaattatgacattttgtgttatcgcgggaaatattgtattatgtattattatattcttgattatatcttcatcatcagatgaagaatcggaacttgaatgcattaatcatttttgtaatgtttgttatttgttatttataaaataggttatgaaattctattttgtttattttctgtcaaaaatctatagaattgcacatcttggtttaaagcactgaaaaacgatataagggttaaaatattggttaaaatttaaactaggttagctaaccaaaattttaactgctcactgaaaaaccggg

SEQ ID NO: 13217 - DNA, 515 bp, Diabrotica virgifera
tgtgttggggaattcgttatttttgtatattactattattacattgactgctgtcaatttcaaacccgtacaactgatcgagttcagcgactcttacctgaaagaaatagacgagaaaattaaagaatgtcaagctaacaacgctacccgtgcttctgaagaatggttaaaaactgaagatcttgcaactgcagatcaatatggaagccatattttatgtcggttaacaaaggaggggagcataaaaccaaacggagatattgatgaagaagaaatggaaaaagatcttttgaggggtctaggtgatccaaagatagtaaacttaattatgaacgattgtaaagatcgcgttcccggtacgtcaccagaagagagtgctgttgaaaatttcaaatgtgtgattttagcagccgagaaatattaaaattactaaaatactaaatccgtagcgtaattcttgtatacgaaaataggttatgaatttttcgttatataaataaacaacatttgcaacc

SEQ ID NO: 13218 - DNA, 515 bp, Diabrotica virgifera
aatactagctaaaaataggaaggatggacggattctctgaggttatcaatgatgaaagcaaaatatctgctttctcctcctccattatattttggtttataaaagatattgaccaaaatggtaatgacacaacgtcactattgtcttaattaatatgatttttctactacgtgaaaatcttatgtatattgtatgttgatggtctaaaacctaatctatttttttgcactctgatttttgcactaaaaatcattcctaatttatattgcatgtaatataaactgaagacttatttttaatttaggcgaaagaaactgacttgtgttatattagaaatgtaaacaagtgttaagagagagaaaaataaaatcaacgcattaacgacaaacattttcaaattaaaatgtacaccggccaattcgtaacttttctactacctgaacctgccaactcgaaaccttctacaggtgaaggttatgaacctgctcatgtctaggttaaagttggcaggttca

SEQ ID NO: 13219 - DNA, 512 bp, Diabrotica virgifera
  SmartBlast Evalue=4E-34; Info=Eukaryotic translation initiation factor 4E nuclear import factor 1 n=1 Tax=Tribolium castaneum RepID=D2A5X2_TRICA
gacgaagacatggcagcagcttttaaaaaattgctggaacaagctcaagctggaggacatcctacatccatgaacacttcaatgaacaagactcaacccatgagtttattagagatgttagatcgttctcaacaacaagacgaagccgcgagaatgtctggaagcaaccctcatcttcttgctccttccaattcaagcaggggcggtatccagcatcaccaacatatgacaaatgatctcagtatgaaactacatcaagcccaaattcaacagaaccaaatggatatgctgaacaagttgattaatcaaactacttctgtacatcctcagcaactgagagcttctccgttacacgatttggttatacagcagagtagagacttacttaatagaccagaggctcaggctatcctccaaggtttgaaacggggtgaaatcaccacccaacatctctaccaacagctggctaacccagcgctacaacctcgtcatagggaaatgttgataaacgt

SEQ ID NO: 13220 - DNA, 515 bp, Diabrotica virgifera
  SmartBlast Evalue=0.000000001; Info="Hepatoma-derived GF, putative n=1 Tax=Aedes aegypti RepID=Q16IV8_AEDAE"
agcgtttgttagttgtttaggcagatttatgaagaaataagttttttttttctgcttttgatttgaatgcttcgcgcattctaggttaattaaagttacatcttgataataaaaatatcgtaattatgaagaggcccaactttaaagtcggcgataaaatcttcgccaaagttaaaggatatccagtatggccagcacgcattgtctccgaagctggaaaaaagttcaatgtcttgttttatggcactggtgaaactggatgcattagtagtgaacacttgttctattacttgaaaaataagaaaaagtttcagaaaccattgaaaagacaagactacattgctgcttttaaagagatagaagacgctataaaaaaggatggcggagatggggatgaatctccagataaaaacgattctctagcagctgatgtctccttggacacttctactgccaacaatagccctgtagtaaaaacggaaaagaaaacaccagctaaaaggaagcggtcctct

SEQ ID NO: 13221 - DNA, 513 bp, Diabrotica virgifera
gtccctttgcttagtggtacatccacgattttcgtttgacactagctagtatagcttacactcaactatacgtgctagaaaactaaggaacaggccttttattgtactatcttatgaggtaactatatattagttaaccctttgaatgctgatgacgtctaagaacgtcataccgttctactgccgagtgtgcatgacggcttcaagcgtcatatgcagatatgcacaccattcatttagaggttagtatttgtttgactttgactgaaagacgtagataaaagtgtatttatgacgtcagtttagattcatattatggatgaagccaaatacattagactataatactgtgacgaatttataacagaccggccctgcccctagcagtaaacaaacaatagggccacgtcatcgacaagtaatttctccgctaagtgagtatttttcgagaaacctgttccaggcgttcgaaatgttcgactgtggattctcgaagcatgagccgtatctata

SEQ ID NO: 13222 - DNA, 512 bp, Diabrotica virgifera
gtcgaaattaatataaacgaggattgtgacttcacaaacggcggtctttgcgtgtcgtaaggggtcaaaggcaaaagtgtcctcaagtggctaccttagtattttgaggatactttgacctgtgacctctgatcggtcacaatcctttgagtaaagtaaatttctcctttacaaacatatctagccgttttcacaccacttgaggtaagctagccagtgagttgatcttttctatcgtggaaagatcgtccccaataggcctacaggaaaccaagcctattttttttaaactctatgtagaattttctttcatgaaaaagacgctattacgtgtgaatcgagggaggtaattctgctacgtaaataatttaaagttataaaaatgcagttaaaaaccttttaaaaattttattgtgtactaagcccaacgaaaaacgaaaaattattattcaaactagttaaacacaaataaataattaatttaaagtaattggaaatccaacaatacatta

SEQ ID NO: 13223 - DNA, 514 bp, Diabrotica virgifera
ctttaacttaacctaacataattagattcgaagtatttcaaagatgattttatcgattttatttccattttggaagaaggaatgaaggaaataaggaaaacattgattatgctgaaatagtttactggagagcttgaacaagaggtaaatccattttaaattagaggaaaactgttgatttgtatgtaaaatagaagacaaaggcaagtttaaataaagacaagctagctaatgaaacagatgcagtgatatgacaaacacctagaagatggaatcctgtgttctcaaagaaaaagctagttccagaaataagctaccaataataaactagagaatgtattacaagaaagaacaacgctaatacccaacatagctcaattgcttcagatagaaaaagaggaggaaagggtagaacacaagcgtgccagagaaaattaaagggcagaagagacacaaaaattcattgatttattaaatttaataattaaattatacaaaggacaattaaataaag

SEQ ID NO: 13224 - DNA, 513 bp, Diabrotica virgifera
catgacttaaaacctaagatacaatcatctgatatcaaattttatcaatcttatacgaggtatgtcaaaaaatatgaattttgctcaagagtaaagtacctttatatttaataaaagaaaagttgtttggaattgaagactatgttttaatatgcaattatatccttctatttaaatggttaattttcggtatctgctagggttttgaagtaacaaaccttacgttgcgccctttcaatctgtttcatctgggaactaacgtcgttgggaggtaagtaatattttacatttttatccgtttttgttgaagaattaacgccttcaagatgttctgctgaaggagaatacttcggatcgtgtagacagcgcttagaacaaatcactcttctccaataacttaacatttagactcgactgctgtatttgtctatcagacgtcttaaaagtttttggatatattgcaacaagaagtaatgataatattgttctgacgctattttcttgcgacatctt

SEQ ID NO: 13225 - DNA, 515 bp, Diabrotica virgifera
ctaaagaacaaaggaggagtccccacatcaaatagagaactactacacatagttgaagactttatcaagaactatacacaagtcaaagaccaaacgaacttggaagccgcaactcagttttcccgaaacatcgtttttgcagttcgcccttactcctccaagctcctgatatattgtacaagtctttttatctacttcaccgaagcattctcagctactgcattagtttttgtagttctttttctcggccaattttaccactatgtatgtaattggaacataaagagaagtatacataggataaaaaaatagaggtcgagcgattgctgacagtgagatattggtaaatcctgatcatttaataaatagtgtttatatagtatgaccaataatattgcatcttctgtctaacttccaataacacaacttactgtaaatgaattttttacgtaaatcactttcaatgatgatgatttcacttttaaaatatgaggaggtatccgacaatggaacag

SEQ ID NO: 13226 - DNA, 511 bp, Diabrotica virgifera
  SmartBlast Evalue=4E-10; Info=Endonuclease-reverse transcriptase n=1 Tax=Schistosoma mansoni RepID=Q4QQE2_SCHMA
ggggtagaatttgattgaattggatgtgagccgttataactgcatgatctgactttcctataggagagctgatttcgagagatgaaatcagctgttcgtcgttaataagcaccagatctaaagtagatggttggttattagttctaaatctggtaggttctgtaatgagctgtattaagttcgaatttactacaaaacttttaaataaattatgagagttttcggtgtcagataacgaagttattggccaggtgatctccggaaaattaaaatctccagtaataatgagattatcgagagatgatagttcttcaagtttagtaaacataatattatcgtgtgcaagtactgtaagaggtggacggtatatacagactaaattaaggcaaaatggatttttagtaatagacacgtgaatagcatctattccaggaatatctaatgggttaatgttaatttgaagttgtggtaataatattagataaataaatgcatacaccaccaccgacac

SEQ ID NO: 13227 - DNA, 515 bp, Diabrotica virgifera
tttgttttcaatatttttattttcacaataaataacataaataggactgatacaatcaacatgtataaaattcttatctatctacattctaatcatgggttaaaattagttaaggattagcttgatagattttgtattgaattttatgttccgtacaattgttttcatatttatctgatatacatatatacacccagtcataatctagtagcaaaatcataaatcaaaagttatagattatagagcataaaagtataaggtgcatattatattctctcaagtcatggaaatatatgaaaagctttgccaaagaacatgatgttgctgcaacactattgtgattatcaaagtgaattaaatgataccattatgatgacgaattttgtgaattcaattgttggaaaaggcaacgctaaaaatactaaatgcgaaaaagattacacacaagtttggtaaaactgattttagatgataacattttacgtaaaaaatatgagcagtaagtaagtatgtag

SEQ ID NO: 13228 - DNA, 511 bp, Diabrotica virgifera
ggggcggatctatcacacactccgaaaaaatagctccagcattcaaagactaccctctagagtggaatcttcaaggaaaaagaaaacgaggtcgtcaagcacaaacttggagaagatctatcatggacgatgtaagcggtaaaggaaagtcttggaatgaggtgaaggccttagagcatattagaacttgatggcgcgttttcactgaaactctatgctctacttaggagttcaacaacctcattaaacatcgtaccaaataaatgtcttatattatttaagaactttctttatatttttgtactcgaaaagtggacaagactccattattaataatctgtgatgtttagttgtattaacaataatttttgttctcattggtgtgatacacttgttaggcattgttgagatggacctataaatgttgataatacggaatttatattgttgttgaaaatattatgtatactaatatcggtttagagaaatttatggaaatttataggcaaag

SEQ ID NO: 13229 - DNA, 514 bp, Diabrotica virgifera
  SmartBlast Evalue=1E-18; Info=Pol protein n=5 Tax=Drosophila melanogaster RepID=Q6J4U7_DROME
atataaggtcctctctccatactgtatcgtaagctgccgagagatcaataaatgccgctgaagttttaattcttctttggaaacccgcttcgatgtaggtggtgagtgacattacctggtccgcgcagcttcgttctggtcgaaaacctgcttgttcgactgggatcacctggaacagttctgtgctgattctattatatgtatataagcctctctaatagtttgtagatggcagagagaagcgcaattggtctgtagttttttaggttgtcggcgggtttgcctggctttagtatggctagtatcttagagcgctttagttcttgtggaatatttccagtttccatgatgtctgtgaaaaatcgagccagccaaacttttgtatacttgccacaatttattaggaattcagggtgaatattatcaaatcctggtgcttttgctggcttaacgtctttaagagcctctttgatatgtcttcgctggtgaaggggagggaatgctccgtttctgt

SEQ ID NO: 13230 - DNA, 517 bp, Diabrotica virgifera
tggtcgtctaaggtactgttccgatggtaggttacggaatcaattaaaaaataagtgtaacaacgaacagcaacatatttattctgggtaaacaagcgtgcttcgtttattatctcgtaagggtttgttagcgagggtgtgtctgaaccgttcgcctgccgtatcgatactgccagaccacaacactctttatgccatcatgcttgcggccctacaccatggctagaaaggcaataaatcactaacatctgcgctttaaaagatgagaaactctctgcattttaagaagttgacataaagagcgtggcaatctggtctcggaatctattagtgttttcttgaaaaaaaaaaaacattaattttatacaatctaattagggatacatttccttaacggcccttgttagcatatggtttgtaattaaatgttatttcgttttgagaaaagttattaaaaatttagcaaaaatagtaattaaagcgtatcgctatagtaccataaattgatcgagtcttt

SEQ ID NO: 13231 - DNA, 512 bp, Diabrotica virgifera
atcacgcgagagaacggaaaatcaaagagaccagaaaagtttttgattgcatagggcttattggacagacagctaaaggaagaccgatacttgggtatcaagatgacttagaagacgatttattccttttgagttagtgcatgaagaagtacattgtagtgaagaaggctttggctcttaacgagctgtaatgccattggatcatgaagtcttttctatttctgttttgtattcagtccattcttcttttttgttagatattacaaatatagaatattcccaatatgattgaaatattctcaagctggtaattaaaatagagagcagataatagcgtaaaacatgagaacaagaatataatgcgtccaatgtataccagcttctgctgtaggtatatattaactaaataatcaatacaattataaagtaatcaatttaataaatatctggagattcaacaaagaaaacaatagctacatatacaaataaaatcaatatcactttgtttaaat

SEQ ID NO: 13232 - DNA, 515 bp, Diabrotica virgifera
cacataacaatttatattaattcataaaaagtgaaaaataattggaaaaaaagttacttgtcgtactgttgtcttagaagataatctgtttttaacgatatccgtaaatttttgttatataaacgtatattgcatttctgaactgaagctttgtttaaaatttttcacatttcaatacaaaaaaccaaacaattttgttcaaacattttattacataagttataacatgaacatacttattttacaaaaatttaaaataacagtttgacaataaagataataaacaaaataaaatgaaaaaataaatcagaatcagttttggtaatagcggatgctaaaagttgtgaaagtaaaagattattgcatttccttaaatccgtgtgaaatatctaaaggggaatttatcatggtattgacactatcgctaaataatcaataatttaacttaactttttcctgtgctttcttctaaattacctatcgtcatctagattataccatatgtaactatatta

SEQ ID NO: 13233 - DNA, 514 bp, Diabrotica virgifera
  SmartBlast Evalue=6E-37; Info=C-jun-amino-terminal kinase- interacting protein 3 n=1 Tax=Harpegnathos saltator RepID= E2C019_9HYME
acaggatgtagacattgaaccttatgttagtaaatgttaggaacgggtaaattaggattttctttagttcgaataactagtcttcttatttcatcgaatcggctgtggatcggcacgagtaatggagtaataatttctgtaccattgtccgatggtaatcctgccgccctcattccaagaaccagttcgttgccgggccaaatgaacgttagatttaggccagtaccaggaaatgctccaccattctgtaccatggcgcatgcgcagctaagttttcacgggcacagggacaatgttaagttctttgtagctgtacctggaagtggaggaatgagtgcagcttccacgccatcagaggcaatgtccgcttcagtatcttcagtaggaaatacactgaaaagtccaacggcgatgctggtcatttctggcggcgaaggttacgtcgacttcagaatcggtgatgaaatggaagagagcatgataagtaacaccgagataggtgtgtcggaagaag

SEQ ID NO: 13234 - DNA, 514 bp, Diabrotica virgifera
agacacaaccgatagtaaaagatatgataagggaagttaaaaaataatctagtacttaacaacaaatgtagaataaatatatataatatattgcggaacacaattcggtctataaatgagaacattaattaagtacacttatctttgttccaatctagatgaaattccttcagctctaattccaagtgttggcttatggacgtgccggtttatcagacggtaagcggctctatgagtatacacatcttagggaagatttacgttccagataattaataggaatgttattcttagtgcattttccatataagttgtctttgtgggatattaaaagcttggttctattttataattctctaggtacggctaaaaagagaggttctcattaggtatctagaaattttttcctggatacaaggtgagacagaccggttacaaaagataaccgaacatattcttccacataaatgggaaggtcatttatccaaaatgaaattacattattacttaagta

SEQ ID NO: 13235 - DNA, 508 bp, Diabrotica virgifera
ttctgcaacatttattaaatttttattattttcgtctcttggtgccttcaccaatgcacttttaaataggtttgtccttagggagtcgttcaaattctcattttctaaagtaccaattactcctaagttgtcatcttcgcttgaagagtgcaatgcctttcttcgtgaacttctagttggagaattgtttgattctgctactgacaacttcaaactctttctagccggtgtacctctaggtgttctttgatacatagacttactttcctctgcataatgttgtggaggtttgactttccttttggaagaagatatactcgtgagtttctctttgttcacaattggtgtgcgtttcggagtggttctcgtagttttaaaatcttcatcatctgaagatttgtcttgatacccaaaacgcttgttaattttgattggcgataaataatcagcgtaggattcctagtagtacttcttccagattttcgaattttcggtggactggaaactg

SEQ ID NO: 13236 - DNA, 510 bp, Diabrotica virgifera
  SmartBlast Evalue=2E-28; Info="G1/S-specific cyclin-D2, putative n=1 Tax=Pediculus humanus corporis RepID=E0VXQ3_PEDHC"
tttctatatttgttatttcagtcagtctctgtaagaggtcttctagactacggccacttttgtagatccatcctacaccacacaatgcagatgctatgcttgcacatgcaataatacttgggtggtaccttgaaaaagtgaattctctggcacaaagggtaatgagggttttggcatgtttctggaccatctcgtaactgatgttccatttttcgtctaagggaggcagcctgttgaaaggtgttaaggaaatcgtggggtgttacggcggatatatcccattttagttgactcaagactagaagttcccatcgccacaattgctgctttgtaacactatggtctgtataatacactaaagtctctccagctaaaggagtggattccctgaatttcgatgctaataacaaacacgtcgttcctaataactgtagctggcttttcattattgaacaacacattaaaaatctgtccatatagttcattgctaacgaaaaaacttcatcctga

SEQ ID NO: 13237 - DNA, 514 bp, Diabrotica virgifera
  SmartBlast Evalue=1E-18; Info=Nudix hydrolase 3 n=1 Tax=Culex quinquefasciatus RepID=B0X8L2_CULQU
tcttcatgtgtttctctaagagctgttgcctctaaacttttgtcaccttcatcttgcttaccaccaggaaagctcacttgtcctctatgatttttcaaatgtgccgctcttaaagtatatagtagcgccaccttcccgtcaacttcacaaagtgggattaagacagctgctctggcttcaggctccttcttattaaatcgaatacatttcatacttgcgaattttgatgcagttcttttcacattttcttccgtatataaataatcagaagaaaaataattgcttagttggttactacaaaaaaatctctgccccacacgaaacattttgtaaatattttatacacatctgtcaaaacgctgacatttcagtgaatatttttgtaaataactaggtgcagagttgaagcatattaaaataaatacctacgttagtactggcagcgtttaacagtaaccacatgattgttttctaattaaatattgcattggtaatacattttttaccctctgaa

SEQ ID NO: 13238 - DNA, 512 bp, Diabrotica virgifera
taataataataatgtgtcaacacctagccaatatttatttgcgtttcggcgcatgcgcatcttcaagggcacctgtctggtcacgcagacagacaacaatatatgcgattgaaacatgatggcggccacaagtgagtctacaattaaagcatgtcaattactgcttcaacactttcccagagcatatgacaaacaaaatgttctcttcaccatataagtttgcgatgtttatttctaggtaaatgacaacctccatttctttgaggaagtgaaaaaacccgcctcatgttatggcatgggctggaattatttcaacttatctgtttgggccatatttttttgaaggctccataacttatcagttatttatctgcagataatcaaagaaaggttattattgcaatcgacagctcagggcactgctgacactatttcttttcaacaagatgacgcctcatcccatttcactctcgttgttcacaaacgcctgaatgaaatcttcccgaaccgat

SEQ ID NO: 13239 - DNA, 514 bp, Diabrotica virgifera
attacgtcagatgcccttcattgctacgcataattgaacattcagtgacattaatgacaattaatgttttacaacttatcaaagagaacaccaggaacaggtttagcaaatattcaggcgaagatatcaataaaatattagttacaatggtttaaaaaccagttttattcatgaaataatcaaattactctcgagctcgaattatcgatttgttttgccctcgtgacactttgacataatttcactccccttcgggtcgtgaaattaaaactgtcgaaatgtcactcgggatacaaatcgataattttagagatcttcttgtaataagtactgataattttagctacatctccgataattgacattttattctagagtgaccgacccattctgcagcgagttgattaacaaatgtgtacagcttataactatatattttatatacgtaaaatagggctatacaagaataaggaatctgtggaattacttgatgatgattagatatttttgtttt

SEQ ID NO: 13240 - DNA, 514 bp, Diabrotica virgifera
aagaattcgcatctaatcttctaaaaccttcattatcttcgtaatcactatcagattccaccgattcgtcaatgctggattcagtagcgtttgtattcggctcgtaatcactggtatcagagtgactatcatccatatcgtagtgatcgtctttctggtacatctcatcatatttttgtttcttaggtaaaccttcaaaatgttcttgttttctatgtgcaactggtgactttttgttaaaatttctttctatttcgtctggcgattcaaagtccatcaactttgaagatttttttctgactcttccactccttgatattcctgttacttcaagatcttcattttttggctttttcgaggaaaaggtatccattactgcaaagcttcactaaaacgggttaattcaatattacttttaaaaactgaaaatattaaatcgcacaaagggttcactaaataagatattaatttatgttttttgaataaaataatgcataaacgcggttatatattt

SEQ ID NO: 13241 - DNA, 512 bp, Diabrotica virgifera
  SmartBlast Evalue=3E-22; Info=Thioredoxin domain-containing protein 11 n=1 Tax=Harpegnathos saltator RepID=E2BZQ2_9HYME
aaccctatcaaacatttaggaaatgagggcataagagattttcaggatgcttatattagggcagaaatgaatgtgtcaccaggaagccttgatttcgctgtgtattacacaacagctcttagatatttagagaaagatccacaatatagagttaccttttatataactccttctaatgttacaacaccatcattgtctctatacatgtggaacgaaactttaatgtttccttctcacgaattaccatggacatctgaagagattttgaaatggttgtttaaaaacgtccatcaaatcacgtcatgggccttgcctagtggatctaaaagtactaccttatcgaatagtatgcaaaacggatctgttcttattctgtttactccaagaaatccgctgcataacaacattgattattataatatgctgcaagaaataggccaagaatattttacatgtgaagaaaaatattgtagcaaatatacttgctgttcatcttaagttgagacgaacag

SEQ ID NO: 13242 - DNA, 514 bp, Diabrotica virgifera
aattaaatattccatttttattagaattaaagatgacaatatttgcttatataaataatattatttaaaaattacagactactttgagtgaaaccaagaatgatattatcaaggtgaaaataggaatgttaacatgatttccagagttgcacaatgtcgcgttacacaaactgcaactaacgagtgttctgttttcccttgttgctattgctttttggtcctcgcaatatgttgaagcagcgcatcgtctttcatatcttgttacatcgttaactttccagacagttttaccgcaggaaaaaccagttgtgcagttttcatgaagaactgatgtaaagtttttttcacaacctatcccagcattagcttcacattggtagcattcaagagcgtaacctacgggtaaattttgagcaacaacaaacaaaacaaaaatcgacaaagaaacacaaaaactggtggatttcattatggaaatttgttgtaatcgtctgaagtaccgatttactctaat

SEQ ID NO: 13243 - DNA, 513 bp, Diabrotica virgifera
agaatagcagtggaatcttaactatctacttgatcaatctataatctagatcgatcacctgtgattattcaagatattttcctcagtacgtgctgttttagtcgtctttaacgttgaccatcttcaatttatgttggaacatttaaactctgctgaccactttcttttattactgctaatgaaactatagaccaactttgagagaactttcgggcgccctgcagttcatcaacacgaatctaccttatcggtagagtcgacgagaagtgcacggtaaattgaaggtgtaattacaaaaaaaaaaattatgtatgtctttgtactcactttataatgctcaaagaattacgggatctgaattttaatgtacatttctttataattctcgtatcaaagttactcgtgaagttaggcgtattgatgacagttgaccaactgcaggcgacccagaactttcgtgagctataaggttgtaattccctttgtattgccgccatctatgggctatgccgg

SEQ ID NO: 13244 - DNA, 508 bp, Diabrotica virgifera
tgaaatcatggggaatcattgcagtctgagaattcctgtaatgggttttttgttttcgataaggtctgaattggcagagttgtatttctgtaatggatttgttcatatgggtacactcttagtttctggggttataaaaattaattttggttcaacaaggcattgaaaataatgtggttttaagtgttatgcactttagagttaagcttatggtatataagtgtataaggtgcactttttatatgtgcatctttacttttctactgaagtaaattttaagttatccattggttatatgttatacagaatgtatacacaagttttaaagtgtgggttgagttaccaaatttataaaaaaaatctttttggggggattaaaaaatatggttaaaaagtctatgaagctatatatagtgaacatctggaaataattttcatcgagggaggatataacttactttcataactttaaaactattatgctattttaaaacttgtggaggaacgc

SEQ ID NO: 13245 - DNA, 508 bp, Diabrotica virgifera
tgaataggagtgatgcctggcgaccttggaggccacgattcgtttccacctctagtgatccatccaggaaaatccataaataacattaaaaaagttaataaccaattttacatatttttcgaataatacaaatttcacaaccacgcattgtcaaaaaattctacagggttgtaacatcaacagacaatcatttgttataaaattattataattaatactttgtagttttttggcaatgtagtacttatttttcataaatatatttgttataaaacatgttatgtgaaacatttgttatatttaatcgtgcatatctggtaagtgtcttgagattataaatatttattcgcatgttgatggttccgtttctccatcatgctttaatgaagaagtattatcatacttcgattctgttttatttcaaaatcgattgtttagtgtcaaaaaattgaaatcaatgtttgtcgccaatgggattcaataatttaattgccgtttactatacatt

SEQ ID NO: 13246 - DNA, 500 bp, Diabrotica virgifera
gcctgctatttttcacaatcatgaacttgtccggatgacaagtttgtcatgttccacaattgaaacttccagtgttcccatacatcagagtttgtccgactcagcaccgttagtctatggacaggaattttcagcctgatattgataatcttttgtttggtacgcgggatccaggactatatttgtaacctataaggtacaatttatataaccattgctctattactagtcttaggcgtaaatatatctagctattgaaactttaaagtattccaacttgtccaaacctatatttttataaatatatatttttatatttattcttcatagtattatagattataaccagttatttgtagtttctatccgcgatgtaaacgaactgtagagggtgctttaacagatgcctagctaatcaagaatgtagaaaaacaaaccaatctgccacaaccgtagcacggaaaacatattttaagtgttaacaatttatgagtgtagcc

SEQ ID NO: 13247 - DNA, 510 bp, Diabrotica virgifera
gtgaagaatactaagtttcaaaccactctgtatgctcgccaatggaatattaccttccatctggtctactagcttttggagaacttctgataatttttttcagactcatattggtgaaattctctttcagctcatcttggaaatggtcaaagttaatccccggatcaaaactggacaagttcctcaatatatttaagttggtgttgttcaaaattgtaaaatgaggatccacgattctatccaattgatgcttgataccgtccaacactgactcgacgtcgaactgttttctgatgtcatccacgttgaactttttcgccagattgaacactttgtagatgctgtcgttcctatagcagagattgaggacagtgctgagtttaacatcaatgtccactttgtttagttttatgctttttactatgtaatcgtcgactacgtttaagacggtagatctttcagggtggcgtagcgggtagcagatgcctctgtcacttgccattcccagag

SEQ ID NO: 13248 - DNA, 503 bp, Diabrotica virgifera
agaaaagaaagttaatatttaaaattagcaattaaaaaaataataaatgaagcgtgtcgctataaatctaccaaaatgtgtaagaccacgtgcatttactaaacagaagtcagagatattggcgacaagagcaaaaaaacagcttggaatggaaactagaagattggcttgtcaatacagatcttttaagagtacctatcttctttgggctttattgtctaggaaagtttggaaaggaggctgagaagcccaagatgaagaacaattaagacggcgaatatacaacatctaagagaaattgatctgaattctgcccaaaacctcatgaaagacattcgtagaaatttgcgtctagcagagaagaataggccactccacataatttgatagtatagtttagttaaggggctatcccagtgtaaaagcacgaaactcatacaatcccttgggaatttttacaataaaaatactataccaattgcttcgaaaacccgcatgagcat

SEQ ID NO: 13249 - DNA, 514 bp, Diabrotica virgifera
  SmartBlast Evalue=1E-25; Info="CG7224, isoform A n=5 Tax= melanogaster subgroup RepID=Q9VLU6_DROME"
ccttgtaatatttgtaatttctttttttcttcataattaaaaatttacatttttaaagatgagtattttaatgtatatgcttcgtacaatgcgaaattctgcattttcacctttacattcaacatggaaagattctgtcatgaacctctcatccggcaaagatccagtttcgaagaacccgatttctccaagagtggaagaatttagaaagaaattgcaacagaaaacacctattggaaagttggatgaacaaatggggaaacatccatatgaagaagagcagcccttgcctccttggccaaataatactaatccacatacaggggaagtagggggccccagaggtcctgagcctacgcggtatggagattgggagagaaaaggaagagtatccgatttttaagatcttttggttggttattgactgatggttattatgtagcttgtttttcttttgtaaagatgttatatattttgattatagtttttatataaatgtagacttgttaatgaa

SEQ ID NO: 13250 - DNA, 514 bp, Diabrotica virgifera
agatataataatttctatacgaaatatagagattttgtccagtttgtaagaaattaaaatgtccaaaataatgataaataagttaactaccttaaacatgattatcatttttagtattatttactattcttctatttgagagaatatacaacactctagccgcaatagcgtaaaactgatagatctgcaatgacagttttaggacaacttatgcctggctccaccaacaaatcttaagctccagcttagtccagcttagcttatacatccatcattttatacttttatctctatgagacgaagtttaagatgcaatccacttgacactccattgtagcaagctgaaaattgatctaagactcaatggtgcaacacgtatgtttagtaagctgagcttaaagcacgtcttaagcttaagatctgttggtgcatccaggcattaatcatacaattaattaaagtcacgatatataaaataaatagttatttttaaagataaatttcctgtatataa

SEQ ID NO: 13251 - DNA, 505 bp, Diabrotica virgifera
  SmartBlast Evalue=1E-28; Info=Canalicular multispecific organic anion transporter 1 n=1 Tax=Culex quinquefasciatus RepID=B0XBQ1_ CULQU
cttgtataggagcgatatataagtgatgtaggtgaatgggagctgtgtcaaatctgcctacatcattagaaagtaaatttaccatttgtccaatggtagtttcggctaaagcagatttgctgagtcttagagctttcctatatattagagaacacgatgctattctcatcttcataccaatttgaaacagtcctaagcaaaatctatgtacaaggaccacactgataaatgaagtcgcaactattaagcctgagtacaggtaaacttcgttaacattttctttgggatctttttcataaacgattagtaactttgatattataaacggttgagccattcttactgcttcacataatataacaagaatgtcctgaccgaatatttcccaaaaaaacgttcccattaacactttccaaaatgcaggattcttattttagctacgtgtttgatccacctttcctccagcctttgtcctagcttgctagatcgtgctcacttcgatgtc

SEQ ID NO: 13252 - DNA, 510 bp, Diabrotica virgifera
  SmartBlast Evalue=5E-28; Info=Pol polyprotein (Fragment) n=1 Tax=Drosophila buzzatii RepID=A1BPH1_DROBU
gaaaagtatgaagaatttcatccctgtttgctgttgggacgacaattttccaatcagacatattagacaaagcttctactgaactaacaacatgcttataaaggatattattttccactttaaaatcaggatactgatcaggttcttgggtaaccttttccaccattttctgataccatgcatccggaactaaagtggataagtcaagaagattgacatcaaacgttcgagacaaagcatcagctactacaacaccatttgccttacgatggacgatattataatcaaaggctgacaacttacaaatccatcgagacaaacgttgggatgggttacgcatagaatgcatccagagtaacgagctatgatcagtaataagggtacacttacgaccttctaaatagtagcggaaagcctccaagccatgaataatagcaaggagttcacgctctgtagtggaataatttttctgggccttattgagcttcttactagtatatgctatggggt

SEQ ID NO: 13253 - DNA, 513 bp, Diabrotica virgifera
  misc_feature (484)..(484): n is a, c, g, or t
  SmartBlast Evalue=4E-69; Info=Dynamin-1-like protein n=1 Tax= Camponotus floridanus RepID=E2AFY4_9HYME
gttcggttattgaaagtttggtaggaaagtcctttcttccccgaggcactggtatcgttaccagaagacctttggtgcttcagttagtctattgtcccaaagaagatagagaacatagaagtgctattgatggaaccgtggaactggatgactggggagtattccttcatgccaaagacaagattttttagagattttgataaaattagacttgaaattgaggatgaaaccagtcgtatggctggcaataacaaaggaatctgcccagaaccaattaatctaaaaatatactcaacaaaagttgtgaatttgacattagtggatctaccaggaattacaaaggtgcctgtaggggatcaaccgccagatatagagcaacaaataagggagttggtgttgaaatatattgcaaatcctaattctattattttagctgtagttaccgcaaatactgatatggccacatctgaaagtttagctatanccaaagatgtagatatgatggcagaagga

SEQ ID NO: 13254 - DNA, 506 bp, Diabrotica virgifera
tagtacaattaataaactgaattggttgagaatcatcattaactttagtagtttttaatacaaatatttacataaggtattaaggtagatgctgttgctgtagctagttctacaatttctggtggtgtacaattaaaagattcttcattttcgtccatctcaacacaaactgtcaaatatactattcgtttgacagtgacactttttgaggttgattattttgtttccgtggtgaattttgtgattgttgtgccagagggattaatagctattaatcccgcattattaatccctaagggattattatatggcattatattgcaaacaccacaagtataatacatatattatgtatcagtcgtagataaaattcttaattgtatgtcaaaaaatgtacaataactacgtcacaaaatccaccaaatttcattggcacatctcaaccggcttcaaaggaataaaacgaatagtcagtttgtaagaacaacttcaacatcccgtatctc

SEQ ID NO: 13255 - DNA, 507 bp, Diabrotica virgifera
acagcattgcagaagctccaaacaatgtagtttttgtctattttcacctcaagtatatcaatatagttaatttctgtggccttatcaactaggcagtaagtgatagtgtaaaacagtaaaacaatatcagctgtatcaactgtaagtacaaagataatcatatgtacatcttgttcaattacctctcgtcaagttcgcggtgttgccagtacgggaaacggttcgctgttctatcaaaaactctatgcgtgataaactgtcttacaaatctcataatttaaatttatgctatcaatctgctatctctcatttattttgcgactaatttaacttttcaatatatctattttttgttagtttatgaacattgtgtttttattacctatcatcctctccttatccctagcaaagattactccttgcaggatgctgaattcagctggtccttcgagaaataaaagaagaagttcccaaaatatgtgtgcgagaatcgaccatagaaccagc

SEQ ID NO: 13256 - DNA, 511 bp, Diabrotica virgifera
tatcatctcccgactacgggtcaaaaagatgacgacggttttaaaaatagatcttcctccatagaatccaccagctccacccatacagatgatatggccagaatgatgaaatccagtgataacctttacgagcgacgaaagtcatccccttacgtattggacaatagtggagtaatcactgccagtctaacaatacctgttcacacacaaaaccagtccttatcctacaatgttgacgacgacattccttttatagaagacggagagaacggtcgacaacaaatgacgataggtcttataaggacgccatctgtgcctcctagaagacgaaaccactccttagatagtgattcatcagtgacttctagcgttcaaccaataacaggatccatatcagtagtaccgggatacgactctgctattggatcgaccacaacgtactccagtcccattcaaaacactcccacatcagtttcaagcagcattgccgatgctggagtatacagttcag

SEQ ID NO: 13257 - DNA, 510 bp, Diabrotica virgifera
gcagctgtggtttggaggtaaaggtaaaggtaaacaaaggtataatatattagttttattaagtgcgttcgcgggtgcctgtcggcgactagtcggtgacaaattagcagcaaaacgcatgcgcactttaaaatgatataaataatatcgttaatatacaaatatacaaggtatttacctagtataatttaataattagttattaatattaactaaaagtaaatataccttgtatattcatctattaacggtattatttatattaagtgaggttagaaattgtcggcgacaaattgtcaactgtacccgcgaacgcacctattgttgtgaggacagaaacaaaaaagtttataatattgtagtgacttttaaatagtttttaaaagcaacaggtacgtaataattgttaatgtatcatgggtataaacctacctatttgatctgccaaaatacatagtatgtaatacttttatttatataatttgattaccatcaaaatttctatcaata

SEQ ID NO: 13258 - DNA, 511 bp, Diabrotica virgifera
ggggaagtagacgttgacgtttctaatgtgtgatggtaaattatttttaaattattggaattgataaaaaattacaaaatgttgaagaattcaatttcttcgttgatttgtataatttggtttgtggccacagtaaatgcttttccaaatgagggcaaatggaacgagaatttaacatcggtggctagtagtttatatctatcaaaaagtttatataaaggggcggaaataatagtaggaattaattgtgattcaaaagttcatgattccaaaattgacataaccctagctattatacagtcagcctgttgggatataagagatgctctctcagaaattagacaggaaatatcttctcccaatcctgaatttaagaattcttcgaaaatatatcataccagtgcaaaatacgactgcaatgacaacatttccttagagaaaatccagctacgccatcagtacaagaaaagcacagtgtcaaacaaccaattcatacagtaactcatgatgg

SEQ ID NO: 13259 - DNA, 513 bp, Diabrotica virgifera
agccaacctagggaacttcccttttagtagaaaatattaatctcctgtttaaacagttttttgtgtacataaacgtaaaaagaaataagacaaaaaaacttaagtccctacaaaagcaaaaaacatgttaatatgtgttccagtgcacattctattgctttattgtttagtcgcttaagaccaattttctaaaacatatcccacacaaaatagctaaaacgttgaatgaaagaaggcaaaaatcattagtcgaaaacattgttttctgaggtagggatagagggagaggaagagatatacctatgtatattttttattcccagagacttattcactgtcttcttataggcctttttttaatcctttacaaaaccaaaccagatcaaaaatactatttcaatatcgtaaaatccgtttcaagtacaatttttctcacaactcacatgccgcacaatgacattatcctcttcattctagtcatattaattttagtatttattaatttatttattt

SEQ ID NO: 13260 - DNA, 513 bp, Diabrotica virgifera
tctgggtcaggtgttttttgtttaattttaacaataaatgctgtaccatttttcccttgcttgttttttcccgagtagaatactatataatctttctttttaatatttccttcttccttccatcttacttcttgtagtgctagtacagtggaaccccgataagtcggcttccgataacccggaagtccggctaacccggaccgattttcatcagacaaacatttcaacaataaaaatgtatgtattatgttaaaacattttagctgtagccgcttctggaatgtcttaaaaatatcgaatttcattgataaaatatctcaccgatcttcgcttcaaccataatataatatttgagagataatgggtatttgtgtaatttgaactgttcgatagtaaaaatgactcatggcacgcggcggcagagcgacgtgtatattatctcaggctatcaaaaacaacagtcacctgttattcctttatttatttccaactgtcttagcattgtttaaagac

SEQ ID NO: 13261 - DNA, 506 bp, Diabrotica virgifera
atccagaagaaatagaaggaaaagtcctagagttcgaaaatatcatccaagaggcaattagaaacagcacaacagaggaagatgtcgagatattcatgggaaggttcaaagacataccacaagaaacacaagagttgataagggaaaaaaatagagcaaagaaaacagcaagaagaacaagaaacagagtagataaatcctgggcaaatattttaaatagggaggtccaaacggccctaaaactccaccgtagcgaaaaatgggacaacttcgtacaagagatggaagaacaagactcaaacatgagaaatgtctggaagctccagaaaatgctgagaagcgacaggaaacccatccccccatacatggaagatacggcatggtatacaccatagaagacaaagcagaggcgatgaggactacactcgaagatgaatgcagactgaacttccaccaagacgaagacgacgacttcctggaagaagtcgaagaacaagaagaaggac

SEQ ID NO: 13262 - DNA, 510 bp, Diabrotica virgifera
gagacatcgcatatcaattcaatgcgataacattgaacagcgacacaaagtcacccgtccatcgttactaccgctcactgcggtaacggttccggtggaacgccacgtcaatactgcggcacctacctaggcattgagctattcctaattcaacacgtcaggaacaactgatcctatgattctcctcctcgtcttagatacgctctccgtgccacttctccttgtgtttcgtctagtggggtatccgccagcacggatactccttcgatcatctacagtcgaccggccccgatcaccagctgtggcatcatattacaaatcaatgattctaaagtgatgcaaggccggaatatgattttgaatcacggagtaatctagaaaaaagaaggaagcacctgttaaacgttcgcactacgctcaagcgcgatggcactaagccggtgcaaaacgagtcgaaggtaggctgcataatataacccaaaagcaaaaactaccgttacgcggtatttt

SEQ ID NO: 13263 - DNA, 507 bp, Diabrotica virgifera
tttttaatttccctgtacattcctcacgtgtggtggtagttttagaatatcgagatagatcttatttctactgctgtggaatcagaaaagtcactaaaaaataccgcttgcttctttgataactttgaaattgtatttatttatcgaaaaattttgtctaatttgttgtcttggatttttggtaaccaccatttacgtgcatcttttcttgattgaccttaaggccaacttccctgacacctctttcaaaaagggtaacttcttttgcatctctggtgctttgtacaattgtgtcgacatcgtcagcaaaacctaacagtactttcgttccctgggcagcgaagccatttgataattctggttgtgctttcttagtgtgttctaaagcgaagttgaataacaaaggggaactggatcacattgtcttagacccgcttcgatttgaaactcatctgatgtactgctttcaattctgatacgtgtacatgaattctgcacacacatctg

SEQ ID NO: 13264 - DNA, 513 bp, Diabrotica virgifera
tttctactagtagtagaaatttgttttcttgcttttggacttgatccatggtccgtttttgaaccatttggtaactcggatataggtaacctcctttgagctgggggtacgtaaagttgtctttctggtcgcttttttttcgaattatttccagttccagcttcttcattatttggcattatttgttcctcaatttcttcttttttgattaaaaattttgtgtcacatactgctacaaaacaatttttcccacttcccaaggtaaacactacaaggtcaaaaagttctgcctgatactgaactgctttcaaataattccgacccaacagaggaaacacaacaacacaacatcggtttcggttcctcaggattacttgaaaatcctccaagacacagcaaacgaaatctctatcacaaaatatcttatggaacttggaagataatgtatttattactttttcaacatctgcgtttatattcatagcatgatctatcgatccataacttcactta

SEQ ID NO: 13265 - DNA, 509 bp, Diabrotica virgifera
  SmartBlast Evalue=1E-16; Info=SET and MYND domain-containing protein 4 n=1 Tax=Harpegnathos saltator RepID=E2BLP0_9HYME
aagaaaaaggccgccacgtagttgcagcgaaaaacatcacaaaaggagaagttttgttcatagaaaaagcttttatatttgctccagttttcaaagaaagcaaagaattttattctttcaagtgctatagctgtttgaaagatatcatcagcagtgttccgtgtactggttgtacgctatgcgtatactgtaacgaaaaatgcagaacgacctcctggaacgagggtcataaatgggaatgcgaaggaatgcaagccaacatttggtacgatttgggcatagctttcccagcgttcaaagccgtgctgaaaggagtgaagtccggttttcagactataaaaggcgactgtaaagaagacttgaagaaattcggtgataaaaatgataattatgcttattttaatagattggtttcgaatatttataagagtaaaaacgctgcgccgtacattttgatggcagccatcgtagtaacttatttaaaaaaatacacagactttttcaaatgg

SEQ ID NO: 13266 - DNA, 508 bp, Diabrotica virgifera
aaaatagactgaaattataaagaatcctcaaaaaaattaccagttcattttagttgactcaaccaaattgtaacctaaccttgttcatactaatgtttttaaaaaacaaatttggttacttaaaacaaaaaatatttgacgaaattgggatattttcaaagtgtctacagtttggcctatttcttttaaacgatgacacagaaacgtggtaagatacgtttaagttgttagttattaagttagtattattttttactatactatttgctattttgtattctctctttacttaatcccagtactcgaatagatatttactatattttctttttcttgcgtttagtgttcagtattgaaatgctttaatactgttagtaaaaatttagagttatggttggatatacgcggcgatgttattttttgtaagtttatagaaatgtttatccatgttgtataaaaaacatgcaaaaggacgacctcgcatacaagatataggcctcagtctgaa

SEQ ID NO: 13267 - DNA, 507 bp, Diabrotica virgifera
tgtactatgtagtttatcgtctctgattctgattgttatattgttaattctaaagttctatggtattcccagaaatcaacaagtaaaacacacagatttataaaagataaaacagtacttgcatttttataggtaataatataaactttttacatacttacagccgattgctggaagtcacaatctgtaatcatggcaggtattttcaatgatagagaaattgtagaaatgtgtcatgttcttgctgaacaagaacagcttaaagttactgtacaggagtcaatgaaagctggattgctagctggttttggagctctagcaggtgctttattaggaggtccaattggaatagcaataggtggaaccctaggatctgcaacagcagcagtttgtgctaaaaataaatttagatcagtagcagatattataagaaacgacttatctcccagacaacaggcaatactcatttcaaacatgtctgcagttctttccagaatcaagcctcaa

SEQ ID NO: 13268 - DNA, 511 bp, Diabrotica virgifera
ctttttcaatagtagctgttctatattgtgagtcttctaagatcgtgtttatagacctctctacatcaaacttcgattttattataatattgactaaatcattcctagaaatgttaacagactccagggttgtattaatctgagcaatacaagatgttaatttggctctatcactatctgataattcagcctcttgctcatcttcttctttaatgtccccctcggaacttctctgtgacatgtctctgttataaatgaactgtttattgctcggggattcaaaaaaatacatcatccacagaatgtccataaacatcgtcgtagccgtcgtagtcatctgaatagtccatatttctaatatctctgtgtcgcgccatgatgctgagaatatattttatatatagttaactaagttatagttttataattaaaacatattttagaatgaattctataaacactagcgaaataaattaactttttgattttacgtcatgcaaattgtcacttt

SEQ ID NO: 13269 - DNA, 505 bp, Diabrotica virgifera
cctccccttacaaatcacctttaaataaataatccttaaaggaatccccaaaaataactaattttgccatctctaataataaaccaattaggtataaaaaaagtaaacaaagttggacattttctcctctagaatatatacaccaacaatttatcattaaaatcacttaatttattaagtaaaaaacatctctgtatttacctatactttgtttcacgtgaagaatagaacgtaacgcttacggagatcagtgttgccaaacctatggcgcacaggtggatactcgactgccgatatacgattcattctagtcagtatggcgtggcatcggcgcgcttctatcgtccgtaagaaatacattggggctatctccgcaatgttctattttaacgtgaaacgctctatagttaataacttgatgtcttgagacctactgatcttaaaatttgaagaaagggaaataagcaactttaaaatataccacaatagatatatggattaaatg

SEQ ID NO: 13270 - DNA, 510 bp, Diabrotica virgifera
  SmartBlast Evalue=4E-19; Info=Cytosolic 5'-nucleotidase III- like protein n=1 Tax=Camponotus floridanus RepID=E2A4U6_9HYME
cctcctaacctgttaatagtgaagctcatcagcgacaatgattgattatataaaaaaattaaaattaaatgatagcaataaagttttaattaaagatccagatgagattaacaggaaaataggaaacttatcgaaggaggctataccaagttgcaagtgatttctgattacgataaaacgattaccaaacagcatgtcaatggaaaaacacagtttcacgcgttcgatttatttaagcaatgtccctccgtaccccaagaaataagagattttcttactgcattaacgaataaatatgcagtaatagacaaagatcccaatctttctcatgcagaaagaagtaaacacatggacgaatggtggaataaaaccatagaagcttataagggattgaaaatttcccaggaggaaattgagaaaacctgtttagagtttggaccaccattgagggataacgtgaaagaactttttgaagtgctgaaacaaggtaatgtcccggtactactttta

SEQ ID NO: 13271 - DNA, 507 bp, Diabrotica virgifera
  SmartBlast Evalue=7E-26; Info=Topoisomerase II n=2 Tax= Tribolium castaneum RepID=D6WF48_TRICA
agtccatctccaacttttttctttccacctttcggcttcttttcaagttcttcgggagtgcctaatttatctttcagtgttttcttacttttaaccattgaatcaaattcatcttcttcctcttcagcaatattttctttcttaattcctctgttcattgctttggctttggtcttcactgcctgttgaatttttttctttaagtcctcagtgataacaggctccaccctctgagccattgcactaggcgccgtgtcgaagaaggatttggctcttttcttactcgtttctttcttttgtttattctgactgagctctttcaacttttcatctctttctttcttctccaacttgtccaaattttctacaaacacatccaaatcatcgcgccataaatctgatggtgtctttttctttaggatattcagttccattattttcttgtctttttgattaagtaattcgtttttcctttcttcagtcaacatccacatagacatacctaac

SEQ ID NO: 13272 - DNA, 511 bp, Diabrotica virgifera
  SmartBlast Evalue=5E-43; Info=Kinesin-like protein KIF21B n=1 Tax=Harpegnathos saltator RepID=E2BPS6_9HYME
ttccctaagtcttctctgttctgcttctttgtgcttttgagattcctctttcattttgttcattaatcgtactttagtcctcttcatttccaatacttcgttcttgtaagactttaattgattttcatactggctttggcttctcactaacctagtgtgttccttttgagctgcctgtaatcgtttcaattctttttgcatatctgatattttcttcgtatattcatctttaaccttcttaatagtatctgaggattcagcttgtgagctgtaattatgtaaaattttgtccctttcttcctgcgtagcatgaatctttgttttgcagttgcatgagtttgtcttcataatgctgtctcatggtttgcattctacgttgggactgctccaattcatctatcagtttttgtttcatatctatgtcattcgtcaaagtaataagttcatctttgagttcattgtgcagttctttttcatcgctttcagtttcgctgtcattctcaccgctttc

SEQ ID NO: 13273 - DNA, 511 bp, Diabrotica virgifera
ctccataacgctcgagtaactgcaaatttagcatactgtccttatctactattgaccattccaggtcacgtgactttcgacaccgttgctgaggggcaaaaattgtgtttctggtgttatttttgctattttctcgttttattataaaaaatctgtggttttaactacaaaatttcaaatattggatataggacaccctcgtaggggatgcaaaaacccggtataatcagaaaatcagttttcttggcccatatcgtcgttctgtttacagtgtattgtgattatagtgatttaaaacatttcggtctttaaatgcggctggtattataaaaaaacttactttatctcttttactttactggaacactttcaaactgaacaaaacgctggtattttaatcatattcttaaattaaacaatggttttctacacttaacctagtttgtttacaatattttgcccatcagtcgctgtcaaatgacgtcaccctggaatggtctatttaaacaat

SEQ ID NO: 13274 - DNA, 508 bp, Diabrotica virgifera
  SmartBlast Evalue=5E-41; Info="Ubiquitin ligase protein MIB2, putative n=1 Tax=Pediculus humanus corporis RepID=E0VYN4_PEDHC"
gcgggtttgtagctttttactagttccttcaaattttcttcctgaagcaaactcaaagcagactgtcctttactattagccccgtctggatcgatgcctctctgtactagataacatgctatagcaagagctagacgacattcttgaaactgtccgagattcttgtaaatagaatggatcgctgggctctcttcccgtaaaacttccccggttaattggttcttctttgttaacgctatatgcaaagcgttgtcttcgtcttcatctttggcatttatgttagctttcagttcgataagtacttctataacgccgcaatgaccttggctcacagctaaaagcaaagcagactggtttcggttattttttaaatcgatatcagcttggcctactctaaccaatgtgtcgaccacatccttatgaccattcaaggcagccaaatgtaaagcggaaaatccgtcgtcttttttcacgtctaccagctgccttgcgacactcagtaacttcc

SEQ ID NO: 13275 - DNA, 512 bp, Diabrotica virgifera
  SmartBlast Evalue=0.000000005; Info=mutagen-sensitive 201 n=1 Tax=Nasonia vitripennis RepID=UPI0001A46D6E
gggtgaaaataaaaatcgataaccctgtacagaaaaaatcgaaaattgttccagaacctgtctcttcagtcgaacatataccacaagaactaacagaagatgaagatattaaaattttaaaagcaaccacttcgaattctgctagaattgtaaatgaaattaatagagacgttttgaaggtgttagaagaaaaaccaaagtccagaaaagcggtggttcctactaaaagtttacacactaaagatgtaattcatcaacgattaagggataaatctacttcgttaagaaataaaattaaagccattgaagtttacagaaaatcaaaactaggtcccggatatgttcccaagcgtaagaagacagtattaattccgaaagaagatgccgaattatctgaagaaagtgattaaaatattttttaaatttatattgatcgcatgtactttatgaaaattgtttttatttttgttatattttttactatgttgattttaataaataaataatatttt

SEQ ID NO: 13276 - DNA, 514 bp, Diabrotica virgifera
ggaggaggggaaaattggtgggtgttttaggggattatatttttaaatggtaaattaaacataatgtgcattgtaaatgtaacattgtaacctattggattaaaaaaaccaaaaaccggtttttggaaaaaccggtttttttagccggttataaccgccaggttaaaccgcaagaaaaaaaaccggtataaccgaaaaccggtattttgtcaaaaacagccatccctactcgatagtcttgtcttgggttgtaaaaactggagcaataatgactttttgtagctaagacaccccccccccgaacgcttaaacacccttgaccacgcattaatcacttgattgtgatggtacatttcactgtttcaataaagttttttgcaaatacatttatggtatgctacataaacttgagttttaaacatttacaagaaaatgtatttcaaaatactaatcttggttaattagtgttgagatactgatggtctcacaacgttttcattataaaatgtttctt

SEQ ID NO: 13277 - DNA, 504 bp, Diabrotica virgifera
gacttgattgggctcaaaaggaagaaggcttacgcctatttttacgccttttcctaaaatatccttgtatttgatcagtactcgctcatggtaatctgaaatttgacaagggcggacgtatatgccttcatcgcactgcgacaaatatgtacaccttaccaaatgcctcaatttgaatttatctaatttctttattctaaacttcggtgttctggtgatagctaaggattccctttttgacaatatgttagtgttatcagtgttgtcgatgcatagtagattgtttatttcatccccaactttaaaagtatttatcaaggtaggacataaacttagtgtttcgctaaggtgattcaccggaactacaccaacaggttttcctatctgcgttttaataaaaagattatctttagtaattctaccaacaactccgttgactttctctcctatctttaaaaaaccgaaatttttcggcggtcgcaaggacaaaatcactctctgttc

SEQ ID NO: 13278 - DNA, 509 bp, Diabrotica virgifera
atggtaatttcataattttaggttctgtgagtggaaaaataatcgaatttaagtcatttttgtgcaaatatataaaggaccgactaaattaataagggaaactccgcaggtcggctagtagttacttttattcaaattcatctagtaattgaagtaatctgtgagataatactagatacttacttcccactcaaacaaatttatcgatgatttacaagataagtgacactatggcaattttctgcaaaccttatcaaatattcacacaaaatcatattaaacttaataatatttggtaacgattgacctgggcaaggttatgttaagtagcgccctcctaaaatgctcacaagagcagagaaatcagtttaaattataatcttttataatatgagtaaaataaagtgtgcaataaatatcttcttcaaatttgaagataatatgtattcaaatttagaccagcagtaaaaactaaaatcaactttataaggaaacactcctgtcagact

SEQ ID NO: 13279 - DNA, 512 bp, Diabrotica virgifera
  SmartBlast Evalue=1E-29; Info=Small nuclear ribonucleoprotein F n=2 Tax=Caligidae RepID=C1BNJ1_9MAXI
gtgcacaacacataacctctgtattttcaaaagaaaactctgaatttatttattagtgtatagtttatttattatacataattcgtttcctatttgacaaaagttacccaacgtttggttaacgaattagaataaagaattgcattttcactgcagaaagtaacacaaagacctaccggtttttagtttaattgtatcttaacgcgaagtttagttaaactacatcaagatgtcagctgctatgccaataaatccaaaaccattccttaatggtctcacaggaaaagcagtcatagtaaaactaaaatggggccacgaatataaaggatatcttgtttcggctgatggatatatgaatttacagttggctaacactgaagaatatattgaaggaaaacctacaggtaccttaggcgaagtacttgttaggtgtaataatatttatatatcagaggtgcagaggatgatgacgaagagggagaatgagggaataatatgtagttttatttaat

SEQ ID NO: 13280 - DNA, 509 bp, Diabrotica virgifera
actctgtcctccgcgaaccgctgtgaatggccttcttcaactaaatcgatagttcttgtacggtccagctcagaaattgaagtacgattcatttttagtcgcgttttcaaaaatttcaccagaatagatttttcaaatgtttgcaccttggcaagacgaggtcaattagatgtgttgtcgaataaaataaaaaaccaaaagaggtatattttttataaaggagggcccattaaatgtgtgataaagatgcggatttggaaagcgtgagcatcgtgaatacgaggggtgatgcataacttttgaaactatgtgtattatagcgctatatctaaatataaagtatgtacttttataaaactaaaaaactttttacagaacattaaattaattctttttaattgttgataagagaaaaacactctataaatcgattttgtgtctggttttctcctcttggttgtcttccaaacgattttggttttaagggctatagcatcgaaatcggctaa

SEQ ID NO: 13281 - DNA, 510 bp, Diabrotica virgifera
  SmartBlast Evalue=3E-23; Info=Zinc finger protein ubi-d4 A n=1 Tax=Camponotus floridanus RepID=E2AVW3_9HYME
taccgcgcaccgcacagttcacatgcaaaaggtttatcaggatctccaggggtgggttcaaaattatgacttgactttttccttcctctgcctgctccttttctcttgttaggcgtacttggtgaatcggtgccgcttcgtcctcttcctacacccctacgtcctctccgtcttttactgtagcattcctcataatccaagtcagagtctggatcaggttcatcataagcatccatttccagcatatcagcctcatcataaaaccattcctttgaaacctcatcctttaacaactgactatctttactatcagtatcttggagtgctggattttcaatttgggaaatgctatgcatatcggtatctggtccatctaataaatggtcagccgctctggcaaatgctcgtgcattcattgataaatactgtcgtcttttttcctccatctttgtctaggataagaatatatctgccctggatgtaatccaggtattctttgcctcttattca

SEQ ID NO: 13282 - DNA, 499 bp, Diabrotica virgifera
  SmartBlast Evalue=1E-39; Info=Chemosensory protein 18 n=1 Tax= Tribolium castaneum RepID=Q0MRK3_TRICA
ctagtgtaaagtactaaaataaaaaatgaaactgtcaatcgcaatttgcctaatcttcgtattcgtcgctgtttctgcgagacccgacgataagtacactacgaaatatgataacgttaatttggatgatattattaaaagtgagaggctgttgaagaactacatcgattgcttgttagggactaagaaatgtactgctgacggagaagaattaaaaaaggtcttgcctgatgctttaaaaaccgaatgcgcaaaatgcagtgacgctcaaaagaatggtgctaaaaaaattattactcatttaatcaaaaaccagagacaatggtgggatgaacttgaagccaaatttgaccccgaccacgtatactcaaaagctcatgaaaaagaactgaaagaacttggaatataagccaatgtttatttgagtattgttttgttgattgtttgatgaattgctaaattgtagatttttgtttaaataaacagcatggtattacat

SEQ ID NO: 13283 - DNA, 510 bp, Diabrotica virgifera
ctagccgttattcttttagaaaatatttcaaaacgtgattaaaagtaattaaaagtgatcatcaattaattacacttgttcttaaatggagcccatgacgttaggaagcgccccttcaagtcctgcatctcctgctgctaaccgcaatttttttacctggttttttaataggaggtgataatcaaattccatcaggtaacccaagtatttcacctggaaggaataaaacccctgggacaggcggcaaaacaccagcaaacgaaccaaatggcttccgtcaaaagttgttcaatcaccagcttaatgaaagtgcaggatacacaccagcacctgaaaaagggggacctcccaagttaggactctttgatagtttagaacaaaagaaaaaaggcagtcctatcctaagtagtacagtaggcccagcagttaatgactccattacttttaacgatagtatatctgggatacacgaagaccacagttttagaatgaccagctacaatgagtccc

SEQ ID NO: 13284 - DNA, 506 bp, Diabrotica virgifera
cagcgcatcatgagaaatataaacacccgccaaaaaagaaagtctccacgatctccacaacaggcacttaaaaaaataaaaacggataaagtagagccatcaaaagtagactcggatgctgaagactacaatattgaggatgattcaaatacaagttcagagagtattccaaaaccaactagtgtgaaggtaaatcacgatgtttcagacactgaccctgatgatgattctgaaagtaatcatagtgaaactgaagacaatggtaacaaaatggaagaagactctagtacgcaggaggcaaacattgcagatagtgacaaagaagaaaatttgatagacaataacactaaaaatgttacaggcaccgataatgatgatagtgaagacactaaggacaaaacatattcaagtaaagaaaaagaatggaacagtataataaaagacaaatttctggtagacatgcctccagatttctttcaattctgggatttttgtgagaaacaagc

SEQ ID NO: 13285 - DNA, 510 bp, Diabrotica virgifera
  SmartBlast Evalue=4E-43; Info=Translation initiation factor 2B beta subunit n=1 Tax=Aedes aegypti RepID=Q1HQF9_AEDAE
aaagaaaaagggagaaggacaatccttgcatcagcttgtgacatctcatcctagtgatatattggactattctgaagctcacagcagtttgaggtcaaatttattggatcatttaggagagtataaagttgaaatagattcaagttccgagaatatagcagcacaagcatcagagcatattcacatggatgagatgattatgacagtggggaatctaatacggtagaaaagtttttaaaatctgccgcaaaagaacgacattttaaagtggttgttgttgaagcggcgccattttatgatggccacataatggcaacccgtttggcaaaaagcaacattcaaactaccgtcataccagattctgcagtttttgccatgatgtccagagttaacaaagtaattataggaacgcacacagttttagcaaacggaggactacgagcagctagtggaatacatgcagtagccttggcggccaaacaattttctgtgcctgttatggtgctctcc

SEQ ID NO: 13286 - DNA, 511 bp, Diabrotica virgifera
  SmartBlast Evalue=9E-29; Info=Transmembrane protein 43-like protein n=1 Tax=Camponotus floridanus RepID=E2B201_9HYME
gtccctccactctgttatatagtaataatcatttgtcattgtacccatggtttccatattattatcatcatctggtcttggtgttctttcttctacccactggtacatttgcacccttcttttcaatttaactgcttggatggctataccatagtcaacctcagtcaaaggctcttcaatttgaagactgccggttacatgaactactttaccattatgttcctctgaaggtttttcatataaattcagaattattgcgttattgtatgtttcatccaaggagtgagcatgatgaactgccctaccctcattccaagtgagtagccaaattccaaaacataacaaaaatattcctataagagaagttacccaacttctctcaaactcttctgataaagtattcatattttatgttcatgttctatattaattatctgtttaagataaattttacatcttttgccttattttcattgttatatttttagttcttacatcaattcattttatt

SEQ ID NO: 13287 - DNA, 507 bp, Diabrotica virgifera
tgatggtatatctaatcttgtaacggtagaagtatatgatccaaagagtgataaatggatctacgcagctgacatgatagcacatgaaggtggagtcggcttaggagtgatttccataccgtgaaatatataatttaatgaagccatatttttactatcattattcaaaacgtattttttaaattttttgttttatcgatctgtgaattaacaaaattttaaattttagttacactttcaaaagatctgcaagaatgtgtgtaatattaaataccatttctgctcgtgacagtttttgaagtgttgttaaagggtcccctgataaaggttttatatagttataacaaaatacctaacacaatactagtttccgatgttttggaaacttcttcttgaacatgattttaactttaacttttttaattaaaaataatctattaatacctgaaaataacctagaaacaaataatgagataattattagagtacctattacttggaaagggc

SEQ ID NO: 13288 - DNA, 510 bp, Diabrotica virgifera
  SmartBlast Evalue=5E-59; Info=U3 small nucleolar ribonucleoprotein protein IMP4 n=1 Tax=Camponotus floridanus RepID=E1ZVS7_9HYME
cccatgtggttgattgtattcttaaattaagaaaagttcaacaatataataatgattcgaaggcaggcccgtttaagaagagaatatttatatagaaaaacgattgaagatagacaaaagtcgattcaggataaaaaagacaggatacaaaagagtcttgatcaacacaccaccattcacggtgatctacaaaagaaagcccttcactacgccaagaaaatagaatgggaagattcaggaccacaagctgcagctcttcttgggggtgaaagtggtggagctgtagccaattcacaggacgacgaatatagatatgcaggtgtggaagacccaaaaattgtaattactacttcaagagatcccagttcaagattgaaaatgtttgcaaaagaacttcgactaatatttcctaatgcccaaagaatgaatcgtggtaattacgaaatgaaacagttgattcaggcgtgtagagctaatgacgttacagactttattgtagtccatgaacat

SEQ ID NO: 13289 - DNA, 511 bp, Diabrotica virgifera
tgtgcgacagggaagatgtttgtctttagggaggcatccctttccattcggcggcaatgggaaagtcacgtgatcgataagcccaacgtaattggataaaccccgccgattagaaagaaatgcctaccctaaatacaaacatttttctctgtcgcacagttttagattgcagagtgcagtctagatattatatgtttagaattaagatcttcaccaaatctcaaaaattacataagactaatataataagcaacggcattaatggtgaggtgtgtgaaatgacgtattttcgctatgaactactgagctcctcaagcctgcgaaatggtcggaagctatgaattcatttagaagcgtatctgagaaacgttgttggtgttatttactgtttagacagacttgagtcctccattttgtcatgtcttaaccaattcatctaaaataaatctacaacaccatagttggtgtttgctataactcacgctgatttcaaagttaaagaagtatgtgc

SEQ ID NO: 13290 - DNA, 510 bp, Diabrotica virgifera
gatactaagcgaaaccaagtcgttatatagaaaacaattcattaccaatatcttggataaattatcgacagtgtctggttttaatacaaggccatataagaaagagctgtgcaagttgaaagttgcgatggatattgatttgatcacaactgcaagcgagagcgggaacttccatatgactaaaaagtatttggtattctacgagaacaaagaacatcctaagttaaatgttgccaagggtgttctgtggttacaaaagtcgaaaatgatacaaaatacggttgggctattagacgagaagctaaagtatcatacggaggcagttaaaactttcagagataatctgaaacgtcctgaagatgagtcaataaaactaaccactaacaacaagcttttcgacgtgcttattgagatgtctgaattaatgtcacgtaatacaagtctgttgacattctgtaaactactttcttcagtattgagcatctctttcaatacaatcgcggatataga

SEQ ID NO: 13291 - DNA, 511 bp, Diabrotica virgifera
  SmartBlast Evalue=9E-29; Info=Transposase n=1 Tax=Agrilus planipennis RepID=D2WLV0_AGRPL
aaatgggtcgtttttttttctgaaattcggcgtaataattctaggaaagctctttagcagttttgctcctttccaggaagtcgatgtagatcaccccttgtgaatccaagaaaacggtggccatcgcgtttccggccgataggacagtcttcgccatcttcagagcatgtttgcaagttgatgtccactgtttcgactgttccttagactctggtgtgtaccagtggatccatgtttcgtcgatggttatgaaacaacgtagaaactccttcggattcgcttaaacagcttaaacactattctgaagtggtctcacggttgcacttattgtccgaagtgagcagacgcgccatcgctccgacagctttctcatgtccaaaatttcatgcaggatataacccacgcagtctgttgagatgcctacggtctcagatatcttgcgcaccttcaatcggcggtttgctaatacgagatcgtggtattttttctactattatcctctgtggtagcc

SEQ ID NO: 13292 - DNA, 508 bp, Diabrotica virgifera
ggtctacaactggaaaaaatatgtagttttcttttcgtataaataaattaatctattataacaaaacaaaagcaagtttgacatttaataatgcgttggttagatggctctactcgagttacttgggaacaagaaaaagaatgaagaaaattgctccatgggaagccgagaaaatgcatttttttggctataccgattttgaacttggagattgcattttctccaacctagtttttgattgtaattttgttatttttggcaattttcactcgtaatatcgatagtttttattgtatgtaataatatatgaagggcacaagggaaaaacccccttagtcaattttttcaagaagtgggctgatgacgctatccagtggcttcaaacgaatagtttttaacattttattagcttctatacaaaacaccgtctatctactaaaatccacgttagaaaatatgcggcactggggaaaaaccccgtcagtcaatgcatttgtatggaaggacc

SEQ ID NO: 13293 - DNA, 510 bp, Diabrotica virgifera
  SmartBlast Evalue=6E-60; Info=Protein suppressor of forked n=3 Tax=Aculeata RepID=E2AWC7_9HYME
taatcgttccagactgaatacgaatgaatatccatgccgattctatcgagggcaaaatcgtatgcttgggccattttttccttgtaggtaggaagagacgcctttgtttcttttacatagttgagatataacttccacaattcgatatttaaaatcttcatcaaacatcgttgaaaaagcttctcaactctttcaaaatttcttgccttcatctcatgttcaatgtatatcctccaatatctggaagcacttggaaaaataccaatcaaatgttcatagagggcacgaacttctgaaatatgtttaatttgggattctctaagaagaatagaccacgattctaagtcgtaagggttcctttcgacttgcttttgcgtcctatgtaatttatcattgccccaatcaatgtgtaaacgttcatctgtttccatcattttattaaatctctatctactatgtttaaatagaattatcactaatttctcagatttaaaagatatgctaacgctt

SEQ ID NO: 13294 - DNA, 501 bp, Diabrotica virgifera
ctgcgagaaccatataaccggggccatttgaccttttatttttaaaaaagtaaggagtttaaaagattaaattcaacgttgtttaattttacttggaaataactttcaaatagtttttaggtgaaccttatatcctaacaattaacggagttatttaaaaaaaacattttttggaaaaaactttaaagataaattttgaaaaaattttggagcataaattttaatgttatcaacttgttgaggactcatttgatagatatttctaagtactttgacaaatgtttaataagtccattttataaatgcatcattttcccgttatttaagcctgaaaacttagacccgggcactcgccgaaagaaatatacattcaatcacccataacttgcttttagtcaacattaaaggtttttttagtaagtggtttatttctttttgtattagcttcaattttggtaataataacttccctgtaaaaacttattagtctttaagttattt

SEQ ID NO: 13295 - DNA, 507 bp, Diabrotica virgifera
aaacaatacataatagtcttactattctatatagtataccgataagatttgtggtggttaaattcctagaaaactaataatgaaaaaaattaattacttattaggtatattttttatcagctaaggtgacatatttttaaaaagtttggatacgatattcgatattactatcggcgtcacaaagcaagaatgttatgattagaaggtgactattttcataacccggacaattaatttcagagaagtcgtttgctgggaagaatgtacaaaatattttatttttgcattgtaataatgacctctgagtacgtgtcaagtgttctttaaatggatattttgattcgctatgtatgtttatggtattgttcgtaatgagcataagtccaattttcaaaaaaaaatttcaaatgttttttttgtttcccataatagagtatctaagaatatagccgaactaatatactccctaaaacgaccctcagttctaactgcaagacgcaagtgtct

SEQ ID NO: 13296 - DNA, 510 bp, Diabrotica virgifera
cgtgatataattttgtgttattgtgttatttaatgatgaaaaattgacatgtatagagtcgccattttcttgttgctgtcaggaattgcagtattcggcaatactgataatacagtaaactgcaagcatgacaccataaagataccatatacagtctggataggcgatgaaattaattatgggtcaacaatagaagtgtatgcagaaccaaattcaacgttttaccaagtcatgttgatagcagccaaagcaaataagtattttgagttcaaagcaacaaatactacatttggacattacattactaaaatagctggagttcgtgaaaatgtaaaagaaaatatatattggtttattcacaatctaactcatgcacctgatatgaggaatccaccatcggaatgtcaactgtctccagttggtgtggatagtttgcttgtaagcaaagaccatcattatctcttttggtggaggcattggaaaaacgactcatctatttacattaattaa

SEQ ID NO: 13297 - DNA, 507 bp, Diabrotica virgifera
actgaccttacagaagaaggcattacaaatgggtgaggatgcaagtctagcgatcggagggcacctcagcctcaaggtgttctggggggtaaaccccagggataaaggtggcttgtccacccctccgtgcttttccggcgtaagacagtgactataattacctggtgggtgcagtttaccctgccgctggtgggtccctcgttgaaagcctttttcgcagttagtttggcccccttactcgcacttgttcttgtaaccgtatgtgaacactaggtagagttcggggcgagcgaactcgctcgagcccagggccagagtattcctctgaaacccagtaatccgtctacctttttggtttacacggccaagcgtcgttggtttttcacgctggttccaaactaatagcttagggctaaccgtgcgccgcttcttcagcacttggtgctctcaggcttctcgctgttcgtcggtaagagtggggtgtgcacgcagtgaccttactcttcg

SEQ ID NO: 13298 - DNA, 493 bp, Diabrotica virgifera
taatatgctagaaaaataacactagcaactttgtcacgctattagatataacatttccaacttttattttttcgatgcaccctattatgtattattttagtttaaataaaatattgtataatatagcataatagtaatttgtgattttgaatactaactcatctttattcttttgtgtaaaacaatgtttgtaaatatattctatacattgaaaattaaaattatttatttttcgttgtttctcacttctttcaaatatttgtatatgtttacgatactaaaaataccattaatcatcatttattcaaataaaaaaattgtttcaaatacctttcaattattggaaggtacgccactgactaagcgggaagtgtcacagtctatcacctcgactctttccccgcgcctataaactgttcggcttcaaatttaggcgaacagagagtagagcatgcctagtccatctttatttatacgtccattattgcagcaa

SEQ ID NO: 13299 - DNA, 509 bp, Diabrotica virgifera
  SmartBlast Evalue=2E-47; Info=DNA-directed RNA polymeraseI n=4 Tax=Culicidae RepID=B0XGQ1_CULQU
tttcgtttcatcatttgttgtaatttttgtagtaaagcacatttaaaaaaaatctgttttaaagctatggctgatgaagaatttgacgaaaatgatgtagcagatgatttcgatgacgacgtagaggatgataatatcgaagaactcgaacaacccgaggaagatggagataacatcgatatccttgctccaggacaagcaggaggtggtgtaccaaaaaacaagaggataacaactaaatatatgaccaaatatgagagagccagagtattaggtactagagccttgcaaatagccatgtgtgccccagttatggttgaactagatggtgaaactgatcctctgcaaattgccatgaaggaattaaaacagagaaagattccaattattattagaagatatttacctgaccattcctatgaagattggggaatagacgagctcattattatagatcactagattgtaatttttatgtggatattatttaatacataggtttttatatc

SEQ ID NO: 13300 - DNA, 507 bp, Diabrotica virgifera
  SmartBlast Evalue=4E-50; Info=Transportin-3 n=1 Tax=Camponotus floridanus RepID=E2ACK2_9HYME
caggagttatgtgggattccaccgaggcagctctgtttgtaatgcaagctgttgcaaaaaacgtaatacctggtgaaagtgaagtggtacctcaggtcgtagaagcaatattaaatgttccagaaaatacacatgtagccgtaaaatacacgtcggtgcttttgctaggagaactttgtgaatggatagagaggcatccgaacacgctggatccagttttgaactttttagtgtgttgtttgcctcaacctggagtaggagctgctgcggctgtggcccttcaaaacatctgtgccagttgtaacgatcatatgccaagacacgtcccaatactcttacagcttcttcaccaagctgattccttcgccatcaccaacacagcaaccttgggtcttctgcgaggagtggcttcgataataggtcgaatgccgcacgaggagttgacgacggctttacgggaattatgttctatgcagcttaatccgatatgtcaaataatagaacagg

SEQ ID NO: 13301 - DNA, 510 bp, Diabrotica virgifera
  SmartBlast Evalue=9E-64; Info=Tyrosine-protein kinase fps85d (Fragment) n=1 Tax=Aedes aegypti RepID=Q16G61_AEDAE
acggcgactatggagttgttattttttagctgcgctttgtatacatctccaaaattaccctttcctattttatctagtagaactacattgtcattattaagttcccacgtttcacgtggtacaggattacgtaaaatggcaccagatctacttgttactggtaattcgctattatactgatacaaaataagttctctaatactaggaaatgccggtccttcaaacctaaaatggccctcggcggtggtttgtactataaaatgtttatgtcctccccaacaaaccgaaagaacagtctgactttcgtcgttcctcgtcgtttctctaactaagaaatcaccgtctacccttagcagcctcactacttcttctctgggaagcacaccgtggaaccattcttcctccactagcgatttgtttgtggtaagatgaacctcttctgtagtaccattgaacgaattttgactatctatggagagatcacaagcggctggagcttcctcgcaaccc

SEQ ID NO: 13302 - DNA, 510 bp, Diabrotica virgifera
  SmartBlast Evalue=7E-11; Info=Choroideremia n=4 Tax=Danio rerio RepID=A8KBQ8_DANRE
atgttgtcaatggttgttgttatagtggataaaatttaagaaaatcatattgttactatggattacgaatttcccacagattttgatatagtaatagtgggaacaggaataatagaatctataatatcggcggctgcaagtcgtgtaggaaaacgagtgttacatgttgatgaaaaggagtattatggtgggcactgggcttctttcagcttagaagctattttggaattaaagaagtccaaagaatatccagttgctaatgtggaaaatccagacttatgtttgtttggaaaccagacatacgatcttaagaatgttgattacaaattccatgtgataccaaaagaaaacacccagttggagaaacaagaagatagtgaaaatcaagaaaacatccagttggagaaacaagaagatagtgaaaatcaagaacaagtgactgaatgtaaagataatgacgaaaatgaacaagtaatagaaaaagaaaaacctgatacagatgtttgggac

SEQ ID NO: 13303 - DNA, 500 bp, Diabrotica virgifera
agaattgttaatagatggcgctataattgaaaaaacgatttattagcgccatctatcagaaatttttaaaaaaagtgtttcgagtaaatgttgcttaattttttatgacgaatccgaatctgcgataaaaagtgggggttgctatttaagattttaaagttacccccaccccacctccagggggtggtttggagggtcatgcttggtgttattcgatagattgtcgaaaaagattaaaaatctgttttttggtttctcatttggaagtgtatgtcgtgagatattagaccgtttctataatttacctatgatatcaggataaatcgtttttcccaattatagcgccatctatccacagttcgaaaaaatgtcttgaataaaagttgcttacttttacgtaacgaataaaatctgcaagaaaatctgggggtttccatttgagattttaaagttacccccaccccacctccagggttgtagtgggggtgtcattggataga

SEQ ID NO: 13304 - DNA, 491 bp, Diabrotica virgifera
tatttatgcatataagttgtaccttttcctatgtaaggagtttaccatctcacaaacaaggagaaagaaaacttagatagatttattcgtttggtgtacttttgtatgtgaaagactgagttgaggctccaattcagcgccaatgcagctttcaacgacctaattttttggaaagaagctgggaaatacagcgtcattgatgaagatatagctaaaactatcaaaaaagccttgcagccacatttgtggtacctatgtgacgaaattgtcgggttatcacttttttccaataaagtgagcatagtgaataatatgtctgtccggcaccgccaaggatgattagaggaaatgccgatttcctaagtgatgaatgtgaattggcagattttgctaatagtagaacaatgttgttgtttactaagctaaacattatgcaaagctttaaacaagcacccaagtgaatcgcaacaggacacagagtttaaagaggc

SEQ ID NO: 13305 - DNA, 509 bp, Diabrotica virgifera
gtcttagtttgtttactgatggtgcaaggatagtggtttaataaaaatatactgataataagaaatttaactccaaaatgaacaatatgaatatatcgatgctatgcatattattttttggactgttggtatcctttgtccattgtcagatatgtcaagtaagtggaagtgacactataacagcaattgactgtaacacagtgagattggtaggaagagatctgcatctggattcaaatatccctgccactagtaaacttgtggttctaaatcttaacaattgttctggaaggatcgacgatcattcattttcgaatatcaaacatctaagatccataaatatagataactgtgtactggaaaaatttaaagtaccaaacctaccagacctaaaagatttggacatacggaactcatttcttccaaggatcaccagagcttcgctgaagaatggaaaaaatctgaaacgagtagccttgtccgaaaataaagtagatataaccagcggg

SEQ ID NO: 13306 - DNA, 508 bp, Diabrotica virgifera
  SmartBlast Evalue=7E-16; Info=Transposase n=1 Tax=Agrilus planipennis RepID=D2WLV0_AGRPL
aaaataggctttcacttcagcgattacttcctcatcggaacgatatctcttgccacggagcatctttttaagatcggaaaaaggtagtaatcgctgggagccagatctggactatacggtggatatggaagcaattcaaagtccaatccgtgcatttttgccatcgttttcatctacttgtgacacggtgcattgtcttgctgaaacaacaatttttcttcaacaaatgaggccttttgtttgcgattttgcttgtatatgataaagccttgtcggcgcggcggtttgttgcgcctttggttgctttggacggttttctccgggtgctatccagtcaggtgactacggatttgattccggtgaagtaatgaaaccatgttttatccattgtattatacagatcaaaaactccagcttatcccgcttaaatatgttcaaaccgcgccgatattcatcaagtcgttgtggtttttgctctggtgtgagaaaacacggcacccatttgcaa

SEQ ID NO: 13307 - DNA, 510 bp, Diabrotica virgifera
  SmartBlast Evalue=6E-39; Info=Transcription elongation factor SPT5 n=2 Tax=Formicidae RepID=E2A5T8_9HYME
taccgataagatctctatctctgctccctcttcctctaccggctccaccagcaggtctaccagctccaaaggcaccgaaagctgctccggctgcacctccaccacttgatggatgcattggagaacttcttctcggggacataaactccattccaatgccaatatctgcagaaggcatgttcttgttgcctccagccaactgaagatgcttagttttgcacacaaatataccaccattttgcaaaaattccactgaatagaggaatgcgaaatttctgtagagatgtttaatttctccagaaaatccagaatgtggcccatcgattactttgaccatatctcttctatgtaaattgttccggtatgaatccaaggctgcagtgtatttatggatccttcttttctgtaacgatccaggcctgcattcaacaactttgccatgcatattcaagacatggaaattttccctttccaacctaataataactccaacagtttcagcatccaggt

SEQ ID NO: 13308 - DNA, 508 bp, Diabrotica virgifera
  SmartBlast Evalue=2E-17; Info=Probable RNA-directed DNA polymerase from transposon X-element n=1 Tax=Drosophila melanogaster RepID=RTXE_DROME
tctcgatgtacggcgttgttggtgatataccaccgtatatttaaaatcatccttagcattttggattggaacctttgtataatttctatattagaatttgcggctgttccccacagttctatccataggtccaaattggcttcaacaccgctttgtataggagtaatttattttgtgttgataactgggattgttttcctattagccagtatatgtctctcatctttatggcccaattgttttcgcttggaaaatatgtgttttttccaggtcagttttctatccaggtgaatcccaaggaactttacatcatctttctgtggtatttgtttgcggttaatacatacaggtggacaggttcttctacgggttgtaaacgttacatgtatcgacttttgctcgtttggtttaattcttctatttttgtaaccatttttcgacttcagttatgttattttgtagtagttctgatgcgatgtttggatttcttgttgtagcataagatcgc

SEQ ID NO: 13309 - DNA, 509 bp, Diabrotica virgifera
ttctgaataaggaaggccgttgtgccctcctggcgacaggactagtcaatgtgttaacgattttgaatgatttaaattttttactatttattaaacactaaaaaaaatgcttacaaagtttctagtgtttaaggttgactggaaaatatttctgaaaagtgatacgttgaaaattatgtcttggatctattaaccaataaaacagatgcagcgtatttacatttgcaacgttttgttagttaaaaaatccaagaatataaataattatcaaacttttaatatgttactgtgacaatctctcttagctttttaatttttgattgtaaaattatgaacacaagaaaacagcgcataatgtacttatatcgtcagtattaactgttatccatgatgttctcatgaaaagtatttccttgtacagtttttaaatgtaattttatctctacaaaaaattttgtggaactttattttttgtatttatacaaataaaggcaaagctattatcgttg

SEQ ID NO: 13310 - DNA, 510 bp, Diabrotica virgifera
aaaacgcaacaaccataaataatcaaaccacagctttgccacagccgacatattgaataatttttgacatgtcatttgaacatccaatcagaacaaagttataatgcgcatgcgccgggatcgtaggttttaacatataaaaattcaccctcatatcgagcgtaaagaagtataacttcaaaaaacattaaattaaaaatgattacacaaattacgtgtataatcaattgacaggcgtcaaacttttgctttgtttggaaacctttttgacgtcacactatcacggtccatttataaatattgaacactttgttttttgaatggtgacatgtaatatattatgtacttaaaattatggcaaagtgtactaagtctcagctagatcctagatcgaccaaatagtttttaagttaatgaatttgtttatcccagagagcgattatttaaacaaccgtacttgcccaaacagtgactagaaagatcgcagtcgattcttttaggctgcaattt

SEQ ID NO: 13311 - DNA, 510 bp, Diabrotica virgifera
tattatacgtacatgctacggttgaaaatggtccgcttgattagcaattgaaaaacaacggggtttcgatattctattgcaaaaagttcttcgggatttcatcaaccgatgttcgtggagtgtctatgtaccttggtaacattagggttttcggtttttcacatagtttttgagggttgagaatgaccgattttgcaatttttaaattttcactcgcttgtatctcgggggctatcacatttagagaaaggtcacttaagatcttttctatttggagtgatccaaaaaatcttaaaaaattgtctaatgcaaaaaattagatttaggaaaaaaaacgtttaaaaaatttttgactgctttttgattatgacaacatgcaaatttgttaataagggaccttttcaagcaatatggtgaaaaaattgaatcagaatattttttctgacgtacatttacgcatattacatatacattcaacggttgaaaatagtgtcgcgcccgcttgattag

SEQ ID NO: 13312 - DNA, 510 bp, Diabrotica virgifera
aagtgaaagcatcacttagttgtttgtctccgtcataggattatcgcccaaatgctaaatcgtgcaccaaatttcgtacaaataacttaaaattaaaatgtaattaaaatttttctcaatacatacaaacgcggctatatacaaagtgcgaagcgaaattgcgtaaaggttattcgacgacagaaacaaacttataaccaatgagcaagaaattcttaacactcggaactcctacattatgaagcagtttcaagatcctggaccagatgatatagaatacggcagctaatactggaattaagatccagttcaatccaaaaagtcacccgatccgaataacattcctgttaaactcctcaaaatactggatgaaggcaacattcatactacagttaaactcttcaatgaagtctgtaaaactggtacaatacctagttattggctaacagattacagatttatgagtctgatgagccatactctgtaatctttctccaaattaaccatgga

SEQ ID NO: 13313 - DNA, 508 bp, Diabrotica virgifera
  SmartBlast Evalue=2E-23; Info=E3 ubiquitin-protein ligase Hakai n=1 Tax=Harpegnathos saltator RepID=E2BNW5_9HYME
gtgaaaaaccctaacctatcaaactattttattattcaaaatattgtaaaaataattttggataatttaaaagcagtacttgtgatttaacttggccgcggccatattctttattgtgcacgtgttacggtagtaatattttatgaaatcgaaaatggatgaacctcccaaaagggccgtggacgaggtcggggcggtcgtggtcgtggcagaggacgaggaaggggccgaggtcgaggcaagaaagccattaaagtaatcgaaagtgatgaagaagtcgaggccccaccagtagaagtacccgaagatatacaagcccaagaagatgctcctgaaaatattcctccacctattgatcttgaggctgatatctcacagttggaagctccgacttttacgaccatcaacagaggtccaccagaacctatgctgcgcctggactggtcacataaagtgaatttgattggagaaaaagtgctcaatccattaattcattgctgtgataaat

SEQ ID NO: 13314 - DNA, 507 bp, Diabrotica virgifera
cctccttctatagtcgaggtagtgaagcattttggctcgcaattttttcgtccaacatggatttacttgaaattttcacagaaggtaaggaatagtccaagaatagtccaagagtggttgccaccctatctcggggatgggaattttttattgcattttaaccatgtaaatcgatgtaaaaagtaattctaagaaaaaaatgtttgttaaattttcttcgtaaaactaatatttttcgagttattcgcgcttgaaagtaacagttttcgacgaaacaatcgccttttttagaaggttttttgagaatacctcgaaaaatatgcatttaataaaaaaaaactgtagatatcaaaaatgtatcttttggtaacacaaattaaattaaacttaaataatcttttttcaagtatactgttagacctttcaaaaaataataatatgaagctcctctagcatgaaaattaagcgacttatgatcaaaacagtcggtacctgctattctctatg

SEQ ID NO: 13315 - DNA, 510 bp, Diabrotica virgifera
ctacgaagatacgaagaataccatggattacttcaagaggtctatgttttgtagttgatggaagagactaatttaaaatatataatgtatgtggtgtattggcactcgttttaccaaccaactgaccagtcaaaaatatgttgactcttcttaaaatggtaaaagattcaataaacagcaacttgggtttatattgtagattcggttagaaattaaataatttttatactaaaacagtgtaatcaattttatacaatatagatttaaatgactactttgctacattggattcggtagaaattcaatatttttattgtaaaacaatgtaatcaattttatacaatataattttaagtgaatacttcgctacattggctttttaaccctttcagttccggttacgcgtacgcgcgtccaaatatgactagattagtgtcacggacgcgcaagcgcgttactattcaaacgaaattatttctgccggcacaggagctgaggttgagaatatag

SEQ ID NO: 13316 - DNA, 504 bp, Diabrotica virgifera
tttttatttattttaaaataataaaatattttttagtaaaagtaaagaaaaattttatttaatgatagttaattagtattgtgagagaatattttatttttataaaagaaaatttattttttgtaccttgtgtatcagggattattaattaataattatatatttattattttcgaatttaaaagagctaaaaaattaaaatttttattgtaaaataaatattttaaataatttttttgttaatgaaatgttattcgtttttaaatatatctaattttttaagaaataaattaaatttatttattaacaatatatttataattaaatatttttatattattaatattaaatatttttagggatgagcttaaaaataaaatttattaaaatttaatttttaaattaaaaattaggattaaaaattttcatattttaaaattaatgttattatttatttttattatattattattttattttttattaattttattaaatataatt

SEQ ID NO: 13317 - DNA, 508 bp, Diabrotica virgifera
  SmartBlast Evalue=3E-21; Info=GPI ethanolamine phosphate transferase 1 n=9 Tax=Murinae RepID=PIGN_MOUSE
ggagcaggaattgcgaaaaatcacaaaagacaagacattaatcaaattgatttagctcctatgttagcatcccttattggaatacacattcctattaattccttaggaattttaccagtaaattatattaatactagtcaagaaaataaagcacagatgatgaagtcgaatgtattagaattgttagaaatatataatcgaaaaagattaagaacaaaaaatggtgctttattttatataccttttaagcatgacgaatttataaatgaaaagttaaacaaattggaaattcttaatgctaaatcccaaactgattatctcatttctgagtgtcaaaatcttatcgaagtgttgatatcaggagtaaattattatcataactattatcagtatcctgtgttattgactgtgagcttaggattcatattgtgggtcatattcttgtgtttatctgtttttggtataaaaagaagaaaagttaccaacaaatctttggacttaattatat

SEQ ID NO: 13318 - DNA, 507 bp, Diabrotica virgifera
atcaacaactaaacaaatggatgacatgtaagattttttatagtagattataccgagaggggctaaattatggcacaaattcatcctctccgaaatggacgattttggagcaaaatcccgaaacaggtcgatttctatttttaaactacaattttttggcacatatttcacaccagtgacgtcatccattccagcgtgatgacgcaatcgacaatttttcaatgggaatagggatcgtgtggcaggtcatttgaaagggcgttcaattctccactcagtaatataaacattaatatcattatttatacagggttgtccaaaaaaatttttgaattaaattaattggcgcaaaaagaagaatgcatgcaacctatccaactcaaaatacattgtactgctgtcagaaaatagaaaaaaggcttatttcacaaattaaacatttcttttcgcttaaattaaatcacaaacagacctccctcctacctattggcagtttgtaacatttaa

SEQ ID NO: 13319 - DNA, 509 bp, Diabrotica virgifera
ttatgataaaatagaaagcactggtgaaattaactataagcttgttcaatttgaaacatatctttgtcaggttagccttggaaacaattgtaatctctcaactgacgttctgaaatgttagttatatttgtagacgtcacactgatgagttcctattatttgtatttgactgctaatttaagtatagtgacttcaaaatggcgtttgttgttaacaatccgtccaaatataatcagcatgcggtcataccaatttcaactttctgcgggcaaggtcatgttaacatgttttttcaaccatgaagaacccttgcccatgcagtttacgaaatctagagtgcatattaacgaaaacctgtataatgaaactttaaacaaggttaatcaagctatatgaccaaaacgtccagaaaagcttgtcattcttctgcacgaaaatgctgggtcttatgttgccgaagaagtgaaaaaatctacaacagaaatagagaatattagagtatcctcact

SEQ ID NO: 13320 - DNA, 509 bp, Diabrotica virgifera
cttctacattttgcatccctaaattcctgtctgatccgaactgctcagtcttgatgagagtcggttagcttcaaaacatgaaatgagcatgctaaaatcttctgatgttcattttgtacctttttctttgacaagaatgtgttttttctgaattgtctttaattaattatgcttctaatacattttaaaaaatcaattgtctacttaattcatcataaaacataaaaaaaatcatatttatactaaaattcaaccgatactaaaaacttgaaatcaaaaatcttattgtcggtatcaaaatttcaacattcaataaaaattcgaaagaaagtggtaataaaaatagactatatttttaaaaaaatcacgaaaaaatctatttacctatcattattctatctagctaggactattctttttcaatcctatctatttatctaacatctaacacctatctatctaacatctatctagctaacatctatctagataaataaacgctaaataaa

SEQ ID NO: 13321 - DNA, 498 bp, Diabrotica virgifera
ctgcgaatttggttgcatgtcattgaatagatgtttggttttattttgactgttcagcttcgtcaaattttctgagttgcagggaatgcagggaaatttcaaacgagaaaacgttaacttatttccactcttcaacatgaacatgattgaaaaataattttataatccagaattatagtatcatgctgaaaagatgcatccacaaaaaattaaggcatttgaaatgtggatttatatgatactcgggattccttgaaattatcatatattaaaagaaaagaattaagaaaactaaataaagataagagagtcttagaagcagttcaagaacgcaagcttgagtatctaggctacgtagtacaaagtgagaacaagtatgaagtgttaaaatattccaatgaaaaattcaaagtaaagggagtcctggaagaagaatatcctaactaaagatcctgaggtaatttcaaaccaatactaccgagctttttcacgcagttg

SEQ ID NO: 13322 - DNA, 500 bp, Diabrotica virgifera
atatcatatgtacatataaacttgacatagaaatgaaagtgaaaatgtatacaaacatatcgatctaataaatagatacacgcgaaataatacggggattattattaatagatggcgagttattcagttagatttgggggttgcccgccgcctagggtaatagatgatgaatgccgtcaacagttgagtactattcatattcaacaactactgtattgaacaaccaataaagtactgatgggtaaataagtgtaggtattcctgctggccaacccatatcaaggacaaacaatgccctacatcgttatatattgtacgaggtgtgaacatccataaactagggatctacctcttttatgaaatgatcccttgtttatgtaattttacacgaatatgaatgagtcttttagatacatggtacttctattcccataataatatgtatccccccccaggtaatcagttaaaggaattgtactgtattgaataagaatcaaaaa

SEQ ID NO: 13323 - DNA, 509 bp, Diabrotica virgifera
  SmartBlast Evalue=3E-55; Info="39S ribosomal protein L14, mitochondrial n=1 Tax=Culex quinquefasciatus RepID=B0WL56_CULQU"
ataatgttatcaacaagtttaatattaaaaaatacgattaaacctagaatagtttcatgtaattttcatgtaacaagccaaaataatgaaattcagaaaatgacccggctgcgagtggtagacaatagtgaaattggtaagcaagccatggctgaaggaaaacctccaaaatgtattcatgtgtataacaaaactggagtaggaagaataggagatagagtattagttgctataaaaggtgaaaagaagaaggggatcttagtgggattgaaacaaaatcaaaaatccaaagtacctaaattcgatagcaataatctagttctaatagatgacaatggctctccattgggaactagaatacatgcaccaataccaacaatccttaggacaattttgaaagagaaaacacatgccaaaggtgctgattatacaaaattgttgggaatcgcttcaaaatttacttagtaataactggtaaattagattttgtataaattaaatataggtgt

SEQ ID NO: 13324 - DNA, 507 bp, Diabrotica virgifera
ctccctccaacacgaaagatttgatttccttgaaatctctcttatcgttcagtaatttcaaagtgtcatcataatctggtttcttgccatgataagctaacacgggtttctcaggttctggttctggcggtattcgaatttggtcaaatggaatgttggacaaatgcggcggcagattctcttctaatatcgcattaattacttcagcagaattaaaattgtacgcttcgaggcattgtaagacaaaaccatctcctaaatggggtaaagtatcaataatttctttaattttactttctatgtcatcgtcacttactcctccattcatattggaggccctgctatcggttctggctcttcttctacttctatttcgggtggcttgaatttcttgaatatatcctcaaccgtttgcttgtttaatttcgacaaacgttgtaatgttttatgcctaggtatttattaatacacgatattataaattcagttcgtgtatgatctattaga

SEQ ID NO: 13325 - DNA, 506 bp, Diabrotica virgifera
tggcactggaacttgttccttaacaactacaggagatggcactggaacatgttctttcacaacaactggtgatggtactggaactgctacgggttttggtacctccacagtataaggctgtggtactcctactttaacaggtacaggtacttctactctaactggaacttttacctctacaggtactggtctttctacagtgtagggtacatgtttatcgactgtaactgggtatggctgtggtacttttacttcataagggcgatctacggcaactggtactgggtgaggtactggtactggtacctgtctatctactggaactgcgtatggttgtggcacagcgaacgggaagtgttttgtaatagtattaacggtatgagttgaaggtccaacattaaggacagatgccaatgatcttaaatctaaaccttgcagccaacagaatgtgctgacaatggagatccatatatggatggagagtatccagaaagtgatcttaaatt

SEQ ID NO: 13326 - DNA, 509 bp, Diabrotica virgifera
  SmartBlast Evalue=1E-62; Info="Diacylglycerol kinase theta, putative n=1 Tax=Pediculus humanus corporis RepID=E0VDY1_PEDHC"
agatccgcttaacctactcagagacgtgatcgatgctgaagagatccgtttagacagatggactgttgtttttcatcccgaagataaacctgatgacaacgtgaaacagtgcaattccactggtaagaggaggaaaaaactgtcgaaaatcaaagtgaccaatgagcaaattagaaaatcagttgtagcaagttccaccagcgaagacaactcacaaatcttcgtaatgaacaactattttggcataggaattgacgcggatctatgccttgatttccataacgctcgcgaagaaaatcctggaaagttcatcagccgattacacaacaaaagcgtttacgttagaatgggattgaggaaaatggtaggaccgaaaatgtgcaaggatcttcacaaagaagtcaggttagaggtagatgggaaactggttgaactacctcaagtagagggcataattattctcaatattttaagttggggatcaggagcaaatccaatggggtcctgag

SEQ ID NO: 13327 - DNA, 510 bp, Diabrotica virgifera
cagtttttccagttaaaaaaaaaacgaattacaaaatttgtcaatttttatagtggaatgtttttctgttttaatacaaagcttggttaccagtgtacttatttttagcttaaaaactcagtgacttaacacactaccattaaattaaggaattgacgtataacttggaataaatttgaagcttttgtgtatttgactattatgtgtaagcttttagagagcttcatagctaatagaatgcatctcctgagtatttgagaaagcaaattactgccatctaaagtgtaagttaatctatttattgatacattaggtttttatacgttaggagcgtagttgcaaaatttcgggccaattcctgaatttaaattcattaatttttttatcctgagaaggctgatatattaatgtttttgaaaagtttaaacgcataatgaaagattacattattaccgagggccgaaagttcctgaaaacttctataatgtttattttaataagttacagggg

SEQ ID NO: 13328 - DNA, 507 bp, Diabrotica virgifera
  SmartBlast Evalue=7E-16; Info=Acyl-CoA binding protein n=1 Tax= Bombyx mori RepID=Q9NBL4_BOMMO
aggaatgtaacaggcaaagtacacatgacataaacgattatttagacttaaaagaatatcccaaacatactgaaataggacaacatggaaataaacttaacccatttgaagaaaaccaaaagactgaaaatactgaaaaagaaatttaaatcggcttgtgatcaagtcagaaaattttcaaaaagacctccagataatgatcttctagaattgtattcgctttacaaacaagctacagttggaaatgttaatactgctaaaccttcaggcttggaagacgtaaagaaatgggaggcttggaacgctaaaaaaggaatcgctattagctccgctaaagaacaatacattgcaaaggcgaaagttctagctggtacatatgcttaagtttcttcaaattgtttagcattgttttttgtagaactaaataataaagtagatgctgatgatatcacattcacaatactgtaatgttagcactgaaaagtaatatactgatattttttgttt

SEQ ID NO: 13329 - DNA, 509 bp, Diabrotica virgifera
  SmartBlast Evalue=1E-32; Info=Neuralized-like protein 2 n=1 Tax= Harpegnathos saltator RepID=E2C7N2_9HYME
ggctttaacaaactcacaggtactgaacctctgcatgttttgataaagttatgattgctattttccttttttgtgccagcaggtatgcatttccaaccatttccttcgccatattcgaaaatactgttttgtgctttactgattccatatatccaagattttgctacatccaaaagatctggtaaagcatacatcggaatggaatccggtttcaacattgtcaaaggatccagttgagtcagtcctaatcgcatatgcccactccatccggtttgattctgttctatttccagcagaaaaatttcaccgggagctagaggtttttcactaaaagttactgcattggcgaaactttttgttctatatgctactgtgttattttccgataatattatattttcaccatgataaggatgaaatcgtgtgtttatagtatttaccattggctgaaccattttatactttgataattgtttttgctagtttatttgagaccataaattttgtta

SEQ ID NO: 13330 - DNA, 507 bp, Diabrotica virgifera
  SmartBlast Evalue=1E-53; Info=Protein ECT2 n=1 Tax=Harpegnathos saltator RepID=E2C281_9HYME
cctaggtttcacgcttttctgaaggcgtgtcagactagagcggagtgcgggagacagagtttgcaggagttgatgattaggcctgtgcagaggctcggtagtattagtttattattaaatgacattctaaaaaatactccaaagacaaatcccgatcattctgcattagaacaagcgttagcagctttgagggaggtgatgactcacataaatgaagacaaaaagaaaagctgaaggccaagttactttatttaatatttttaacgatatagataattgtccgcccgatattgtatcgtcacatcgaaattttgttgctaaggccgaagtagttcagttatcgtcttccgaaggtcttgctagtaaaggaaacaacttagtacttttcctcttctccgatcagttggaggtgtgtaagaagaaatcgaaagcctttaatagtttgaagagcccgtcaacggtaacaacggcaggagttggtggatctttcaaaataggcagcttatc

SEQ ID NO: 13331 - DNA, 508 bp, Diabrotica virgifera
ttgtacagtacttaaggagatatacatttaaggtaaacaagtcattggagcgacacttttctaacatatcagaatctagtttcttttttaaattctatagaaaatatagatactgttgtaaaaaatgtttgtagcgctactgcacagcacaactgggtaatagtagtttacattgtagtgaatggcttactccgaagatttgcattatttttatgtccttattaaaaattattagtaagtattaatcttactagtgagttcgcagtggcaaaattcgaaaaaaagtggggatagcttgccgtttacttgtgtgccatgtagtaactttgtgatacagatattgaaaatgtgcaaaaacgacaagttctaaatcatcaaacgaaagaagtaatttataatgttgtataatgagatcgccaccgccaccttatcatcctgatctcagtcaaatcgaattggtttgggctacgttaaaaaaatatgtggcctcacgaaacttaacttttaa

SEQ ID NO: 13332 - DNA, 509 bp, Diabrotica virgifera
  SmartBlast Evalue=1E-18; Info="Fibronectin type-III domain- containing protein 3A, putative n=1 Tax=Pediculus humanus corporis RepID=E0VER5_PEDHC"
attgagggttgttgttgcctggaccgccaccataatgttgaggattatgtgacggcataggtaagagattcggtggatgttgtggtgacagtataacatgccttaaggtaccactttcgtcaactatttgctgcaccatgtggcctggaggaacttgaacaggcatcgctatgggaggcgaggaattagttgacaccatgggaactgtcaccggtccgaaatctcccatagcacagacgtgcgccgggcacatttccggatgcaagtagtactgattttcctggtagtaatcaccatatggggaatgtacgggtccgcagtacatctctgcattctgttggggttcaacgccttgactggccaccataacactgcgtggtcgtataactccacgtctttgacgcccgaaatcccgctgagacactttgtcgcacttttctcacacttttttgcctcctaatagaattatatttctccgttgttggttcactgaaacactgttcaccgtg

SEQ ID NO: 13333 - DNA, 509 bp, Diabrotica virgifera
ccaagaatttctggcacttacctcgtacaattacaaaaaatttcactatataaaaacgtcacggtttttctcataacatcaacttttaacatgaagatttcgtgcttaaaacttcttccaaaaaggtttaactcccaaataaaactctaacattatcgttgagacttaaaaaaatgtctcacggcatagggtttgtacatcgggtactgtacagggtgttccattagtatatgtcattaatttcaccacggaaacattgaacatgaataaactagaaaacttgggagataaatgtgccttttttaatcttcctgtatgctaatggttccagctaaagaacaaacgctgcattgcgatctgtcaaaggcttttttttacctttacctttacctacctgtacccactgctcttctctatcctatgtattgagataaaaagttagattatccagaacaaaaatatttacactctgtagctgaataactaaaagtacttaatctaagtgttgt

SEQ ID NO: 13334 - DNA, 508 bp, Diabrotica virgifera
  SmartBlast Evalue=7E-24; Info="Dolichyl glycosyltransferase, putative n=1 Tax=Pediculus humanus corporis RepID=E0VUA0_PEDHC"
caaatctggatatcttactggaggattgaaaaacaaacttgctaaaaacaaaagaagacaaccagttagtgaaaagaacatcacacaatggaaaatgagagtcttgatggcatcagaatttttactaatttgttgtagagatgccttaataatacctatctgtgatgcttttttatattctatatctagtagagagtgcaaaagacttctataatactccttcagaccatctcggttatttaacatactacgatagctgtgttctatagtgactctaaaggtgatgcaataaaataaggtaagagatattagggcaatgactaaattatctttaaaaaatagaggaatcatgctaaaaacagatatacacaagaaccagtaacaaacaaatggtgcaaatggaaaatataataatacaggaacagctgctaataatatagttttctcatgtacttgaaaactaaataaaaaaaaagctaaagatgaattaatttgggctagaacaaac

SEQ ID NO: 13335 - DNA, 498 bp, Diabrotica virgifera
ggccgttatacaaaagtgacttttttaaatttgttgattacattattcctttcaacctacttatcctcaaattgtatttttaaacatcctattcattttatatattaataattaaattcactatcaaatttgaagtaaaacttcttttgaaagtttgttaattctaaaattaatgggtaaaaccactagtatagtttgtcaaacgtagcaaaaagtttaaaaatgtcggcgattgtcagattttcaaactctttcctacgtttgacaaaccatatatattatgtattaaattgggtatatcttaaatatattaaattataagcataattataataaatgaaatcaaatccaattaaatggaatcgaattgaatcgaaccgaatataaccgaatctacgagaaatattcacctctgtcggcactccgcaagtatcccgctccaattgtttccacagcacacacctattttcacttatgatttcctcaacctcgtttacc

SEQ ID NO: 13336 - DNA, 509 bp, Diabrotica virgifera
ttaatctgtgacttttacaatttatttgacacaatatattaccatatattttacaatttttctttttcttttgtatttctatatttttaacattaacatgtaaatgtatttgttaaatttaagacagtagcatgacataatatgtcatgtcatatattatatgtcaacatactcaaatgctcctatttttaaatcacacagtttgtcgaggggcgaaatcttaaccagtcgttgaaatgtgtagggaagtaacctagacaattgacgaaaaatacaattgaagaaaatattgatctactttagcgacactggtataactaaacaaaaaataatactttataaaagatatagacctcaatatatcgacatatttaatgaaatatattatcaaaaatattaaaaacatatcaaaacacaaccctagaatatttagagaagcgtaagatgatataatccagtgtatgatgatataatttattttgcataatttgtaccatcatactctcgaa

SEQ ID NO: 13337 - DNA, 510 bp, Diabrotica virgifera
  SmartBlast Evalue=5E-33; Info=Protein KIAA1219 n=1 Tax= Harpegnathos saltator RepID=E2B8D2_9HYME
taccaagaaacagaaattatacgacggttcaagtcacgtgttgtattgggctgacgcctgctctgaaatcgctttcgtcattccatctcagtgcaaaccaatagaagtaacgtctgaacaatcaagttttaactcaaccaacctttcatcttggagtgataagccctggactgataaaagagcgttgagtttggacttggacaaacaaccagttccaccaaagaggatgtcacacaagtccatattgcaccctcacactaacacaaaaataatggttgtatggttggagagtttcgaggatcatctaactttaccgataagtgatcttctcaattccatgaacaccggtctagaaaaaggaactaaccaaaaaactagcgatgttttggtgatttttctgcatatattatccacgggcttgttgagggttcatctgcaaggtcctacaggcagagttggactagcttctcctctagtagacggtatggttgttagcagaagagctttagg

SEQ ID NO: 13338 - DNA, 506 bp, Diabrotica virgifera
  SmartBlast Evalue=1E-55; Info="DNA-directed RNA polymerase II subunit J, putative n=4 Tax=Neoptera RepID=E0V9G7_PEDHC"
tatatttattagtcacattaaccttaattacaaaagctaaatcaaagtaaaaattcactgcctaatccaatccttccttcttttctttgatcgcttccttaaatctttcttcgaacaaggacaattctgaaattaaatcagtgatagcgtgcattaaggcttcttgaggtgaatagtctgatgttgtttgaattcgcaagacaaatttgtgttccaatggatgaggtagtttgtaaccagcgaataatacgttgggatcttttaaaagttggtttctgatcatattaccaagtgtgtggtcctctttgttgatagtaaaaatggctgcatttggaactttcgtatcttgttctagaatgatctttttctctccatcgtataataaaaacgattcaaaggtcggaggcgcattcatcttaaaatacttctatgtaaatcgctgcagcaatacagtaattttcaaaatgtttaatgtttacaaaaggtttacaacgccgaaaaaatca

SEQ ID NO: 13339 - DNA, 507 bp, Diabrotica virgifera
aatctaataaggaataatttttattgcagtcaaaagaacctaataactaatatattaacataaataataaaaaaagacatatgtttaataaaaaatacttgtgcatctaatcgattttaaaaatctacttcctctcctccatctggtccaatattgttcctattgggaacatccacaatcgatcgttttcccctagaatgaggtttttggctctcttctggtacgtcatcagtcgcatcctgtggaggagtctgctcggtgttgttttctggtggtggattctcgttatcactcatcttcggctgctcttttaatggatttctttttacaccggatcgaagttataaaccctctagttgtgagtgtcggtaaccaagtagtaaccaaggtttttatataacctgcaatcttgcgtctgccctttaggttaagcgttatcgctgtagtctgtagtattgcgaaaatgattaaattttatcgtctttaatgcatatgtactcaggatta

SEQ ID NO: 13340 - DNA, 506 bp, Diabrotica virgifera
atgattcctgcatttaaagtatctatgaaattcgctaatgaatttgtaatatgcgtaaatataataattgtcgaggaatccataaggtgttaaatggagaacaaaattaaagaggagcacttactacagtcctgcctgactgaagagccttcaacatctaaggctaaccaacaagaagcatgtaccaaaaaagatggagaaatacagtattttcaatgctcaacttgcaatcttcgagttccatttgattattttggaagaaatccttcgtatgtcaaacattactttttattagaagatagttacttaatagaagacccgttcacacctcccaagaatggtaaaattattgtcttaaggggctaactgcaaaaagtgtaaaaaatctgtttgtaaggatactaattgtagtacttattatgattggacgtactgtattcagtgtgctcaacaaaatattaattgttttcctaaaagcgttcaagaaaaattgaatagaattgttg

SEQ ID NO: 13341 - DNA, 509 bp, Diabrotica virgifera
accgtacctaccatgccaatgaccattagttgtcgaggcattagctatatataaaaaaatacagaaaaaatatttgcggcgaaaatttaaatatggtcaagtattttaacgacgtaaatatttagttcgtgtgttgtaccgccgaatccacttagcgacaagtggataatcaagtccacgctaacattactgtgcggcgcaaatttctttgaaatcgattgaaaaaccgacagcacgacggatagcgtgcgttgttcgtcacgaaaatatttttgcgttattctatgcggcgtacagtccacatcaacaaaaagttcagcgcacacgagcaaatttgcgtcaaaaacaacgtacaacataaatttttattgatgtgcatccgccttaagaggaatttttctttacattttttaacctgactgtagaaaacacggttatttatatttatgtacattaaaattgagagttcgtatgaggtaggaacgtggaatatacaaagaattgcaaaa

SEQ ID NO: 13342 - DNA, 498 bp, Diabrotica virgifera
gctgctgttactgatatattaatctaaaaatgctcaatgtgtggcttaggccactgttgctctaagggcctcaagttaccttctgagctaccagggcgagtcacttactatcttgttcaaggggatcgagaggatatgaatattctggcaacactgtaagtgctaggaaatctcagcagatgccgaaagtatatttacagtactacagtattttagcgaaatataggcatatttatgttggacagaaaaaaattgtacaatatagtttgatatagtatgtgagattttaaatattaagcttcttcataaaagctccttctatcgcttatattctatagggtgtcccaaaagtagcggaactgtcgaaatttctagaaatgaactcggatcgaaaaacagtaaaatacgtgttcaatatttttcaaaaatctatcgaatggcaccaaacacgaccccactccaccctctggaggtggggtgtgggataactttaaaatc

SEQ ID NO: 13343 - DNA, 509 bp, Diabrotica virgifera
  SmartBlast Evalue=3E-31; Info=Ubiquinol-cytochrome C reductase complex 14kD subunit n=1 Tax=Bombyx mori RepID=Q19P02_BOMMO
cttgacattgacaatttcatcggggacgaaagttcggttaggttgattacctaataataatctttctttcgtgaattttataaatttttagaacttattctagaaaaatggctgttagctttgcccagaaacgtttcatgtccagcggactacaaaaatgggcatacaacttggctggtttcaacaggtatggtctgtggagagacgatcttctctacgaagattctgatgttgcagaagccctaaaacgtgtaccccagaagacaattgatgaaagaaactaccgtatccttagagccacccaactgtccctttctcatagtattttacccaaagaacagtggacaaaactagaagatgataaactatacctgactccatttgtcaaccaagttattaaagaaaaaaaagaacaagaagaatggaataaagtttattaattatatagtgaattgtagcaatttgtacaatatttatgtaagttatgtgttaaataaaatttagtcccg

SEQ ID NO: 13344 - DNA, 508 bp, Diabrotica virgifera
gcaaacgtatcaacagttaatgtatctataagatttgttagtttcattcgcttgatcaaattatgaagagctttgtaatatttttattctttgttgccatttcggcagctcaagtacaaaaagaaacaaaaaatactgaaatttatgagagatttgtaaaaatagcagtagaaaaattaatcaaaagtttggaggcacagagcagcgatccaggtattattgcgcaattaaatgagtatgcccagaaacttctaagtagtttagctaaatacgctgtaaatcatgacttggaaccaattgctattgccgatgtagccgaagattttcttcttgccaacttcaaattaacgaaaggtgagcttcgtggtatttctaccattgagaggtatgacgacgtttatgttgcgtataaacatactacaaagactctaagtcttgtaattccaattgaatttctcgatcttacctttatgtataactatgaaatacatgtattgggtatgggccc

SEQ ID NO: 13345 - DNA, 488 bp, Diabrotica virgifera
agctttcgagatgtttgaagttaaaaatgaaacggcacagttattttgattaatgtattatgccactttgttttaaatttcaaatatctcgaagactaatgacattatcgttacgagaagcgtaccttatttacatagaaagtattggagaatccaagaatgcgctaaagtagcggtcccgccagttgcgtagaatatggtaagggtctttccttcgtcgtacgccactgttaatagccagaagcgtttgtttgacataatttggtagggtgtacagtatctacactttttgtcaattataacaaggatatgtcaaatggtttttagtaactacaatgaaatgcaaaaaaattgaaatttgcatcgtagatttaaaatgcgtttatttcaaaaacagttgagtttagcgagatgaatgtagtatactttttttaattaaaaataatagtggaataaaagttttgatctcaaaattatgtataatgggg

SEQ ID NO: 13346 - DNA, 508 bp, Diabrotica virgifera
  SmartBlast Evalue=6E-34; Info=Sodium/potassium/calcium exchanger 3 n=1 Tax=Culex quinquefasciatus RepID=B0WBJ3_CULQU
catgtgtatcgtatggataggagtcaactcctatgttgtatcgtggatgattagtattatagggacaattactaaattacctgatgcacttttgggcatgactttgatggcaattggtggatgtttaccagaaacagtatcaatgacgattattgctcgaagaggagaaggagcctttggagtatctaactcacttggagcgaacacaatgaacgttctgtactcactcggtcttccgtggttattgaagagcataacaatgggcctaacaactaaacatcctgtattgatccaatctggttccatagaatataccataatgtctctaatttttgctgtttgcactttgtatatagtactcttagttagtaagtttaggttatcaaaactttcaggcagcattttgggagtgttctatgtgagtcttgtagtgctggctatagtatctcaaacggtactatttaagcagcaatgctgattaaggtttgtaataataagataaactcaa

SEQ ID NO: 13347 - DNA, 509 bp, Diabrotica virgifera
ctcttcttctgggatgatgaaatttgacataatccttgctgattcaactcctattatgtttcttaggattgataatttaatagaatcagcagattcatactgaccagttgcaaccaaatagttatcaaaggtggtccgccaggatcgccattcagctgccacgattttgaccctgcaggtcaaaatcaggaggcattttcacggatcccatttcaaaattcactgccatatttgaggttatgttgtcttaccacgacttatactttagaaactccaacaatatggtctttactgcctgaaaactgctgactgtgccatgttttaactacatatatatacggtggacagtaaaagatgggatggatgttaaaggtttattaaatcacttaagatacatcatgacaacaatgatgtcatgtgtctggcagatagatgtcacccatcaatgtcatgtcatctctgtcagtcacagtcatggaacacttacattatattaaacaatcagatcc

SEQ ID NO: 13348 - DNA, 508 bp, Diabrotica virgifera
gtggttacaaactttcgtgttacgagatgttttgtcccgagcagcctagggagttgtaactaatagcaacacttaatttaactcataaccaacaacattcttcttggacgtctaagaggaatgaggttggttatcagattgattatcttctttttcaggtagagctagatcacttggtggtgcccttggggatttgctggctcttcgctggtttagcaaagatggtgtccaactaaaagctagagagcttggttcaacaccaagactttcagcattgtcgctcataggagggggtgaaacggatggcacaacaggaaatttagaatgagaagtagaatgcttcttttttccttcattggtgaatccttccttcgagtttggtcatgctcaggataacaatttatggagcgtaaaaatgattccaatggacccataactgattcttttgtgatctgagatataggaaccgtttcagtccataccccaactggattagtactaggttcag

SEQ ID NO: 13349 - DNA, 505 bp, Diabrotica virgifera
  SmartBlast Evalue=6E-81; Info=Mitogen-activated protein kinase kinase kinase kinase 3 n=2 Tax=Formicidae RepID=E2ATS5_9HYME
aattgaataaaaatggctcaaggagtattgagctcggatatctccagaagaaacccacaggatgactacgaattaattcagcgaatagggagtggaacttatggggacgtttataaggccaaaaggctctcaactaatgattttgctgcgataaaagtgataaaactagaacctggtgatgatttcggaatcatacagcaggagattcttatgatgagagactgtctgcatcccaacattatagcgtattacggtagttatttgcgtagggataaactgtggatttgtatggaatattgtggaggcggttctctacaggatatataccacataactggtcctttagctgaaaatcaaatagcgtacatgtgcagggaaacgttactaggcttacaataccttcataccatgggtaagatgcatcgagacataaagggtgccaacatccttctgactgaatgcggtgatgtcaagttggccgattttggagtgtccgctcaaatta

SEQ ID NO: 13350 - DNA, 504 bp, Diabrotica virgifera
aaaaaattaaatttttattctatctttgattgccaaattgatacacaatactatatcatactttttaccaaaaaagggcttaagggttgaacttaaaaaaaactattttaaacactttaagaaagttttgatgagttttccctgaaaagtacttatttttcatgagttacaaatttgcttttatttgatcgatagacttcaaaatatacactatttttttcgttttttatagcctacagttttgctaagaatatttttttatgaaatacttactattcgagttatttgcaaaaaaccgtctgaaaacgtgtttttttttttgttgacaactaaacattttcactcgcaactaactctaaaagtgaaaaaactctacagaacaaaagttgcttagaattggtcagtttattcatttacggacttatcttgaacgtatgttttttcatcccaaagaaggggtggctttctcccccaagtaaaagccaccctgggctcaagtccaat

SEQ ID NO: 13351 - DNA, 508 bp, Diabrotica virgifera
acttgtcaggctatcattccatgcttgaccatggaataatataagagaatcatgctattatattaaaatactcagcatacctaaaaattattctttcaaagaagctctttccatctgcctctgttgaatgcggtttgcatccctttattgttaacacgtatcagaacttcagtccatctctgtcccatagtacttattgtcttgccctccaattgacaatatgttttgtcgattggttgtttgaaaatctcgcgacatgtcctgaatagtttagaatacttggaggaaagaaaactattaggcgaacaaataaagagatatatgagatctacacagaaccaaacatagatatgatcataaaaagataaatattgcagtgactgggtcatattaaaagagtgcccgaaggatgaacaccgaaatcaatagcttggaagacaccatgctataagaaaaagaaggagagatctagaacacgatggcgacaagtggttatagcggatttgga

SEQ ID NO: 13352 - DNA, 508 bp, Diabrotica virgifera
gtttgtgtcaggtactgtcatagttatgtgccaagttgatgatggttgaaatcacgcaacaaactaataaccgccaaaaatgcccagtcttcttgaatctcctttttaatttagttaaatcattttgtatcgttggttttgacactttatcgatgacgtcacgccatgtttatgacgtaggaaaaacgcaaaaaattgcctataccctgtgcgtatcgatccattttaagcgccaggactatttcgtggccgatcagtcgacagagtttcagactgtagataatcatatatgtcttttgaccatagacataataagaatagactagataaggtatgtgccattatgtgaatagaggtgaaatactaatattcagtagctatctttgtttgccatacgcaagtaatagcacggtagagagagatagatagaccatttcactatgttgctcaggatgccttgtctattcttattatgtctatgattttgactcgccgaatttgaatttca

SEQ ID NO: 13353 - DNA, 507 bp, Diabrotica virgifera
  SmartBlast Evalue=1E-40; Info=Polybromo-1 n=1 Tax=Aedes aegypti RepID=Q17Q18_AEDAE
atcatttgtttctttcttcggacttgggctctttttcctttccacattttcgttcctaacagcttcctccttattattgctaattccttcgtttacatgtatttcttttagtatcgaatcctccgaacacctcgtttccgtgtcgtcatcaattgattcctttatcgctttttcagttcgtatttcatctatgaacgatttcgcatcctcttccgtataaagcagggcgggggatgctaaaagttctccgtttttacacaactcgtctctttgttggatgaagaacagctgcagatctatggagtcctcaaacacttgtgaatcagtccttgaaatatatcgcgccctttccatacaggcgaaaaaatcgtcttggaacacatctagacgcttgtacttgcccttgtccaatcttcgttttattaaatccaaagaaattcctcgaatcttttttccatcaacttcgtcatgttctggtagatccgccatggaatcagaataacacct

SEQ ID NO: 13354 - DNA, 507 bp, Diabrotica virgifera
  SmartBlast Evalue=3E-40; Info=GRAM domain-containing protein 1B n=1 Tax=Harpegnathos saltator RepID=E2BPH5_9HYME
agacctatttgatgttgtttcgggtatggcagaatgcgcttatggatcaacctatgctccctcaagagatgtggcaatgggttcatcaatcttatggcaatgaattaggtttaactagtgacgacgaagactacgtacctcctgccaacgaagaggacaaactttccgttagacactcagttgaatcattttcagaacacgaaagtcaaggacaaccagaaggcacaatggagcagacgtccacagggacatcggaaaaagccgacactgatgaaattaaagtgccacatgtcagtcacaaacgaacgctatcagattcacgaaatcctactgatgccactgataattccgaatctgaagttgagaaacctatcaaaaatgatgttaaagtcacctgcacatctcctcacgaaggtcgacaaatgtggaacgaagttttccccattcacgtggatcaactgttcaccttactgttcacaagctccaaattctacttggactttcacg

SEQ ID NO: 13355 - DNA, 505 bp, Diabrotica virgifera
  SmartBlast Evalue=8E-27; Info=Protein lin-52-like protein n=1 Tax=Harpegnathos saltator RepID=E2BKR6_9HYME
acattattatcgaatatattttcaaaatgtacaaaaatattccatcttaagatctaatataaacataaaacataaatatcacttctcaatgtaaaaaatatacaccacagcccttaaacaataaattattatacaaaaacacttatttatgtttcttgtccctgttaaacaggttgagatacttcccacgtgtcacttctttcgattcttctatgcctagctgataggcaatatcatgtagctctttcacttttccaattaagcctgatgttgatagagttgctagttgatgtacatagttctgatcctcgtgggtgagttcctttgagtagggcagcttggtggtgctgttgggtgttgtctggaagctgttgatgaattcggtcacacctggaatcttttctggccacagttctggagaagccctgtctaaattttccatgctaatcaggctagaaccgaattctcgaagctcttcctggtccgagtccgaaactgcttgttg

SEQ ID NO: 13356 - DNA, 503 bp, Diabrotica virgifera
  SmartBlast Evalue=7E-23; Info="Syntaxin, putative n=1 Tax= Ixodes scapularis RepID=B7PDN0_IXOSC"
gtcaatacagggcagtatttattatggtagagaagtttattttgttagacgtcaaaattatgtgattttctaagttattttctataaattgttaatataacttaaaacctttaagttattacaacaacatggcttctagaagtttaacagacgtgtttttattaatgcggaataatgcaattcgaagtagacacatttatcctgaacatgattcgtctgaaagaatgcatttggtatctctcaatgatttggaggagggcataaatgaggtaaacgaagtaagaatgcctccaatatggatagactacttagaaaaggcacagatgatcattccaaagctgaaatccaaaataaacgatctcaaatctcttcatgctaaacacctacataaatcaacatttgatgaatcttcagaagatgaggtggctattgaaaattgcactcatgagataacacgcatggtcaatgaatgtcataggttagtacagattattaagagccat

SEQ ID NO: 13357 - DNA, 507 bp, Diabrotica virgifera
  SmartBlast Evalue=8E-33; Info=1-acyl-sn-glycerol-3-phosphate acyltransferase alpha n=1 Tax=Camponotus floridanus RepID= E2AA02_9HYME
gcaaagaccatcatgaacgaagctgctcaaaaaattaagactgataaggttaaattatgggtatttccagaaggcactcgacgaaatgacgggacgattcaccctttcaaaaagggcgcattccacatggccataacaaataagttacctattgtgccagtggtatattccaggtactacttcttagataaggatatcaaaagatttgatcacggaaaggtaattgtgacagccttacctcaaatcgacactgcagacttaacgatcgacgacttggaggacctgatggaaagaacgagagctctaatgcaatcggccttcaacgaagccagcaaagaagtgattgacggatacattcccaactctagtcagaaagtaacatgagatttacacgattgtctcgagcctacaggtataggtagctagtttttacgttttttcggaaaacttcagcactttttagtttagtgaccaggatttgtactagggcagtccgataagtactta

SEQ ID NO: 13358 - DNA, 507 bp, Diabrotica virgifera
  SmartBlast Evalue=2E-21; Info=Endonuclease-reverse transcriptase n=1 Tax=Bombyx mori RepID=D7F165_BOMMO
cgagacctcttcactctctgcttgtaaagtcgaaaaatttctatagcttggaataactccattacaatttctgcataaaaagggtgacaacatgaatctagagaacaaccaatcgactggaaacaaaatttgagctgtatcagccaagagaataggctgggtttcgccccaagtacggtacaaatgaccacctacagtgcataaaagttttgattgaaaaatcaattgaatacaatagacctctacttctaacgtttatagactttcagaaagcgtaggtacaccaatattatataaaatgtatacagaaatgctacaacaactataactctgcacggtcctaccaataagatacatatcaggagaggtattcgacagggagatactatgtcgcctaagttgttcattactgtacttaaacatgctttgaagtcactgaaatgggaaaataaaggaataaatatcgatgatgagattcgcagatgatattgttctgatttcagatga

SEQ ID NO: 13359 - DNA, 506 bp, Diabrotica virgifera
  SmartBlast Evalue=1E-69; Info=AP-1 complex subunit gamma-1 n=2 Tax=Formicidae RepID=E2B231_9HYME
aataacgataaaaatatacgatacgtagctttaaatactctactgaggacggttcatgtagacacatctgcagttcagcgacatcggtccacaatcttagaatgcttgaaagatcccgacgtctcgatacgaagaagggcgatggaattgtcgttcgccttggtcaattctcagaatattcggacgatgatgaaggagctattaacgtttttggaaaagacagatccagagtttaaagcccagtgttccagttccatagtattagcggcagagagatattcgccgaataaaaggtggcatttggacactcttttaaaagttttagtagcggctggtaactatgttcgagacgatgtcatcagttcaactatccagttaatttctgacagcactagtcagcaggcctatgtcagtattcagttatttaaagcgctctcagaagaccttcagaacagacagcctttgactcaggtagcagtttgggcgataggagagtacggtgattt

SEQ ID NO: 13360 - DNA, 507 bp, Diabrotica virgifera
  SmartBlast Evalue=1E-49; Info=Microspherule protein 1 n=2 Tax= Formicidae RepID=E2BA40_9HYME
ccttgtcgtctggaaactttatgtgccggtccttcaagagccaagtcaatatcaacaacatgtcccttgcccgttcttccaatactgatttctcgacttcgcatgagatacctaaccattcttcctcgaagaacggctaatgtttggttgtccaaattgccgggacatattcctgtcacgctgtcaactaatacgttccatcgaccaatctcattttccagttgcctaatttctttcaaattccttctctgttggagtttcatctccctatccaatccctcatcgggaggttcagttagatcggaatcttgtacaatttcttctgcgtcattaaaggtcactattgggcgagctgaagtaggaagaggtcccaatgtctgatctggtaagagattatacatcttaagactctgccagtggcggaacaaggaggcggcagtgcggccggtgtaaaagacggacggatgttgagaaaggagttctgcaaaagtttctactgtgggaggg

SEQ ID NO: 13361 - DNA, 498 bp, Diabrotica virgifera
tatttaagtatatgaaactgttacataatatataacttaaattaagtcaaaaataaatacttattagaagtcacactgtatatatgtgggcaagctcattcccacctcttacattaagaacgttaacgcctttatgaaataaaacaaaaaaaaaaatactctacaaacacgttcacgtgcttgtagtacaataaaattattatataaactaacctaagaaaatcacattaaatatcagaaccctggttacaaattattcagctagaatacaatccaaaaatctttcattacaaaaatcttcacgtatgacttcaacagtgaaactttaggtgcaacagctacaagcctaccggcagtgtaagccttaaggaaacacaaaaaatatcaagacatcaagtactttattaagagattacaaaaaacaaaaaaatacgcttccgaatttaccaatatttttacaaaaagttacacatataattaatacataaagtaaaagac

SEQ ID NO: 13362 - DNA, 504 bp, Diabrotica virgifera
tatatgtacatctgtttggtctcggcatttgttttcattcggtattggttagccactattaccagcatcaaaagctgaataatgaccatttggggcaagaactggatatatcctcaaatagttagtaaattatctatttagacgtctataatcatagtgaagaacaattcttagaggttttacgtgattttcacgtaatattcacgttgtttttttatgtggtcacacatttttttacgatatgatttggtaaaactgctaccaatatacctaaactcattgaattaccgttaagtgatgacatcgttggtgtaagttgtaaataaacaatgatatgatttaccacaactctgacttatcggttcagtatacagggtgagttcttagtgcgacattcaccaatatatattttgtatatcaagtaacaatcagctagaattaataaacttttactattttacaacttaaaatttatgaattctcgtacaatttcgataagggtgc

SEQ ID NO: 13363 - DNA, 506 bp, Diabrotica virgifera
  SmartBlast Evalue=2E-12; Info="Enzymatic polyprotein, putative n=2 Tax=Pediculus humanus corporis RepID=E0VZF7_PEDHC"
tcttggtctttttaagagaatattatctccaactttatactttacttccaagttactcgttcttaagttatcaaaacggttcttttgctttttcctttgatcgcattgtttttcccttatattttctaactgattattatacgaaatttcatcaaattctctatcatttttatatggaaatactaaactgtagggggtagtggatgttgaatgatgtttactagaattatatgagtatatagcgactaaaagtgcatcttctaagtcgcactggttatgttctaaaagatagcttcgcaaagtatctgttatggtagcatggaaacgctcaattataccgttagaggcatggtactcagacgaagtaaggtgccattcgatattcaacgaattaacaaaactttgtatcttttattattaaattcgcccccgtgatctgacataatcatcttaggaaggccaaaaagcgaaaaataattttttaacttactaattatcgtttctgg

SEQ ID NO: 13364 - DNA, 506 bp, Diabrotica virgifera
ctgtccactaacaaatcacttataaagaaacattcaaacatatttataatatattatgtccatatctgttattttgattttgactgtagattcctgtacatatgtacagtatgtcccttgattttatttcaacatattcgtgaatttccatctctcatcacgtattcgcttttttttcttactctatttgtataacagcatctacagttccttcatttgggccagatttggataataattattatttaaagttgtaattcaattagtagaattttattacagttttctgttgcctgttagctacaactattcctaattcttttttcgattctttcgctcttttcttggcttgtatgcctaagtagtagagatgataatgctcaatcttcatagttctttttggcgatttttgtttcacatgtaactaaactgttaatattgtaacttgccattttttccattaattgtttttgttttcctgttaagcatgtgatattcattgtccc

SEQ ID NO: 13365 - DNA, 506 bp, Diabrotica virgifera
aaaattcttctaataatttttatatttgattgtttttgaattttcatccgtcttataaataggacattaggacttaggcttatcaaaattgcaattatgtgtacgttttatgatattgtataaaacaattttcacttaatgttacagtacactttccacaatattttagtggtttggctttacaattttctatttgacatcgtctctgcttttcaggtttctccatgaagtgtttgttcccatcaaatgttatgcccgtaaaaatactttagatgttaaaaatacaagtttaggtagggaactactatagatcgacgaaaatctaatttttagagaggccatgaatttactaatacaacatcaatccgtcgtgtgaatattgaccaatatcatttcttagctctaatttcagtggcatattttccaacaaaccagtaatgttaatccatacctcctatggctgtattatatatttgcggttaaaaaataaacttctttgaatttgt

SEQ ID NO: 13366 - DNA, 499 bp, Diabrotica virgifera
aggatccttcatacgattgagttgtgcccatgagagctttttatcgggatgcttcagagagtgttttcccaaagtatgagcgaaatccactgggacctattttccataggtttgtgcgaggtcctttacaggactaaacgaaaccattgttactgtaatcctaaaaattttaggaaactgtcatttatcgggaactttcaaatcgtgaaattatttaattcacctgcccagtttattggaataaaagttgtgttatcattgagaaatttctcatcaacgaaactgggtaaattactattctctttttaatattatggcaaattatgcccggtatacccaacaacgatttaccgtagcgatgcgactgcgcagttcgtttgtacagttttgttgatggtgtgtacaaaaattggcgcagattttaggttggtgcaaacggttgtcaggcaggaacaacatttgcttgtggcatcagaaaagttaagattatcacgaccgc

SEQ ID NO: 13367 - DNA, 507 bp, Diabrotica virgifera
  SmartBlast Evalue=2E-13; Info=Zinc finger protein n=1 Tax=Aedes aegypti RepID=Q16XZ2_AEDAE
ataaagagtatgtgacgagattaccatcaatatttctatgttaataacaaaaatgttatgtatcctacttaggtgatcatatggtatttacaaaggcaagtgtatctagtactgtacatcctctattttttctcttgttaaatgatgcagctgcgcaacggccaactgcgcatggagggcattggcatggagagcattggcgtgtagagcatttgcatgtaaagcattcgcatgtaaggcgttgaacatgacattatcaggaattactggcttcggtaaaggaattgttataggtggaggttcatcgggattttcttgcttgtgaacaggttgcaaccttcgtatgttactaacaacattcaaaccgtgaacagttctcttatgttgtgtcaataaatagcccataaggaaactctccgtgcataattcgcattggaatctttctcctgtgtgacgtctaacgtgggctttaagatcgttaccttgtagcaaaagcagcatcgcaat

SEQ ID NO: 13368 - DNA, 504 bp, Diabrotica virgifera
  SmartBlast Evalue=4E-84; Info="Protein FAN, putative n=1 Tax= Pediculus humanus corporis RepID=E0VB80_PEDHC"
aaatattaagtcaatccactggtgcagctgacaagatacgaattcagattctagcgccattctattgattcgaacgaactcttctggtgagctggcccatggaggtagttctacgtctgcgatgggttttccttcttcgtttaagcctaaccggtatctatttgaattgacgaacatttcagggaggaagaagaactccggtatgagttccttaacgtctgaggtgtctctttggcagttcttccatgatagcgagatggaagaaaaaattctggttggggtagtcgaatttgccgccttgaagtgacaggaacattgtcgtaaaaggttccactcgaatgagccagttgaagacgaaagccgctgtggaataatgcgttccataatggaacggaggaatgctttcgtgttcccacgtcgcgtatctgtcctcgaaataggctcttctgctaggattaagggcaccgattggcttagacaagtctctgtagttactaggttgac

SEQ ID NO: 13369 - DNA, 507 bp, Diabrotica virgifera
  SmartBlast Evalue=3E-47; Info="Upstream of N-ras, isoform A n=5 Tax=Sophophora RepID=Q9VSK3_DROME"
ctggaatcattgagaaattgttgcactcttatggattcatacaatgttgtgaacgtcaggcccgtttgttctttcacttcagccaatttagtggtaatatagagcatttaaaaattggagatcctgttgaatttgaaatgacctatgatagacgtactggaaaaccgattgccagtgctgttactaaaattgctccagaggtagttatgagtgaagagcgtgtgacaggaacggttaccactgagttgagagctgcagagggttcagttggagacaccacggggagaatcagttacgaaaatcggggagaatgcttcttttgccttacaccaaagatgatgtcgaaggaaatgttactttacgatctggcgataaagttagcttccaaattgctactaataaccgtggaaaccttggtgcctgtcatgttagattagaaaacccagctcatcctgtaaaatatcaaggagttgtttgctctatgaaaggagagctttggctttatag

SEQ ID NO: 13370 - DNA, 504 bp, Diabrotica virgifera
  SmartBlast Evalue=0.000000002; Info=BEL12_AG transposon polyprotein n=1 Tax=Anopheles gambiae RepID=Q4JS97_ANOGA
ggaagggaccaactttgctgacaagtaaaaaagcacttaggcagacagcagaggaaataccagaaacaaatgaggaggaagtcaaaacgaaagtaacggtgcacacggcaacgataaaggaagacatatgcgagagattctcgaatttagaaagaatgagaagagtattatcatattgtatgagatttgcaaacaactgcagaaagaagaaggacaaaaaaccaaggacaacttacagttcgagaattagaggaaacactattaaagatgataaagctcacacagcacacctagttcaaacaagaaatcgacaagctggagaagaaacagcaactagacaggaagaacaaattagcatcattggtaccattcctggataaacaagggattctaagagtcaccggaaggctgaggcacacgaatctacagtacgcggaaaaacatccgataatttgccaaaggacagtgcactaacaaattaattatatcagagagtcatacaag

SEQ ID NO: 13371 - DNA, 504 bp, Diabrotica virgifera
  SmartBlast Evalue=9E-48; Info=Mitochondrial ribosomal protein S17 n=1 Tax=Culex quinquefasciatus RepID=B0WCB2_CULQU
cttaatatatgtttccaaatgtgtaaaatctttcttatcttcttgccaacctctacttggagcatttttatagttaaacgatgatttcttctcaccatataccttgtttatgtcttcaatatgatctctgtatttaccagcaacaacttttttgttagtaacagggtctgttatgtcaccatatgggtacaagacttctttcactctgtgcgtaatcaatctagtaagtctttctggcagaagttcaactatgactatatcaccagacttacatttcttttcaggatcgtgtgcatacacgaactcatgttttgggaaaaacatatttaaattggtatcaagctctaagcgcttcactttaaatttggatgctccttgtttaaggcatggtacacattgacctaataacataaaacttttatttatggcaggcaccaacattgccattttgaattaaaggctatgtcctgtacttggttctatttacaacaatcaacaaaattc

SEQ ID NO: 13372 - DNA, 504 bp, Diabrotica virgifera
ttgacttgctttttcacttcctctgtagtatatttatcatacggtacatctattccgaagtagttgaaattcatgactctattatgtattcgttaattattagtttacttttgatggagctctcggtttttaccattttcgtgggatattaacatgtttaacttgtgtgctgtcatattgaatctgtaaagtacatgtccctttttattcttgttttattgcgactgttaagtttcctgattatattggttgtaaattattttccttaattgttgttttcaatgttttcacaaattttgagtggttctctttattcaacggatcttgctatgttcatttttaagacatttatatgctatgattgtcttgtacatcccgacgaacaattaaatttgattgtttgacatactttaaccatctgaactacctggtgttacaccaccagacggcgctaaaagtagctgtgctttacatccagtacatcaatgtccaattttgtgttta

SEQ ID NO: 13373 - DNA, 507 bp, Diabrotica virgifera
ataaaatatttttatttgttataaacaatttataaatactaagtaattgaaaaacataaatataaaactgatttatattatttgaaaatctggtgttgccataagtaacttattatttgctgcaaggatgtgactcagaatgaacagatcctgaattgccttgatccgctgtataagctcgaatggtataactgagatagttataatctttatttaaaatatccacaatagcatattttacatccaatccaccatcagatataacaggttggctcacaccatcattgttatccaggacacacaggcacgtcatgggcgaatcaagaaaatagacatctggaattctagccacgatggaacttccctgcattggagtattgatagtgttttcatataccaaatttttcgcctgcccaggatgtggacacaatattaaatcttttccttgtgcattttccaaaaacacgaaagcagtaacaaaaaacaatcccacttttgtcaacattt

SEQ ID NO: 13374 - DNA, 505 bp, Diabrotica virgifera
cattgtgttggggcaggaacaagcaaaaaaccggccgcggatccgccacctctagaggttgttaatcccaaggtgcaagcgccaatcgcatgagcatcagccgggacctcgctcagacggaccctgatttagacgagggaaagaggtcatttgatggggatagtgacgactcagaagaggagcacgagagaaaacgcagtaggccatcggcgcatgaagagggcgtaacgcaagaaaccctagatctcgcaagatcaaccaacgtgatggttgaaaagatacttaccatcgtctcagggttggatacgaggttggtggctatggagagcagagttaaaaccctagaggaggctcgccaacacatgttccaggctaccacaccgttgtaccctaatttggccaacatcgcccctacacaacatgtcccagtgaatgtaacacccttagctgcccaaaccgtctcggaggatccgtttggacccgtgtttaaaggtcattagtaatt

SEQ ID NO: 13375 - DNA, 502 bp, Diabrotica virgifera
gccactaaagtgcgcggtctatcttcgcgtgtttcctatagcttgcggtctaccgatgcgtctaaacattttaatttttttttcagaaaggtttgcacacaacaatgaaatacttcaaaccgtttgtagacaaaatgtttattgctgagtagtaataaatatttccggaatatacaataaaatatttcttaacttgtcttatatttttaaactagaatcgttgactatcttactttcttaaattaaggtgcataaattttttctttaataataattatgctgtaccgtcttgtaaataattaggttataggtaagtatatatttttttgtaaaaagttggggtgcatttttttgtaaataatgagtcacctttcattttacatttttactcttctccaaatgtttattacttgtgaataaatatattttttctacgagagttttcttgcatttaactattttgcgaaaatcattcaggaattttcagattgcgatcggaaca

SEQ ID NO: 13376 - DNA, 506 bp, Diabrotica virgifera
ttgccattacagagtatatcaaggagtaggtattccagacctagtagcagcagcagaataaagagagatacaacattggaagaagtaatcttcgaagacgatgacgatgaagatgaaacaaacgagtcacatattttatctaaaagggaacgcatgcttaacctcgagcatttggagaatgctatggaagatgtagaagatcagatacatggactaaggctccaaaacgcaaccctagctaatgatccttccttaaaagttaacctcgacaccaactccatcggaactccagcatgctttgtccagaaaggaaaataaattgttcaactgtgatttactaaagacaaaaaaacatggagacgttcacgacatcgagtagaaaacgaaattcaagatttaaagcataaattaagaaaccctcaaagaaaatcagacgtcatttgaagaatacaagacctttagatgacactgacaaaggaaatggtaccgaacttaacgctttaatg

SEQ ID NO: 13377 - DNA, 507 bp, Diabrotica virgifera
gggctcgatgtcagcccgattttgcctggagaaaaaccgatgaaaaaatacggggagaaccatagaaaaaatattaagagggttagatctgtgtctgaaaacgataacgatggagataaagacggtagaaagcgattgaggaggaaataccccaccagtttagaaacatcagaagaagaaaacagtaaccagtcaagagaaaaatctactaagaaacgtgccaaggtaccacccaaagggaaaacttgtaaagtaattttaagtaatatactgaacgataaacgatttaaagtcaacttaaaagaagacattgagatttcagtgagcacacaaattgatgagacttccaccagctcaaaccagaatcaaaccaaagattgcgagtctagtcaacatgagaatagcaatttagatgaacagaatgattctcttgacaatacagaagttacctcatccaaacttagtaaattaactggttgtactgaaatagataataacgaaagtagt

SEQ ID NO: 13378 - DNA, 503 bp, Diabrotica virgifera
ctgtgcagtagaaaaagtaaggtgttagagagcttaaattagtatttagcatttttgaaaaagtaaattttccagtaagtggtttcttcttgtcttcgaaccaaaggtagcaatttctgggcacctttttagcatctagaggaagagcaatagctttaacttcaatctttccagttaaaaacgcagaataaacatagccattatctatttcttgccacattggctgcggcccccaatcatactgctttaatgtatagtcacttgtctgcaagtctgaaaagttgcaaggctggccaaaaaagttgaaaacttctaatacatagtgtaagcgattgtattcatgacgataaattaaaaataagattaaacttattgcggaaacaattattaataatagtcgatggtatttcttcatgttttctacttaattatatttacttcgttactatttataacactagtaacatattctaccattttaaatctaaaaagaagataaaaaa

SEQ ID NO: 13379 - DNA, 507 bp, Diabrotica virgifera
ggggacctgcgatatgttaaaatgctgcattctgtttatcgctcgcacccagctagttaattttattttaggttgttatcgccttaattaaaatagattggtggtgtttacaataactaattaacgctttaacgcttaaatcagataatacctattccggtagctcggtataagaacgaaaacggttttacaaggtactcattacatttttactccctatacaagacaagtgttaccaaacaagatgaaggttgctttcgttttagctttgctctgcgtgagcttggtgattggaaccgaaggggctaattcagattcactaccagaaaacctgagttgcgctgaatcacacaacatctgtagaccagtacgccaatgtccaagaaacttgaacattggtagaaaagaatgcccgtatggagaagtttgttgtgttttagtgtgacatttaaataattttaatcctgtaatattatattttctaaatataaaatttatttgactagt

SEQ ID NO: 13380 - DNA, 506 bp, Diabrotica virgifera
tttttgtgtttcagattggtttattttttgttataaaatgcatttatgttctattagcatcagcactttttatttagaataacaatatatttttatttagaaaaataatagcgttaataacttccactagctggacactttttcaattggatgcatttgtccattactgtgtcagtgtcaacttcgtcataaaaggaatcaacctcctctagatatgagtccaagcatagttgccttgtttcttcagttgcaaacactacttcacaaacaaaagtcttttgcgatgttgctgtttccttaggaatatcttctttcttgaaagcttccatgatattcccaatcataaaacaaactccacagactaagtcatctggttctggtgttggacttggtgctggagttggaagttttgctgataatataataccaaaacaagcgaagaatacaataacgaatactgatttcatcttgtgtaaaatattttatttacagctaatggcaaagag

SEQ ID NO: 13381 - DNA, 503 bp, Diabrotica virgifera
  SmartBlast Evalue=1E-36; Info=CG2022 n=10 Tax=Drosophila RepID= Q9VN75_DROME
tttaaagatcaatgcataacatctgctaaaaaataaaaggtattctacaatgactgtattttctaggtttgtagcctttacaaacaaacaccctgtgataagaggaatgctttcctatggaactatctggcctacatcttgtattattcagcagacgatagccggaaaaacttgggaaaactatgactggttacatgctttaagattcagtatatatggtggtttgtttactgctcctactctttatggatggataaggatatctacaatagtgtggccaaagagcactcttaaatcgtctattactaaggctgttacagaacaatttacctatggcccactagccctaatatgtttcttctttggtatgagtttactggaggggaagagcattgaagatgccaaacagcaggttaaggataaattttttccaacatggaaggttggtgtttgtgtttggccagtttgcaaacagtgaacttttgctacatccctgagaaaaa

SEQ ID NO: 13382 - DNA, 501 bp, Diabrotica virgifera
tatactggaaaaaacagaaatattgattttttgtcacttggtccgttatatattatatccactcttcatatggctgaatgatcagaaaaaaattacagatgttttaagtagtattaaatataaagatattaaacaaatgagttctacacaattgttttatgttttaaatacagtttattttatctttatatacttctataaattaacacagcaatataaaatccataatataataatacttaacaagttgtgcacaaatctgatcaacatttttcttcatcatgtatattaagtgtttttcaaactatttcggtatcttgaagtagagctacatatagaagggaaattatttatgtttaggatggattaatttttttatgtaaagtttttagtacttcgatatgtttagctgttactgaactttaagtgtatttactcaattttgttttaaatatatgacttaaaataattttcctagggtagtttaactttgactggtgg

SEQ ID NO: 13383 - DNA, 492 bp, Diabrotica virgifera
aatgaagaatccgtacaagagcctgaggtagacgacgaaccaccacctgacctccccagcctccaatgggatatttaccttcacaaccacccacgagcttttacgccttgagggcacaaaagtatgttgatgataacattcccactgtacctagaaggagaagacatgctaaatcgaaacagttggcgaggtctagctccgaggaatcctcagaggtgtctcatgtagttcgaagacaccctcgaagggctagtgatccttcgatagctcaactctctggacaactggcgagagcctgcgcagaagctaacaatcaacttaaaagactgataaattacattttaaacaacgttttacataatgaagacgggaaagacttaaacgttatgatcattataattttagtactaattgcagggctgttgttgttggggtatggagatgaaaggactgtcgtacacttgcatcattgggaatactttaatcccccta

SEQ ID NO: 13384 - DNA, 506 bp, Diabrotica virgifera
  SmartBlast Evalue=6E-30; Info=Ribosomal protein S33 n=1 Tax= Bombyx mori RepID=Q2F5Y5_BOMMO
gggaaattataaagatctaaatattggaggaataaagtgtaaatgtcttgctagagcgatattctaaaagatgagtaaatatgcaaaatatacagatttaataaaacaaactacggagtatgctcgacggatgaacaggctaagtaatagaatatttggagaagttgttcgccccacaaatcccaagtctatgaaagtcgttaagttatttgctgcagagccagttcatttacaaagagaagtatatgcttactacccaagacatatagaaaccgggaagctaatgatgaagttacgacattatggtttatacagagacgaacatgcagattttcaagatgaaatggatagaatgagggctctaagaggtaaaccaaaacacatcaggaaatcaaaggccgaaagagaaaaagaggcagcagacaagaaagaatgaaagctctaatttagttgtaaatgtatagagtgtaaatatagtttttaatatagaataatttgttaaattt

SEQ ID NO: 13385 - DNA, 506 bp, Diabrotica virgifera
  SmartBlast Evalue=1E-16; Info=Werner Syndrome-like exonuclease n=6 Tax=melanogaster subgroup RepID=WRNXO_DROME
cgcgaaagcactaaacaaaccaggcgacttgtttttattaaaaacgaaaatagtttttatctgggtttttaatatattctaaggtttttaataatcattctttggtcgaaatgaatttacgtcgcagtcgcagacggtcaccagaagctgaagagaaggttgaagcaaaaataatgaagctagaaatgactttacgtcccagaccatcaccagaagagaaggcagaagcaaaaagaatcgccgaatacagagccaacaatccatttatagagttcaaaggaaaaattacgtatcataccgaactaatagacatagctttagtgagtgataatttattagaaagagcaaaagttgtatccgatctgttaatcatcggctttgatatggagtggccgtttaatttccaaactggtcccggtaaaactgcaaccatacagattagctatgacgaagagcattgttacatcttccacgtaagtaagattagaaacctacccacgcagcct

SEQ ID NO: 13386 - DNA, 504 bp, Diabrotica virgifera
aaatttgtcattaagattcaatttaatagtactttaacgacttattaatcacctcataattttctcggattatgggaaatcccttcaatcagattattttaatcttttctgtagaattttgagctagtaatttaaaaaacagtaagtataccgataatgctaattacaagcacaaacttaaaatgaattagcgaaaatatacaaaaaacttgtgttaaacctcaaaactataaggcgcttaggtgatgcaggactttttaacaccactgtacttatatattacaaaacttctatcaagtggggtggcttcttgtccaatcatgctccttgactactaaattgacttacgattctcctccattcatccatatttgttgctctttcttctcaaccatcaattttctcttttccatctgtgagtcgtcctttccttctcttcgtgattgggtcacgttttagaatcatctttggcatcctcttcctttcaattctcatcacacgtcc

SEQ ID NO: 13387 - DNA, 505 bp, Diabrotica virgifera
accttctcccttctggccattcccaaaacacattgtttataaagaacatgccctaggtatgaaagttttcttactttaattagttttcagtaacttacgaactgcatttaaagctttgttggtctgcctcgctatccagggtaatcgaagcatttttctttgcaaccacatctcaagtgcctctaggcgattgatcgtgtcatgcaatatgagctaatttgcatgtgtcgagctttcgatgccacctttggaatcatcttcaggacctgttcttgttacaaacagcttcgaagttgcctaatttttttttcacctttatactgtgttattttactcgtatttgttattatcgttaagatttcgtttttattgtgtttttacttaagcacagtataaaaatgcataaactttcaactctccttgcgtatagaatatttgtacgcgataattggaataacttttaagttctggctccgtttccttgttctcttttctctcttatctg

SEQ ID NO: 13388 - DNA, 495 bp, Diabrotica virgifera
  SmartBlast Evalue=6E-14; Info=Transposase n=1 Tax=Salmo salar RepID=A8C5I4_SALSA
atgcagggcaatccaaggctgcgtacctcaagaatcgtgcaaaattacattccatcgggtcatggaatggtccggcgtatagtccagacctcaatcccatagaacaattatgggatgagctaaaacaaagaattcgagttagacgtcacaccccaaactcgatcccagagcttattgacgcagtagaagaagagtggctcaacatcccacaagaaacaacagcaaacttgattagatctacgcctaatcatatgagagaagttattaatgcaggacgaggttatatccattattaaaacattaattgttaaatttttaattgtcaaaataccttagcaataaaaaaagtgaatttgcttgatgcattaattttacaatgttaaacataagaagtcgaaataaattttcatgaatgtatatactcatattaaattatctttcaaacaatatatgtgtacggacaaaaaatcctcacaaattatttctggacaaaaa

SEQ ID NO: 13389 - DNA, 504 bp, Diabrotica virgifera
gcgcgcaaagtatagaaacaaagatatttgtgataccccggattatacagtcgaactcgcttgttagaataccggttattggaatattctggtttaaggaattgaaatttgaggtcccgattcctctttactaaccataaatgatcggttattagaatatcccggttataggaatacttttgctaggcacgaaggctattctaataagcgggttcgactgtagtaacaaaatgttggttatggacattgtcggatccttactcatccgaggtattgcggtagctcggatataataaacgaatctttgtaaaagacaatgaagcagactttacttagttacaaggcaattactaaaaacaacactaacatacagaatctacaaaaaaaccaattgactgcagtacaccaaacaaaatactgaaaaatagcaacaaaacaaaaaggaaaatagtactaaacaataataagtactatactaaatttacagtcaagatgcagtagaaa

SEQ ID NO: 13390 - DNA, 504 bp, Diabrotica virgifera
gattatctgcgttttgaatgtaatatagtattcccacgaatcaagcaaataccgaaatataactgtagtacaagtgatatctaatttatttgttctaaatcaactgtagttacagagatcaaagatatttgcagctgctacttatcgcaagcttttgatctcaggctataaaatcagtcaaacaaataaaagtccatcaacaggaaacatattttccggggggtcgattatcgtgacgttcgtgatacaaaaattcgtaattttttttagttaaaacagagccaacttcattttatgtctttattgtctattggtgtcagttatatataaactttgctataaatgctacgtatgtaagcaggtttttcctattggaagatagttttaataaggatttaatgaattaaacaggttcccatgacatctcgtaacgcgacagttcgtaaccagacaaatggtaatgaacagttcgtaacgacgtcagttcgtaacagcgacacttcg

SEQ ID NO: 13391 - DNA, 506 bp, Diabrotica virgifera
  SmartBlast Evalue=5E-21; Info="Mitochondrial ribosomal protein, L36, putative n=2 Tax=Aedes aegypti RepID=Q16VB4_AEDAE"
aatcagttatgaattcaaactaattttataacaatttgaacactaaatagaaataaaatgtttccgattttggtaaactctgttattacgctttctaaaaggataccctccttcacaaaagcctccttttctcagcttagtacaccaattgcatcaagtataatacaaagtacatttttaaaaccagtatctttaaatgtagttccttcgtgtggctttaaaatagttggaagagtgaaaagaaggtgcaaagattgtttcatggtcatgagggaacaaagaatgtacaacctttgtaaaacacatccgagacacaaacagatgtcgatggccaaagatcccaagaatacatggattcttacccatgcaacacagtccaaagttagaccatggtaaaataattaagtgtaagaagtgttagtgatatattttaatttaaacagaatattataagtacctttgtattgtatgtatcttctaatgagaataacaggctttaagtcccc

SEQ ID NO: 13392 - DNA, 493 bp, Diabrotica virgifera
actccccttgcttgtgtacaagaattcatctgtactcattagatatcttttaaaaacactttttaattatctacgctaatttctttcggttatttaaatgtcatcataaacaattccaaccttctttcgttacataaacattattgacctagatcgtgaggtgtaagtatacatacagccactataaacacttttcagggtcgacgctgactttgcacttttaaatatatttatacaaccaaaacataataagggaatcctcattacacattccacattcgtcattctattttattagatgtaagattattcacattaaaagatagtgtcatctacactccgcgagacgagttacgtaggttgctaccagcttatactcatgcgagtataataaaacaacttaagcagtgatatgactattaatcattccacccctcggataagggttaaccacccttatcgggagaagatggtcctagtaaccctggactat

SEQ ID NO: 13393 - DNA, 505 bp, Diabrotica virgifera
  SmartBlast Evalue=5E-33; Info=Alpha-amylase n=1 Tax=Aedes aegypti RepID=Q16SN7_AEDAE
gatctttcgcattgcactcagctttctttgagctgacgggcaaccatgtcttttttccatcggtaaatcctgcaaactcactgctgtcccattggaaaggcgttctttcgaaatctctggagattttataataatctgtacagttttcggcgtgatctagaccttgtgtttcgcagtctacttctccgttttccatgccgatttcctctccgttgtaagtaacttggattcctggcaggaaagcagataacatatttaaacagtccactcgttcttttccggctttggtagcaattctgtggttatcatggtttcccaacacccaattggacgtgtatatttttggaagcttatccacccaagcgtgtatcaatgaggcaacatcagcagcagtggaagtcgtttccaatccaagcaatacaaaattaaatgagaaatgtgctcccaattttgatccgtcggctgtaccataatatggtactacatatttaagatcaacagctgc

SEQ ID NO: 13394 - DNA, 499 bp, Diabrotica virgifera
  SmartBlast Evalue=6E-49; Info="Protein-L-isoaspartate O- methyltransferase, putative n=1 Tax=Pediculus humanus corporis RepID=E0VP09_PEDHC"
tttgtaaatccaaaaatattcaaaattttgagaatgataataaacatttactaatcctttagtatttggtaaatttcagtgttgctattgacgatggcttggaggtctcatggaaagtccaatctggaattagtcagaaatttaagagcaaatggtattataaaatcagatgctgttgaaaacgcgatgctagcagttgacagagggaactactcaaaaacaagtccgtatatggatgccccacaaggtataggatatggagttacaatcagtgccccacacatgcatgcccatgccttggaattattaaaagacaatttagtcaatggtacgagagctttggatgttggttcaggcagtgggtaccttactgcttgtatggccattatgatgggggagaaagggattgctgttggtatagatcatttaactgaattggtggacatgtcaaggataacatccaggcagcgaatacagatttgttggaatcaaacagagt

SEQ ID NO: 13395 - DNA, 504 bp, Diabrotica virgifera
  SmartBlast Evalue=7E-79; Info=Cytoplasmic phosphatidylinositol transfer protein 1 n=1 Tax=Harpegnathos saltator RepID=E2BF69_ 9HYME
gaattcatctctcaagccgtcttccatattgggttcagtctgtcattccaaagatattttatgtaacagagaagtcatggaacttttatccatttactataactgaatatacatgttcctttattcccagatttaacatatcaattgaaaccaaatatgagaacaacaatgggtgtacagagaattgtctcggcctatctccggaaaaattagccgaaagaacagtcgaccatatcgatattgcatatgatgaagtatcagcaaaacactataaagaagaagaagatcctcgattttttcaatcccgaaaaacacacagagggcccttggtcgatggttggaggagtaactgccaaccaataatgtgttcatataaattggtacatgcctcatttgaagttttcggcctacagactaaagtagaagagtttatacattcgtgtataagagaagttcttctcttgggccatagacaggcatttacatggattgacgaatgggtag

SEQ ID NO: 13396 - DNA, 505 bp, Diabrotica virgifera
  SmartBlast Evalue=1E-31; Info=Importin-11 n=1 Tax=Camponotus floridanus RepID=E2AYU4_9HYME
tattgccgaggatattcgaaaaaatctatggtggggaaagctacccaatgctgttgtcgatgtacctttgtgtcatgtcaagggtactgctgtcatcacacgaggtttttactagagtactgagtaagttagcacaaagtagtactgagactgagcaggttataatgagcaaattgttagacatgtggctggataaaatgagacatgtttcccagccagatcatagaaaattactgggtttagcacttactaacttattaacgacacaaagtacgccagtttttgaacgatttggattagttatgttaaatatattagaagctttaaacgacatcaccagaacggaagataatggagcaatagtggactcactagttttaacggaaggccagagtccgagtgactttgaagacgaagagtgctactacgaaacggatcataatcaaagaaggaaacagctcattttgtcagatcctgtacacacgatcgtcttgaaggactatct

SEQ ID NO: 13397 - DNA, 503 bp, Diabrotica virgifera
accgctgaatgatccagacccagaatgacctcctttaattgactgattaattagttctttcaggagaggaaaaccattttcaaaaccggcaccactaccagatgaggagtaggaaccagcactaggccctccttttacacccccaccataagatccgctaccagagccgccgaacgaggaactgcttgagaaagaaccactatatgagccacttccagaagattggaagccgcaggaccctgttttgcaaccaccttttactcctccaaagcttccagatccagaatagcttccaaactgacccccgataaaaccttgtccacaatttcctgtactgcaaccaccaccatgtacgttcccttgcacgagtccattagaagaactggaataacttccttgagatccgccattagcaccacattttccagtggaacagccggaaccaggaacgtttctttcagggtaatcaggatatgcatttccctgattgcttccttcaaaat

SEQ ID NO: 13398 - DNA, 500 bp, Diabrotica virgifera
ggtgtcggaggatggcgggagactcgaaattgaatcaaggagcaaagcgattattttcttttttgtcatatattttagttgcgaatttgtctatataaacaagaagttctaatgtttatctcttactctatgtctttattttgaaatatactacagtatataaatgaatttaaaccattaaaacctttgtttttgtcgaaaacctttcctgaaaaggatagaagagtaaaaaatatatttctcttaaaagatatttgcaagaaaattgatattccctaatagtaccacttttacaacatactctttatactaggtacagtaatatggttttcctacaaatgtagcacttgttgttaaatttcattatgtatttcattatgcagtcaacgttacgctagtagacacacgggtagacaaggcatactgagcaaaaaaagcgtaacgcgaaagtagttgatcggtggtctatttaaccaagcgatcccgcgcatgtgacagac

SEQ ID NO: 13399 - DNA, 503 bp, Diabrotica virgifera
  SmartBlast Evalue=2E-17; Info=Protein zer-1-like protein n=1 Tax=Harpegnathos saltator RepID=E2BG81_9HYME
tagatttatcattatgtcctaatttaacttcaaaatgtatccattatattagttactacagctctaatttacagtcgttaagtataggcgaggaaacagatatttttccagtcaggcaatttggaatggtgtttggaatgtcacctctagatcaggagttttatgaaaaaggctacattttcttggcacctaatcttagacggctgacattaaaaggtttacatctactaaatccagatttttacaaaattttattacagcccctatcttctctaacgcatttagatttgtcaaattgttcagatttatatgattttttatatacacaacatcttgtaaatttaacctctctaatattatataatgttgaaggtattcaatccaaaatacctgctatttgtaaattgacaaatttaaggcatttagatatctctacatcccagtcaagaagtgggcaagggaagtataagaaaggaaatacgattttgaaagtattgtagata

SEQ ID NO: 13400 - DNA, 504 bp, Diabrotica virgifera
tcccatgtttatatcgaagactgtctgtttttttattctcaatgtgtttaaatttctcatttattgaaatcagattttgattttccttctctaaataatgtttggttcttcctcgttttctgtccatttttagtaaacaaaacaacatcattacactatttagaacttattcgacgaataactaactgtagcgtacaaatagttattgaaacgcaataaaatataatctattcactgacttattgttgttggtgaaaccggccgatagtcttttatatacctaaaaatgatatttttatgattgtcaattagaaagaatgacttccagactatttttgtacctgaaacaccagttttaattgttttatttcttcgctgggtattattttaaacagacaatttttattgtggttttgcactaatttgtgacatcacagtattttttatttcgttccttttcttcgattaacataataattttgtgggtagtaggtgcctgagata

SEQ ID NO: 13401 - DNA, 505 bp, Diabrotica virgifera
atccggaactgttctctcggagttatttatgagtttacggtttatctgatgaatagatatgtaggtactttatattttggtaaaaatgaaatgggtaatttttgtcttttcttagtacttattctgtttccaatttccaatattgcagagcgtgttttgttaagttgtggtatttagactttgcggtgctcattttaataattaaatatcagataagcagtaatttgtttttaatttttaataatgaatttctataatttatatttttgttgggaataagcactgaagcaaataagatgagtttattttgaagtaaaataaataaataaataataaaacgttaaaataaacttattttacagtaaagttgtagctttgtttgtagtattttagtattttataactaaagtattatgaaggttttgaactgcatgctcataaatcatgtatgttttctgaagtccataacatgcagtatcgttttcagcagtaggtattcattaat

SEQ ID NO: 13402 - DNA, 505 bp, Diabrotica virgifera
  SmartBlast Evalue=6E-25; Info=Sugar transporter n=1 Tax=Culex quinquefasciatus RepID=B0XK84_CULQU
tgaagaccagcatgcaccaattcctagaagagctctaccacaaataataggtgtcatgctcttagccatcgcaattaaaacccaaccagcaatggtgggtatcagaccaagtttgactgtattaagtctcccgaatcgatccattaagaaaccgcttgttgtagatcccaatggcattatcatagtaaatacactggccatgaaggtattttgggccttggtagatactatttcagtatctggaacctcaatttgggaaattaaaactgctgagaatgacataacgactccattttgaatatggtatgccgctacaacaagcgacgcgtagatctgtggtaataagcatctaaaactgtcactttcatattgaccaatggacttcttttttgttataaatacttcttcttctttttcttcttcttcctcttgaagctgttcctgaatgtacgttaagcttcctatgctggctccaatatccatagttacgagtaggtaggtatat

SEQ ID NO: 13403 - DNA, 504 bp, Diabrotica virgifera
cgaagccggtagaggtgcttgctgcactctctgattgaactagaatatgatgcggctgtattttcgtgttgcaacgaaattgaaaatggttattcatttttaatttggatttttttttgttcgactgtaatgtattaagatgaaaacaagaaagcctaattgaaaatgcttcgaaatgtactgtcaatattcagtcggtcttccacgttcacgtatttatgaaccttgttcaagttattagagatttagataagataactgagttgaagctacttttatgccttgaataaagatataaacgatctttcaacgggtagctgtcttggataccagactcagtaaaatgcaagttgaattcaaataaaaatgtattctgttcttctgtattgattacatgtgaacaataaatacagttaattgaagtgacaagacgatgcgtagtacatatacgcaaatccaggcgaacgaatgattcgatgctggtataggattagagatgggacg

SEQ ID NO: 13404 - DNA, 500 bp, Diabrotica virgifera
gccggttatcagagcacccatcactgtatatttcttcttactgataattcgaatatggaacaatgttctttatttgttctattagtatgttacctttttatgtcatagtggaataattccattacataatcgcaagtttttgtcgaggaataatgacatggttttatatggcataaatatttactgactggttttcttaatatgaattaagtccgagagttgcattccacaagttacagttcacttaagtttaatctttttaatgctgttataaatcaaatataaggtccacctgcatgcgttgacttttcaccatttctagcagatggcaggtatctttttttaggttagtaatgaaggtgtttttttttcggatgtttcgggtaccgccaactagcagaatttgataaggcgcagaagtcgatccactgattgagggctttcattgaatacataccttgagcttaaggaacgtctatttattttactattaagatagt

SEQ ID NO: 13405 - DNA, 505 bp, Diabrotica virgifera
  SmartBlast Evalue=4E-24; Info=CG6878 n=12 Tax=Drosophila RepID= Q9VUM2_DROME
ctttaatttctttaataatcacatgtacaaataaaacactttcgaatataaaaaataatcatttttaaatttctttagattccccttcaatttatttgtaaaaaatgccagtaccgggtggtgtttatcaacaacaaggacaaggaccatcttgcatggatagaatgaaaatgggattctttctaggattttgtgttggaatggctagtggagcattgtttggtggattctcggctctcaggggcggcattcgaggaagagaacttgtgaatagtgtaggcaaagttatgcttcaaggaggtggctcatttggaacattcctcgcaattggatctggcttaaggtgttgaagacattttttataaatttgcactgttttacataaaatgtcatcatatttagtgttagtatgaatgaattgtgattatttactatttatacaataaatttttagaatttatttccgactgttaggtagaagagtgtattaaatttttttcaagtc

SEQ ID NO: 13406 - DNA, 501 bp, Diabrotica virgifera
ttggttgaccatttaagtaagttataagaattttataagcgaattactaaggttgtaagtgccaccaaagtggttaagaaacattgaataacaacaggcgtgttttgcccccttattttgtatttattgctgtattgcagagggggtaataccttaagacatttttgaccagtcgtatatcatacaaaattaatagaaattaatagaaaaacgtattaatagaaatcttccaatattatttctacgcatatattataaaatatgtctagtggctgtaattcccgtgtattcggcaaatgattctaaaaaggaacatacctaccgcctaagtatttcgtgttggtatcatgtgacgtcacgagctatgacgcggatgacgtgcaacggtgggtatattggacggactgtagttacattcaaattcaatagggaaatcatcctagatgaatggtgtatgtatgtatgtatgtatgtatgtatgtatgtatgtatgtatgtatg

SEQ ID NO: 13407 - DNA, 505 bp, Diabrotica virgifera
  SmartBlast Evalue=5E-10; Info=Golgin-45 n=1 Tax=Harpegnathos saltator RepID=E2BTC7_9HYME
catggtcaatttcgtctacttctttagtggcattaatcttatccatctcaagttttcgggtttctgacaactgggttacaaggttttgcaaatccatgtcattcctagctactcttttagggcttctattaactactttcttactacataacaacggttctacggcagccttatatggttcacatggtacgaattttggttccttctgtttctggacaaaataattgggagcaactttgggagaaaatttatgttttggagtcaaatacacgactttactgcttggctccacaggccttaaagagtttaaaatctgtttgctgcgttttgcagcattcgtgggatttattatagactccagtgggtgagacatattaaaagttgagttatcaattccatcgccttgagttcttacgactttatccatattattacacgatttgattgagtgtattaaaactttgatatgattactttaataagcaattaaaatttattagttgcg

SEQ ID NO: 13408 - DNA, 504 bp, Diabrotica virgifera
  SmartBlast Evalue=9E-21; Info=Vitellogenin 1 (Fragment) n=1 Tax= Nicrophorus orbicollis RepID=Q5IH21_NICOR
atgcccgcaaccccaaaaagttcgtacaaagctacgaagttgaaggacaagaaggacaacaagtgagaaacaattctccaaaaaatccgatgaatgtgtagatagagatatgccactctacattaatgtaattagacaggcagataccaaggacaggaaagacgaagaagactcaacggaaaacgactgcacccaacatcgaaccagatatgtagaacaagatggagatatttgcttcactaccaaagttgtacccacttgcaagagccgctgtcaagctcaaggttacattaccaagaaagtacctgctcattgtatcaaaaatacccttgtatccaaattgtggaagaagcaaatcgataatggaggaagccctgacttcagtcacaaacaagaagacaagaaggttcaattggaaattccccaatcttgttctacataaaaatatgtttttagataatatatgcgacaaacatgtaaaatagaataaataaacttgcaatt

SEQ ID NO: 13409 - DNA, 505 bp, Diabrotica virgifera
  SmartBlast Evalue=8E-33; Info=Hemolymph proteinase 6 n=1 Tax= Manduca sexta RepID=Q5MPC8_MANSE
gggcaccaccactttacaaactgaaaccttagactcagctgattacaatgtagttcgaagaattccttacccgacttacgtcaacggtcgccagtacgatgacatagctctacttcagttagacagaccagtgcaatttacagaatatatacaacctatatgtctgtttgcttccaccgacttatctaacgtgcaacttactgctactggttggggaaaaactagcaattacggcagtattgccaaagacttgcaaaaagtcgatctggattatgtgcccaatgacgtttgtcaaaaagcgtacagtataattcctaaagatgagctgccatatggaatcatagatacgtcacagttgtgtggtggtacacaagatggatccaaagatacttgtcagggggactctggcggacctcttcaagtgcaacaagatggaagactgtacatagtgggaataacgtcattcggaattggatgcgggaagccaggtataccgggagtgtac

SEQ ID NO: 13410 - DNA, 504 bp, Diabrotica virgifera
  SmartBlast Evalue=2E-20; Info="Gpi inositol deacylase pgap1, putative n=1 Tax=Pediculus humanus corporis RepID=E0VHG5_PEDHC"
ggctcaacagtacgtaaacacaaaatacgtagtatggcttggcgccttcttgaatagcagtaaatataattgagcaatatccgtcctccaaagttattagttgatgtcttaacgacatcaaagctattacagccagattagctaccaacaatggtgtgtacgtcctggctagttgcccgagaacaccaaacaaagaagactgcacacttattttatatctacaagatggatctaaaattatttttaattttgcagttgcattattgagatcaaaaggcttagaactatacaacctaatattaaacggttttttcatgttattcgttataaacccatggtaattctcattactccatggcactgtcaatgtgacagaagcatgatgatcacttttcaagcactctatcggttctaaaaacaatctataatactgaataatattgttcagcgccggtagagccacttcataatacaaggcgttttcgggtgttctttctagtatgg

SEQ ID NO: 13411 - DNA, 505 bp, Diabrotica virgifera
  SmartBlast Evalue=1E-24; Info=Cytochrome b5-related protein n=6 Tax=melanogaster group RepID=CYB5R_DROME
gcatttccaggatattaccttagaagagtactactttctccattgtgcaactatgaaagtgttgctttcacggatctaacttatttaatactaccagcatttatggcgttgactggaggaggtaccataactcagacactgattatatatgctttaatcatggtgatgggttctttcgtatttacattaatcggactacatgcagcccatcatcatccagatgtttttcatgatggggacactccaagagctgtagagaactacgattggggcttaagtcaattggacgccgtcatggaaagaaaagaaatcaaaggttccgattttctagtcctggtatcgttcggagaccattgcatgcaccacatgtttcctactctagatcattcggtgttaaaacatctgtatccgactttcgaaaaggttctaaaacaattcaatgaaaacgtaaggattgtttctcaagcagatgccttttatggcggttttcagcagctgatgaaag

SEQ ID NO: 13412 - DNA, 502 bp, Diabrotica virgifera
tgaaatgacagcatttcttcaatacacattgtttatcactgaacatttaacagctatttaatagagtaaaagtagtagaataaaagtagacctaaatattgtatttctatgcgattaaaccacaatttattgtaatgagaattaaattttacttttgttttcacgttttaatttccaatatttaaatcgtttttacaatatttataaattaaaaaacatttaaaaaatatattgttcttaacgttttaacgactaatgctttctataggcttttaatgtttttaagtcacttttgatattgttcgaatgttaaacaatcctgcaaaactggttgacatgttcaaaatattttgatgtttgttggttcgtgcaaaaaatgtatcttgacgaggaatctattgaaacacaaattaatattcaaagattaacattagttatcataagattcatattatgctaacacagcaaaacacctggacatgacccttgacgtgaggctcca

SEQ ID NO: 13413 - DNA, 503 bp, Diabrotica virgifera
atgatatataatgttcttagataaacatgtaaccgcggcatgtaatttttgttggtaacattgttcccatataagtaatacaacgatatttggtccaatgaagttcccataaatgcaaagtccgcatttaaaaatgggaaagaaacagttgtttcttaatgcgtttataatattaactacagtatgtgtaactaatactgaaacagccagtgacaaaatgatcttccatcatcaaaaaaacaaaccaatatctaaagtagaaccacttaatggaccttgctgtgttttgccgctatgtacacacacccagtgttaccaaacgattagctgtggagacctttgtgccaaaaaagaactattgacgcaaactcaagattacagtacttctggatataagataagaatagcttacaccaaaacagattgtcactttgaaaaatgccacactttccaacactcctgccatcattgtccagatcccaataaggataactttaatatac

SEQ ID NO: 13414 - DNA, 501 bp, Diabrotica virgifera
attttgggactgtgagggggccatttcgatatctgaatatttacctgatgtaaatattgattaaagacactaactccgttcttactgtcaaggaaattccatcccaaaacatcacagagcctccattaaacaatctcgtctcttatgttgcgttgtgcataccgctcacttggttgacagataactaagtgtcgactaaaactgttttcgttatgtgtctttgtttttaaaattttgataactgttgttgttttttattgttaatttggtattgtttcagttcaaacgcatgttacagaataaaaccatctattttctttgattttaaagatgtcaggtggattaaagagcaaaatgttttaaaatctgttacagctcatagaaacttttcattttttgcattatgttcaggatgatgtcaggaagaaggtctgccatagaaaaatgggtggaagtgcatagttgcattttaaatggcataaaatgcatccaaaagtgcac

SEQ ID NO: 13415 - DNA, 505 bp, Diabrotica virgifera
taatataataaatagacacagcacaattgtttacagtttaatgttggggctttcttaaaatcaagaacatcgatcatcgaacattatgtgcgatgaacgatcattgttttgttggaacgtattttgcttactgcgcaggagcgtgatcgttacatgacggtttttcgttgtgttggaacaaacccattgtcaaaattaagaagaataacatcaacaaagtatatgatctgaaactgtttacttgtcgcatgtccaagttaaacattatgtttatatgggattaaaacacaattagcaaaacgagctagcgtagtgagctggtaaaaaccaattgggctgagacgtattgagtcgaaggtagccgcagagcaattccgagttaaagaattgcttcgttggtaatcgcgtattgaacgattgctcatctccgatctttggtctagtcgttgtatgtgtgtgtagatattaatagcttgattccgaattgaggaattgctgtcattga

SEQ ID NO: 13416 - DNA, 501 bp, Diabrotica virgifera
  SmartBlast Evalue=2E-77; Info=Rhombotin n=1 Tax=Culex quinquefasciatus RepID=B0W573_CULQU
agaaagccaagtgtcaactacacgatcgtctatatccctgcctaccggtgttacccctgtgtccgtgtctagtgctcccaatacgttatctacgactggtatcaatgtacgcgagtgcgcggggtgcggaaaacgaattcacgatagattccttcttaaggcgttggaccttttttggcacgaagactgtctcaagtgcggttgctgtgattgccgtttaggcgaagtaggatctactctatataccaaagcaaatttaatactatgtaaaagagactaccttagattattcggtacaacaggatattgtgcagcgtgtaataaaattataccagcatttgaaatggtcatgagggcaaaaaataatgtgtatcatttagagtgcttcgcatgccagcagtgtaatcataggttttgcgtgggagatcgattttatttatgtgaaaataaaatactatgtgaatacgattacgaggaaagactagtttttgcaaatatggc

SEQ ID NO: 13417 - DNA, 505 bp, Diabrotica virgifera
gtttattaatcacttcattaataaaagtttcagagcttagaacaggcagattacctttaaaaccaaggaggcagctatttttatttacagttgcaaatttaggtcccaaaacaatttctgaatttttgttatatacaagtatatgtttaactagttccattgccttggaacagaagctaatcttaggttaccttgttgattgttaatcaacttgaaaaatattagatactcacagttttctttacctaaacacgggttttacacttagttatgaacgaaaatcggaccattatactctttttttgatgtgtatgagtaaaaatgttccattagggtaatccccttacattttgtaaaattaaacaaattaggtctgtcctctgtcaccactaatttaatacataacactgtttcacttcattaataaaaatagtaagtcatcgattagtaatagtgtaagttctaataataacatgatattttataaacataattaaacaaggtt

SEQ ID NO: 13418 - DNA, 503 bp, Diabrotica virgifera
aaaatattcagtattgtttttttataaaaacaataattatacctcaattatttttccatggagtgctttggtgacacttaaaatcgcggagtatcattagtttcttgtacttgcattttaaagctgtagtttatatctgctacctcttaaaaagtttgatggcaaatgtcgaattctgatcttttcaatttcatcttctatttccccatcttctagaacagtacttccagtttgggcttcattctgttcattagcaagaacttttaattcctttaaagcttgctcctctaaagccgattgatctttagaccaaacatttacatttgcctccagaagtatttcatgtaaatcatcttgattattcattgagaatattgttttgtgttatttttattccttctttgtcacctgtaaattaacacgtgctccttttgtgtgtattattttatgtttttggtttgctttattatttcttttgctttttgttatacatatacccgctt

SEQ ID NO: 13419 - DNA, 501 bp, Diabrotica virgifera
  SmartBlast Evalue=7E-10; Info="CG5953, isoform A n=1 Tax= Drosophila melanogaster RepID=Q9VJK4_DROME"
attgagacgtgaacgtgtttgttgtgttggttttggcgcgcccgagttgcattgcaatagtttgttgttaaataaatagtaatggattcttggtcagaagatcaagttctggaacttattgaagcttaccggagatggtccgtattgtgggattttcaagatccgctccattatgacaaatctattatatacagggcctggaaggaagtaggacgtgaacaaaatcccgaagtgaggggtgtggaagactgtaaaagaaaaataaagtcgttgttgtcttcttaccggcgagaaaaatacaaaatgagaaagagtaaaggttccaagtacgtcagtaagtggtacgcatacgaacctctcacgtttctagatgacagggtaatgccaaaagaaaccgcccaaggaggaaccggaagatatgatggaagatgtagacgtagatgacatcggagtagaggtcaaactttcggaactaagcccagatgagacatcagcaccatc

SEQ ID NO: 13420 - DNA, 502 bp, Diabrotica virgifera
  SmartBlast Evalue=1E-10; Info=Histone-lysine N- methyltransferase SETMAR (Fragment) n=2 Tax=Camponotus floridanus RepID=E1ZYL8_9HYME
gcatttataccgaaattcattcctttttattgatagtgtaccgtatgcctggggaatgcagaggagtagaatacaaggacccacataaagtctcatgttcgccgtgttggtgttggtgatgttatgtcgaatttgtttcttggtccaatgttggcatttggagatgagttcgatatatcattgtcaatatgaacacggcaaaattggcgctcaacgtggagagccaattcaatttgtcaattcattttttgtttacaaatcatttagtatcgacgtgtaacagtattttttacaatggaaacaaccaagtctcatgcagtgattcaatttatatttttggaaagtttaaaagcaaagaaaattaatgaacgaatgtttaaagtggctagggattcttggccttcaattaatacagcagaaagataagttgctgaatttaaacgtgtcgtataagccttgaagatgatctacgtcaaggacgtccaaaaacagcaacaacgcc

SEQ ID NO: 13421 - DNA, 503 bp, Diabrotica virgifera
  SmartBlast Evalue=8E-54; Info=Ankyrin repeat-rich membrane spanning protein n=1 Tax=Camponotus floridanus RepID=E2AU14_ 9HYME
gccctccgatattattctcactaaatagtcttctagtattgacttctacagccttggcaataacatgtggatctatggctaatatcacaatgaacggggtgttcgcgtcggaaaaaagcatatgtacagtatctaaaacaagcagcaccttatcttgctcacaactatcgagtccgtccactaccactacgagtctggtttgttgactgctcaaactgtctaaacattttaccatgtctttcattaaattaacctcttgtctaagtgtttgcaaaaatccctcagacttcaatgtttccaacttagatatagacctttggaggtgtctcctttgggaaaaaagtaaagctttcaacatcctactccaggtatacatattggccaggcatgcgacgccgagcagcaaggcggcaacaaccagaatcatttttagcgtaaattcatttatgtcagtaacggtagttgtcgcactaacatggataaggtatatagtcaaggcacac

SEQ ID NO: 13422 - DNA, 503 bp, Diabrotica virgifera
  SmartBlast Evalue=1E-42; Info=Eaf6 n=1 Tax=Culex quinquefasciatus RepID=B0X0M5_CULQU
catctaattcattattgtttatgattgttattctagatttagttgctacttttgctaataaacagtacagtttttgaatatgtcaaataaaatatctattgatgctcgacaagaattagccgaattagtaaaacggaaagcagaaattggggaaaccttggcaaatttggaaaagcaaatatatgcttttgagggatcctatctagaagatactcaactgtatggtaatattatacgaggttgggatagatacctctcaagcaataaaacaactaattcaaaagctgataaaagaaatagaaaatttaaagaagctgaaaggttattttccaaatcatccatcacttctatggctgctgtaagtggaatagtggaccaaaatacagataaaagtaagaattcatacgatgtagaaagtaacaatccttatgcatacagtagtaattaatgttaagtaatagcaattattgtagtagttacatttttttttaattttaagttac

SEQ ID NO: 13423 - DNA, 493 bp, Diabrotica virgifera
  SmartBlast Evalue=4E-12; Info=Endonuclease-reverse transcriptase n=1 Tax=Bombyx mori RepID=D7F170_BOMMO
cccgccaaagcacaagcagaattgcttataaaaagatagaaaaagaagataattaattaaagaaatttatactgtcttccccgcattacatgtctaagataatatgctattttcctgaatttgacgctatcaatcagctgacgaatagcttctactctgttaagaacatttttcacttgtccgtttaactatccacggtatttttaatgttcatccatgcaaccacatttgaaaagtcgctaatcgggtaatagtagatattttcaaggtccacgattgataagatcaaatatttacaataagacaaatccttgaaaagtattgggaatataatcaggacgttcatcagatctttatagacttcaaacaggcttatgattcaattaatcgtgcaacattactgaaggcaatgatcgagctcggcgtacccaagaaactagctacggtaacacaaatgtgtgtaagtaactcctttgcacaagttagaataggg

SEQ ID NO: 13424 - DNA, 495 bp, Diabrotica virgifera
tatttttaaaaacgctggtttgaacgtttggatatttattgattaaaaatcgatatttactataaaatagcattggacgaggtagactatacacttacactatacgtattaccgttttttggacagtgaagtttttttgagttcagtaggtacacacatgcttctttcattgttaatttatttttatcgttctaagccttttatcaattccccaccttccgagaaatcaatcggtaccttgtagcaagtaagaagctaaaattcttttgattttttttaaaaagggttagagcaataaattgcattattcacctttctactgactgcaccaatgattaatagaaaccctgtatcaactggtcttaattactaaatacatcatttttgcataatggaacgttgtagagtaggtatatgcagtatcagtagtcagcgagacctaagaatacgttaatactactgagttagtaattaccaatcatctataataaaata

SEQ ID NO: 13425 - DNA, 501 bp, Diabrotica virgifera
  SmartBlast Evalue=8E-12; Info=Reverse transcriptase (Protease) (Fragment) n=1 Tax=Anopheles merus RepID=Q9U997_ANOME
tactaataggtctatagttggacacaagtactttgtcacctgttttgtgtaagggcaataggaaactggtcttccaaacatttggaagcttccactagctaaagacttgttaaagatgagaaataatggccgagccaaattaaatgcacagtacttgagcaagcttgatgggatgccatcaggtcccgggcctttagagggattgaggttacacaatttagagtaaatgtcagagatggatagtttacatgatgataggtttaagggtgaagaagtgatgtattcggggaaatcaacaacaacagaggagtaaactgatgaaaagaaatcagcaaataaattcgcaatatctttaccagatgaactagttttaccgttgtgagataactcagaaggaatttcatttgattttcttttgttattgataaaagaccaaaacttattcagaccgccgggaagagagtttcagtagacaatgtaaagtttaaatagtcacgcttg

SEQ ID NO: 13426 - DNA, 504 bp, Diabrotica virgifera
tctgtatctgatacatctgtactaacaggaactacgtaactcgttttttacataacacgtaagaggaggaatatccatatttctgaaaagaaaattgatgtttttaccattaccactccgcctcgacgttgattctaagcaacatactttttaggtgcaatttttgctaagacttctcaaaatagaaagtaactgtatcttctagattgtaaatagacctttccgaaatctattcgtaaaatattacagcaaaatacatgtttttacttaccgatttgtttatatttaactatcaacgtcggcgttacaacattgctgttgaaatttcacactcgaaattatgtttactaagttaaaatattttaacaggtggcgcacatggcgaaatcatagacgaacggttgtcgcttgcataccacactgtcctactgtgataaaattcgacgtatatggaaatttaacagtttgaagtgaacgttgcttgagagcaacaagcgcgcttaa

SEQ ID NO: 13427 - DNA, 502 bp, Diabrotica virgifera
ttgaaataaaaaaatcgttaaatatagaaataaagtcctaataaatacaattctgctgatctcctgccgatcagtgattgatattacaaatggtatctttttttataatgcggtatctacagttacacttaaactagaccatgtcctttttttaataaccaaaagtagctttttggcttgtattacattaatgatatgatcctgccacaaaacaagaaatttctatctgtgatgtagcccaaatcaggattgggaccactcggaagagatatcattccttactgttggattgtacagaagcatggaatcttacggagtctaatattctttagcaatgttgtatgtctatcatgtggcaaatataatggtacagtttatgcaaaaagaccaggaaatttttaacaagatactccattaaacttgtatattagagccagattatggaaacaaaatgaagtcttctccgttctccaactaataaaaaaaatagaattaaatgggg

SEQ ID NO: 13428 - DNA, 504 bp, Diabrotica virgifera
  SmartBlast Evalue=1E-73; Info=Retinoblastoma-binding protein 5 n=3 Tax=Aculeata RepID=E2BCB0_9HYME
caattctccttttgtaccgtgaaggatctttaccaaattaccaatggatttttcccaaacataaagggcgtgctgtctattcgaaccagcacaaatatattcaccgtctccagagaaacaacattttttccacatggttttgtttaccaagtcctgcaatttttgaatgggttctatttcttttccatatgtcaacacttctttgctatcatatactcttataaccctatctgcagcatttaccagaaaacaatcccctcttcgtgcaaattcaatactcctcacagcagttgtgctagaagatccttgcattattctaaaactagcttttatttctagtgtattagaattcaacaccaatactttcccttttgcattaccggtatagatatactgccctcttctatcaaatgagccaactatgttcaagtcgccatcttcatcaattggtagtaccttatgcactccattaatgtccacaatcactgctggatgtttcatggg

SEQ ID NO: 13429 - DNA, 500 bp, Diabrotica virgifera
  SmartBlast Evalue=3E-28; Info=Nuclear pore complex protein Nup93 n=2 Tax=Culicini RepID=B0WEZ2_CULQU
cacatatctgtaactttttgatctttaaaatcattcacaattgaacagaatatattaacgagatttggtttctgagcacctctgctaacggctttgttatattccattatcttagatacatatatagtctccaaaggaccaagattacctgcggcataagtaggacgatcgagatttatagttaaatgtttatttgtacctacttcaatggctgccccggaagacgtactcatagcatttagaatcttccttttttcttgtttccactcagactgttggtgttcccatgacatgtcataggtaaacgataacatcttattataacctgaatcaaaaattgagagtatctgggttctggtttcgttttctaaagtattgtagatatctaaatctgtaactgggaggattggttcaaatgttctcttagtactgagtgattcgagcttctgggcaattttgggaagatccactcctttggcacctaacagaagattggcttg

SEQ ID NO: 13430 - DNA, 500 bp, Diabrotica virgifera
  SmartBlast Evalue=8E-62; Info=Dumpy n=2 Tax=melanogaster group RepID=Q8IQ18_DROME
gacaacccatgcgtaccatcaccatgtggacccaacgctcaatgccgtctttcagccggctacggagtatgcgaatgcctgccggagtaccaaggaaatccctacgagggctgcagaccagaatgtatatcgaattctgagtgtccgatgaacagagcctgtatcgggaacaagtgtagggatccatgtcctggcacttgcggcatttctgctgaatgcgacaccgtcaatcatgttccaatttgttcttgtcccaatggatatactggggacgcctttagacagtgcatacgggaaatagaacaaccaccacgcaacccatgcaatccatcaccatgcggcatcaacaccatatgtcgcgaatcaggccaaaacgcaatttgtgaatgtctgcctgctttcttcggaacaccaactgccggaggttgtagacccgagtgtaccatcagcgcattgtgacagaaatagggcttgcgtcaaccagaaatgtatcgatccat

SEQ ID NO: 13431 - DNA, 500 bp, Diabrotica virgifera
acatccatcctaagtttaacaagacaattcaatcaagtgtcagatttctcaagaaatggtgtaatttagaattattctaccagggttgccaagcagattatattcaattatattataatatgtttattacctgatagtttttttaaaacaaattttgattacaattttatacatcgttactatattttttattctagttgtctctggttcagctcatatgacttttttttcgttttttatgatttagatatatgacatttggcaatcttacaaatacgtaatcccttaataacgtgaaccttatttctacctaaataaggggacaccttatccgctaataaggtaatacgttacttttcagttaatgcgcatgagcagaatagcgtataacgtttaacgttgctgaaataaggggcttaaaaactctctattaacttgaagtggttgtttgacttctaaagcacttggataataacggttaaaacattggtttgtagtaa

SEQ ID NO: 13432 - DNA, 504 bp, Diabrotica virgifera
acatgttagccatgcgtatgccaaattccatgtcaatccaaggggttctttaaaatttacagcaaaaaccgtgaaagaatgtactattagtgctggatttaaatcaattttaaataaggatgcacagccttgttttattccttttagtaattgtaagttgtatattcgtataaatgtccttagctgtttgaataaatatattacttaaaccattctccttcattggaggtcccattttagtgccgggtatgctaacataggcttttttagatctacgaatatcatatacatacatacttctaagattatggctattcttttttctaaaagctatttgggacgtcgattggatagattagcgggacgagagttggctagtacatcacttcttcgctgtgatgaatgcgagatcaattcctcgctcggtacacgaaaagcagaaaggctaacccagcagtttaaaattcataggaacctgatacttagactggaatgtgcgattgt

SEQ ID NO: 13433 - DNA, 499 bp, Diabrotica virgifera
gtcccaggaacgcaactcataaatattggtaacatcattttaaagtcttctactttaaaatgtatcatatgtatctgaattgccgatataaatgagtcaaattaaataaattattagaagaattttttttactaagcaacaacatttttgtttatgttagtagtattttgtattttgacaacggcacccgatttgggcgtcgaaacgttaataaaaatcattttttaataatactgtggcccacctcccatcaaacagttaaaataataaacgaatgaatcaaaaaacagaatgtcaacaaaatccgaggctatgtatggtttcaatttcagtgctttataaatgctagaatattccacagggcgatgcgcgaactttgagaaaaaacacagttcgattggcacaccctgaaaaacattccagcatctataaaacaccgaaatcaaaacccaactatagcctcagggtttcctgacattctgttttttttattcattcg

SEQ ID NO: 13434 - DNA, 472 bp, Diabrotica virgifera
  SmartBlast Evalue=4E-39; Info=Inhibitor of growth protein 3 n=2 Tax=Formicidae RepID=E2AMB9_9HYME
gaaaatatacctaataaaacaaaatatctttaccaaaaagttgaacaagatgctgtatttggaagattatttagagatgatagagcatttacctcaagaattaagagatagatttacagagagagaaatggactattcacaataacatggacgaactcgaaaaaagggttaaaaattttttcagtgattggaaaaggtgccctaatgatttacctcagtcagttgaagcagaatttcaaggtatcagaaaggaatattataaaactttggaagaggcagatgaaaagggtcacctagcaagccagatgtacgacttagtcgataagtatttaaggagattggattctgagctacacaaatttaaatagttggaagcagataacaagggtataaccgagggtttggagaaaagatcattagaattagatacaaatacaactccaaatatttcatcgcttcagcaaaaagaaaa

SEQ ID NO: 13435 - DNA, 477 bp, Diabrotica virgifera
gccttgtattataagtcgaagcagatggtatgtttaggtcctctaattatatggccgaagtattctgttttctcctctttatgatttttatgagcagacgttctgaattcatcattttcttcttctacaaaatatatattttaagacaagtaattgaatattagaatattagtaattcaatagcacacgaatggatatcttttttgaaaaacaagcaatatttaaccattataaatatttgtaagatatggcggtattgcattatatttttaaataactcatcaaccataactgctacgattatacagattaacaatgaaaaaaccagacaaagttataaatggtagtttactagataaaaataatcataattgtatattataaatcacttacaagaaattaactcaacaaattgaaataaaatgattggtgtacatttgcaataagatttttttgcataattccagtaaatgctct

SEQ ID NO: 13436 - DNA, 503 bp, Diabrotica virgifera
  SmartBlast Evalue=2E-21; Info=Dorsal protein splice variant B n= 1 Tax=Apis mellifera RepID=Q86DH6_APIME
cgatactactaccacagctctgccttgataaccttctaccctaatggtagggtaacttttattttcgggggtactccttgatccgggaatggagcctgctgatcttccttcacattcatatcgaaatcttaacgctttcgacgctggttgttctactattctaatgcgagctttgttttttcgccgacatcgatgacagctggccagactggatggccgtttgttgtggaactggtatttctcctcctccgttaaacatggttgggtgttgtgcaggttctttagactctttgaagtctggatcagtctcaataacctcaatgacatcacttaattcaatattcccatccgctaggcctccatcgtcttgtgtgccagtatcttaacaaatatcataacaaattccaaacaatactttaaaattcaaggtcgtcaaacttcactcgccgcggattggcggatttttcataaacagatccaagaagtagattatcacacttgtc

SEQ ID NO: 13437 - DNA, 500 bp, Diabrotica virgifera
tccaacagaagtagaaaggagagaagagctcatggaacaaaaaaatagtgtggcttgaacgttgagaagccgaagtaacaaaatactacttttgcagtagtattattataggaagatgcgaagacaaatagaatagaattgataaagaaagtatgaactgataaaaattatgaatagatagatgtaacttgaatggctagctaatatgcaagagaatggccacttgacactcaaggaaggattcggccaatttgcacggctatttttggctagacaataaattaaaggaaatgacaatgatggctagaaaagaagatattaagacaatgttcacaaaatagatagagtaaatataataatataatgaaaatagaataaatttttgggcgccagaagaaggataactgggttaaccctcttccaggtattctacgctgctatagagtatattaaatttgtagtacaagtatattaaatgtacaaatataaaggagtaatat

SEQ ID NO: 13438 - DNA, 498 bp, Diabrotica virgifera
taccttattctaaaattttagtaattgcattcattttgccaagtttcctacatttgatatgactttaaaagtgacttccaaggattaaaattctttgtaaaactcgtcatgtagtcccagagtaaacattctgaagtttcattggtttttaaacaaaacagatgtcttactgatgctgtttatcgcttaatcagatagatgattcgcatctttcatatcacgctgtaccgcttggctgacatcaggtttgttccaactcgatacaaaaccgttcttcaatcgttacgcgcatgcgcaataccgaataattatgcgcagtaacacatttttcgttactgcgcatactcgtaaccgttcaagaacgggtttgtatcgagttggaacaaacctaacatgtacatctgtgtcgctgtgacttcttaagtattagatatattcaacattaaatgatatagccgatattttgacatgaaagatgaatcgactcttatacctttt

SEQ ID NO: 13439 - DNA, 492 bp, Diabrotica virgifera
atattaaattgcaatatttacaaaatctaacgaaaattgtgatccgtttcttcttattatttataatttatgtgttttcaagcaatgatacaatgattagcgttgaaatatgggttgattttaaaataataggtacctactgtaaaaaagactatcacaatgaaatcgtttcaaaaagtctgactgattccgttcctgctgtctcacacaacaagcacgtgcactaagaagtttcgagcaaagatgaagacatcattgtaaatttttaatctataaacatcgacttagtgtagcttttgattaagcccaaatggctcaaattttgtaatacaaaggtcatgtgcccaacttctgtaactagtttctaactactaagatctggagttttacctgatgatgatctgataaggccgaaaacgtttgtgacgtacttttagtccaacttggatactttttaagaaaaattttaatacaatttatataccatctaca

SEQ ID NO: 13440 - DNA, 503 bp, Diabrotica virgifera
taaaccaagatgaaactggcgtgtgttttaattatcgctggtcttatggtctgcttaacagaggctcaaattcgctatcctgaatactatagagtacaggacgccatcggagaatgcaaaagggaattaggttcaacagtagatgaactcacaaacgttaaacttgggatcataacccctgatactggcaggcaagttctttgtgttcatcgtagattgggatatatggatctgaatggagacattcttcctggtccgtacgagctacacattgcaggagttactgatgacaagggtcgtaaggaagagtttagaagatgtggcgcgtatcaaggtcttctacctgccgaagttaaagctattaattttgatagatgtttccaagccattttacaaataatgggtcgtgatggttgatttatctaaaaaaaataatgtgtaataaatacatatatatatgtatgtatattcacatggtgtaataaaatatattccttttgttt

SEQ ID NO: 13441 - DNA, 494 bp, Diabrotica virgifera
aaacatgatttttgacatatataacatactatatagttatagtgacgtcatccatctgggcgtgatgacgtaattgactattcttttaaatgagaataggggtcgtgtgctggcgcatttgaaaggtgattcaattctctattcagcgatataagcattaagataattatttacacggggtgtccaaagaaattttttagttaaattaattgacaaaaagaagactatattgttgtgatcttacttttgaaatctaatggtgttctcagttgtaatttatcttaattaattaatcaataattatctcattaatcaaacagatcaaataccaatatagtgtcaatctcagggctaaattataatatcaattacttactttcgtggcttcaaagtatttctcagtggattcctaatcgggatagataaaagagagtaaaataatacacacatacggatttcaattagaaattataaaaatcgtttattttatctaa

SEQ ID NO: 13442 - DNA, 504 bp, Diabrotica virgifera
cagcgatccaattaacaacgctttattctacaaacgaagactagccacctacaattttactatttttaacgtagcaacaaaacagggtgattgtttcatgtggcatgagggtcaaggtggaagaggtagttgtgagattgccagacttcttttttcgtactttcaatcacttccagataccatcaaagaagtaagatgttttagcgatcgttgcggtggtcaaaatcttaacaaatacatcgtagcgatgtgtatgcacgctgttcaattgataaacaatatcaaaatgattaaccttaaatttctgacacctggtcatagcgaaatggagtgcgattcaatgcactcgtctattggaacagagtttaaacgcgtcggcaaagcactgtggccaggagattggagaacaatagcacgaagtgcaaggaagagaggagacaagccttacattgtacatgacattgaatcagaaagctttatagatagaaaacagacacagacaat

SEQ ID NO: 13443 - DNA, 503 bp, Diabrotica virgifera
  SmartBlast Evalue=1E-19; Info=2310067B10Rik protein (Fragment) n=2 Tax=Murinae RepID=Q1LZK8_MOUSE
cacctctttctcgaacttaaccgtagaaaactccatgttaatggcgcttggtgcggaaaagctcattgtcctggacgactccaggttgctgctatttctttcactaagtagggaaatatgacaattccagccactttccagacccattttttcgctaaagacgcgcgatctcagctcattttctttactaaaatggacgaatcggatacaggctcgttccaattgttctataagatgaaccatatcaataagtgcttggtactgcatggttatcataccaataaatatttgattacactggacctgaaaacagctctctgcatcgcttacattatcagtctgacaatcgttgaataaaagagaatctgcactgtagaattgagacgatttagtttttggttccagaacacttttaatgtcccaatggactggcgtggggctcctatgactcaaatataaatgtctcgagtcactgggaagctctaaatatacctcacttagtt

SEQ ID NO: 13444 - DNA, 503 bp, Diabrotica virgifera
gtttgttcaatacacaaaggtagtgttagtggtattcccctctacggggataagaggacgaaatgatcggccatggactggggttcctggtcgtggcgatagggatattggggagcgtgactgggcaatttatgagtaattaccccgctgagaatcgaaccggtgtctttggaagacattctagaattggttatggggggagaggatatgaggcagaaaatctagaagaaaagtctgaggatgcttttccgttagatgatgatgaatatgatgagttaaggggagaccttagtgatgacggtgataacggtgacaacggtgaggacgatgactacataagtccggatgattttgcacgtggatacgacactaccggttcgtacaatccaggccgcgccgacgactatacaacaactgctcctgaaggcggagaaagcagagctgggtcgtatcctgatccaaggtctaatcccgcagaccctcgctacgatcccagatacgat

SEQ ID NO: 13445 - DNA, 502 bp, Diabrotica virgifera
ctccgacctagctgtttgtattgtagatttgcaagttgtaggccacgaatagatgcttatagaaagccaacgcttaataaaaagtacttcgattcagacaatgccggaatatgtataaacaaacaaattttgatcgacccgaacgaagatctgatacttttgggaccactttggatgtggatataccgtttatagctccagcttagacaagaacttgatcatatttgtaattattgtttaaagctgataatatctttttttgtcgtttttgaataatttccaatatattgcatttgttaatcgtcctactttatcagttcgctgtaacccatttaatttttatacagtcatgtatactgtacctccttacttacttacttaagccgtcctcttgtaccttacggtgtcgaggtaagtggagaaatcaaacgtctccatgcctttcggtcagtagctagtctttctgcctctctccacccaatatttctttttacgcaagcct

SEQ ID NO: 13446 - DNA, 496 bp, Diabrotica virgifera
  SmartBlast Evalue=3E-81; Info="Polycomb protein esc, putative n= 1 Tax=Pediculus humanus corporis RepID=E0VN79_PEDHC"
gtttgtattgccatatttggtggtgtagagggacacagggatgaagttttaagtgcagattttgatctgaacggtaataggattatgtcttgtggtatggaccattctttgaagctatggcgactggataaagaaacaatgaaggacactataaagaattcttactcatggaatgcttctcgcaataccaggccgtttgaatgtctaaaggaaaattttccagatttttcaaccagagacatacataggaactatgtagattgtgtaaaatggttcggagacttcttactcagcaaatcctgtgagaattgcatcgtttgttggaaaccaggtcgtttggaagacgagaatttgagaaaaggagaaaccagttccacgatcatccatcgatttgagtacaaagaatgtgaaatttggttcgtgagattcgccatggatttctggcaaaaaattttggctttgggaaaccaaactggaaaagtatttgtttgggact

SEQ ID NO: 13447 - DNA, 503 bp, Diabrotica virgifera
  SmartBlast Evalue=2E-40; Info=Integrin-linked protein kinase n= 4 Tax=Apocrita RepID=E1ZYB0_9HYME
aaatgtcacctgaaatggaagtgacataatttttaaaataaattaagaaaaattggtaattctactttatcagtgtttgtggttacacagtgcttcctttagaattagtgtttgtaaaattacttgaatattattgcattttaaaggtatcataagaattccagtttgaagtgaacgcccaagtatttattttaagaaaaagtaagtaaataaaatggaagatatatttcaatggtgcaaagaagggaatgccctacaagttagggtttggctggatgaaccggaacatgatatgaatcaaggtgatgatcatggattcagcccccttcattgggctgcgatgaaaggatacaacaaaattgtggaaatgttactgcttagaggagctagagtaaatgccactaatagaggagatgatacccctttgcatatggcagctgctcatggtcacagggaaattgttaatatgcttctccgtcaaagggcagacgtaaattttacaa

SEQ ID NO: 13448 - DNA, 499 bp, Diabrotica virgifera
gctaaatatgactctcttagttctctggttcaactatagtactctttttaagactacttcttttaaatatgtttctcacaaatgtttgcatatttttgtaaatatgacaactaaagaatatatttttaatttattatcctgaattatcactttaaagtagtaaaactactcttacaggtagattatattgattttaagacaattttcaaaatatatttctcccagaaatgtgaaatgtgtcaaaaatgtttatcctgatgctggttcgttaaattgataaacgtaatttcaaattgtaactgtaataaaagttagtttccacgtaaacaaaaataaacagaataattcaatttttacgttacgaattataccgttacgaagtgtcgccggtacgaattgtccgttaccatttgtggggttacgaactgtcgcgttacgagatgcctcgtcacgggcgacagggtcagttgacttgtgtggtgcaaatctatacgcagct

SEQ ID NO: 13449 - DNA, 503 bp, Diabrotica virgifera
ggcgtcgtgttgtttacgtttgtgttgataatttcagaatttccttatttgtgacatttgagtgaatttgttagcgtattttgactttaaattgaacaatcgtaatcgttaagtgtcctaatcatggtacgtaactgtgttgtgttgtatgcagaaaaactgcctatttacatccagaactgtcatttcattcgtaagtatattatcaagttttataaacaacatccattggcgtagcacagggatatgatattacttaatccttgaattgaaataaaataaataaaatatattttttaggtatcaacgcttgttaaagtaggaggatcaaaagcctatggttttgtaccaagagttagaaaattaattattagcaatgagcaaactttaaagtacagttggctgggacaaaaaggcaaacaaaagtcctacatgtaaaatttgaatagcaataaacgtattttagaacctacttatttttattaaaagttcatttaaaatat

SEQ ID NO: 13450 - DNA, 502 bp, Diabrotica virgifera
  SmartBlast Evalue=2E-41; Info="Serine/threonine/tyrosine- interacting protein, putative n=1 Tax=Pediculus humanus corporis RepID=E0W3F8_PEDHC"
accgcggctcaaagaaatatccttgttgaaaacggtatcaattacatcatttgtgtgcgacaggacgtcgaagctcattacatcaagccccaaataaatgacccaacattcgcctatcttaccctcaacattgctgactgtgtgacagaaaatatcataaggtttttcccaaaagttaaacagttcattgacgaagctctttctaataatgcaaaagttttggtacacagcaacaaggggaattccaggagtgcgactttagttttagcctatgttatggagaagtttggattaagctcaaatgaggctttgcagtttgttaaagcaaaaagagataccatagacccaaatgaaggctttcgggctcagttgatagagtacgagcccatttacaaggcccgccagattcttgcgaacggagaggcttcccaggactgtaggtccaaaagaaaatgtgaacagctgactgaaactgtagattataatcttatacaaaggcccc

SEQ ID NO: 13451 - DNA, 501 bp, Diabrotica virgifera
atgtaacaaagaacttggagttacaaatattcaatgtcgttaagatttggagaaatcttggcgtttcgttcgtattttgagcacagtagatacaacttattcaaacatattaattgtgatcaagagtaatgaataaaaattttacggaagtattgaacaattggcaaatctgcgcagtcaatgacacgtatctgcgcagttgaaaactccgccaaatttaaattaaaaatggacgagcgagactttcacttaacacattcgctgccatcaatcgccaagaaacgttttgcttataatgctacagtctgcctaagaaactcattaatattcagctccgcgaagtgctattgttagaggtgtggaatttcataaacaagggatctacttgctttatgaaacgatcccttgtttatgtaagaacacatttcgaacaatagcaccccgctgatgagtctcttagatagattgtaggaccatacttaagtcaggtgccactgtctt

SEQ ID NO: 13452 - DNA, 501 bp, Diabrotica virgifera
tttttttataattccataaaaaattattcttaaaaatccacatcagatgtactcaaagtaaaaaaagaaacgttttatttcatgtggttgttaaaacagaaacatcattggttaagtaatgagcaaccaagatgttagcattaaaaacattcaaaatttgtcctaaaatctaaataataattttacataaccgtttcaacctaccgctaaatcttaagtcacctaacctcaattttgggacgtttttcatacacatttcagttgtttaaatacagaaaccgaaataaaaccattttctgattatttttcagtcattttcaacaagcttctaaaaaactaggaacgactttgaaaattctacaattgtcacgcccacttaataagcagcaaaattaccgaaaattatcttagtacaattgtacagaaatatctgatatcccgaaggtcacttaggtagcaaatcaaggagagaggacttcagtagaatgcgttggtgcaaag

SEQ ID NO: 13453 - DNA, 501 bp, Diabrotica virgifera
agaaaaattgtccattacagtgagaaatattttttctcacggattctccgccggtttccatacatatgatcgccgtttccatggtaacatgcgcaatacgaaaacaattattgttgttaaacaaaatgtgttgaagcaaaacttaccaggaattacctttcacaactgttcaaatgtaactgttaattataattttaaataaataaagtatataaatgttaaaaatattaaatacatacatatgtatttatttcaatttgcatttaaactttgaaaaatatatggaattgaataaaaaaaaggtttgtgcagtagaaaggaaattaaaaatttagtttattctctgcttatggggtaaaatatcttgcctaaataggaacaccaattattgggatcggaagcttaagtttgaggagccttttcttttggttttgactgtaacttcttcagttttctaaagtccaaattttccctttttcttataagtgtatccataattat

SEQ ID NO: 13454 - DNA, 502 bp, Diabrotica virgifera
  SmartBlast Evalue=2E-45; Info=Endonuclease-reverse transcriptase n=1 Tax=Bombyx mori RepID=D7F164_BOMMO
ggcatctttatatatattggctattaggtctgtatatctgtggtcaattctgctgttaatcaaagaacttttcactgcccaatgttcgacactgtcaaaagtcttttcgaaatctatgaacgctacatatagagggatgttgtattcatttgctcgttctataaggattttcatacttagtaaatgatcacttgtgctaaatccctttctaaaaccagcttgttctttcgattggtatccgtcgaattttgtcgtcaatctgttggttaaaatttttgttaggagtttatacattacattgaggagtgttataggacggtagttttttatatctgctttgtcccctttcttgtgtaagataatggttacggattccttccagttgtttgggattcttttttcttttaatattttgttaaaaatggaatagagagtatcaattaccacttttccaccatatttcagcatctctgtagttattccatcttttccaggcgatttg

SEQ ID NO: 13455 - DNA, 503 bp, Diabrotica virgifera
aattaatgactgaggacagaatagtcacagttaaaactttcttcattaatgaagattttattgctacctaaacgagggtagtgaatgtatagacataatggtctaaagttctaaaggataccaaaatttgcagaaataaaatgatgttaatgtgttcattactgatggatcagcgatcattatgtcgcctaaatctgtattgtattagcccagaaacagacgaaccactttgtggcgccacaaccactctgtggcgccacaaagtagcttccgatgattagccgtaaattcgtatgtaaattaacgtaccattccacacgagcgacagtggccagccagtgttgccgatcctcgctgctagtggcgtccactacaaaattcattggcgctacaaaatcgctcgtctaggccactttgtggcgctgcagagtggctcgtctgtttctgggcttaattgttttaattttaatagtaaaaatgtacaatcttattgattaaaatga

SEQ ID NO: 13456 - DNA, 502 bp, Diabrotica virgifera
actatggaaaagcggattttttataaaacgcaaacttgactgttcttacaataaatcaacaattaaacttacgaatatctataaatatttaaagacggcttcgtttcaactcaattcgagtatctcgccattctcgaacacttgtttcaaggcctacctatcatcagagagacttgtgagaagactgaactgaattaaaaagaactggttagttggcaattaaagtaaaatactattccaaagtaacgaagaaaggtggagttaatatcgacagcgaataaagtaagttttaaacttcaaaaatcttgtaaacattacgcatatttagtcaaaaagaacgttgcaagtagagctttaaaattctacacaaagcagtaacgccagaagctttatgtcttaaatgagaagcagtagacgaggttcatggtggaattaagatcaacggaactaaaagccaaaatccacgaggaaaataaacttcctctcgctggctgtataccat

SEQ ID NO: 13457 - DNA, 500 bp, Diabrotica virgifera
agctccttaccgttattactccaacgtacaaataaatgtattcacagtgagtattgttacttcatcaacccttatggtagggggtaaccaccccttaattatctgaggtggctcagaagttaggagccgccatacatagaataatactaatgtaatcatttagtaatttttgttctgttttattctatacctataaagatgaaaaatgtaagtcgtcataaacaatgcatgaatacaccaatagctcagtaaattacagtttttgagtgaaattatcagcgtcacgacggacgtattggcttgtaaatttggatttaggttctagttacactccacttcaaagttggatttatgccgttggttgcgtttacctcggggggtgacacccctccttggggtgaaaaacatacatttaaaataagtccggaaattttaaattgactaattataagcaacttttgttcttctatagagtttctttatctatgctgatacttttc

SEQ ID NO: 13458 - DNA, 503 bp, Diabrotica virgifera
tgaaggagcccaccttaataattaacaaatagaagtaaatatagaattttggaaagtcaatgacatcgtttctttattatggatctacacataattcacagaatctgcatcttgttcttttatctagtacaacaaataagcagcttcaaaattggctgtagacctagttcagaaacctattactgcaattctatctcaaagctatttcctccgactgaagccaataactgcaaccatctgataatattcaattcaactttatcaaccatagatgccaccctgtttaccagatttggagcatttaccaccttcacactcagcaacatacatgttagagaaatatcaccagggtcttttgcagacattagcaatttagaacatctttacttggatcacaataatctaactactatagaaaaaaaggtagtacaaaatttacgtaaacttcaaactcttgacatatcttataattcaatcacttacatcgcaagcgaagcttttac

SEQ ID NO: 13459 - DNA, 502 bp, Diabrotica virgifera
ttatagatcacaatgatacataaatatggtcaataataatgtatatattacttcctttgccgttgcacgttatcaaaaacatgttgcacttcattgttacagtacaactaactttattgttttttgaattataataattcgttattttagttttaaatttattatgtaaaatttattaataaatatcactatagctttaggagatcgcaaaaaattagttattaatcaatattttgttaagtagttatatctaataacacaaattcttcagactgcaataacaatgtttccatttcataattccctacattccctactatctcgacgatatggcaacgctgtgcaaaatatcaatgtcaacattgtctaacgtgcaacagttttataagaaaataagggataataatttttaataagcaactttattgtacactactgctttttgcattataataatcaattattttagttttaaatttattacctaaaatatatacagagt

SEQ ID NO: 13460 - DNA, 494 bp, Diabrotica virgifera
ccagcaaaatattctcgccgacaattcttgacgatccgtgcatggcatgcgacggcagtgcgaagaatatttttgtcttatacagtcctagtacgatcataatacgaaacggtgtagtgggcagagacctttagtgaaatagttggagtatgcattgatactaaaaattacgatatattacggtttattttaatatatatttgcaattttttgtacttaaataataacaaacctttcctggaatcaaacagaacaaattataatggaccgagcccagtccagaaactgaaatcatgagaggtgttaggcagggattgtattatgtctccattactatttaatgtatgtagtgaagccatttttgaagaagcattactacctcaaagtgaaggaataataattatcggaagatctattaacaacataagatacagatgacaccgtgattatgacaagctttgctggacaactccaattactactaaaccaaacaa

SEQ ID NO: 13461 - DNA, 502 bp, Diabrotica virgifera
gatttcgtctggaccaggtgctttctttggtgaactttttcgaatcagttcacttatttctctttgctgatgtgggatttattatttcttcttgttcttcgggcgtttctagttctgtttcttcgacttcttcgataaagtctatatcttcgtcttggtgataattcagtgtacactctctttcaagtgtccttctcatcacctcggctttatcttcttctgtgtagacgatcccattttctccatgtagtgggggaatgggtttctatcgtttcttaaagttctttggagcctccatatttcttgcatattttggctcctttcctccatttcttttatgtagttttcccacttttggcttctatggtctattagtgcctgtttgacttgtcgattcagtcgatttgccctatttttatcttcctggtttctcgttcttctggctctctttttggctctgttcttttcccttatcatttcttttatttcctgatttatgtct

SEQ ID NO: 13462 - DNA, 503 bp, Diabrotica virgifera
  SmartBlast Evalue=1E-48; Info=Oxidoreductase n=2 Tax=Culicini RepID=Q178A6_AEDAE
agcgccagacttttgtacattccagatggaacttcagaatggcatcttagtgacagccacattgaatagccatacagttggaagtactttcaatcaagatgtgatgatttgcagcagtactggacatttggtagtaagaggaggcgatttgtttggcagaagaaacaaaggaaatgaagaagtattatatctagatgtagaggatctaaaatgtccagttcccaactctatactacctaaaacatttgtcaaaggcttgtgtaagatggtgtcagctttgcgtgaagcatttttaccaaataatgagaaagaagggtggataaaggagccagtccaagcagcggcgacttttgaagatggcttgtatgttcaagctgtacttagtgcaatcagggagtcttcacagaccagacagtgggtgaaagtcaaagtcttgactgaacaaccagacaaaaatgaactattgagtgctgttgtgaggagaactgctattactatttctt

SEQ ID NO: 13463 - DNA, 499 bp, Diabrotica virgifera
cgaaattggcagatccagatttgaactatacagtccagatcttaccccaaaaatgatttctttttgtttcaaacattcttacttttctccaattccccaatttcattaaaaaatatgatttcgaaacatcttatattaaaataaaatatgtaaataatattaaaacgtcacaagaaaatagcttcagaacaatcttatattgataaaaaatgacaacttcagttaatgatatacgatataaactcacgtgcacagaaatcggcccactcaaaaacttggtcattttgatgtctcacatctcccaaacctgttggccgatttaagtgattctttcatttaagcgattcacttaaatgaaatggttcatttaagtgattctctatagcctgattctctaacaataccactgtaataataggtttacttgttgctaaacatgcaaactttcattgtacaccgggtgtaccaatcaaactgtatttttttctcaaagttcgca

SEQ ID NO: 13464 - DNA, 501 bp, Diabrotica virgifera
  SmartBlast Evalue=8E-41; Info=Painless n=1 Tax=Tribolium castaneum RepID=D2A388_TRICA
aactgcgtccagtttgatctcaaaggtaaaaaggagaaagaagacttcactataaccctcaattatcgtacgttagtcccccctgccaaagaaatccttaatcctgatgctgaggttggtagaaactctgggaataaagaactcgttcacgaaacagaagttatatcgtatatgagtacagctccagaattcaagcatttgcttatgcaccctgtgatagtgagttttttgtatatgaaatggcatagaacaaggtggttgttttttacgaatcttgctttctatgtagctttttgtgcatctttggtcatctatatattttcttactatgcaaattttgttgacgaactttcatcatttcaaaccttcctcaagcacttttcatggattatattattaataacattcttcgttttaatgtttagagaactcttccagatttttgtgctacctaagaagtattttacaaatttcgaaaattatatggaattatcttgatta

SEQ ID NO: 13465 - DNA, 502 bp, Diabrotica virgifera
gtaaaaacttgtatggtggaacgcaaattttaactaagaaatttttttgactaagcaaaacttacgtaagattttacttagatcaccttggtggaaccgagcgcgagcgttacacttttattgtgaaaaatggatgttgtggatcatgaaacgtggacctgcgatttagaacaagcgaataaaggtcataacgaaccagtttggtacaaatcctactcagcgagagacacttatagcatgcagtcacttgctccagaggaatggaataaacttgtagataaaatggcagctgaagatgacacttttgatttattttataggcactactacagacacagtcctactagaccatcctgtgatgctgaatgtaaagttcaaatattgtgtgacttaaaaactggaaagtctcaagacagaaaacatatatgtggcgagttacaatatgtttaattactttttgtagattttaatatacatcgaagaataaaaaaaaataatattt

SEQ ID NO: 13466 - DNA, 496 bp, Diabrotica virgifera
ttctttattttattttttacagaatgttaaaaaccagtaatcaataagtataaactaattaatgttcgtggttagagttaaaaccagtgccgttttatccattgggcgcttgaggtggggccgcccaggggcccgggcacccggaggggcccgtagggacctttccttttattaacctattagttcctagcgttacaattatgtaacagcaaagtggtgccatctaaatggatcctccatcccatacgtcgcaaattttcagttaaaaacaggttagttcttgtcagaaggtgatattgtttacattgttttaaatgcttgatttttttagaactttgttttgaatctgtgcgttgataaaatccaataaaaaaaaataaagcttcaaataatggacttcgttggtaacgaataagtatataagtatacttataagtatcttattttgataaagttaatattagaaaacaaatagtataagaagatataaataaat

SEQ ID NO: 13467 - DNA, 488 bp, Diabrotica virgifera
attctgtaaaactgtgaagttttcaaaaattccattttttgagacatcatttgaaatacatttttgagatttttttgaataaaacatcgtttagtaatatcattaaagggaagttgtgcaaaattgaaagttttataagaaaaatggtattagttacacatttttaaatcatttttaaacaaaattcatgtaagtctcaatttcagcccacaccgtacttatgcccatatattttgtttctttttattataaccatacgatagctgaattattcttctttcatgttcaatttgtaaaatttcatttgatcgattagttaaagaattacattaaaatagctcaaccgtgcgcttcgccgaacgctagtatacagtacgccaatgtttgtgagaagggtgactttagcgttataaataaaaattatagaagctatagatttaattatagaaaaatctttgtataaggttttttgtgtaaaattttcagaa

SEQ ID NO: 13468 - DNA, 496 bp, Diabrotica virgifera
tttatatgcagctttaattgggtatatgcaatggtgcatttattaggaagagaagccaattatcttcaaaatggtatataacagaaggttgtatgtgtatttttaagtgagatatggtttttcaaagttttatacttttaacgatttttgatgtgctttacgattatttttaaatttctcattgggtataacttttttttatacatttatttatatacattgctgaatacaaaaaagcttattttctttactttaaaaaatgatgttttgttaaaaaattctaggacaatttttaaacaaggtatgctttttcaaagtgtgacatataggtacacatgcaatatgtcccactaagttggaaccatatgaaaaactttttattattaattttatgaaaaaaaattattcttcataaaatgctctgcatagcctaaaacccaagatgcaatcatcagatataaaattttatcaatagtatacgaggtagagtgggccg

SEQ ID NO: 13469 - DNA, 499 bp, Diabrotica virgifera
aaaaagaatagacttacaataacatcgtggtaagtgcataataaattgcaattttgtttttacttacaaaccaaaattgtttgaaatttataataaaaataacggtttaccctgtatcaaagacagtccaacaagtgtataaacttcaaattaaaatcaaggaactgtagacaaattgtgtgatctcaaactacttgtaataatctagaaaaaatatacagcaacgagatattaccgtcaaaattttatatttctgttttcaaaaactccttcaagctcaagctgatctggtttttgtcgtggacactgaaaaaagtacagagaaaacatatgaacacatttgggatccctatcgccacatcctgaccatgaccctgccaaatatatagtcagttaaatttttgcacagatcacagatgaaattattttcatgaattattttgaaatttcgactctattctaaaaaagaaaagtctattgacatggaaaccagcataca

SEQ ID NO: 13470 - DNA, 494 bp, Diabrotica virgifera
ggtataattatgaaatatttaattgcatttgtgctgttgttcgctgttgcggcaggcgatcgccacgatgatatcaaagcagctgccgaagcatgcaatttgaataaggttgtccttcaaagtcaagacaaagaaaaaataggtgaaacggttttctgtgtaaacaagaaaattggtctcatgaatgacgatggtagccttaatgaaaatgtctttaagtccgatgcaaaattatggaattctgatgacgatttaactcaaaaaatcttcaataactgcaaagatttaaaaggtgatactcctaccattaaggcgtataatctagccaagtgtattaaagaaaatagaaactaaaaatataagtatgttacagttaataccatctgaaaagatgtttgccatcatttgtgataatattattttggatcttttcttatgctattatattaattttgtgatatcgtaataaatttttaaaataaacgttgcagtgt

SEQ ID NO: 13471 - DNA, 502 bp, Diabrotica virgifera
gtgcaatctctttggtgttgtcgtcgtaatagaattccactttaaaactagttcctgtagttactacaactttgtacgaatatgatgcgtttgttggtgctatagatacttccttccctgatgtttttgctgatatctctaaagtttgtggttcttccgccaaaacatcagccagttggtatcgtttactgcccttttcggcaatttttatccttgcagtttcatagaccagtaaagatatttgcaggattagttcctgactatcagaatttgttagaggaatcgagatcacattgccagtttgacttaatttgtctaattgagctgtaaactttgagtgattttcaatggttcttaattttttgcaaaatggtattctggagcaatctttgtatatggtgtgattcgcacacgaaacatagctggctgtcaaagccaaaagtagtaaaggtcttaacatcttgtctgacctttccatacgttgacactgaacgagttattt

SEQ ID NO: 13472 - DNA, 502 bp, Diabrotica virgifera
  SmartBlast Evalue=9E-10; Info=Growth hormone-regulated TBC protein 1-A n=2 Tax=Formicidae RepID=E2A414_9HYME
ctcaagaatgtgtcgtgtggtggtgaaatatgagtaaaagatgaaagaaaactggctgtgcgacgaataacaatttttgaatgagtcatatgtatcaaaatgaattatataaatccttttattaggttaatctagatgtacattttcttttatatatcaattgaagagtgttgtgtttcgagttgacccagaagattgataatttaacttacttaacagtaattataacagaaaaatgattcatctattgttcctgtcagtggtttgtgaaatacagaatatagtgtgaaatatgatgttgatacaatgaagtcaagtcatggctaaatccacattcagtaaagtggatgaatatggttttgaacgtccagacaatttcaactatgaagtgtacgataattttatgtctgggtacattagagttttgacaagaagggcacaaagatggagtaccgtaaaaggtgatgtatataggaaaccaaatgtgctaaagagattcata

SEQ ID NO: 13473 - DNA, 501 bp, Diabrotica virgifera
  SmartBlast Evalue=1E-31; Info=RNA-binding protein 10 n=2 Tax= Formicidae RepID=E2BHD0_9HYME
ctcatcaggaagaaagacacaggtgcttcccgcggtttcgcctttgtcgagttttccacactgggtgaggccgttcgatggatggagaaaaacagggtgttttgatgctccaagaccaataccgtgctattatgcaatatagcataccgaaggattcgaattccgccgaaaaaacaccatcctataaggcttcagctgattggttttgtataaagtgtggagctcagaatttcaaaagaagggacaattgttttaaatgccacgcatccaaaacagagagtgaggaaggaggtagtggtagtgacgaagtgtgcatgtatgcgaccaaaactatcatgttaaggaatttggacgcattgacaacggaagaatctgtcatggctgtactgaagcaaatcataccggaattggtggaaaccatttcggtcgtatgtattggacgggatcctctaacgtcaacctctagaggcctctgttatctagaaacaagaagcactgtag

SEQ ID NO: 13474 - DNA, 498 bp, Diabrotica virgifera
gtcctaaatttttcgaagagagactaactcgtgtctactccttcattcgtttgtaacgctatctctgcaagggccgtatatcactcttcttcttcttcttgtaataggacttatatcactcgaaggattttttgttcccacaccagcaatttgttgtttcgcttaggagatggtctagtgatttcccgagacttattgtttacctagcaatttcataatatcattataaatgatctaaatgtctatttgtgataatatctgttgaatcacatgttagagttaaatttatctgcaaaataacgtttttcatctcaaaaaatagcttttattatttatttgtcaatttttatctgacttggtgtgtattgttcgatataaatgtatttaactaatatattgatattttatacatatattagtttattttactcgttttcagtctaaatttcgaattttatctttttatataataaaaaaatagattagttaattgaatat

SEQ ID NO: 13475 - DNA, 499 bp, Diabrotica virgifera
ccgcgatcatattttttaattttataattttttttgggttaggattagcgaacgttcggattaccagggttcggattatcgacgctctactgtacatatatttcgattaaaaaatttgtaatattttctgctaaaacctttataaaaataccctaccatacatatacatttaagtacactttttggatcagtatatttgtatgttttaagagtaaacagtagcgcgtcatcaacatttttgtttttcgaaagttctgcgaactgtcaacagtgaggcaacagtgcgtcggtaattcgacactgacactactgacagtgagattatactatcaaaggtaataccacgagtcctctaaattttatcgataaatttttttgttttcacgaaaacttctttatttggtaaaattacgaaaacaaaccgaatgatagactaactaacgtacataagtaccaacaactcaatcatatagaactggaaattatgactctttataat

SEQ ID NO: 13476 - DNA, 502 bp, Diabrotica virgifera
ctgtgtgtggataggtgtgccgtatatactttaaaggcaagaacagattataaaagatggttcgactggaaacaagatacgatcctattcacggatacgattacacttactggcccgattcaagatattttagagattaccgattttctccgccaatttcctgggccgatgactggagtcatagatcacgagtatggttcccgtactactggtcaacccgtaggctatttcaacattacatggactacaaaccttcagcaaggtctcttcgatctcaacgactacgaaacgacttgtatttctagactagattccgagaaaattgtatccgaagaaactagatgaaatattatttattatcataaaaactgaatctcgaagactacaaactaagaaaatattatttacatgcaatttatatttgtatatatgtattttttgaacttattttaaacaagtaattaaagaacgaaaagtttaataaaataaattttatttattc

SEQ ID NO: 13477 - DNA, 502 bp, Diabrotica virgifera
gtaaaacctgtagatattcctctgaaaaaggaagaggagaatagagtagaacttgagcataacctattagaaactactgaaaccatcgttgagactggagtagaaaatatggaattatcagaatctgtagaagttcctgtagaaaatgaagtccagcctaaatatactaaagaatctgcagatatctctttgcaaacagaacacaggaatattgagaaagttgaaactgaaacccttacagaaataaatagagaagtaaagatgcctaaacctaaagtagaaacctcgatgaatactgaactcgttcaaaataaagaatctgtagatgttgccttccaagtagaaccaacaaaggaaaccaatattaatattaaatttattgagaatgaacaagttacttctcaggtcactgattttgtaacaaaaacagaagaatcaacaattttagtctcctcaaaagagccagaagtagatacaattgtagtagaaccagctaaagaga

SEQ ID NO: 13478 - DNA, 500 bp, Diabrotica virgifera
  SmartBlast Evalue=1E-20; Info=Lysosomal acid phosphatase n=1 Tax=Camponotus floridanus RepID=E2AZX4_9HYME
tagtatacggcactggctgccaaggcatccctaaaacttcatcttcttttcttggtgggaacagtccggccaagactaattccaacgacatttggtacgattgtaatgggtacttcttgcgtctatcagttgtgggtagtagtaatctcccagaaaacggtcgtatctcttacgaagttccagacccaccaagtattgtttgcgtttgccagcatttgttagttgtcctaagccatagggaaaataagtcttgttcaaataagggtccctgggatacagttcttcctctccatttggagttctattaccgtgtcgaaacatcactaccaccatcttcaaactcccctcatcttcgtgatttgggaaagccgtgttgtaatcttcatcgctgaaatcgttgaaggcgacacaacaattgaaaaggacgatgtgcagcagtgcgcgagctaggacgctgccaaagaaacggtcccacatctcgctctgttcgatcacttttt

SEQ ID NO: 13479 - DNA, 497 bp, Diabrotica virgifera
ttagccctacgcgccgatgaatggtagtggatacgttatacgtttgctctgattgggcattccaataacctgtcaaaacttaaatatggcgcctgtgggcaaacacatgttgtgttttaggtgttaacaaaagtaagtttatagttgtagtgacttttaaatattttgtgaaagcaacaggtacttacagctccggagcgaaccatgaccggcgagagaaatcctgtctgtgtagagactgtagagtttaggtgggcacgaccgtcgacagcgtttcttatcggtcatggtttgttccgggagctgtaactgtaaatgttttagtattgtaataaaaattataaacctatttgggaaatgtaaaatgttgaagtgcttcgatttacacaatttgatttccaacaaaatttctaccaatctccatctaatatattgttttcttactctatattttgttgtattttaatattttaattccataaaaattaaactaattt

SEQ ID NO: 13480 - DNA, 499 bp, Diabrotica virgifera
aacgctttgaaattgtggtaatattttaagcgccacactacccaatattgcatattatatgaaggtaccagattgatatttaagacagtcgtcaataagcgaaagttttgccttaataaaataattaaataatattaaaaacacaattttatagggaccaattttttggtaacaccttcgtggtctctaaaattttacaaaccatcgaattactggaacaaagaaggctgagtgagatctaagagcatctcacttctcgcctgtctagcgcggttaaattccaacgaaaaatggtcccgcatactcacaataggagtaacactaatataaataaataatcatttcgttgtaaaacgaaacaaactaaaatataggacggctcttttttcattttagaacgaaatgattgtttatttacagttattagcgttttataaaaaatcgatatttgtgacttcttttaattttctaagcaataaataaggatataaacatttgg

SEQ ID NO: 13481 - DNA, 501 bp, Diabrotica virgifera
  SmartBlast Evalue=9E-13; Info=Homeotic protein female sterile n= 1 Tax=Camponotus floridanus RepID=E2AA50_9HYME
ctatcggccttttctttagctttattttggaatgccttaaaactatccataacttgttgtttactgctgccgcccggaatattgttttgtggtgattttcctttggccaaactcgaccaggaactagcgtttttgacgttatgatctggtttgtcattcttgaaaccaaacgactgcgacatcggcttttgtatgaggagattggacttcttgtcgttcaaaagtccacctaaggtatccatgcgatcgtccatcttgagttgggaatcgttcttcatcatgggattaatattttgtggaattggatcaaacattgacgatatcgacatttccatgggcagacccatcgaggaaagaccgttgttgtttgtagtcagatcaaaattgtgtttcatgccaaaaccgttgttctgtccatgcagcatgttggtggggggtggaggtatactgatatccgtttccattgcttgttgcaatccgtgatgcaacatggtattgctc

SEQ ID NO: 13482 - DNA, 490 bp, Diabrotica virgifera
ccttattcttttcactgtccactttattattattcatatattcatgtatatattatatgagtatacccctcaaatatacacatacacacatatccatatgcagtggtatctaaatatgtgatttataagttatgtatttacatgttgatataacgaatgataagaagtaaacagtgtcatacctttgctcagttattgctatgatggggatggtggctagaatggatttattccatccattccatcctagctaccatcctcttttaagaatacctgagcaaaagtatgacagtgtttacctctgaaatcattctttatatctgcatgcatgtacataacttatatacatggcatacttagatatcactgcattagatatgtgtatgcgtacatatgagggtatactggtatatatgtatatacctctaatattgggttgataatccttctttaaaagataccagacagcatacctaattcttgttttttt

SEQ ID NO: 13483 - DNA, 498 bp, Diabrotica virgifera
tttgtttggccgattgatctaatatctaattgcacaccctgccaacagtttataagtaggacgtttagtctttacgatatggataaggaaaaacaattgagtggttgtccgtaacactggatatgctattcgtattatatttctatcactttaggcgacatacttctttaaaagtttcaatgcgatattattatactgttgcgtcggcgtcacacaacacaagacgattattttatgaaaggttgctattctcaaaatctagacaattgctcaattgtaattaatttcggagcgaaggcttcgtctgatattaggaaagaatgaaatattttatttttacattgtataataatttattattacctctgagtacgtatccaataaataagtgtttatatttttaattcggtatgtatgttcatcgtattgttcataatgcggattaatccaattttccaaatttttgttacatatttttttgtatctcatagtctctaa

SEQ ID NO: 13484 - DNA, 500 bp, Diabrotica virgifera
caaagagtaaaagtatttgatcgaacagaatattgttagcaaaaatgtatctagcttataaaaaaattaaacaaaaatgaagtctatccactcagcaaaagaaaagtttagtagtaaagaaagtgtttaaaagaagctttttttttacaaaagtttgtagcatcaaaactaagccaggtacgctcaaaatacaattaatcccatttttttggtaagaaattgtgaaaatctgccctatttagcaccccaaatgaaactaatcgttatcgccttacaaattacttaacttttttatatgacctgtaagtttcaccggttcaaagtgcttatttttaaaagggttctagttaaaagggcttgaacgagtcattaatcgtgagtatatgcaaattttaaacagccaaccaatttttgttttacagaaaaacaaaataaagccaaaatatttataaaagcaagacctacattcctttactctttgagatttttcgtatcactaa

SEQ ID NO: 13485 - DNA, 497 bp, Diabrotica virgifera
aagagagaacatttaaagagatttatgatagtaacagtatttacaaaacctgtggtcgacagtgaagagacaaggttaacccattcgctgccaatcacgcgccagcgcgtgatatggctaccacagtcaggtgtagttcacgcgataacgagtgatacggttactttagttaggtgcccgttcaacaaaacggctcctatctgagttccatcctcttcgataggtagcgaatgtataatggtaaggatgataatcccagatattgaacacaataacaagaccagttatttgtcctggtttattaatccagtgagttttattaactctattcccagttgcttaatttcctgtcttgaatgtagctttacattagcctttaataagttcaaagaacttttgatgatttcaaaatcaagttccttaatgaaaaaatatccttatcagtcccattattaacataatgtccttattctttaattaaactttaaataaatata

SEQ ID NO: 13486 - DNA, 501 bp, Diabrotica virgifera
ctctgaaacaaaaaaatcgcacggcatttgaaaaagaaaggtctcccacgtgacaatttaccaccgttagtgaaaaattctgcaaaaaaaagattttacggaaatttgaaaaaaaaattgtgaaaaaatcgcccgtttttattcaatttttcatggttaaaaaatatttattttttggtcaaattgtggtaaattgtcacgcaagaaaccattctttttcaaatgcagtacgactccttggcttctgatatcccaatcctgagatcaactgtccgccatcatttttcgaggcctttacttttgcgccctccacaatattagtgcacgtgcacaaatgaaaaaatatacatttcttgtactctccaagagttagatattaatatgtaaaaaggctcatgttcacccttaataaaggttctgagaaaaaaattcccgaaaaaatgattattttggtcctctaaagcagcggttctcaaccttttttactcagcgacgcactaa

SEQ ID NO: 13487 - DNA, 491 bp, Diabrotica virgifera
tttatcctcaaatgaatgttatactttttggctactctgttttcttcatttattatattttcatactccctcaatattacacgcagttccttctccttttcttctccacatatcaattttctttctttctcctccgattctctacacatgtttattgtgtattctgtcttctccattttgcatacttcttctttaaataccgcagtctcaattgtatcttttccgccttctttttctattctgatctcttcttcttctgggctcatctcatcttttgaggaatcccaagcttcattttcctgtgtcaatctttttcttccttttctttctctgggctcatctcttcttttgaggaatcccaagcttcattttcttttgtcaatctactttcttctttttcttcttctgggctcatctcttttttcgaggaatcccaatcttcattttcttttatccatcttctttcttctttttcttcttctgggctcatc

SEQ ID NO: 13488 - DNA, 503 bp, Diabrotica virgifera
ctgcaattacgatattaattttgatgtgaggatttagtagatggcaaaaagtcttgtataagaatttctcgagaattgaaacctgtcttaaatctggtgaagagcgttgaggataaaaaacaaataccgttaaaatggaattttggcgaaagagaaatgggttgaaaggaaatttagtacatcctgatcgacaaaacaagaaactatctgctacagctcagcgaaggatgttaattgaggaaatgttagctgctaatggctctttattttcagaaactgataagaaaatactgacgtctcttgtaggtgatcaaaatcaacctaaagaatgggtcaatccaatgtttaaaaataccgtttattctgataacgaatctcgcgaagtacatggggatctgccatgtaattttaatgaagatcggaacgcaagatgggaccaatgggatgaatctggggccgaaaagcctaaaacatctttcttgtcctcattctcggaccaggat

SEQ ID NO: 13489 - DNA, 502 bp, Diabrotica virgifera
ttgctcagaagagagcaataagaacaatgctcaagataaaagctcgaaggacctgtaggggaaaatttaaggagttaagattattaactgtggcagggctttatatatatgagtgtttactgttcctgttcaagaatagggataggtttacacattctgagccaaaacacagcatacccactaggtatgtagggctcaattttcctatacataggctagtcgcaacagagagaggacctacatattcgtgtataaaattttttaacaaattgcctgttagaattaaattgcaacagaattttaatatatttagaactgaaataaaaagcattttattggatttagaaccatattctgtgtatgagtttttaaatcacacattttaacttttaactcatagtatttgtaattgtaattttgtatgtatattagacacttattattcaattgtgacaatttgctagtaagtgtgttgtttacaattttttttaataaaagatat

SEQ ID NO: 13490 - DNA, 500 bp, Diabrotica virgifera
gatttacatgttttagatgtgaatgaaatagaaaatctagctctaccattacctgatacagatgttacaggtcattaaggtaacacattagcatatgttgctgggtttataataaaaaatcttaaatcgattaaagaatgtgaggtgtgtgcagctaatatcatatctgactgtttggaaccacaccatacatttacaatgtttaaagaatatagtgataataaattaagtttaaattatgttacaaaaaattttctagtagatttagccaaaatgtacgatattgtaattgcggtattagtcattaatggacatataaaccatttggtcaaaaaaattaaaattctgataaaaaagtatgtaactctggagtggtttacttgtaaccaacatttggattatgtgtttaattattgtctagatgtgtctgtatccttaataattaagaaatattatgatgatgtttatagaagttctcaggatttgcaaaaaaatgattt

SEQ ID NO: 13491 - DNA, 499 bp, Diabrotica virgifera
gttcttctatttccattgcttcacagtcacctgtgtttttttgttgtttttcgttttgatcatcatccttgtcctccttatttataatgtcatgtagttttagagcaccattcgaaaacttctgtaaaagtgtattataatcccaatctaaattaaattcaatatctttggtaatttctcctttttctactttgggaggtggtattttcatttgttttaaatttattgtttttattccatggaatgtgcacccatattggtttaggtttcttttaaagaaagggtcagttactggaggaacatcttgaatttcttcgaaaaataaatttgtacccattgcatgatcatattcgccttggaatattgtatcattaatttgaacaagtggattttcttgtgtaagttggccacgcgaatgaacgtctcttttcaaaagtttcatttgttaaattatccttaaaatcaaataaaataagagtttcattttcagacattgtgt

SEQ ID NO: 13492 - DNA, 494 bp, Diabrotica virgifera
atagttttcgatatattggaaaaggtcgattttagttttgtaacttcaaggggctgtaactttttttgtgagcacatttgtactaaggtaagttaggttcaatcgaactatttttgaccttaaaatgtgtggtatatttgtgaccagtcttttcgggacaccctgtatattacatttgcaaaacattatcataacaatttcttttttctttataaatggtatgaaaattttagtaaaatcttctctaggaataccctttctgatctgtgttgcatattgatttcaacagtgtgacaattgtgacagaagtgacagaatcaaaacctgctgaatcctaaatttttcgttatgctaaatccaaactaaagtacaaatttctgaagatgtagaaaaatgacaaattagtgtgccattttataatatttattgatgcccctttgattgaaaaataccggatactttttgaaaaatttacatttttaattattattttt

SEQ ID NO: 13493 - DNA, 495 bp, Diabrotica virgifera
  SmartBlast Evalue=3E-46; Info=4-nitrophenylphosphatase n=1 Tax= Aedes aegypti RepID=Q0IEN1_AEDAE
tttccaaggacagtggcttctcgttgagcaacggtttccactgctcttaccatagttccagcaccaggcacaatcaaatctgaactcatggggaatctttcatcagtattggttgctataaagaggcaggatggtttgcttaagtatgaagcggctttcatcacttttacgaatgataaatgctcatcaaatcctactacaacagctcctacatctgggtcaatatggatattctctacagtggtagcaaggttattttgaataacatctggaccaatccctagatgtttaattccagctgattctagttcttgtgcaattcctttagaaccaatcacatatactttcttactaaatcgatggctttttagataggaaaccactagatatgctgtgatataatgtccttccttttctacattatatcccatccttttagctttaataacaaaatcttctcgtatttttgtggtaattattgtaacaaatgctatc

SEQ ID NO: 13494 - DNA, 495 bp, Diabrotica virgifera
cagaactaaaataactttattattttgtgctttgataaataaccaatttggcgtttcacaattcactaatatcgacatatccaatgaaaattccaatataaattccattactggcatttgactacaattattacatgcatgatatggaccaaatcatattaaaaatatgtaattataattaatacaaaaaaatcaaaagaatgcaatgacgactccaagtgtacctactgtaaatttcctgcacatgtgcaaaaacccctttaacaacatattggcggactatggcaaaaattaatatgattaacatcaccacacatataacatctagaacatttattattttattatgaacattggtaatcacatactatgtatatatacatttatattagtaagaattatacacttttcttttatcaaaatgacctatcataaaaagacgtacacagcactgtccaaaagttaagttagtcacaaaatcaatctgagagaaag

SEQ ID NO: 13495 - DNA, 502 bp, Diabrotica virgifera
  SmartBlast Evalue=1E-15; Info="N-acetyl lactosaminide beta-1,3- N-acetyl glucosaminyl transferase n=1 Tax=Culex quinquefasciatus RepID=B0XF90_CULQU"
tacatagctacattttaacttatgtacataggtaattatattgaacttttaatcattattttgtgttattgatttataatgtgcaatgctgttactatatggtaattttgtatattgttatacgtcccatcatgtcttggcattgttactttgccgatgtcggttgtggaacatgagcatagctgtcctagtctgcctgacaatatacaatgtgatgttgaccctaaaactgatgtacgctcaggagtgccccaagcagcaacagaaaattatacagaaagttgtttaccaaaagtgcaaccaagagtcgccatcaatcccggatgatgccttttcctctctggacctaaatttgggccgatgggacaaccagcacaaatataagctgtttgataattttgttttgggagaaaaatacataatcctcagcaacgtctacaaaacctgcctagcgactcagggctccctggataagctgccgtcaatcatagaagttgccaac

SEQ ID NO: 13496 - DNA, 500 bp, Diabrotica virgifera
ctactatcggtttacagcgttctccgactactaaccgccattcttctctgtttaaccatagacctggagggatttctcgttcctctagttctttttcaattccctccctccagcttcttctcgaccttcctcttttccttctcccttgtggtgttcacgtcaaaatatatttagggatcctgtcatctggcattctctgtacatgaccttaccatattagttgttttgtttgcgtgaataatttctcgtattctctcatttggtatccgatctcttcttgatttgactgctgctcttttccagaagtctatttctgttcctagtgacattttctcagatctttgtttcattggccaaacttcactgctataatatatgattacacttttaagtatggtattgtatatgagctgtttgttcgctttagatattgtttggtcccacagaatgccatcatagatatggcttttctatcctgtatggttgctgttgactatact

SEQ ID NO: 13497 - DNA, 502 bp, Diabrotica virgifera
  SmartBlast Evalue=8E-11; Info=Neb-cGP n=1 Tax=Tribolium castaneum RepID=D6X4R9_TRICA
cttcacgccgcaccgcactacccacttgattttttgttttagaaaaaggcacgaaaatggctggagactcagttgatgcttcaaagttaaccggtatgagcaaaattttcaatggctctaccatgagaggaagggcaaatgttgccttagccacatatgccagtgttggactcctaatcgcctatttctcactgaaaccatcaaaacccaaggcaccaaaaaattagtctagtagtctattccgtaatgttactctataactatgtacatgtttaataaaacttaaaatctcaatgcttaataagtttttttagatacaatgttttttgtagacatatgtaatgactcaataaaattgatgttgtatacaagggcaagatgaaaagttctttgcctggtagtgaaaagtgagttttttattcaaaacatgcctttatttacagtgcaatctcactttattgtaatattatttgatatatttttccagtaaagagattccacc

SEQ ID NO: 13498 - DNA, 501 bp, Diabrotica virgifera
tccgttcctcaagttctttaaccaggagaatattctccttgttcctgaacctcgctctataattgtccttacaggatggcttatagagagcatatctggattaatttctcattctcgcattgtaacttttgtgatgttgggggttgctggacgaagacactcccgaacaaacaaacttaaactttctacatatctttatcttacaaggttaaaggtacagttacaactacgtcgaccgacattatagttaggataggtcaaggtgacccatatctcggtaactatatcccctgaccacgcgccagcagagttcagcgaacacactgatacaataatgaatgtctcaggtactcgaccttcccacttatatcttattatattaaaaacaatgcccatatgtattaccatatatggttatgctatacgtatttcaataatgacgtgtgctgtgtttgcagtcttgcgaatgagttgaatactttgaactttgctactatcgta

SEQ ID NO: 13499 - DNA, 497 bp, Diabrotica virgifera
  SmartBlast Evalue=1E-50; Info="Translation factor GUF1 homolog, mitochondrial n=1 Tax=Aedes aegypti RepID=GUF1_AEDAE"
gtggacctcatgttgcaacccataaggcctatttgacctgcgactaacttttgtactggaacttcatcaggtctaagaacagaaagtgacttaacttcatactcctttttattgtaaaaagttgctatggaatctcccagagaaatgcatccgtcttggaggtagattaaattaagggcacctctatacctatcataggcacagtcaaacaaaagagcccttagtggtgatgacctattcacatttgggcaaggaacttttgtgattatcctttgtagtacatcatcaatgccaagtcctagttttgctgaaattttgagtacgtcttttgcatcaatatcaaacagagaatgtaactgttggcagactctttcaggattggcattttttaaatctattttgttcaaaacaggtattataaccaattcattcatgaaagcaaggtaaaagtttgctacagtctgtgcctgaacaccatcattggcatctactagaag

SEQ ID NO: 13500 - DNA, 502 bp, Diabrotica virgifera
aatgatagctgacagggtgcattgaggaagtctctaattttctcgtcgttaatatcgttggcctgtggggtggagaagacggttgatagatgttctgcaaatctgttggatttttctatatctgataagtaacaaaagtatcaaaaaacaagtaacatttattcaaaacattttttagaattgttgatggcgccataatcagaaaaatacgatttattagcccatctatcaacaattcgaataaatgttacttatcctttcatgagcaatccaaaactgcaataaaaaacggggttcctatttaatatgttagagttatccccaccctacctccagggtgtagagtggggtatttttcggtgtaatttgataggcttatgaaaaatattaaacacctgttttttgttttttcatttagaagtgtatttctcgagatattagaccgtttctataatttacctatggtatcaccataaatcgttttttccgattatagcgcatc

SEQ ID NO: 13501 - DNA, 501 bp, Diabrotica virgifera
  SmartBlast Evalue=8E-78; Info=C-terminal-binding protein n=1 Tax=Camponotus floridanus RepID=E2ADM8_9HYME
agcccgccgccgcttctcgaacctgttctggtcctgtgaattttttccttcccgcaccatattagccaaccaatatgttcgcctgtataggtttaatatgagacacatcgtcgtatcggcgacttcttctacaccgtatcccggcacattgcacaccgctatacccagttctcctgcagcctttacatcaatattatctacaccgcttcctatacgcactataatacgcagggtcttgaatttttctaagtcctccttagtcaagataatggtgtgccacatgagcgcgcccaccgcctcgttgagcactttctcgtgtatttcgctggtactttgcgcgtcgcaaaacgccaccgtggccacgtcttttaaaattggcatttctatcgaacaatcacgaccgtccaacaaagctacgagaggcctcgtctgcatgggtccgttggaaattgggccgcgtggctcaaactaggccttttgggcatcatttttctcttgtcc

SEQ ID NO: 13502 - DNA, 500 bp, Diabrotica virgifera
  SmartBlast Evalue=9E-47; Info=Rho guanine nucleotide exchange factor 10 n=1 Tax=Camponotus floridanus RepID=E2AW26_9HYME
aggtgcgctgtggttgttactacactgtaactttaccaaagacagccaaaaggagacatcggatccaaaactacctgtgggtttgcacaacagatggagccagcagtcacatttccgtacttgctcaacaccaccaacaggctggatatctgaaagacttcacatcattttcgctagtggaaactcagataaccgctatggagtttgtaaaaggttcttcgccgccgtgtccaaacttagctacagacacagtctggattggtaccgacaggcacaaacttctcttgtacgccgccgatgaacctgaaaaacaagaagaaatagccaatacgacagtttctgacgtcataatgcatattaaataccactgtgataatgttttcgtggctctggccaatggaaatctctgtgtatatagaaagaaccccatagacggtgcttggctcatcaacgagcctcaagtcttgaatttaggaactgacccagtgtcgtgcttattg

SEQ ID NO: 13503 - DNA, 500 bp, Diabrotica virgifera
  SmartBlast Evalue=9E-38; Info=Solute carrier family 41 member 2 n=1 Tax=Harpegnathos saltator RepID=E2BPL7_9HYME
tgacgtaggtggctaggaaataggggttgatgttggagacccctttactgttgattaagtcggctaagtagacgaagactatgtggcctggtacggagatcacgagcagcaatctggcggattttgcgggtagtactccacgaatgagtgcttggaacggagtgacccactgtttggtgtgtagcggaatgactccttcgaacgaagtcttgtgcaacatggtagatattcgactagcttgcacagagactagatttccacccaaaccgttgattataggttggaatactgtgtagcctttgaatttgtcgacggcaagatccaagataagtcctcccagacccgctaatgaagagagctgaaataacaggaagccaaccgtgagataggacctctttggtgtattcgttctttcggacgatgtacacccaagcgggaagaagaatcacgatgtagaaagccagaatcaccatcataacccaagaatgcgtatcatgaat

SEQ ID NO: 13504 - DNA, 501 bp, Diabrotica virgifera
  SmartBlast Evalue=2E-41; Info=Retrovirus-related Pol polyprotein from type-1 retrotransposable element R2 (Fragment) n=1 Tax=Popillia japonica RepID=PO24_POPJA
tttcttcgagaagagaggaatgtcgctgaacgctggtaagagtgccgctattacggttagcgtgaaccgtggtaataagcactcttattgcgtaacgcgttcgctcttctctgtcggcaacgacagaattaggcagttgaaaccgagcgagttgtttgggtacctaggtaggaaatataacgcactcggtcagaccaaggtggccttccaagatctgcagacccagctcgatcgaattcaacgatccggtttaaaacccgctcagaaattgaacgtggttaaaacatacttgctgccgcgatacatcgatatgcttcaatcaccgacgatcacaatgaaagctctgaagggttttgacaggactgtgcgtgtagccgtgcgtaagatctgtcgtctcaatcgaacgtgcgccgacgcttatattcacacgccgatcaaagaaggtggtctgggcgtgctggctatggccttacacgtcccagccatcatgagaaggaggat

SEQ ID NO: 13505 - DNA, 501 bp, Diabrotica virgifera
ggttaccctatatcggtctagttcttttattttatctaagtttagatttcaagatgaagctaatactttttggtattgttgtattgttatattttatatactgtactgaagagggtagtgcactaaactgctatcagtgccaagcgaaggttggaaatgggtctgactgcgaaagtgggaaaagtgattctaatactacttgccagtcttctccagacagcaatgagacacttgcttgtttctctatagtagtaaatggcttttttataagaggttgcgacaaaactactttatgcaatgatgaaccaccacctggatatgatataaaatggtgtaaaagttgtactactgacttatgtaacactcacacttcttcttcctctattattacaccagctttattcactccaatcattatttttaccgctgtactaagttacttttaattataatttttaagcatatttgtagaagtttttgagttaaagattaaaacatttt

SEQ ID NO: 13506 - DNA, 500 bp, Diabrotica virgifera
ctcgttgttgtatcgacttctgagcattccgttttctcttaagctttattaaataataccaaataataaaataacttcaacactgataacgtgattacacgaggttgagttaccttttcttaataaaaaaaaagatgagaagtgaatagattttgattttattaacctaatattatcttctaattatttttctttctgatattcatattcgcaaaacattcgcacaaacttcgcgaatgcgaatgtgacgcgaatatgcaaaaatatgcgaatattcgcgaatgcgaatgcgaatattcgttacatcactagtgcagattatcggagaataggacattattggaaaaagttatttaccagcaatttgactgctggaatcgaatcttatgattccatgtaataataatatagtaatgcaaagttcgcagataatgtgctacttcctttataaacaaaatcctattttgtgcccgaaaatcgtatttttctcaatttctgct

SEQ ID NO: 13507 - DNA, 500 bp, Diabrotica virgifera
atggaactttacattggaaatacggtccagggcggtacaatttaatcgttcgattaattttcttcgtgacaatacagatactctctcaaattttcgaatatctgatacagaatcaatgaatgaatgtgaatgttattcagtgaacatgtaagtatttatcgagtttcaaaacatgaattacaattttagaattagagaaatattctactcttcctttgggctatcgggatcaatatgctactcgacaaattagaacgatgggcgcatgcattagataaagaaaatagaggacgatcttgatgcaaaaattgtattgctcttcaggcagttcgcgataaaattggtacgcaaagcattacagtaggactaactagatgtattgtatcgttttgattttggattctcgtcatgaaattcaaacgtttttttaaatgacatgaggacaaaccttatactgacaagagtcaccccaaacccaaacttactatacagtcaatgtg

SEQ ID NO: 13508 - DNA, 488 bp, Diabrotica virgifera
  SmartBlast Evalue=5E-27; Info=Endonuclease-reverse transcriptase n=1 Tax=Bombyx mori RepID=D5LB38_BOMMO
cttgagagacagccatatggaataaaaatcaacggagaactacttagtgtgataagatatgcagacgatacagtaattctgtcagataatattgaaggtctccaaattctgcttgatcgtattcatgaggtaggagaggaaatgggcattaaaataaactcaaacaaaaccaaatttttagtgtttagtcgtgacccacatcccgatgcaaagcttcaattaaacggagtccaagttgagaaagttcacaaaatgacatatttgggaactgtgataacggaccaactagatccagacatagaaatcaaaacgtagaatagcaatgactaaaactacttttacgaaaaggaagtcatttctttgcaataatcatctcagtttagaactaagacaaagaatggttaagtgctatgtttggtccgtacttttgtatagtgcagaagtgtggacgctaaaagtatcgatcatgaacagaattgaagcattgg

SEQ ID NO: 13509 - DNA, 491 bp, Diabrotica virgifera
catgatgtcggtgattatagatttttaactaaaactttttttaaactgatttggctgataactttggcgggacccagtcgtggtcgccattttcgagtaacagcacagtatgctcccttttacttaaaaatccataatcaattgcattacgtcgtttaactttagttcaagacaagttcaagagaaatcgttaaaattcaacaaaccggcatatttatgtttcgttgaccttaaaaagcatttgaaatggtcaaattaaaagacgtttatcagttattgtatgcaagaaagatacctctaggaataactacgatcgaaaacatctaccagaataacaaaataaaaataaaagtagaagatgaactaagtgacccaattgaagctggcaatgggataagacagggggattcctttagtcctttattgttcaagaacttaaaaaggataccaaatgggacaaaaacaacttaaaataatctgctatgcagatg

SEQ ID NO: 13510 - DNA, 500 bp, Diabrotica virgifera
  SmartBlast Evalue=3E-20; Info=Multidrug resistance-associated protein 4 n=1 Tax=Camponotus floridanus RepID=E2AHJ1_9HYME
attttcattcccagtgcttgcagtccaaatgcagtgtggtgataaataaatacaattaaaacgtttaatccaataaaagcggcactataaatgtaaatatctgtgactacatcatcggagtagttaataaacagtgcaaccaactgggcaattagaagtggtttcaaagacgttagtaccacattttgaatacaccaaagaattccatacattatcagctcaagacgaaatgttttccatagcgcccacattaaacttggttttttacttttttctttggccagcaaaacctgtctatcccagtgcttttccaaggcatctcccagtctttttgatttgtcggcatctaaagcttcgtacagatctaccacttccagagtttgtttatttccttttttaattatgggtacgagccatgcaaacaataacttcgacaagaagttggcccgtcttttgggattctctgtcttaagtttaaacaccacatccatgattaccaa

SEQ ID NO: 13511 - DNA, 492 bp, Diabrotica virgifera
  SmartBlast Evalue=1E-15; Info=Coiled-coil-helix-coiled-coil- helix domain-containing protein 8 n=1 Tax=Camponotus floridanus RepID=E2A0J6_9HYME
ctatcttaggttgtcctgttgctaaccacgattttaaatgcggattgttactttctattgatgactgatacagtaatacagctgcatgagctgcctgggaagctagcttgccccttcccatgttaatatcagttcgtaatatattaccattttcgaaggttgaagactggatattaaggacttaaacatgtttaaaacaagtctttttagaaaactaaaacacaaaataatgatgttaggttttttgggagccagttttaattttttgtattcttgatgttcttgcatacacctcctgaactcggttacttgactttgacactgcctccaatctttagtttctgatatgcagtcctgtactttataatgcagattaatacaaccggtctttttcagcatttcctccacaggatctgtaagttcttgattgccatgtcctgaagacatttctctgcgtttacagggttcgcaatcttccatgtgttatcattt

SEQ ID NO: 13512 - DNA, 498 bp, Diabrotica virgifera
  SmartBlast Evalue=4E-56; Info=Ankyrin repeat domain-containing protein 17 n=1 Tax=Harpegnathos saltator RepID=E2B848_9HYME
taaccatgtccaggtggcctttataacaagctaacgtgagtgcggactccttaaaactcgttggaatgggtgttgatgccggcgccgtggctgagcaggatcttagcgagaccgacatgaccggccgacgccgcctccatcaagggcgtgtggccgttctcgttgtggtcttcaacgttggcgccgttttctagaaggaacttaactacttcggtgtgacctcctgcgcagccgtacatcaggggggtattgcctgatgttgactgagcgttaacgtctgcaccgtgagctaccagaagtctgacaatgtcgagatgtccggctgaagcagcttccatcaaaggggtggcactcccctttgatgcccctatcttctacatttgcatgcattgctaaaagcacctgtgcaagttcgaaatatccagcactgcacgccaacgaaagcaaactttcccctcttcggaagtttcgtgtacggatcgaccttctgtgagcagt

SEQ ID NO: 13513 - DNA, 500 bp, Diabrotica virgifera
gccccgtgtaggcttaatccgttactattcaaatttatttcttaccttttaacctaactacctgaggtattcgatttaatcaatggtttcgaattcacctgtataaagtttcgagttggcaggatcaggtagtagaaaagttacgaattggccggtatacattttgattccaaaatgtttgtcattaaaagttgcgagttggcgcgtgtccctctttttaattgaagatactgatatcagcacttgctttacgatccatatacctcaaagaggcactttttaccaccgttctgatatttttatgtcctcaatcattgaatatacagtctttcggttgttttaacattggtacgccgtgttcgaagatacttccgttttacttatccattttgcctcgttttctttgttcgttatgaagatttcatgcaggtcattaaacgtcgtttttaattcgattcataattcacgattttcagcgtcgcgcagccatcttggcctct

SEQ ID NO: 13514 - DNA, 496 bp, Diabrotica virgifera
  SmartBlast Evalue=6E-36; Info="Retinoblastoma-binding protein, putative n=1 Tax=Pediculus humanus corporis RepID=E0VYL4_PEDHC"
gtcttgagtggattgtgacatcatagccttaatcttgtcatcttccggagcatccaaacttgataaatcaacttctttggctatgggtccaccttcgtccaatttagtaggaggtgtgttatcgcctccgtacccttcccaagatttgttcttttggggtatgataggaatcctagcgatgagcagagaggcatttttaggaattaaagtgttttcgtcttcgtacacttctttagtttgcgcgttagtgacctgtaaatcaaaatcagtacttttcccgatgcgtttctgctgtattatagcattcttcagatctttcacggaaatatgtaggccatcaaatgtaaccgtatcatactcctagagccgatttgaatttgtagtgtacagacatgctttttttaaaccggtaatcctaaatatataaatagtactaaatgtctgtcacaattttaatattattttcacaattctcgacatatttaaacaactttaa

SEQ ID NO: 13515 - DNA, 499 bp, Diabrotica virgifera
gtagtgtctgtttaagtatttaaatgtctgccgaaattccttcgataaaatcacaaataaataatgttacaacgtacaagattgttcacgtaaggaaagtctttacactaaagaccgaaaagaaacacacaatttagcaaaaatggaaaaatacacaatataatacctaaacataaaacaaatcacgattttaaatcacaagaagagcgcagtaaaatcctaataataaaaatattgttctttggaagaattcaatctagaattaatacatttgacatttgtgatcgtaaaaatcatacaaaataaaagtttccgggaaggtaatagacaacatttgttcattccctcgtatgcgatgcacaagcttttacattattgcgttaagaggctacatcagtgcgtcatcaagacggaaaacgcgttccaagatagcagcttttaattttgaattatctgtcgagttatttggcacacatacgtaatatagctataattgaat

SEQ ID NO: 13516 - DNA, 501 bp, Diabrotica virgifera
tctataaaaacagtaatttttgtagtgtaaggattttattttatgggaaatacttgttaaaaaatatttttcgatgttgtatttctatactagtctacttaatgacggatttttatttcttaatcattatagtcaagtgaatgtattataaaagtgctgaaaacttcttaatgctcatatagaggtcagaatttaataatttttattaaatgttagtttttatgtataactgaacagatttaactgaaaccctcaaggtcacttgcgccgcatcaacgaacgtctgtcgtgtattttccttgcggttgcagataaatgaatgttactgtattatttgaaatctgaagtaatggggaacttaaaaaaaaattttaaattcgaacaaaatgttataaatcacaacagaacataatttaaaacatatgtatcaaagataaaacagtttttttttgtctttcgtttggcccctaaagacgattaaaaattcaagttataccagcc

SEQ ID NO: 13517 - DNA, 497 bp, Diabrotica virgifera
  SmartBlast Evalue=9E-15; Info=Sugar transporter 6 n=1 Tax= Nilaparvata lugens RepID=D4AHX1_NILLU
ctcttttatttacagccaataataataattttattattttttacaaaataaacttacctaaactaatttacaaaaataaataaattaacaggttcacgtaacagtatatggttatgggtcaaaactgtttagtttttgctcttctaaactaatgagttgttccccaataaattcaaagtttctttttcttccttctaagagcatcctttgtatttcaacgagacttttccttttgtttctggtaaataaagagcaatatagaacagagaaaatactgaaaatgctgcaaaaatccacatactccaagccattcccagatatacagacatatatgggaaaacgagggtaactaaaaaattaactgtagtcatgactagggcagttagagtacttaaaagaggtttaaatgatggaggaaagatttcaccacttagtgtccatggtaggggtccagcacctactttgtagaaaactatataggttaacacgctggcaaa

SEQ ID NO: 13518 - DNA, 500 bp, Diabrotica virgifera
  SmartBlast Evalue=7E-50; Info=3-hydroxyisobutyrate dehydrogenase n=1 Tax=Culex quinquefasciatus RepID=B0W036_CULQU
aaataatcggatgaaagatctgttagattgaagatttttagaacgtcttttgttgagataccacatcgatccgccaagcctagtgcttctgccatcccaactaaacttacccctttaataatttgtaatatcaggctagccttagaagcagctcctgcaggtcctagataaaagctggtttttcccatcgccttaaagcacgactgacaatctaaaaacaaggcttggtcgcctgccgttaagacgaccaaagtaccatcatctgcttctctttttgacccttgcacttgagcttctaagtacctaccacctttacttcggatcatttcacagatgtcctgcgaatctttcggatttatactagtcatttccacataccctttgccttcgaggtaatcgccggcctttaatataccgcagtttcctaccacgttttcttttgcgttagtgggatcactaacacaactaaaaactatgtcgctgttctgcatgacatcgca

SEQ ID NO: 13519 - DNA, 498 bp, Diabrotica virgifera
gggaaaagtgttacaacatttaaggttaacttaagacttttctcgtttgggggtagcttccaaacattttcacataggtttagggctggctaccttcggttaggattaaggattttaaggataccaatataatttttgacattttaggagattccctgtattttctgaagtatttatttattgttattgttattattattattttttgaaaattctatagatctacttgaaaaaatttgataaatttattgattatcttaataactttattcgagggtttatataaaatgctctgtaaagatattggactgtctattccagcttttattagttctagatacaaatccatatctctatgtttatttatggggcactcaaagatgatgtgtaccaatgttcccatagtaccgcattcgcatatcggtgtttccgttttgcctattttgtggagataacaaggagttttgcaatgtccacttcgtaaacgattaaggttag

SEQ ID NO: 13520 - DNA, 500 bp, Diabrotica virgifera
  SmartBlast Evalue=2E-33; Info=U4/U6.U5 tri-snRNP-associated protein 1 n=2 Tax=Formicidae RepID=E2AGP7_9HYME
cagaacaagatctcagaggtctaacagtacaacacgatgtagacaattttgctgaagaaaaaacagttattctcactttaaaagataaaggcgtactagattaagaggatgatgttttagaaaatgttaatatgatagatgatgaacgttataagaaaaatattgaaaataagaagaaaaatctgtttataatccctatgaagactcagaatttgatgaatttggtaattataaagaaaaatcattattgtctaaatatgacgaagaaatagatggtgctaagaaagatacttttaaaattggttatgataatgctgtagaacggaagctacaagcagtacaatcagttaaagcaaaactggcacaaaagaagctagaaagtttggacaatacacagctcaggatagcttcggattattacaatgaagaagaattagctaaatttaaaaagcccaaaaagaaagtaagaaaaataagaacaaaaggaaaactgataagca

SEQ ID NO: 13521 - DNA, 499 bp, Diabrotica virgifera
  SmartBlast Evalue=2E-13; Info=Zinc finger MYM-type protein 1 (Fragment) n=1 Tax=Camponotus floridanus RepID=E2AEF4_9HYME
ggataaaacacaaacatcagacacacggctgacagcagaagggtttgttaaaaccttggagaatttccaaacagttcttttaattgtaatttgcaatgatatcttgcaaagagtggacaaagttagcaaaacgttgcaaacagaagaattagacctacttggtgctacaaaagagcttgagtctttatcgttgttcttaaacgagaaaagtgaaaaatttgatgactttgaagctgaagctttgaaaatggctaatttaagtaccccttcttatgacagagcaagaaaacgtaccatgttttttgatgaacaaagggatgaacagtttgagaaaatggatcctagaacaagatatagaactggagttttcaaacccattttcgaccatctagtagtgcagctcagtagccggaaaaatagttacgaaaatctaagtaaaagatttgaaatattcagtcaacttcacgagaagaagtatgaagatctagtggaacaagct

SEQ ID NO: 13522 - DNA, 501 bp, Diabrotica virgifera
agcattgtgtaagccagtttgagaggttgttggttcttgttggaaaccagttttcaacgaaaattgggcgactcacgattgtgcgattttttgttctgaaagtttgtattgtatgctctcttggtgttggatcaatatacctgcgtttttaaagtgattcttatgatttaaccggagtatttttagatctctcgcttaattggagattttggaagtgaattaagaatattgttatcttcccagcaaaacaaaatctaacatgacggtgttggcgtatgaaaatctatttaaaggcactctatttcagttacttgctgttttatcaggcaccttaaacgcaatcagtgatggaatgcaatatggatggactgctccagtgttacccattctccttggtccggactcgcctgtgccaattacagaatgggaaggtgaaatgttggaaactttcttatgggtaggatcgttgtcagtgcctaccattaactatgtatcttgttg

SEQ ID NO: 13523 - DNA, 489 bp, Diabrotica virgifera
atctactaaaagatgaatggtctaaataagatatttaattatcctattgttgcctgtggcgatttaaacgaaaaaactgccatttttgacccttatttgttaataactagaattctcgtctgactgtgacgggcatttttgtatgtataatgtattaggtatatagtacccaaaaaacgcatttgcaacctggctgctcaagtgtcccgaatatggtatattttgccttatttccctagagtagtaagacattcctatattacaggtaagcgtctcacattttgcaactagctacctatgttttagatctctccctcttaaggaccttcttcatgtgcgttctattgttgtagatattaattttatcttaacaaggttgtgttcaaaacttatagcatgctcctcgtacactctaggaaatatttccgttgtttatggcgactctttttaattttcaccgcaagattccttcggaaggattcagggtcc

SEQ ID NO: 13524 - DNA, 498 bp, Diabrotica virgifera
  SmartBlast Evalue=4E-23; Info=Gamma-glutamyltranspeptidase 1 n= 1 Tax=Culex quinquefasciatus RepID=B0W7T9_CULQU
cgttaatggttggtggttaggttaaatatttaaaacaacaaataatattatcaacgaatttaaattatctcaaaatgaagatcccttgtacaaataacgtgatagtagtattattagcaatgctccactcaggatacggacatggagtaaaggttagaaaaggagctgtggttacaaatggttatgggtgttcagaaataggagcgtcaattcttcaacaaggaggcaatgccatagatgcagcgatcgcgtctctattctgcgaaggggtttcgatgccacaaagcatgggactcggaggagggtttctgttgacaacgtttaacaagacaacaggagaggtgtggacgatgaacgccagagaaacagcaccggggaaagcgcaccgtgacatgtacttgagtgatcccgattcttccaaatggggaggtaatgcagtggctgtaccaggcgaattacgaggctactggcaaatgtataaaagatttggtggaggcg

SEQ ID NO: 13525 - DNA, 498 bp, Diabrotica virgifera
  SmartBlast Evalue=4E-49; Info="Misshapen, isoform A n=1 Tax= Drosophila melanogaster RepID=Q9W002_DROME"
ttcaccagatccgttaccgaccccgctccgcagtattccatgaccagccacaactgatcatccttcccaggtggtgatttcttaataaacgctccatagtaagtcgcgatgtttcgatggtttgaatatttcttcagtacgttaatttccaacttaatttcttcttcttcgtcttccgtgacgtccatgactttaatggcggcgagctgtccagtttttgtatgtcgacccttgtaaacttgtccataagtgccgttcccaacgacttcgatcagctcaaagattcctgctgggtccttaagtgctgtcaagtcgatatcatccagtgaacagttcaccgacgggggcatttgatgcgccattttgattaagttcactcactttaacaatcaaaataacaccgttcttgttcacgaactcgttttacactacaaaattagaaaaatacattaaaggtatatccctagatttggtaaaatctagtatcacactgttgtt

SEQ ID NO: 13526 - DNA, 500 bp, Diabrotica virgifera
  SmartBlast Evalue=1E-57; Info=Pleiotropic regulator 1 n=2 Tax= Aculeata RepID=E2B378_9HYME
tgtgttgggtgacaacataaagcagtggaaatgtcccgaaggaaagttcattcaaaacttatctggccacaacactatcataaactgcctggcagtaaatccagaaggcgttttagtatccgggggagacaacggcactcttcacttttgggactggagaaccggatacaattttcaaaggttgcaggcccctgtccaaccaggatctatggataacgaagctgtcatatttgcgatgactttcgataattctggatctaggttaataacaacagaggctgataagactataaaaatttataaggaagatgatacagcaactgaggagtcgcatccgatcaactggaagcctgatattcttaagagaagaaaattctaacgtgttcttttacttttttatcggtttatgtgataaacattcttacaaaggatacaaagttttttaagtatgaataattattgtattttaaagataagtgattgtaatataattttttacc

SEQ ID NO: 13527 - DNA, 498 bp, Diabrotica virgifera
acagaagatcaaccagaaaaacccatttataaagttagagaagaagagattatactgcaggaagcggaagaggagatagtaccatggaaaaatcgagctattgttcttaagaagaccaaaatcgagaggaaagaacagaaaaaagatgaagtggaaaaagtagaacttaaaccgtttaagaaacaacatatcgaagatgaagaattcattagtgtcgatcaagagaaagaacaaacaagaccagtagaggaacagaaagaggaaattgtagaaacacaagtagttgaaactaaaggttggcgtagacaaagacaacctcttaaaccagaaattaaggacgaaaagccagaagcagagggtgtagaagataagcccagccaagtatatcaagcaacagaggaagacgtaattccacaaaagcctaaagaagagatgattccatggaacaaacaggagattgtattaaaaagaactaaggttgaaagaaaggaacaagtg

SEQ ID NO: 13528 - DNA, 499 bp, Diabrotica virgifera
cttatgcagcagcgcggaaaagctgcacagatgctgttttcttcttcctggatcccgctttccaaatattttccttgcaggatggtttgtatatataacaccggcttatagcgtcctgcgccttccggttcctattttccagccgcgtcgatctgtccaatctcctggtcgtagatctctctcagacattgctttctggattccgtttttccgggtagttttcggtctgccccttttccttcttttcgggggttgccattccattactagctttgggagtcgatgttcctccattctctgtacatgtccataccaacaaagttgtttttatttagttttttctattatgtttattttcctcttcataatatcctgtgttcctattcacaagttcatttccagtgcgagcaacttttgttttgttcgcttattcagttgccaggttttacatccatacagtaccacgcttttaaatatgctaatatatatctgtgtttgc

SEQ ID NO: 13529 - DNA, 499 bp, Diabrotica virgifera
  SmartBlast Evalue=3E-34; Info=Protein RFT1-like protein n=1 Tax= Harpegnathos saltator RepID=E2C1K3_9HYME
ctacagatgatgatgttttcttggctttatcgaaatcttatcttaaaataaggatgatttaaattattaaataacaaatatggggcgcaacgttctaaaaagtagcgttgaaaacgcttctttcagtataatttttcaggtattttttagatgtattacttttgttttaaatgcttatataataaggacagttggccaggaaatcctgggtattatgaatgtgagactgcttctcctggaatcgactattttgtttttatcaaaagagcccattttaaaagcctgtctaactaatactagttcaagaaattgggcacaggttatcaatcaaatttggttatcagttccattatctgtttttattaacatattgttggtgtatgtgtggatatatgtattaacacctatagaagacaaatatctacatcaatatatactcggttgctatgctgtcgcattatcttgtatagttgagcaaatgtcacaagttgtagttctt

SEQ ID NO: 13530 - DNA, 496 bp, Diabrotica virgifera
tttctaatacaaagattagacactcttttgacctgaagagtcagaaaaaaccaagcatttcagaacaacgaagaaagtctagttttgaaggagatctgtactcgccagaacactcaacaagctggatgacattacagcagagcaatttaatgactttattctacttgtcaataccaaaaatggagttttacgaaatacaacataaaaaatagaaaagtcacaagagtcctgaaactaacttaatttatctttgtaatagtacaaattattaatgaaacattgagacttaagaatcataatatgaaaaaataaaaaccttatcttgcaaaaggtatatccaaaatccccaaaaagggctgtatcacaacaaaacgttttcggaaccaacactccatcatcagtgccatcacaggcctacatgctccaagccaccaaaatgtacgggtaaaaaccctcacattgattccaaacagttggggctacattacattatccg

SEQ ID NO: 13531 - DNA, 499 bp, Diabrotica virgifera
tagcaatagtaaaatgaggcgatcaacggcacctcccaggccgctgagggctgcgtcagtttgtctagctgaaaaacgaaagtggtctcaaattggagacgcgcagaatcgaaggtatacacccgaaaacgaagagaacatgtcccactatagtaatctatctccgtctccttgttcgccgttccatataaaatgttgtagcgaagatggtggacaccatattgaacattccggctcgtcggatgatgaggtgcaccacttcttgtacacacgggctactcctgtacagttccgcacttctcctcctttagaagcggtaaaacctgaacgaagatcaattgtaacgagcaagggtcggtcggacgagcccgcctgccaaactacttcactacgaagattccccaagaaaaagaaccaagcacatgaaacatgcacatatccagaggccataccttgatttgaaaaatgacaacagatagaaaacgaggtacagtaacgg

SEQ ID NO: 13532 - DNA, 498 bp, Diabrotica virgifera
gttaaataaactctatttttcttatcagctgtacatatatattagacaaagctaaaacttatcttgtaagggtgcgtctatagcgcacgctggttttctgaagtcagcaccgagtacgtgtgcaaataatcatttgtatttaaacaggcctgtccaaagtgcacctgcgcgctgttattaggattattcgcacacggactcggctttctgactcggaaaacagcgtgcaatggacgcgccctataaggatacaccaaatgttggagctttcagggtttatgcaagctcttgacagtactaacaaataacagtaactttttctaatcctgttttcacatcaacaatcacatactttccaatattttgatttacctgttaataatacatagataaaaatattatcttcagctctaattctatggatatagggtatcaacgtcatcaaaaatgtagacacacagtgcggggttttaagtaaaaaatcgattcagtaacaat

SEQ ID NO: 13533 - DNA, 499 bp, Diabrotica virgifera
catccaaaaaattaagaacaattcatatcgattgaatttttaaaggtcttacacaaacattattgtttttatagtggaataactaggtgacattgatgtcacaatgtagggcactcgtttcgagaaagaccttgtcagctattttgatattattaatatttcacagtcgattcagcgtctgaactgcctgcctgccgtgacgatactgcagagatcacaacactattatcatcatgtttgtggttttacaatatggctagaaaaggcaataaattactacatctggcgttttaaaagctcagaacctctctgtagttttaagaaacgtcttcgattgcatttccaaagtgcgttattgacataaggtctgataaggtaattaatttatggggaattcagtttgttaaactgaccacaccaacaacatatagttagggatacatttcgtttcgtaaaacttaacggcccttctcagcatctggtttgtatattaaatgtg

SEQ ID NO: 13534 - DNA, 494 bp, Diabrotica virgifera
ctgcaataatataatcgaaagtatactctttaaaccaacgtggattatttcttaatttcgaatataaatgatgcaattctccaaatttattttgctctaaatatttatatgatatttgttgtctttcttcttcgtttatggaatttttttagagctaagtatttagaatatgaatgttctagtaacactgccgtacactccccatactgaagaataggaatgaattgacatcgtcacgtttgtcctaggttgagcgatggaaggcgacgcgatgcgacgctacataagccacacgtcgtgtgaagtactggtcgcatcgtatcgcatcgcagcgcgtcgcgtcgttttccgtcgctcgcctaggacaacgggttagtagcgaaagagagagaaagagtctattatacaaatttccgtgttgacaattagcgagaggggcaattattgcgagagcgtaatggattttcacgacgaaaagatgagcacacacttaa

SEQ ID NO: 13535 - DNA, 498 bp, Diabrotica virgifera
attgttgccaaacgtcgctgaatttcttgtaaaatgtgatttatgttaaatgtttcttcacaaattgacaatattgtagtaacgaacggttacttggttacaatatgttgggaagtgcgcgtaatcttgacaggtgacgaagtatcaagtactgaaactgttttgtaaaaagatttaaacacttactgcggaatttattgagatatgttacccagcgtttgcttgtttcggttgtagtaataaggcagtaagagggaataagtgatttttctgacgtgcagatccgtattaaggtgatataactgtacttattcgtttgattttgaggttcttctcgaaacgagaacttttttcttttgctttgtggaatcttgatttacattccaacagttcattgtcgatatcggatagttttaaaacgaggctcatttttgcgccgtatctgtatcgagaaaaaatcatttatttcgatttgaaacaagtggacctgaacaataa

SEQ ID NO: 13536 - DNA, 497 bp, Diabrotica virgifera
tttggaactaccagacagtacctattattctctctactactggaatcattccgaagaacattctagaaaccataaagtagttaggtacgaatgaaaagctctaaagatagaccatatttaaagctgtaccactttttaaacaatacacgaaaatttttggaagatactccagcataccaagtcacctagggctcgatagcacggaaagagcgtcactagagctcaatcattttgataccgtaagtatctgggatgagtgaattttccccttagaggaagtaagagccatgtggttaaatctgaaataatggagttataaaatggtcaaaaacggatatagaaggtcttcagcataaaataagaacacttctcacaaaggcacaaaaatatcatccactcagtgcagtagagagaataacattaccgcggctttaccatctactctaaatagcgcatttggcgcagtagatgaaacagcgctgcttaaactgatggaa

SEQ ID NO: 13537 - DNA, 497 bp, Diabrotica virgifera
gagttaatactccaatgaaatcttgtacagggttcaccttgttcctgttcatgtcttgacaagaaacaagattccatttggtgattagtcctctaattgatgtgaggctagttagttaaactcgtacatagattgcagcatattgtgtagcctaatatctctaaaggatctactatatgtttaaccaggtcgttttgggactggccctgtcaagcctctttcgtttttggatcttcacaaaatctgtacaacgttatcatgtaataaaatgacggtcacatttaatctattaagctataattatgtcgatggggaaagtgctaagtactcgaaaatggccaacagattaactcagacttatggaaattgactgcgccatattccaaatagtaaccaacagttataatcaatagtaaaaaaccgatgaattgtttgatccgtacgaatgttgcaccaatcaggtgacactgttttggagcaactaacctggtcctggc

SEQ ID NO: 13538 - DNA, 499 bp, Diabrotica virgifera
ctaaaccaagatgcaactagcaaatattttaattattgctttggtctgcgtaacagcgtacaccgccaatactgaaaggggaagattatctgaactggttaaggaatgtcaaaaagaatctggttcaaccgttaatgaaatcgaaatcattagaaataatggagttataacccctgatactggcaagcaagctctttgtgttaatcgtaaatttggtgtactggatcagaatggagacgttattcctgatcagttcaatcaacacattgaaattttgagtggtggcaacagtgatgctcggaaagaatttaaagacaattgtagcaaaactgaaggagaaaatcccgaagctaaagctatcaaatttgttaaatgtatgcaaaccgtgttagcaaaatatcctgtttgatttgtttaaaattttaaggaatccttacctgaaaggtaagcaatgtacaaatatgtaaaataatttgtaataaatacatgaccaaatatg

SEQ ID NO: 13539 - DNA, 498 bp, Diabrotica virgifera
  SmartBlast Evalue=2E-57; Info="Homeotic gene regulator, putative n=1 Tax=Pediculus humanus corporis RepID=E0W1C8_PEDHC"
aagagcaggaggtcttggactcaacttgcaaagtgctgatactgttatcatctttgattctgactggaatcctcaccaggatttacaagctcaagatcgtgcccatcgtataggccagcaaaatgaagtcagggtcctacgtttaatgacagttaattcagtggaagaacgaatcttagctgcagctaaatacaaacttataatggacgagaaagtaatccaagctggtatgttcgatcagaagtctacaggctcagagagacatcagtttttgcagagtattttacaccatgacggaagcgacgaagaagaggaaaacgaagttcctgatgacgaaacagtgaaccagatgttggcccgaagggaaaacgaatttcagcttttccagaagatggatcaggaaagaaaggaagaagatgaaaagaccggaaagtcgcgacttattcaagaagcgaattgccgaatggctgttgaagcaagacgatgaaatctactcgt

SEQ ID NO: 13540 - DNA, 497 bp, Diabrotica virgifera
gcgagggtgaacgggtgccacatccttggtatgtgcgatctcataagaaaatgaacgtttgttttgtttggtttgtacaccgcgcacatccatgtatccccggcatgttcgcacctttagtctgctgagagtggcatgcccctacaggactatatatgcggcagccttgtaggcatcactggatatattccgctacatgtcttggccgtgaagaaaaagacccatatgaaagaagaaacctaggtcttactatgaccgaaagaagacaagaaagggaaaggtcaattgaaagatggctaaaagaattgaataacaccgagtatgtggcacaatggacaaagattctgatcacgaacctaagagagaggtcgcagactactgattattttctaatgctgttactcacaggccgcgagtgttctgagggttctgaaaggcagacacggatgaatgcctatactgcggatacccggacactctgacacatacgatgttag

SEQ ID NO: 13541 - DNA, 498 bp, Diabrotica virgifera
caaaatgattgttgagctttactggagcgagtcctaagtctataaggtataaccactgtgacttaataatgaactctgcgattggagaaatttttgccaagtaagggttgagatactgttcgatgtctgcacctatcagttctacctgggggtttaaaggatctggatggacaaaggatatgagtatgtcatattctagactcaaaggcattccatactctttttctgtgtaattgtttacttcgacttcttgcattcttgtgagaggcagtgatgctctgtagactcttgttgtgtaccaccatattggtaaacctatcacaactaacactatgaaatacgaaattacactatatatcctataatcaccatcttcctcattttctgtcgcttttgttgaaggagttttaccatcttttatcgatgcactcattctttatttttcatttgtatctaactaatctaatttgttttattatttttttgacggtagattta

SEQ ID NO: 13542 - DNA, 490 bp, Diabrotica virgifera
tgaagtcaactttatcaagtaacaagacatttactcaacacactacacattacactatttgattgcgaaatcaaccgtaccatgccaatggcctaagttgttgagacatttaagctaaatgtcaaaaaagctgactacttttatttttatacataattaccattttacaacttttaagtaattagtacctgaaaagcacatagttcatttaagatattttttgcgatatcagttggacaagtatcaaatcgaccgattgttataccgaaataaactagagtagaggttgtttttataatttaatattcaagattcgttgtcatttatagatttaattactggcgattttcgtacaaaaagttgtgattccaaaagaacatttatgtttgtttcatggacttcgagaaggtattcgaccgagtgcttacaacacgatacatttttcgattacctacggacagcaggacttaaccactacgatataagagtg

SEQ ID NO: 13543 - DNA, 499 bp, Diabrotica virgifera
  SmartBlast Evalue=8E-11; Info=Tau-tubulin kinase 1 n=1 Tax= Camponotus floridanus RepID=E1ZUV6_9HYME
tgctgatatccttattcgagcggtgcatgaagcgcagaggtgttaaagaaactgatccgtacgactgggagaaaccatctcagaccgacaaccaagtggttacgcagcaaccagtgacgggtacgaccactcaacaagctacagctccaacgacagttccaagacacacccgacacactcctacaacggataacaaccaggagaatatagagcccacggacaacaaagaggcccaaatagacgcccgaagacgtatagaaacagaaaatacggcgcctttagtcaccgatacacagataaatgcaacgagggcgaccgttgataagaactgcaatgctacagctgtggaacaagttcaagctcgcaaacgacgagccacatcccacctcgaccaacctcccgaccggctagacaacgacgctgtagcttcagcaaaatccacatcagacgctgttaaaccagcgccattgcgtaagagccagtcaggagtggctacggt

SEQ ID NO: 13544 - DNA, 500 bp, Diabrotica virgifera
aattgcatctttgaattattgttcgaatatttcatagcagataaccaagatgggagtagttcaagtagctttacttgtattgctggcgctcgtaatagtacaagctttaccgaatccaaaatcggtagaagagatcgaaaaacccgccaccattcttaaaccacaagcagaccaacccgacagtacaagcagtaccgacgaaaatgttaaagttgaaaatgtaccacgcagagttgctagagaggcaaatccacaaaatggccatttcgttaattatattagagcagatgacagattcccaacacttgcttagataaaatatttacctctaatttcacattgcttgcatttatttctaataatgtgataatataataatatataatataagatgtatgaccaaaaattaagtttataagaagtatattttagttttagagaagtcattttgtacagtatgtacgtagttgttaaattgttaaataaatgtatatatctct

SEQ ID NO: 13545 - DNA, 499 bp, Diabrotica virgifera
  SmartBlast Evalue=1E-56; Info=Peptidyl-glycine alpha-amidating monooxygenase n=1 Tax=Aedes aegypti RepID=Q171A0_AEDAE
gggccagtccgtgaggcacttgaagggatagaatttctggtgcagtaggaaatattcgaagtaaaacaccagcagcattatatttgagtattcttgagttacagtatccgtcagcaatgaagatctctcctgtagaggcaatagcggttgatgtaggtttacagaaatgccttttatctgctcctggttctaatctttggccaaaagtctgagacggctgaagctctccaggtttaaacttaaaaacttgatgcagagcgacgtcggttacccaaatgttgtcatgcctgtcaatagttaagccgtgtggcatgtagaagaaatcagctccccatcttccaagcacttttcctgtttgtggatctagagtaagaactgtatgttctcgtattggtcccagatgcgtttgttggtagtggtgcgtttcattgaatgtagtttcatcccacactcgatctactcggtggaatataacaggttgaagagcagaattaactga

SEQ ID NO: 13546 - DNA, 487 bp, Diabrotica virgifera
gttgaaactaaagtaaagacaaggagagaacaggcatttaatataaaaatgaagaaaatcgctacgaacaaccaagtattaaagtatacaaacttcagtctgaaaatattaggaaagaatactgtcgtaaattaaatgaagaaatacgaaaaacaaattggaaaaatgaggaggatatagaaatattatggaatatttttaaggagctggtgtatgcaactgggagtaaagtatgtggggtaacgaaaggaagatatctgaaaggtacagcttggtggaataatgacataaaattggaagtttcgaagaagaaaaaattgtggaaaagtatataagcaataaaagtgaaagtaattatcaagaatataaggaacagagaatactggttaaaaataacattaaagaagctaagaatcgacaatgggaagaatttgaataaaatggaaagtgatagtaagggtaatgcgaagttgttctataggacttt

SEQ ID NO: 13547 - DNA, 491 bp, Diabrotica virgifera
cgagcggcgttgtattttcacactcggatgcaatcgagaattgaaaataacaatgtgaaagcaaaaaaaatatatcctctttctacttatcacttaagactgatctcttccttgtgagctaacttttccttgtgatcactgacaaatgtgcacattctgattcgctcatttttcaatatataatgtaaaatataatatacataataataataggtttgttccaacacaacggaaaacagtcatgtaacgatcacgctcctgtgcagtaaacaaaagttgttatcgtccagtgacagtttcgtgacgatcatttcagtaatcggataaacgcaagtactcgttgggctgatctgctcactagaatcactttttcattaaaataaatttattttttgtccgtctttttcaaaaaatcgcataagggttaataataattgcagatcgcagcgtatagatgggcaaaatgtgtatggattttcttatcagatatc

SEQ ID NO: 13548 - DNA, 495 bp, Diabrotica virgifera
  SmartBlast Evalue=1E-19; Info=Transposase n=1 Tax=Salmo salar RepID=A8C5I4_SALSA
aaatacataacaattaaataaaacaataaactatttaacaaacaaattgaaagtagttgtttaaaagtcaatagtgtacaaaatttcaatgtaaaacgaatattatttaaattgtttttattttttttgtattttgtggtagtcagtgttatcacctctagtccttatgcaagcttcagtttgcgcgggcacgctcctaatcaaattgtcaacattttgctgtggtaggttgctccatcctttaagagcagcttttactagccgtgctgtgttttgtggattatcccggcgagctctaatttttcttttaagcatatcccacaaatactctataggattaagctccggtgagcaagcaggccactccaaacaagggataccttctgcttcaataatgtctgtagtcactctattggtatgtagaggtccattattatgcaataaaattaaattttctcctgttgcacctctccagagcctgattacaggttatca

SEQ ID NO: 13549 - DNA, 497 bp, Diabrotica virgifera
aatcttttattagcatatagtcgtagattctatagaattttatactacgacgttggcctttttatttttcaatgaccgggccggggatcgaaccccgatcgtaaatccgctaggtttgtcgatcaaacgcctcagcccattgagccatctgaccgatagtcagtctttctatatctttctattaattttatcttatgtcttttttgacttcttttgtccgaaaggtcttgttgatgtttcaacttttactaccatgttttataaatttttatattttttattagtacatatatatattctacggctaaccaatgagaggcttacaatgagtacgctgaaaaccaccaaagtggcgcaaaagatggaaaacataatacgttgtgaaataaaaagagatcaaacttgtagaggtggaaaattgtcgttagacacctataaatttacattacatagtagtttctcacatttagacgttatcttaagtgcttgttgacttc

SEQ ID NO: 13550 - DNA, 496 bp, Diabrotica virgifera
tatttaatattattactttcaactaacagtgaatgtgttctagagtattcgtttgtcactatgttaaaaaataaaaacttgtaataatttaaacaggtcataatctcaaaatctgctcttttgggcaaaatggggtaccaataggtagggtaaaatggggtatcctttttaccatacctattggtagtctttaccctttttaccataccaagtaagatagccgatgatcaaaccaaatcacagacgagtaagaaatcgcaattgaataaaactaaaaaagtagagtcagattcagaaggcgaagatagtgacactgactggttctgcggaaacttttattcaagttccacagaaggatggataagctgatccagttgccttaaatgggctaaaaattcatgtgcaggtatagaagatgaggatgatgaagtagtacttgtatgcgaattgtgcaggtatagaagatgaggatgatgaagtagtacttgtatgcgaa

SEQ ID NO: 13551 - DNA, 491 bp, Diabrotica virgifera
ccccacacgactacccaatttttattaaaaaatcaaatttgtcaaaatcggcattttaacctaaaaataaaaaaagatgaaatcacggtttaactcgctacaacgatctatttaaaattttttttctgaaatttttacagcacatatctcttaccattgtgaagactatgacaaattgttgtagactttcagtcttcttctcgtaaaagttatgaatttttaaaaataaaaggtgcagattcgtgaattgcaaagttaaatcgcaaaaattaagtgaaaaaatttaaaatttatctatttgatcacgtctatgttaaactatagagtccaaagagaagtgttatggggagttttagatctagacgtgttatagaaaaaaaaatggtgaaacttttaattttaagaaaaacgttgtttaattttttatttttatggtaaaattgcgattttgactttgattttttaataaaaaattgggtggtcgtgtgggg

SEQ ID NO: 13552 - DNA, 497 bp, Diabrotica virgifera
acatttccagtatgaaggtcacttttgtgttactagtttttatctcgtgtgtaaatatgatatgttcccgaccaaatatttttaaattcaaagatgccaaaagaatccattccgagtgccaagcaaaccccgaatcacatgtcaatgagtacctggaacagcttcaaggattaccaccgattttggttccgaatatggcgaggcataccctttgtacgagcataaaggctggacttcaatacgaaaacggcgatattgcagttgagagattaagaagcgacttggaagaagtttcaaacaacgaaataaaattaaagaaattgttgatacctgcggcgtgcgagcaccgggaagccctgaagatgcagctatggcatttggtaaatgtctatgcagtcattggtctcaacatgcattatgtgtgtgcagcacatagtaaaaggaaaaaacatttttttgtatataaatttatattaataaattcatggtatcttgct

SEQ ID NO: 13553 - DNA, 497 bp, Diabrotica virgifera
attattgataaaaataattcaaaactgttgagtaactttatacctatttggatacatttagaatcattccaaaaaaatatatgaagagtaccaaaaatgagcagtgaaaaacttacctcagagcaaaaatcatttctagaagaatgtaatttagaattttcagaaagatacactgatgcagatgttgaattcatgaaaatattcgattcagaaatacctccgccaccaattgtatcaccctggtatggtagacagagattcaacaatagggatagggacagaccaggaggaagctacaacaactacagaaatagggacacaagtcgggattatagcgaaaatcacagaggtagggagtacaggcatcatcatcaaagggatgatagggagtataggcatcctcagcaggatagatttagaccttactgaatgaatataccttgtcaatttttaattgctgtttagctcaaattgtattacctatatcgattatcaat

SEQ ID NO: 13554 - DNA, 497 bp, Diabrotica virgifera
  SmartBlast Evalue=1E-56; Info="Trafficking protein particle complex protein, putative n=1 Tax=Pediculus humanus corporis RepID=E0VPD4_PEDHC"
caaaaataaatggtattaaattaaaataacatgatcggtacttattattttgtgattgtagggcacaatgataaaccgctttttgaaatggaatttacaaacagcaaagattctaagaaggaagaccacagacatttaaaccaatttatagcacattcagctttagatttaattgatgaacatcaatggaaatcccacgcaatgaatttaaaatctgtagataaatttaaccaatggtttgtctcagcatttgtgacggctagtctcataagattcgttattgttcatgacaatcgtaatgatgatggcattaagaacttcttttctgaaatatatgaggcatatattaaacattccatgaacccattttatgaagaagacacacctattaaatcacctgcatttgagaagaaagtacagatacatggaaaaaaatatctgtctaattaatttatgtatctttttttgtacatattattagagtaaattaaatttat

SEQ ID NO: 13555 - DNA, 497 bp, Diabrotica virgifera
gtttaaaaatcccctatagggctacagggcaattcgagttacttgtcacctcttttaacataatgacctaatgttacctattgacccacttaccacgtgtgggagtcatatgttgccctagggccgtagccataggaattttatccatcctttggattttgccatgttggcatctatataagacttttagtctgtttttgaaaggctttcctttgtattttttggttggctcaccatgttcctgtaacactgatgatgctcttgttacagagcgaaaacgttttgtttctatgtttgtagccctatagtggctgtttaaactaatataccttttaccacgacaaaattttttattaaattttacttgtaattaatggtatacagccagctacaggaaatttttccttgtggatttttggaaattatttaatgcgggatgtttcttagctctaaaattttccataaagcagaatgagataagctgtcaaaggcacatt

SEQ ID NO: 13556 - DNA, 490 bp, Diabrotica virgifera
ttactttattttgggtaaacaagcgtgcttcgtttatatctcgtaagggtttgttattttagcgagggtgtgactacgctgcgtgcccgttgtgtcgatactgaccgagaccacaacattatgtcatcgtgtctgcggttctaccatgtggccagaaaaggcgattaattactaaatctggcgttttaaaagctgagaacctttctgtagtttttaagaagttgacataaagagcgtggccaatctggcaatttgtgtttccccgaaaaagtcattaattttatacaatctggttttgtatttaggagcgaaacacatgtgaattttaaatgacccatattattttcgtttagaaaagaaagttaatatttaaaattagcaattaaaaaataataaatgaagcgtgtcgctatatattttttaagataccattattttaccaacaaaaataacaaaccggtatagtaagacattatatagagagtatatt

SEQ ID NO: 13557 - DNA, 495 bp, Diabrotica virgifera
gcaatactgttggaaaaatatatctgaagacattgttgatgtgtgtagtttacctcattttggcaaaataatttagcttttttgtggacaccttaaaataactagaattatatacgcttaaatttgaatctactgctaatacgcttaatattaataatttatacttgaaaattttcaaatttcatcttgtataaatttacgaaatctgtgattcaactaaatgaaatttcagattgggaatgatgagtcgaatttgtgatttacttgtttaccatgtccattaatctacattaaattctaccaaatatttggacattaaaaaaacagttgtctcttatcttggttattttcaatgcctttttcaataagattatatcaacattgttataaaatttgagataattgacatctgtttacagattatgaatgacaaagacaatgataggtatgttttttaaaagaatgtatatgtagagaaagtgtgaaatgaacatg

SEQ ID NO: 13558 - DNA, 497 bp, Diabrotica virgifera
gccggacttaaatatttctgccatttactttcactgcagttccaagggttattgtttattattatataaaaatcattgctcatgttaagtttctgaataaattctggttctaagtttgtcattttgttgtctgagatattaagaactagtgaattaaatgagtttaaattaaaattatatatagactctaacttattatatgaaagatctaatgaagttaagttgcctatacttgataatgccttaaaattaaagctgtctatacaattatgcgacaaattcaaaacttgtaagttatctaggctatgaaaagttctttcttttatatatttaagtttagtgtgtgttatagagagggtttgtacgtattggtacttctgaaacattgctgagttcaaaccgctaattgaagaattggttattgacaaatcaagtatgtcttgtgatgcaatggtaacaatcatattcgaataaaaatcagtttcttccatgcctgc

SEQ ID NO: 13559 - DNA, 498 bp, Diabrotica virgifera
ttggggacgcccctgatgggaatagttatgtcaggaactggtgtgaggaagactcggtcgttcagagctcttctttcgtcgttccagttttggttccggcgatcaagtcggatgtcgatgtttcggtttctgaatctgtcggttccagttctaaaacttcgcctgtcatacaagttctcataaagtctgtctttctcgttgacctgcctcctggtgtctttcctaaagggcatttcctcgacgacgctctccaccgacgaacggcttcctcggacattcctgcggctgatatcattcctgcttaaattctccaagaatccaaaagtggtggaagtcaaacaaataaaaaggatccagacggacttactgcatatgagtttttttagcggcaacatgttggacaggaactgaggactatttctcttcttctttcgaggtggcttgtgtggtcaagttggtgtacaatgattaggacttgtatcttgttgtgttccccaa

SEQ ID NO: 13560 - DNA, 498 bp, Diabrotica virgifera
caagttttattttattataagttttcgtttcaaaatgagaccaacaatttttggtatcgttggtttgttatattttatgtactgtactgaagagagtatcgcattaaactgctatcaatgcagagcccagcttggaaatggatctaactgcgaaagtgggaaggatatggatccagcttggaaagttaattgcttcccccctataagcactaacaagacagttgcttgtgtagctggtgtaaggaataatactattataagagattgcggaaacaccaatacatgcaatgaaaaagtaccatctggatattatataaaatggtgtaaaaattgtactaccgacttatgtaacactcagacttcttctgtttctattattacaccaactttattaactccaatcattatttttacagcagtactaacttacttttaattataatttttaaaacacatttgtagaatttttttaactaaaaataaaaacagtttcttttt

SEQ ID NO: 13561 - DNA, 495 bp, Diabrotica virgifera
atttataatgaggttcttaattgcatcatgcctattgatttccagtatcatttgtttaaaggctgcaccaacgatgacagccgaagaacaacaaaaagaaataaaaaaaattgaaaaatttcaacgagaatgtacaaaagaagtaaacatcgatactgtcactatgttcaaaaatatgaacaattttggcactacagtggatccgatatatatggactatttatcatgttactataaaaaactaggttttcaagacgtagatggaaaaattgaatacgagaaaatgctcgatttctttggtgttttttccgtaggagtagatcgttcgtatataatcaataaatgtaaagatactaggggatctagtcacggtgaaaaagcctatagtgcaatgaagtgtgtagtgaataatatacaataataataatgatatatcaatataaatttgatgtttcgattctcactacggaaatcattttcaaaaaaatattattt

SEQ ID NO: 13562 - DNA, 498 bp, Diabrotica virgifera
  SmartBlast Evalue=9E-10; Info=Dysbindin n=1 Tax=Camponotus floridanus RepID=E1ZWI9_9HYME
ccattgtgttgggacaataccgttctagaaaggaagactcccttgcaagttttaaaacagaacttaatgctaaacacttaaaaacaatagaagagtatgaaatgaagaagaatgctgttctcgcagaacgtcaacaagtgtttcaagatgcttttaaatctgatttagaaatgtataaaacttcgggggcgattcctggtcggattcaacagaaaactcagaacagcgccttgctagaagaaatacagctagatttggaccaaaacgaactagaccaattttttagtgatgagaaatcggggggcagctaatgaactggattattttacttaattttagtggtgagatgtgagattaaataatttatgggattaagtacttttattagcttaagggagattgtaataaagttgtatatacactgttatcattttggagacatatttttgtatatattgaaatttatattacatattttatgtgaataaaacactattg

SEQ ID NO: 13563 - DNA, 489 bp, Diabrotica virgifera
  SmartBlast Evalue=2E-56; Info=Putative U5 small nuclear ribonucleoprotein 200 kDa helicase n=3 Tax=Aculeata RepID= E2A6Q4_9HYME
taacagtgagggaagaagaaaaactagaactgcaaaagctcatggaaagagttccgataccgataaaggaaagtatagaggaacctagcgctaaagtgaacatcttgcttcaagcgtatatctctcagttgaagctggaagggtttgcattgatgtcggacatggtttatgttacccaatcggcttcgaggcttatgagggccatttttgagatagtgctgcatagaggatgggcacaattagcggataagtcattggctttgtgtaaaatggttgacaagaggatgtggcagtcgatgtctcccttaagacagttcaagaagatgccggaagaaatagttaagaaaatcgagaaaaagaattttccttgggaaagattatacgatttgggtccaacgaaatcggtgaactggtacgcgttcctaaattgggaaaaacaattcacaaatatgtacatcagttcccaaagctagaactatccactcacat

SEQ ID NO: 13564 - DNA, 498 bp, Diabrotica virgifera
ttaccaagatgagatatgaacatcataaagtcctttctaacttgcctgtataaataacatttattttttacaaaaatattctatacacaataaaacctataccctcacagaggatatcgtgatatttaacaatcctcgtttgcatatttctcctttatctacatttttaaattaaaatacaggatgattcgttaaaaatctcatttgttttctagaataaaataattggtcaagcgataaaacgttgtaaagtagatattggtcattacaaatatgtactttgtgagattctttatgtttgtattttcacatattgttaattaaaaaaaatagcaaaagacgttttcaattgttgttataaatagcatcattctgtataccaatacttattaatatttgacaatctttatacatcaccatgtatatagtgaacaatttgaatgttaagtctcaatgacgacctctcgtggatttcagctgaaccagcttcgagggagt

SEQ ID NO: 13565 - DNA, 498 bp, Diabrotica virgifera
  SmartBlast Evalue=4E-36; Info=Dehydrogenase/reductase SDR family protein 7-like n=1 Tax=Anopheles gambiae RepID=DHRS7_ ANOGA
aaagttatatgaatctttaagtttggtgggttctgtctccctagcagtatcattgccatggatcatatttagaatatgcaaagctttgtacttacagaagggtctaaatgagttatttggaaaggtggtggttattactggcgcaagttcaggattaggagaagctctagcccatgaattttacaagaaaggctgccaagtagtattatgcgcgaggagaagacaagaattagaacgagttagaacagatttgttacattcacatagtactgtacagacacaccctcctattattatccctcttgacttagcagacattgataacttgcaagaacaagtaaagaagatattatcaatcacaggaaaaatagacatactaattaataatggtggagtatctcatagaggtaatgcgctctccacccatgttgatgttgatatgaagattatgacagttaattattttggaactattgctttaacaaaagctgttctcgt

SEQ ID NO: 13566 - DNA, 497 bp, Diabrotica virgifera
aacgtggaagaagaaaaatcaaaaacctacgttttgctgatgacacggttatattgacgtctttaccagaagaactccaacaaattatgaataggctgagtacggaatatggattgaaaataaaatatacagaaaaccaaagtaatgatcattgacttactaatcgtggtattttatttctattgactacctcttttaatatgggtaaccacatcctactgcattctaccgaggaatttgcgacacaattggtttcatttagcataattagagcagcttctttgatttttatctttttactatctggatatgcttgagttggggttgctttcatgtaaacgaatgaactatctatcggtaaagtcgtcccaggaacgcaactcataaatattgggattatcatttaaaagtcttctactttaaaatgtataatatatgtctgaattgccgatataattgagtcagattatataacttattagaattttttaccaagc

SEQ ID NO: 13567 - DNA, 496 bp, Diabrotica virgifera
  SmartBlast Evalue=7E-44; Info="Glucose-6-phosphate/phosphate translocator 2, putative n=1 Tax=Pediculus humanus corporis RepID=E0VXT1_PEDHC"
tggaagtattaatttatatttgctaaatggctcgaacttttctgtggactgcgcctgcgtttgaagctaatcggtcttgattatcatactcctgtgcctttatgtacatcaaaacgcctattatcacagttattgtgcccaaaccgctgagcaaagtcacagggttgccgaacatcactaccgacaaccaaatcaggaacgctctcttcgctgtgttggcaacgctatgagtgacgggcccgatgtaatccatcagtacatacgctgatatactttggaaatggaaaaatatcccattcaatatgaacgatatcactagtttagtaccaatcttctcgccgctgaaatccaccataatcaacgtggttggtatttgtacaattatactagcaatgctagtataaaactgaagctctgcgggagtatatttaaattatctccagatatgagcatttttgaataacattctgtacacattcggtgacgttggtggcca

SEQ ID NO: 13568 - DNA, 498 bp, Diabrotica virgifera
tggtatattggataaataaataatatttatagaatttatatgacattgagtatatttatttgccctgttctgtcctggatgaagtaagcaactagagatactagaagccacaaactaaaggtaatacattaatataatttagtcctgaaaattttattggaaagttttatttaatttttgttttgtttcataagtaataattaaattaattaatcgaaataagaatatgctgatcaatctcataacagagagaaaatacagagcataacaatacatatataatgccaaaaaattatttcgtggaatttcgttgaaatttttgccacgctgagcaggaaggaagtgagatgcattttatagatcccctagccttctttgcctcagtattcgtatggtttgtaaattataaaaaccgcgaaggcgttaccagaaaattggtctcaataacagttttattttaatattactttgaattttattgacttggctgaccaaaag

SEQ ID NO: 13569 - DNA, 497 bp, Diabrotica virgifera
  SmartBlast Evalue=6E-36; Info=Protein enhancer of sevenless 2B n=16 Tax=Diptera RepID=DRK_DROME
tattctctttcaatcatccaagtgcagtgttaaatttcatagacggggagtgattaaaagactaattatttaggaaaaacacaaacaaaagtttcaacgattgttgtcttcttgataatatgaggtgttcgtgtttcaaatactatagtgataaaatcagtgaactgttcagtatcttgtgttgactttttgctgtcttgtgtcctttgttttgtattttttcgtgataagactgtagtttcaaattatctagctatggaagcgatagcgaaacacgaattcaatgccacagctgatgacgagctcagctttaggaaagctcaagttctaaaaattttaaatatggaagatgacatgaactggtatagggctgaattggatggtagagagggcctcattcctagcaactatattgaaatgaaaccccatgaatggtattatggacgaatcactagggcagatgctgaaaaattactcttaaataaacatgaaggggc

SEQ ID NO: 13570 - DNA, 497 bp, Diabrotica virgifera
gtatgttctactacatatttagcaggggcggatctagaaaaaattttgggggaactttttgaaattacatttatctataatataaaaatgaatcgtaaaatgtgttcggagccgcataactcaacaacgcatggatcaccatttcggtagtagtatattggagaaaacatggcgtcaaaaaccgtatagccatctaacggcaagaagtgaaaataacgcactatatattattgtagatttcttgattactatttaattcgaattcggaaggggacataaattgcatcagttttcaccccagaatttgtattctgaggttttcacgttgttgcatctctatatacagggtgtcccatttaaaaaacaccaagtttagtattttacggcaaaaaacggattggcctattgaattaagtacaaaacgctgtatctatgccaacttctgtatacagggtgtccgtagatccgcccttcatatttagtcaccttagagtttc

SEQ ID NO: 13571 - DNA, 492 bp, Diabrotica virgifera
ctcgtgatttactatggaatctctaacgcgagaattttactgtcaacgttgcatttggttctctttttaaagacagatcacatgctatgatatttttttgtgacggatattcttgagttgggattgatttcatgtaatcgaatgaactatctttttagtaaagtcgtcccgggaacgcaactcataaatattgacgatatcatttaaagtctcctactttaaaatgtataatatacgtctgaattgccaatataaatgagtcagattaaataaattattagaagaatttttttacttagcaacaacatttttgtttattttagtagtattttgtattttgacaacgaaacccgatttgggcttcgaaacgttaataaaatcattttttggtgggattgtggcttatttcccattaaaaaatagttgattataaaaatgccacaaggaaatagcttcagaacaacaaagagaacttgcataatgaaattattc

SEQ ID NO: 13572 - DNA, 496 bp, Diabrotica virgifera
atggttatccaaagtatacaaaatgtaatgtgcaacatcttcacgtctgcccccaaaattattatatgggcacccgtgcccacttgttttctcgtttctaattttaaattttttacgatcgactgccgactggggtgggatcacgatgagtagaattctattttgctgacgtcacgttctgccctgactgtgacgtacctctgtgtgtaacctcttgttttagagtgtatcacactgttagcaatatttgacattattatactggaataattgcgattttcttctcttacttgtagtattttgtatgtaaaaagttacgaccgagttaactcgggtgagcgcatgagggtatttgttattttatatttttctaagaaaatatgcgctttttttactttagattatatctagtgacaatagtcttgttcgtagtttattttactgtaataaaataaataggtaatttttgacgtatttttgcaaataaatgtgtgcg

SEQ ID NO: 13573 - DNA, 495 bp, Diabrotica virgifera
  SmartBlast Evalue=4E-24; Info="Efflux transporter, RND family, MFP subunit n=1 Tax=Methylotenera mobilis JLW8 RepID=C6WWT9_ METML"
tcatcgcgctggattccggcgacgccgcgctggcccgcgccgcgcgccagcggctggcgctgtacggcctgtccgaaggccagatcgcgcaagtgcagcagacgcgcaaaacgcagcggcgcgtcgactactacgcccccttcgacggctacgtcatggagctgggcgcgcgccagggcgcggcgctgcagccgggcaccacgctgttccagctggccgacctggacagcgtgtggatcagcgcgaggtgccggaagcccaggccgcctggatcaagcccggcgaccaggcccaggtgcagctgccggcgctgcccggcgagcgcttcgacggccgcgtcgactacctctacccggagctgagcgcggccacgcgcacgctgaagctgcgcctggcgatccgcaatcccggccgccgcctgcggccgggcatgttcgcctcggtgcgcctgctcggcgcgccgcgcgacggcgtgctgctgatccccagcgaggc

SEQ ID NO: 13574 - DNA, 497 bp, Diabrotica virgifera
cctacattactaaattaggcagtacatacttgcttagcactttcagctccgggcaatatcagatatttgtctcatgtgccacttttatacagtcactagaaaattgtagaaatgtaaacacggtggccgtgtcggtggcacctgatcgataacagtgtgaacacgggagccgtgtcggcggacttgaaagtatttttctatgtgccaaaaatgggaatgtacattttaccatactctacgttataattctaaaaataatttgccactttcttgtacaaggatgtgatagagcagtggcggatccaggggagggcgatcggccccctttcaaaccaagttatatataaagattataaatacattcgtttattaatttatttttcataaaaaattagtcaatcggccccctcttgacgatgctggatccgccactgggagagagatcaattgtgagctacagaatctacagccaaattttcagcattcactggtgccca

SEQ ID NO: 13575 - DNA, 497 bp, Diabrotica virgifera
ctccatttaacggaaattgtgtcaactgatgtaataatacgccatattatgtaccagttttcattttgtcgtatttggcctcctgtagacgtccgtacttttcaccgaataacgtgtcgtcaataaacgaaactcatataaggttttctacatgactgaccttggattcgagtttctctaggttttgtcacacatgacaggtgtattttcgaccaaacataaattccatttcattgttttccattattaatttcaagtagaaacgcaggtaaactgcaatcgcggcaggtggatatctagaaacctggagatgcgtctggtatcaatatactaacgaagctgagcgtactttcttatgcaccctggaggtgctatgaaggcgcgcgaagatcgaccggtatctggtgcactatttactatacaacttggcaaatttcactttgtttctgatttgtgcaatcatctagcaaataacggctacagttctatgagggagc

SEQ ID NO: 13576 - DNA, 488 bp, Diabrotica virgifera
gtgaagaacattcttttcttttagtctggtaagcaactcggaagaatccttggaaggttcaaatttctgataagatcacttagctcttcctgagtaaagcgctcaggacgtgttgaatccccttcaaaatcactgtcgtcttctcaaatctattagtctgcagttcgtcaaataacgtttcggcattatcctctggtaacataggtagactgctaaatattggaatgggtatctgctcaagctgatgtggaattggtcttattgctgaatccaggttaggatatgttcacgtatgtcgattgttacgattaatgccctttatattcacaagacagaaatagcaatcgtcaaaatgattttttggttccctccataccattggaaaaccaaatttaaacattttcgttgtcctttcgtccactgtcgcaagttttcaatacaagttttgcacactacatgtggagctcaggatttatcttgatctccta

SEQ ID NO: 13577 - DNA, 495 bp, Diabrotica virgifera
ttaataaattatttattagtttgtatgttttttcagttttgacatacagtaagtaggtatacttatataaatagtgaaaattctataatgcgagggctggtacaatcatgcaaaatcaatgttagattgcttctaatgcacaagcgatcttaaacaaatggtagtatatcttcgacacatgggacgtagacctataggtttcatgttacctattttttatactacctagtttgaaacatctgaaaggtcacgttttgaaagtattaaagacgtgattttaccgacgtataaaagtcgtcacctttttgacgttttaaaatcgtcacaattatgacgtcaaatcgatgacacaaatacacgtgattttcaacgtcggtactacgtcatagaaacacgtcaattgatcatttttatgacgtgttatctacgttataaaaacgtcgtttggttgcctgctaagaaagagcatacattaaatacatttcttcgagtaac

SEQ ID NO: 13578 - DNA, 497 bp, Diabrotica virgifera
agaaagagagagagagagaacccactatggaagctgagttgaatatacataatggagctattgaatggggatttaaatattatacgttcaatagttagtgggactgtggcctgaaaatgagtataagagtaacaatagctagaaaaaatttggctcatcctgatatatggaagtgagacctgtttacttaaaatgagatctctgaatcgtgtgaggatttcgaaatgtggtgtctcagaaggctgcttagaattcctggatcatgtaagaaatggtgaggttctaagaagaaataatgttcaaagagaattatttgatttcgttcagcagtgacaggtttcatatttgggctatattccacgaaataacaaatatataatctcctaaatgtcatcttgatgggtaaagttgaaggttgaagagaccctggcgacattcataggtcagagatataagaaactggttcggcctgatgtcagtatgataataataagaag

SEQ ID NO: 13579 - DNA, 497 bp, Diabrotica virgifera
atttggttttggagaaaaacttttacttttggtgttttaccttttttggaccagttatactatactacctccgtagctttggaaccgtttattttggaaggattatgcattggaccttttttatttcagatttaatgtggaacatttttgtatagaagttgttcatgctaaaccgcatagttttggagatgttgaggaaaagcctaaggaactgcgaatttaccgatttctcccccccccccagacccgacgctcgaggtggtgtgacttttttctgaacattatgtggaccatatagaacaatttggtgttggacgataattttcactttggatgtctgggtttaggtctagttataccatactattttacctactcattacagctaatgtacatactatgttaataaatactatacctatatgtattatacttaatggttatcaagaacacatagtgtatacattttacaaataaaaatattaatatgaatattt

SEQ ID NO: 13580 - DNA, 496 bp, Diabrotica virgifera
caaggtcaaagactgaaagatttacagctcttagagaaattgagtggtgtcaaagatttatcagaaaaaactgagtttgagggtaaacaatcatcagatgttactattggggatgctaaaagcttagcttcgtctgttttaagcagattaaaagcgaaaaataaagtttcagaaaacaaagtagatagtggagcaagagaaagtgtacaaagttcagaagagtcagttgaaactactcccaagaaaattaaaggacaattgccaattgacaaatttagggaattagaaaataatttaacgaaaataatggtatcacccactaccaataaggttccagctaaagagtctaataacttaacaagaaagtctttatttgagaatgatttaactaaacagcgtcctactttagaaaaccctttctcaggcgttccgaaattaagtggatttgccagtgggtcgatagatctaagcaaacctataattccacgcagatctg

SEQ ID NO: 13581 - DNA, 496 bp, Diabrotica virgifera
agttggtattatttgttatgtgaaaatcattgtacacaactagtattcatactagtaaactaagtctatcttacaatattgcaatccaatatcgagttatcaactaaagtttgctacaacctatagctgatcggaatataaagaaaggggacgaaaaatttaactaactagagtcagcatactgttgtggatccgaatacctggaatggatcgaaactgaaaggaatcacttggaattctactgagaaatttatttcgtagttcttcaacctcctaccctactcaattcacttattagaaaggcccaagaaaataatcacctagcaagtattatatagacggtacaattacatgtaatatttttcttattgtttgctgcttcattaaagagaatgaagaactattaatcaaaatacaattggggattacccgtattactatttgataagtgatacaaactatcacattcaacaaacgaaagaaaacgtggacaatt

SEQ ID NO: 13582 - DNA, 483 bp, Diabrotica virgifera
gaagtttattatgaataaaacattttttctaattttaaaatattatcaaatacaaatctagaaagttacatttcccattagtagttactaaaactcatacaatttgttatggacggctgtaattattataaatattatataaacaactaattacattttatttaacatataattattaatagatagaaaatgagtaataacttattatttagaattaggtattacgatagaatagcatacaattatatgaatcctcatgaattattttaatttatgtgctgatgtaaagtaaaatgagaatataaatttatataatttatactatttttattattaggcttaatttattacttttcgatttcgaaagtaatttactattttagttgggaataagccacaatattattttttcaaaagaaacaatttcaaagtaaaatggtggcttattcccaactgaaatagtacctaaattaataaattaaa

SEQ ID NO: 13583 - DNA, 494 bp, Diabrotica virgifera
  SmartBlast Evalue=7E-15; Info=Putative uncharacterized transposon-derived protein F52C9.6 (Fragment) n=2 Tax= Camponotus floridanus RepID=E2ALS0_9HYME
tctgccaatccatttttgctcacgttcggtaaaaatcttatttgcagctaaccttcatttatttttaactctattttcatttcgtaacgttcaataatatgctgaactgttgatgaacatttatttaccattttggatgtgtctcttcggctatagctatttaatgtggtgagtaataattaaatttctttcattaatcgtagtttggcgatcatcatcatcatcatcatcatttggctctacaactctatgtgagtcttggccgcgtttactatttccctccattgttgtcggtcctgagcagctatttcccattgctgtactcccattttgcgtagatcgctggctactgcgtccttccatctctttcttgggcgaccaactgacctttttccatcgggcctttcccagaatgtggcgtttagaagtctttcgtcacttgatcttagtacgtgacccgcccatcgtattctgtttgatttaatgtagcgtac

SEQ ID NO: 13584 - DNA, 497 bp, Diabrotica virgifera
atattattatttatttaaatttaaagaacagtcaaacatgttacattataacaattattaatatgcgtgtccaccgtacgtatggtgagactcatgttggtgctcttgctcatgaccatgaggaccgtatgcaccgggatgttgaccaccatggtgtgaaccatgttcgccgtgttgctcatgaccatgagaaccgtacgtataatcttggtgaccaccgtggtgagaaccatgttcgccgtgttcctcatgaccatgagaaccgtgcgtataatcttggtgaccaccatggtgaggaccatatccgccgtgttcctcatggccatgggagccgtggggatggtcaggaacatgaggaactggttggacatgtttatcctgatgcccataagttccgtatgggctagcatttattgctgcaataaggaagcaaactaaaacagctactttatacattttgtcttcttacttaactagctactttatcaatttaaaat

SEQ ID NO: 13585 - DNA, 497 bp, Diabrotica virgifera
  SmartBlast Evalue=5E-27; Info=Macrophage migration inhibitory factor n=1 Tax=Bombyx mori RepID=Q2F5Y8_BOMMO
cattgttgtaccttaattttttgtcaaatcattttaggtgatccataagtacctataaaaataatatagtaaagatgccgtattttaaagttgagactaatatacccaatgacaaaatacctgatgatctacctgcaaaattatgcattataatttcaaaaacattaggaaaacctataaattattgctgtgctacagttgtgggaggtgtgaatatgtcatggggtggtgacaatgaacctgctgcccaagcggttttgacgggcttggctgttgatgacaacaaaaaacacgcgaaagtcttgttcgactgtatttataaatctcttggagttcctgtggataggatgtatatccatttcacggatgcaaaaaccagcgaagtcggatataagggaacaacattccaagaattaattggatgataaataaccaacgagattactctgttatacgatgcactgcgctttagttataatatgaagtatgcacaaaat

SEQ ID NO: 13586 - DNA, 493 bp, Diabrotica virgifera
tatttttattcataaaattaaggttctttttcgagaatgttgatttagaaaaaataatttatagttgtataaaccatacacctctaggaagttctatgaattctcccgtctttctctgaaatccaaatgatgaacattttgtatagcaactttctaaattatttatatacaattagtgctcggtttatccacagttaaaaatttgagcaacatttgcaaatcagtacttataatattcacaatttgctctaactaaaagatatacgaaataacatttaaattcaattcagggtggagttactagaaacagaagtatagttgctaacaaattattgcagaaaccttcatcttaagcccattacaaattcatttgtatttgaatggtgtggttaagtttccggcacaggtagaaagtaataaatgtcaatctattgcaagtttaattattatacctgctattcagtatgtttacctctcgaacccaacaacacca

SEQ ID NO: 13587 - DNA, 496 bp, Diabrotica virgifera
gttgtgatatatagcattttttagaatttaaaattgtatgcaagttccctattatattgatgccaaaagtcacaaattgtaaatattagagtgaatgtttacatgttactttctgtacattcctcgtagtgctcaatgatttcttttgagacaatacacaattctttttgtagaaattagagtagtccgtccatctttatagatttgtattaaaaatttcgacttttttgataaagatatgagatataaaggatttttatttgtgtataaatgttttgcaaaatgtttctttattaccaacctaaaatcgtctttatttccagggtatacaatttctatgatattattaaatagagaaaggtttcttctataattttctttatgcgccactggtaaaatttaagtttttactattatactgtgttgccgtatctctttgaatgttgtatagtgtcggaaaatttaaaaagttcacgttttcaagattacacaaaag

SEQ ID NO: 13588 - DNA, 493 bp, Diabrotica virgifera
aaaaccctgaatgggccaacacaggaaaaaactaaaaatagctgagaattcatcaagaaagtaacccataaagaaaattcaaaaattcttatagagatcatagcgtgatgtatctttcttgcccatatttatgcacaaattttacgaaacattttataaatcaaaagaatgcaacataattatatattttgaattatttatttacggccatcgaagactgaatattataatagatctattcaaaatacgtacaaaataagaacgagtatggcaaaaaattggaatagttttgataggaaacgccccattaacgaatattcaacttgtttcactgaatgtatacactttatattacattacatctagcacttcatctaaaattatttaacaataatggtacaactcgtttatatatcatattgaaagcgccaatacatctcatatcgaaatgaaaaacgaaaaagataatccttttacgaactatgtttgttac

SEQ ID NO: 13589 - DNA, 497 bp, Diabrotica virgifera
  SmartBlast Evalue=1E-87; Info=Extracellular sulfatase SULF-1 homolog n=7 Tax=melanogaster subgroup RepID=SULF1_DROME
ggcgtatggtgtgttgttacattgaaaaataagtgagaaaactgaggtgctgaatcttcaggaccatgaggtgctggaaacgacatcatcaacatcactggcttattgtggtactgtttcttagaatgtcttaagaaggttatggaatcatttgctatcaaatccgaataataatccttttggtaatcaaatccgtgttttattttcttgccattcatattaatagaataattgtagtatttggagttcataattaatccgccccactctcgccaacctggtggaatgtatgaaccattgtacttgttgagatattttccaaaataacctgttctgtatccagcattcgacagatatgtagcaaaggttctggtttcatgcgtggcctgccattgcgtgctcgaacaattatcgttgttggtatagacaaaatggttgtgaacgtacattcccgtcaataaggacgatcgagatgggcaacacatcggagtggtgac

SEQ ID NO: 13590 - DNA, 495 bp, Diabrotica virgifera
gactaatcatactgcagacaaatttaaagttttgagtctaatatctgagaagcaaaaaactttgctattatatattatttagagttagagcaactgttatacagtaaccgccacgctactagacacacgtgcacattgcgctaatacagtcttggactcttcactcgttacactgtttaattttatgccaagaagtaaacagattgatcctacatctatctaacttaaagaagaactattaagttggagaatattcgagatgtccttgaataacctagaaatgtctaggatgtcagaaaatgtatataaagatagagagttgacagtttatagaacagttgtaaaagttataaaatacataacatacatgacatgaaggtcacatgacatgacagacatgaaagtcacatgcattagcccataatcctagtaattacatagatatagtcggttcgctaaactctgtttaaactagacacaactggctagtgattt

SEQ ID NO: 13591 - DNA, 496 bp, Diabrotica virgifera
  SmartBlast Evalue=1E-19; Info=Plectin-1 n=1 Tax=Harpegnathos saltator RepID=E2C0F0_9HYME
aattagaaactttgcagcctatcaaagatcgagctaaggaacatttagatgccaccagaaatcttctcaacagtgtggtcgagagagcacccaagatcgagcaggtcaacgtaaatggaggacgcttcatacgagagggcaagatatggagcaaaggggcgcagaagttccgcgaggctctgctcgagtaccagccttctctcgacgccaacgctgcggtctggaacaccaggcaaccttccggagccgatctggtggccaaagagctggacgagttcaacgagaggtaccagtacttggtggacttcttgtacgaccggctgaggcagatcgctgacaagtgcaaaggggatatagttacactgagactggtggagcaaatgcaaccacaaccttttagaacgtttaggactgaattccatatgagcagtgccagtgaacacacatctacctataccacaactactcactacagtaaacagtacattcaaacatc

SEQ ID NO: 13592 - DNA, 498 bp, Diabrotica virgifera
cctattaacactacatcatcagcatacattaggcaccatggaatgcaaccctgtagtttagcagttgtctggtccaattttttaaatattctaaatatttcttcctaaacattatggaagacgaattttcagtgacggctgaggaatttgccaatgaatgttatggtatcaatagggaacttactcatttttttttattacataataatgttcagtttatacaataacttagaagtacaaatttaaagtcttctttatcttaaaatagttcaaacgacccgtgacgtcacagagtttaactatgtggttcagtgtatggttatatttacgtatattcttcttcttcttctttagtttattggcctccacctactttggtatttagccagatcgtcgtcggggaataaaggaaaaatatttatattctaatgacatttatcgtatgtcattgtaataaaatataccagtttgttgagattgcagtttgatacagttttt

SEQ ID NO: 13593 - DNA, 496 bp, Diabrotica virgifera
  SmartBlast Evalue=4E-48; Info=Long-chain-fatty-acid--CoA ligase 3 n=1 Tax=Camponotus floridanus RepID=E2AYR1_9HYME
cctattctcaatcccatcaaaatacacccactctcgaccaacagctcgaaaacgtgagccagaggtaaataacccattatcacttcagtggggtacattctagtggaatccgtgaacgctttcacggaagcgatcatatttttgtgggtgagttctacacccttcggtatccccgttgatccgctcgtgtacatgattatggcgatgtcgtcggcagtgggttttacgtcaacaatatttgaagcagctcccatcttagcaacttcgtcaaaagttactatttgtaccccactcttaaaactatctttctcctcctgactcagactcttgatctgatcttccatataaacaagcttcttcacgttcggtgtcatctgcaaaacgtgcttaaacttgggcaacaaactgaagctcgtaatgactatatcgacctctgtttcgttgattgcatgggctatagcgtcatctcccaatgttgcgtagatggtgactaggg

SEQ ID NO: 13594 - DNA, 493 bp, Diabrotica virgifera
ggtcgcgttactggtatcattgaggaactgccacctataggaggttttccgaaaatttgatgaggtgcaggactgctaactttcggttttgagtttgcaacagtaggtgttgcagaggagatcatagtgtagcctgccgtcgtaaatgggtaacttgcttttgcagatgtttggtacagcattgcttgattttcagatcctgcacggtacctcatctcaggattttgatgaggttgactatgcggatgctggtgcggactttgtctttgatgatgtgggcttgagacatgactactggtaggcctgtggtgactggctgccctttcccagattttgcgcttcaacatgatgatgaggactagctgtatgagaagacaagtgtggtgactgattcggacttctgtattcgtaaatacttttttgtcctgtaggacactgataatgtcctaacatctcattcctcaatttgggactaggagaatgagcaactgat

SEQ ID NO: 13595 - DNA, 496 bp, Diabrotica virgifera
ttgtcttgtaattataatgttggccttctatctcatttttattctttactttggtctaacattgtataatgcatgcttttattgtatatttgtacattttttattttttactttggcagtatggctagtttttgtcttactgcacatttaattcatttttatctaaatgtgttaaatataacagatttagaagtttatgtattttgattttgcaacaattgttgtaaaaattaaattcagttacatgatttcatgtaatgaagcacattcttctatttatattacatataattttatgtaatatattcctcaaagagatgacagcaaaaaataaatttcacatttagtgaaatttgttttcactatcaagtcaccattatggattactattatggattactattatggattaccattatggattaccattatggattaccattatggattaccattatggattaccattatggattaccattgtgattaccattat

SEQ ID NO: 13596 - DNA, 494 bp, Diabrotica virgifera
  SmartBlast Evalue=6E-67; Info=Ribosomal protein L27Ae n=10 Tax= Endopterygota RepID=Q4GXC4_CURGL
ctccgtcaacatgtcgacacacagaaagaaaactaggaaactaagaggacatgtaagccacggtcacggccgtatcggcaaacaccgtaagcatcctggaggtcgtggtaatgctggtggtatgcaccaccacagaatcaacttcgacaagtaccatcctggatacttcggaaagttgggtatgaggaactaccatgtaaggaaaaactccaaatggtgcccagctattaacctagacaaattatggacactagttagtgaacaaactaggttaaaatacaaggaaaatccagagggaaaggccccagtcattgacattgtcaaagctggttactacaaacttcttggcaagggtcgcctacctgaacaacccgttattgttaaagctaaattcttctcaaaaaatgcagaagacaaaattaaagctgttggaggagcctgtgtattgtgtgcgtaagatgttaaggataataaatttgtaaaataagaaaaaa

SEQ ID NO: 13597 - DNA, 484 bp, Diabrotica virgifera
tgctgaatgagtaaatgaaataatgtcttgctacgccctttgcaaatcgttttattttttgcaggatttcgaatactcctctttcttcctttttcatcaaattttgaaaaatttttataaattgggtgtagtcgtttccactttttggcatttattggtttaatttcagtttgattgaaccagtatagtggtatatttttcttacatttcaaaggtataccaaaattgtatgtgagtacctgtttatctcttattcaggttttgtttatttatttggaattctgttttgcttgcagtcttagttgtaagctgagcctagttgcctaatttcgcaattagttcagagaaataaggaaaaaaatatcttgttggtgacacaaccccctccaggccgaaagcaaattttttgagtaatatggacgtctgtaataataaccaatatatttcctgcagccgattttgatgatatgcatagttatgaaca

SEQ ID NO: 13598 - DNA, 496 bp, Diabrotica virgifera
  SmartBlast Evalue=4E-10; Info=NFKB repressing factor n=2 Tax= Xenopus (Silurana) tropicalis RepID=Q28C35_XENTR
ctgaaactcgtctggtatagacaaaacataggactcattttcaagacctgctcttaataattctcgaattaatacccatttactacattttttgctaatggttattcttctagaattaaaacctccctcactcttagattttaaatgatacttagctgctatagaatgaatacgagccctttcctcttttgtgaaaccagaatcaaatgccagcgtgatggttttcgtcgacttagcataatcagcaagaattttgtcgatttcttgcattacatttttacctccacctcctaaaccttctctagaaatattctcaacgattttgtctgcaacactttttttgttcaccttgttctttgttaccaagtccttttccaccccatcccatttttaacatcatttttaaagcaacactattgctgtcgactgggttattttctggaatctctgtctttttattatttatatcatccattgaaacttcttcgtagtgtga

SEQ ID NO: 13599 - DNA, 495 bp, Diabrotica virgifera
  SmartBlast Evalue=4E-57; Info=Solute carrier family 41 member 1 n=2 Tax=Formicidae RepID=E2ABA8_9HYME
attgccataaggaccctcgttgttctggaatgcatgtcttttccacaaaagcaagttaatggagatatgaaaataaccatctccttgtctgtgttattttctgatgagtgtataccaagttctgcttgtttatgaagagctgttgaaattctgctcgcttgtactgctactagattacctccaacaccgtttatcactggttggaatactgcaataccctcaaatctagaaaccataaagtccagaattaaacctccaatggaacttatcaccatggctgctattactggcgtccaaccataatacagaacatctcgggtttggtagttccttttagcaatccatacccacaaaggtatcgccagtaaatatgctgctattatcgatggggccaaccaatcttgtgttcctattgattcatataacatggttgccacccatgacaataatgctagcgatgtaatgtctccaactagctgctataggcgtagctac

SEQ ID NO: 13600 - DNA, 491 bp, Diabrotica virgifera
gccctttctcctctgattcttctagccagcttctgttacggatagggggaataagctaggcaaaagtctgggtctctaacttctggtttcgcagaagttcttaatggcggaacgttaggttaggcactctaacatggcctctccccgctgtgttcttgaatccaactccagttagattcactttctgcgccttcggtgtgtatcgattttggtgtagcagttctttcaacattcatctccagatcgtcatcactataatcatcatcagcaaatttgtataaatagctatgcatcatgtttgttgtattgtagctgaaagtggcatacgtcataggtttccaactagctggctggacaaagaaattgtcactctagtgcggtacagttctgttattacaaaactcatttcaattgaaagtacttacaatcaattgaaaaagattatcgatccattgtccgacaaatttacagcctcgtctcctcagtccgac

SEQ ID NO: 13601 - DNA, 494 bp, Diabrotica virgifera
gccccggagagacccgatcacaaaatattgaatcgttaatttgtaactttactcactttacaatcaaaatacaattcgatattattttgtgaacaaacaaaaccgagttttttgtcagaaaaatcacaacccaggtgtggacaaaaattggcgcagtctctttgcgaatccactggagacatcctctcgcttaaattggagaatactccagaatcagtgcggtttgcttccttaccgtcttcccgatacgacgacgttgcatattctatttcgattcatatcgatcaaatatttgaagtgattcgatataatatgaaaattgataatacaacagtcgaagtaaagaggcatttctcggttttttttccgttaaaaggaaaaaaagctgttgatctaagtaacgaaattctcaagaagattgaaaatgatggtttagatattatgaagtgccatatacaggaacacgataatgcatctgttatgcacgtacatac

SEQ ID NO: 13602 - DNA, 496 bp, Diabrotica virgifera
cagattgttcccagtatttttctgtggatttcttctgtatcttctagctgttttgctaagtttcatagtagttttaggtctggacttaatggtccacgtccagtcaaatagttttgatgggtggaccgagtcctgttagattcatcgtttatccttctgttattttctgtagcatttattgtgaatatgttttaaataagttgagaacaatacataatccaacctaacgctccttccattctctatttcttttaaaaagtagttttctttctttcttcgtacattttagataattattttctgtttcctgttttttggcttcaaaccattatattcctcaaaacttcaagaaccgatgaacaaaggaataaaatttattttcaccttcaatttgataagaaataactaaactagtgtaaactatacaaatttaacattaacgttgcaataaaatctgttggtatgaaattcatttgtttggaaatgttgatatctc

SEQ ID NO: 13603 - DNA, 493 bp, Diabrotica virgifera
  SmartBlast Evalue=1E-25; Info=Mps one binder kinase activator- like 2 n=1 Tax=Drosophila pseudoobscura pseudoobscura RepID= MOB2_DROPS
gtcaatagtgagaaagatagttaggctgttgttccacgtgatggcgcatctgtacgccgctcattttaaagaagtggtaatgttgggtcttcacgcccaccttaatctgacattcgcccatttgacggccctccatcatcggttctctttgatcgaattgaaagaaacggaaattttaagagatcttgaagttgctctcaggctgacagaggatagtacgcaagagggcggtaataataatgacaagtccgaatcgtcggatgtagactcgaaatctaatttaactgaaggaagctgtggtgacaataaatcctagttttgctggggacacgaaaaaatatgtatattttatgtaatgcaattttttgtctctccaagtacactaaccacttggctattagagcatgtgatttaagacacaatagtgacttttaattttttagtggttaacttttatttattgttttaacattgttttatttatatttagccg

SEQ ID NO: 13604 - DNA, 495 bp, Diabrotica virgifera
ttggctgtctgtacgacttgcttccacatattttggtcaatcataccttctagccaattgtatttacccgtggcatgcaattattttgggatattatcccaccatctgagtttaggtccacctaaatctctgagcttttatctcgttgaatttatttggttggttattctaggtttccaatccttgtttgttctaattcgatacctataggtctactgccgatcagattttccttccgtatctgcttgatgatatattctttattgactctatgcacatgtattgtcaaactcaatatctgggcatttacctcattgatgttaattgattggttatataaggtttccagtcctcctttgttttaattcgatagtatcttattgtcccattaactatcgggccatgtatttttcactattaaagtgatgtcatccagaatactatttgtatctcaaatttttggtatttggtaacctcttttactacaatctttta

SEQ ID NO: 13605 - DNA, 496 bp, Diabrotica virgifera
catgaaggttttcttggtactagccgcttttgccacgctatgcgcagccaagccgacctttctgctcgactcccttgtgattcacaaggtagctaaaggacttggtctaggaaatgtcatcagcgttgatggagacgcaagagccaagctcggccaaaacgaaattggagttgatcttgctggaggcatcgggggagatgtcgttggatatcacgccaaagttgatggtaatgtgttaggacaaaaagttaatgtgcatggagacatatacgatggtgataaagttgatgccaagaatcatcaagtgtacaccgacgaaaacggtctccaatacatcctggtccgccaatatgtcggtaccaactcactcttggtcagaaaatatttgatctccggaaaaatggtcattgatggtactaatcaaccactggacattaacgcccgttatccagacaccaccgttgatgtacgctatcctaatattaacgtcaacgtt

SEQ ID NO: 13606 - DNA, 481 bp, Diabrotica virgifera
atggatggaatcgatttatctctggaagatgaatatgcatgccaatttttgtttttctgaatagaagcgttccggaggtatttgaggaaactagttgccgggcgccatcttcaaatagctctggctcccttaggaggcgttttcggactgggtgaattgggttaaattgtcttgaaattatctgaggagtctcctgtattcgtttgtcggtggagttgctggacaccctgtatatatgtatgtctatgaaataggccgatcgaaagaagaagaagggggtgacataaattcagatatctggaggatgtgcaggaagatttaaggagtattccgtgagattgaagtaaggggattgagaagacaggtactcaacaaggaagaatgttttgaggcaagccaaggctcacgaagggctggtagcgtcaactgatgatgattcttcagttatgcgttgagaataatagcagggaaagggtcatta

SEQ ID NO: 13607 - DNA, 496 bp, Diabrotica virgifera
aactgaaactaatatatgtcactgaactaaaaaatcagtgaaactagtgcctatggaacttgccgaagactattttagctcattttttattattgaagaagcttgttggttttactaatgttttatatttatttttagtggtttttcttcatttagtaccacattcttataaaattgtagaaacttagttgattgaattttcttagtatcgtcacgtaaatgtggtgtgtatttatgcggaactagattgacaaatgctttaaccataaaattcatttctctaaatgtaatatggatctaaatataaaataaaaaaaatcgattatttttgaaattattaagtgtccaaatccaagttcaaacgttcatatattagttccatatgagaattttgggttaattttcgaacaagttttaacaaaactattcccagttcacgagatagaattctgcatctaataagaagttatgttaacaaacaagaatacagtgccgg

SEQ ID NO: 13608 - DNA, 492 bp, Diabrotica virgifera
  SmartBlast Evalue=2E-35; Info=Transposable element Tc3 transposase n=1 Tax=Lepeophtheirus salmonis RepID=C1BSK0_9MAXI
gaaaaaacaactgtttggtgtggtttatgggctggtggaatcgtcaatccctatttctttaaaacagaggccggccaaaacgttactgtgaatggagacggttattacgccatgataacagactatttggtgcctgaagttgaagctctttagttccaacgagatggcgccacttgacatagagcccacgaaagcatgactttactttgagaacgatacggtgaaccacttatttcacgtttcggaccaatgaattggccacctaaatcctgtgacataacacctctagacttttcctttgtggctacctaaagtccaaaatctacatgaacaaaccggttacgattgagggctgacgcattggaagccagtattactagtcattggtcaaataccaatcgaaatgctcgaacgcgtcatcgagaataattggatcttcagagtggaccatcttaaccgcaacattcaaaagaaattatctttaagaagcaa

SEQ ID NO: 13609 - DNA, 491 bp, Diabrotica virgifera
gttgtacagaatgatatgcttagaggagggtggtgcctaagcaaatgctgcgtcttaagttcaacctccaccccaactatttattgaagtataaaacatcataaattttaaaacaacttaattaaggaatatgtaaattgtttttatgttttattcgtacatctgcaaaatggcgaatgtacgtcattttgtaaaatgagtttaaataggatcaaatacgctgtgagctcgtacgtgacgggatatttaaaaggccgtagacgtagacgtaagaaacggactggagacggaagaaaatattatgtcaatttctagatcgacgtagcggaatttttgcacatgagtagaaagagtaaacaatgacttaattataattcaacaacatagcctataaattatacgaacagtaaacaaactttgtgtttatttatttatacttatactattatttattataatatttatctgttttgtgtgttacatggattagg

SEQ ID NO: 13610 - DNA, 497 bp, Diabrotica virgifera
  misc_feature (464)..(464): n is a, c, g, or t
atttgtttatatttttaaagcatgcaagaaacctacgagaagaatgtggcagtatattctaaccacttcccacacgagaacgtaaaatcataaaaaaaaatcttcctaataacgactataacattaaaactcaacgaaatcaattattaactaataaatacatatggtggccctaaaccaacagagaagattacgaaactgtcgtacagctcaaggtgaacagtcaaccatgaacaatatttattgagcacccttgatttgagtctggtcccaatttgagaaaataccttataccaaatttcaagaaaactatttcaataaaaatcctctacattgaaagctacctgcaactttggtgccttttgacttattgatctaaaattgattattaaggatattccttggatcaagtggaacttatatactacatagcactgagacctggactctaaagactgatacgntcaatcgcttagagacatttgagatgtggttgc

SEQ ID NO: 13611 - DNA, 492 bp, Diabrotica virgifera
tatataaaacgtttgtaaacaattttagtattttatttattacaataatttcatttagaatcttacaaatttaaaaacgtaaaggaaatgcgtaaattttaaaataaatatttatcttttatgagctttattgtaggtaatatctctgaaatatccttattgggttaaaatatttcggcactttctgtatatcgggcttttaaatgttgccatcaaactgtattatcaaaactcggctcaaacgtttctaccaaaatattcaccttcagtactcattaaaaaatacagataccatatgaagaaacatttaaaagcttggtattttagcaatacctgtcagttgatagcagatcattaataacagctcttttgtaaaatttaagcaaacatcacgctttacttcatttttttatacataaaattgcctatactgtactaaaacaaatagtagaagtatctaatagagtaccaaaatgattaaattcacaatat

SEQ ID NO: 13612 - DNA, 488 bp, Diabrotica virgifera
acaatataaacagaataagtatataatatcaatgcaatagcagtgttatggataaacggtgggatgacaaaaaatatctattaaatacaaattattgcttcaaatcagaggtgtaaccaggatgatcctaaggggggagggttgcaactacttgatggtctctgggggatgtagaatagtaatggtgttaagcgtatagagctcaaagtacatccaaagggggttataaccccaaaacccccctggttacgcctatgcttcaaattaacatttacattatcttcatttaaaactctacagataatattaccgatgaaacattaacggaagtcccaccaagaaataaagtaggtacggtgggtatgcaataagtagggtaagactaattaacagtaagctaagaaaacattcaaacagttacttagaaatatactaagccttactactcctatgtgtctccagcgaaaagactttaacagtgacgcaag

SEQ ID NO: 13613 - DNA, 495 bp, Diabrotica virgifera
  SmartBlast Evalue=4E-55; Info="Dedicator of cytokinesis protein, putative n=1 Tax=Pediculus humanus corporis RepID=E0VNL9_PEDHC"
cgcaagaagaatgttacgagattcatcatcctgaaagagtttaccagtgacgatgtttttaatacatgataatttagcttgaatcaataaaacaggcaaatctcttggtaaagaatctagcatgttcgctgcaagtcttgttacttctaaaggaggaagaacgtcaattagctgttcatatacagaactgattgttattagtagtgcaacctgggtattaatgatgtggttatcagttatggataacattttgttcaaagacacaaaaacactgaaaaggtcccttcgaaaactatcttcaaaatgacctccggttgctcgcgaaaatagaagtctgctttggatgatgagcttgaaaatatactccaaacttttgaaacatttttgaatcggttcttgtttttcaaaagatgaaacccaatctgcacaatgttgtacactggtgagaagacccttatacacaagagctgccgaaaaatgattcttaatataagc

SEQ ID NO: 13614 - DNA, 495 bp, Diabrotica virgifera
  SmartBlast Evalue=3E-29; Info="NADH dehydrogenase (Ubiquinone) 1 alpha subcomplex, 7, 14.5kDa n=1 Tax=Tribolium castaneum RepID=D6WJ71_TRICA"
acattttctcatatgttttatttttaagtatttggttgactattgtaaataaaaggtctatgtacactaaattgaaaatctaatttgttaactaatcccatctatatattggtccaggagtaatccttttgacagtttcacctttttcaccagattcaatttgttttggattaggtgcaataacttcaggaggagacacttcacgccttgcatctcttgaataataatagttagaattaagtttatgggcaggtccatctggtaaaactggtggaggtggtgatcttgaagctaaagcatcttgaaacctgagggccaaagtatgttttctaccaagtaaaaaattacgtatagtttgcataaaaggattcacatcatgtatccgtatttttggaacgttgggcatttttatagaaattaaaggtaaatataccctgattataccaaaatactataatttgttacgaaacaaaacctattatctataaaataaaa

SEQ ID NO: 13615 - DNA, 495 bp, Diabrotica virgifera
cggtattacatcaattacataatacagtagaagctctttattcacggggtatatgttctgtaaatataccgcgattacagaaaccgtgaatatggaatggtaatttatatgggattataggggatacgttcctaggtgacgaaataacaaagcaaatacttaaaaaaaaacagtttaatgtaagtttttgaccatacatattgattatttacatattatcttccggtttagcaatcttttaaagaatttagtaattttctcttgcttggcagtgtttaaaaactccttcaattcggactggtatttagcagtggcattaccaatttgccccttaagaataatgcttcgttcccagtggtggtttctccataagtgcacatgtgcacgtgaacccccaaaattactttcacaccaacattcatatatgtaatatttatcattctataaataacagtttaatctaactatacagtaatttaaattcgaaataacaga

SEQ ID NO: 13616 - DNA, 495 bp, Diabrotica virgifera
  SmartBlast Evalue=3E-47; Info=Probable small nuclear ribonucleoprotein Sm D2 n=15 Tax=Diptera RepID=SMD2_DROME
caaaaaagctatttaaataaaaaatagcgaattaggtattacttctacttatactaatttatatagatcattctaactaaatttaattaatggctttaacaaaaccaaagtcggagatgtcctccgaggagctccaagctcgcgaggaggaagaattcaacactggaccactgtccgtcttgacacaatcagtaaaaaacaacactcaggtactcataaactgccggaacaacaaaaaactactcggtagagttaaagccttcgacagacattgcaacatggtgctggaaaatgttaaggaaatgtggacggagctacccagggctggtaagggtcgcaagaaggcgaaaccggtcaacaaggatagatttatttcgaagatgtttttaaggggcgatgccgtgatactaattgttagaaatccacttgctaccgtgaatgcatgagatatttaaggtatttttgtaagatttagaaataagtaaataaatttgt

SEQ ID NO: 13617 - DNA, 491 bp, Diabrotica virgifera
ctaaccttacaagtagaagtttataaaataatgttatacgacaaagctgatttgaaccgtgactccggaccaccaagaagcaagcttggttatctgacttcctcttttttgagaggtctctattagcgtccccagctaattattgtttttcactaacttattgtctcttggttctttggatttcgctgatgcatttgttttatttttataaaagaactttgtattttatttaaaatgatttttattgtggaaatactttttggattatcgcgacaacgaacattctagtatgcaacataagaagtacgaaagtattttgctctaataattactccaataaacaacaatataatttgcaatttactttcgttcttcgtattttgcacagtaaaacattcgctatcgcgataatccaagagggccaatggggtaggtatatatatttaacttacctttctctttacgaatatttctttttaattcatatgtga

SEQ ID NO: 13618 - DNA, 493 bp, Diabrotica virgifera
gagatattgcaaatttaacacagcctacattgccctatttacaccgcgttattttgacagaattgacatttttcagacgtttcataaaaacagatattgctcaacattttggttgcggtatttttacggttcgattaatagttgttattcgaatttgtatacaatttaaaatggatcaagacttataagctctctttttcatcatcacgtagcgctacaacactgggtgggccctggctgactgtacaactttcttcccattttttcggtcttccatcaaccgagagtcaaatggaatcttcatttttcggagatctgcttggatgttatctatctctccatcgcattctggtacgcccgagtggtcttttgcctgtaggaatcttctcccataccagtcttacaaatctctcgttatgaagtctgtgcacgtggcctgcccatcttagtcgctgtgatttaatttcttggacaatactaatatactattata

SEQ ID NO: 13619 - DNA, 495 bp, Diabrotica virgifera
gttcgttggtttttattttgtaaaatttgttttttggtactgaaaagtatcttggttggtctactaaatggtagagtgctctttatatacctttcaaataacaagaatttaaaaagtttgccctttgaagtagttctagatgtagcttatgattgtatatctatattcgttatatcttgtactttaataattcttttctcttcatttcctagcaatataagtaaaactgaatataaaaaatttgccaggccaccttctagttggtcatagctaaaatataatacagtaaataatattttgcaatatttttgttgaagtaatcattttttcaaacataacaccattttagtttgtctaataatttaaggagttttcgatttcaacttaacattaaaataaaaaactttatcataagctcttatcaaaatttaacaagtacaataccgtaaagttcacctagaaagtacaaagagtaatacatgttgtttaacatga

SEQ ID NO: 13620 - DNA, 493 bp, Diabrotica virgifera
caatagcaaggtcgtcagcgtaaacaaatctctcagtttggggtgcattggctggtcgtcggtatagatgtaaaatagggacggcgccagaacgcttccttgaggtaggcaatttttttgagttctccatctgcccccttttccatttagcacaacgtgaaagcgtctattacacaatagggcttttcattcacagtcatttgtttcgagcttctgtcatgtgccacataatattaatatatctacgtcgtacgatattggtatataccaatgatacaaaccaaagacgtatgaagtagatatattgatgttatgtgacacatggcggaggctggaaacaaatgacaatcgatgaaaagccctatagtaatctaatgatctttagcaggtcgtagtcaagcacagtaatatagatgttagttagcaagatgctgtggtttattgtattgtatgccgctgtctaacggcccccatatctctttctaagttcagt

SEQ ID NO: 13621 - DNA, 495 bp, Diabrotica virgifera
actacagattcagtagcaaacattgatttagtgagtggtagtagtgatttaggaaacacgcaatcaggtgcagcttcagaggttatagaaaacgaatcgcagattgaaaaggcaacaaataccccagattcagagaaggatgcatctgaaactgttgctgttagtgtgtcagctgcagatacaacatcagcagttcaagtaccagacacaactgataaagagaaaccatttgatcttattgcagctaataatggatcatgctctagagaagagagtaatgacgcccctcttcagttagatgaaatcaatgaatccgataaaaacaatagtttacaaaacgtatcgtccacttcttccgattccgttataaaagtgaacgagaactgtgtttccactgacttacaagttaacggaagtgttaaacatgtagaagatttagtcgtggaggccgattcagtaattgacgatgacgaagatgacgatgacgttgtattc

SEQ ID NO: 13622 - DNA, 494 bp, Diabrotica virgifera
  SmartBlast Evalue=3E-25; Info="CG4699, isoform D n=4 Tax= Drosophila melanogaster RepID=A4V2Z1_DROME"
ggccgcacagcctttctggataccgcgtgcagtccggccatctgcagcagcttcctcttcttgaatttggtcaacggtctggtcctggcacattgatagtccgtcgcggattcttcggccgcgtcgtccgcagacttcgaagacagcaacgaaccgccgggaagctgaccgcgatacccgttaacggcagtctgagaggcggcagggatgtgaggtggactggcaccgcccagttgaatactgcccttgttcaagcgagcttgtttgtgcaagtccgtgtgttgccgaatacgatgttccagatccgcgatctgaccctgcaaccacgtccatttcgcggctatcaaggctcgatcgttcgagtatttccacagcgccctcttttgtatgccaagatactgttgatgtggattattgtaactttgcatttcatcacagctttctcccctgaactactctcagtagcctcagaatcaacttccttctgcattaca

SEQ ID NO: 13623 - DNA, 495 bp, Diabrotica virgifera
  SmartBlast Evalue=5E-19; Info=U3 small nucleolar RNA-associated protein 14-like protein A n=1 Tax=Harpegnathos saltator RepID= E2B486_9HYME
ggcccgtttctcaatgacctttactttctcatcactatttaaagggaacgataattgtgcagctgatctattagcctgaacaagagcttcccatctatccaattttaatttcgctttctcatagtttaaagctcgtttaatacgttcagcttgtggcttttctagaggtttaggcaatgtcttgctgatattacttgtagatttaattttattagacagctgaagagacttccttccctttaaaacgctcgttaattcattaacatgcactaaatttttattcgaaagggattttactagattaaattcagacactttagtggcagcttcagttctatgtgcacttttgacatgctgaactttatttaactttaaaacgttatccactagcttattgtgagttttatcatctatctcatcgtctacatattcaaagttatcactatcgtcactcatctttttaaattaaaagaaaaaagctaaaactatggaaac

SEQ ID NO: 13624 - DNA, 494 bp, Diabrotica virgifera
  SmartBlast Evalue=3E-33; Info=Tubulin--tyrosine ligase-like protein 12 n=1 Tax=Harpegnathos saltator RepID=E2B995_9HYME
aaggcgtctcttctccctttatctgtaattccttctccgaagtctctgcaaattatatcttccttctgtatatctttaattggaaatagaattgagtaagtaatttgatcatttacatacacaaaaggtactatcctgcagttggggtcatcactatgtattacagcaatacctacttcatccattatgtaccagattggcaaccgatcttccacattttcattattgcttatacaatagtaattattaattttccacatatgttcaaacaatgaatcggctatttcatatttatcttgagttatgtctatgtcgaaaacgttgcatagtctttctcgaagggcatcatgagccacaagctgctttttcgcatcttgaactttgtaagtccaggcatggtctataaggtagatatgatcaggatctgatagttttatatctttagaagcttgaagaagtaatcttgatcgtatcacatcatcttcgtcatcgtc

SEQ ID NO: 13625 - DNA, 495 bp, Diabrotica virgifera
  SmartBlast Evalue=1E-77; Info=CCR4-NOT transcription complex subunit 2 n=2 Tax=Aculeata RepID=E2B1P6_9HYME
gttgacctttataagggcagctgagactgatccaaatcttgtatcattggccctaggccaagatttgactgcacttggactgaatctcaattcacctgataacctataccccacgtttgctggaccctgggcggaacacccatgtcggccgcaggacatcgatttccatgtacctcctgagtatatcattaaccatgcgataagggagaaactcgcatcaatgaaactaagtcggtataaagacgacttactgttttttatgttttataataatgttggtgacgtacttcaaattgcagctgcctcagaactatacagccgagagtggaggtaccacatagaagaaaaactttggatgacgcaagtaccgggtatggttctaatggaaaagacatcaacatacgagagagggacttactacttcttcgacccgcaaaattggcggaaaatcccaaaagaattctatttggaatacagcaaactcgaagggcgacc

SEQ ID NO: 13626 - DNA, 492 bp, Diabrotica virgifera
  SmartBlast Evalue=4E-23; Info=Histone-lysine N- methyltransferase SETMAR (Fragment) n=2 Tax=Camponotus floridanus RepID=E1ZYL8_9HYME
tcctgatgaaaaaggattttttcttctgcaaaccgggtctttttggacgaatttttttcttcagctgatgtaaacggttagaataatattcagaatttattcttttaccagtttgcaagtaattcacaaacagattcacaaaattcatgttaacaccttcttggacacgcttgtttcgaaaccgaggaactaggttcacaccacactttagtctcttgttttgattcagcatcacggtgatagactcaaatatcatccataatgatgaatagatgcacaaaatctactttatcctttcgaaagcgctctataactctgtatgttgctgagaaagtcgcattcgaatgtgtttttgttccgttgttagcgaatgtggccctcattgtgaacacagctttctgcaacccaatacttcagtcaaaatattgcttacaccacccaatgagatgcctagggcttctactaaatctctttcagtcactcgacgatttt

SEQ ID NO: 13627 - DNA, 493 bp, Diabrotica virgifera
  SmartBlast Evalue=9E-15; Info=Rhophilin-2 n=1 Tax=Camponotus floridanus RepID=E2AKP7_9HYME
ggcggcgacgcgcgttcaaattttaaactcttctgactttttttcaacagctgataacgaattaaggattattaccgatttgttttaagtaataatttccaataatcgatgtagtgatagtgacgaaaacgacaaaaaggaatatctgtgtattgcggactgtgtttttgtttattattgctgtggtgtgtgacaatgtggcataatgtgtgatatagaaagaagtttagaagagattaaaattaatgggacgtctgacagcttggatgagttaccaaagaggccttttatcaggggatcagatccaagggtagcaacatgcagaggaaactccagaacagacgatcaaagttaaaccaagagattaacaaggagttagcgtttacgcgccggcgctgaaaatttgtttaaggcaactacaaataaaaaattacgagaaacggtggctgtggagttgagtttcgtcaactcaaatcttcagttgttgaaagag

SEQ ID NO: 13628 - DNA, 492 bp, Diabrotica virgifera
gggcacttcttcgaggtcttagctacttctttgatacacgtcatacaaaatatatgtccacagagagtcgcaccagcaacaacctcatcacccaggacttcgagacagacaggacaagttggcttgcttttaacgggagatttttcttctttgggtttttccttcacttcgtctatggtacttattatagagttgatactatccattacttcatttactttattttgtaatttattccaattatctggttctgtggtactagtatcaacttctacagtatcagtatctaatatgttatgaacaatatccatcaattcttgctcttcactggcttttggatctgggttattttcgccttctagtgaaacttcctctatctgatctgaaatgtttggagcagacaccacaccgcaatcatcatcagagtctgatagaacatacaaagatttggtgggaactgttggtttagtggctgtagtatctttagttaca

SEQ ID NO: 13629 - DNA, 493 bp, Diabrotica virgifera
tacaagttagcttgtacctagacacagcgaaagtaaaatgggattaggtgttgtttttcagagacaggtatcagatatgccatttggtgatagtctctttggtaaactaataggaaaatcgtgcttttttatgttcaaatttgttcttcctttattatactcaatgacattcgaagtcttacatccacaaggaatcatttctggaccatgtttggcaacatggtacattttaatcaagaatgaaacgatcacattggcaagactttttattgacatgtaatcaaaaaaataataataataatgtgtttggcgaccccctagctgagcacccctgtatacgtctaggcattgacaaaatgagatgatcgatgtctgcttgaggcacctcgttacaagcagcttgaatttcatggattaactgtgccagactctggggagatggtgcaaaatgacagtctcctccccatcatatcccacacacgttcgataggat

SEQ ID NO: 13630 - DNA, 490 bp, Diabrotica virgifera
aaaacgataagatatcagttaaaaggggattgcaagctaacatgtttttcactttcactcagttgtcaggttgtatcaaactattttacgcctgtaggataccagatgtactggttgattttttatgtgcttcttgtaggataccagatgtactggttgattttttatgtgcttctttctgtgatatagctgttttgtctggttcttcttaattccatttatgcagtttattggtattttttcaaaaacgtttgaaattttataatatatttttaaaactatggacattacaaacactgattttgacgaacacactattttaaaaaaatattagccggcaagtttttaatcatttgattaaacttactgctttttctcacccattagattaaacgccgcaccattccaaacgatccacttcccagcgtagtcgccggcgctagaaatcgcctgtttcagccactctgtggatccacagagtagcgctgca

SEQ ID NO: 13631 - DNA, 495 bp, Diabrotica virgifera
gcaatgattattctttatcaaaatttttttgttggcctgtgttatgatattagaatataagttgtgtggaaaggacgcgatattcctgagtattttttgtgtaatacaaaagtagtgaagaatcgaatcatcaatgaaatgatatgaaactttccgaaaactactctacaaccatgctttcatatgatattaaagcacaaaattttagtattctatttttgtggatcagttacagttttattaccttactaaatggcattaaagcttgttatcatggtaattaacgaccatgtatataaatatatgctataaatttaatatcgtatagagcctgagatattttggacatatggaagaaaagaaggcatggaacgaatgatagttgttgaagtcaacgtagcgggcaaaagattcagaagatctccagtaagatggtcggaccaaataaaagacataactggttaattattctccaaagcaaaacaacacgcacag

SEQ ID NO: 13632 - DNA, 489 bp, Diabrotica virgifera
aagttaaagaatggagttttctggttcgcatatagattgaggtagcaactctacacttaagatgggaaacaaccagaacaaagaaaaagaggaacagatcttcataaaccaagcaggcaacagcggaggtgtgacagctgaaaccggcgaaaacgagaagctatcaatccctggaattttgggaattgtgtcgttcagcctggccctaatcatcgttggatggatactgtatcgacgatggaagaagcaagcttcgacgccacatccgacagaaaatatctaagtcgatgaagatgctgaggttagacgtccagaatctaggaccagacgcatagacacatgtgcccatattcgtgagtaatttttcttttatacaatacagtttaactacttatgaagtaagtttgatgactactttttttttaatttcatattgaaattttgatttttttaatttcttactaatttactgacattttaaatattgac

SEQ ID NO: 13633 - DNA, 495 bp, Diabrotica virgifera
  SmartBlast Evalue=1E-70; Info="BTB/POZ domain-containing protein, putative n=1 Tax=Pediculus humanus corporis RepID= E0VZX0_PEDHC"
ggtaaactctgcccagaggggcgatagggaatgccacatcgtggtactgctggatgacgattccgtagactgggacgaggaatacccaccgcagatgggcgaagaatatagccagacagtcaatagcaccgcgatgtataggttctttaagtatatagagaacagagatgtggctaagcaggtgttgaaggatagaggattgaagaaaatacggcttggaatagaaggatatccaacttacaaagagaaagtaaaaaagcgcccaggcggaagggccgaagtgatatacaactacgttcaacgccccttcatccacatgtcctgggaaaaagaagaagccaagagccgacacgtcgacttccagtgcgtcaaatctaaaagcgtcacgaatcttgcagaagccaccgcagacccggctttagagctggattcgcgagggaatcccatagtctcgtcgatgatggcagctatccctgtgttgccggcagaccacgg

SEQ ID NO: 13634 - DNA, 495 bp, Diabrotica virgifera
atacttggaacatttctgtgctgatacatgtgcacagaaatgttccaagtatgagacccgcacacagtgcacagatgttgcgttttcggcctagggtgcttcgatgtcctatgggtccttaaatccataacggcaacgttacatctcgtgcaaaagccggccttcggagtggtattgtgaaccgacctaatatgtgtaacccgagctgccacagtctcaaataactcctggcaatacctacacatataggaaccgtggttcttacaaatgtggctcttaaagcttttggtagcaatattttggtagcaatacttgcatcttttatatttgtatttttccgaataattgatattctctgtgtggatagtcatgtgacgtttgacatgaagaggatttgaaaacttcttgtcgcaacatggacacgcgtgtggcagttcatcatctttgtgggtcaataaaatgacaattgtagttcatttcaccaagaaaaccttt

SEQ ID NO: 13635 - DNA, 495 bp, Diabrotica virgifera
gaatttttagtcgtctttaggggccgaagaaaatccaaactttccttccatctaaatcaaattcttgattttgtgcatgtaatatatgttcattgttcatctcacagaattttatgcaagattataaacgtgatgtcttcatcattagcattggtcaaaatgagagcttctaagtcttgatccattttaaattgcatacaaattagaaaaccaattaatcttaatcaagccgtaaaaataccgcaaccaaaatgttgagcaatatctgtatttatgaatcgcctgagaaatgtcagttctgtcaaaatagcgcagcgtaaatagcgcaacgtaggctgtgttaaatttgcaatatctctctaataacggacaactgataaaacactgcataggtacaatagggaacttgcataaaattttaaattcgaaaaaaatggtataaatcacaacggaacataatttagaacctgcatcaaagataaaaaagttctgttt

SEQ ID NO: 13636 - DNA, 489 bp, Diabrotica virgifera
  SmartBlast Evalue=9E-23; Info=Protein SMG8 n=1 Tax=Culex quinquefasciatus RepID=SMG8_CULQU
agacacactaaagaccaagaggaatatattggcaacagaccaggggttgtacttaatgtcagcatcgccggggcagtttctaccaaactggaattttccttctcctggtccttttcagtccgatctgatgaagccgacgaggactcctccgattcgctgatagaagcttttgccgtttttgtttgttgtggaattgtattttttccagtttcgagcattgacactctttggatatttgatggtagaatgtgtaattggcttgttttacgttatatgggtcctccctagcccctacttttcggccacaatcacatacagctttatagataaatccgctcatatgttcccgatcgctagaatgttttggcaatttacagggattaccagttaaggaagcgacttcacattgttgtctaccgttttcccaatgagctcgacaatccttttccagctgagatgcataccgctcaaaagccgggccacgtgctt

SEQ ID NO: 13637 - DNA, 488 bp, Diabrotica virgifera
ccctgtatatgtaatttaaataacccacacagggtgatcagcattcttgttacagttgttaacacattgatgccatattatttttactaacagcaagataattacatctttatctacaatgcttttaaataacatacaatatttattcttcagtgatacttactggcacataacacatttttatttttaagagcaataatgaccaaagatagtatgtatgcacatatggcaatatgggttggttactttcaatttacttcattacaatacattgttgctgaggaaacaatacctcttgagttataaagtcttcctttgtttaggataatggctatagaaaattacaaaaaaaaatgggcagatgagattctgtttctttgaaaataaaccattgtttgtataggtattcaaactattgaataaaccctaattattttttaaaattataaatacaaataaaaataaattcgataacgaaataattctac

SEQ ID NO: 13638 - DNA, 490 bp, Diabrotica virgifera
gctacgacgtttttcaccagtaaccatcctcgtttcaaataaccttgtaagcaaaacatcaaaacgtgttttacacgactagctttatcttctagtcaactaatttatagactagtaaagtctttaatatggatacaaaaggtcgggcttcactattagttatgagttttcgactcaaacgacgtgcgtcattatcacgcctccgtcttgcttcttttttctcttcgctttcatttgcgcgccgtatgcgacgggcttcagattcgcgcgctcgtctcgcttcagcttgctcctcagtttcatttgcacgccgaagacgccgggcttcagcatcccgtatacgtcttgccaagttgttctgtagtagcttgggcacgttgctttcggcgatattctagttcccgttgacgcattgcttgatcttgtgcttcattttgcttgatgattgctcgacgttcacgtttatatgcagccatctttgctcgatcct

SEQ ID NO: 13639 - DNA, 490 bp, Diabrotica virgifera
aaagctacaaatcttacctattacactatatagattgcttgaacaatacttgggctccgtcattgccaaggtagtggagcgtgcgaagacgaaatacatcggcgtctcataatggccagatcaaaactagtggaccattaagaaaagatattctaaacgcttaatggtatttgaaatgtaggtctgccgtagagtgatgcgcacaccacggacaacacaacacaccaataactcaatattattagaacttaaactcgttacaactatcaaattatactgagatactttggacatattagtaaaagaacaaaaggtatggaaataatgaaagttaaaggcatgtacctgactaaaattgtagagaaaggtgtccatcgcgatgatcagattaataaacataaccgtttactcatttttggaattaaaacaaaaatagcacaaggaacagataaatcattagcaatagtcaaccgaatggaacaacgttaac

SEQ ID NO: 13640 - DNA, 487 bp, Diabrotica virgifera
aacaatcccaccacaaattcagtgttagtgatcgtgtaaattattgtttgacatacaaaatgtatacaaacccattcagccgtactcattgccaagttcgtcaggttattgaccgatttttggagaagaccctcaaggtttgccccaagaatgggatcaagagatatggttcggacaattctgtcagttcttcatcgtcgaaaagtagtacctggagctgcaaatcgaaaaatgcttgcagcagaattattagatagtgtgcttcgtattaaattaacctggatcaaagttttgatgtccacagtgaccaaatgagagaatttatactttgttgaaatggaagatggttctttaagaaaattaaatatttcgatttgagaaaaatcattggcagtagtatgaaagccgagatgactgaagattaaatgtaaatgtgaagatcttgtaaatatttacagtaataataaaaataaagtaattgtgtact

SEQ ID NO: 13641 - DNA, 495 bp, Diabrotica virgifera
  SmartBlast Evalue=2E-30; Info=Survivin n=1 Tax=Culex quinquefasciatus RepID=B0W6D8_CULQU
acttctctcaataacacggcattcggcaactgcagcattaactcgatgtgactttcttctggataaaaatggtacgaccataaaggagctcttgctcttctgttagttgaactgacaactccctgtatcaaaacgtctgcagactgagcagtgctagattcgcaagatatcgtacaatatggcgcaaagttaatcatcgacattttgttttcgggaaatgtatgagcggattttttggtagcatgtgccgttagtatactccgtatatcagaagatgaatttatacagctaaaatgttgcatcaccgttgatatagtacctattttagataaggtactaggcgaatttgtgctgttgactatgttcttacccaatattgatataccacctgaattaaagaataattccacagcttcttcagtatccaaaaactgcagaacgaaccaaaatactggctcgctcagctgattcacttgcgataagaacattagcaat

SEQ ID NO: 13642 - DNA, 491 bp, Diabrotica virgifera
  SmartBlast Evalue=1E-13; Info=RNA-directed DNA polymerase from mobile element jockey n=1 Tax=Camponotus floridanus RepID= E2AVN7_9HYME
tacaaaacgctcttaggatatttatagaattactgtttttttgataatttggtggatacagtccttccataatagttttctatctagatgcagaccaagatatttacagagttactaatacagagtttatatttcctattgttagttgtctttgatagttatttctgtttctagagaaaatacatatattggttttggactcggatatggaaagtcccatgttgtctaggtatttttggatttttataaattcagtgttgatattttctatacatttgtcctctgatttgctactggtgtaaataacaacatcatcagcgtattgaatgattttagacttttgtgatataacattttctatatccattgtgtacaggctgtagaggattgggctcaggatactaccttgtggtaatccagatctacatattcttgattccgaaatttcttgattatctttaaggaaactgatcgattagagtaagctgatt

SEQ ID NO: 13643 - DNA, 494 bp, Diabrotica virgifera
tctatgggtcaacgtaaaaccatatcaagtttttagtgtgactttctgtagtcgtacttattgtttgacggtctccttactacttttgtaagatactcattaacattatcaaagtgaaacgtttttgtcattgtttaatctcttatgccagtttttataaacaagttatagcgatttgaccatattttacagcataaggcctatttcatactttgcgacttcggtcgtcacgacaaacggtcataacgacagtttgtcgtacattccattagtaaaatacaacaatgtacaaagccttccacacaggatgaccacgactaactgtcgtgccgttgctcttcggctgtcgtccaatgtcactgcaatggacgacgattgtgtcgtgccgtgctatcagtgaaccacgggcatagatcagtgcttccatacttaacgacagttagtcgtgtaaaaccagtgaatccagtggcacgtacctacataatggcagacaa

SEQ ID NO: 13644 - DNA, 491 bp, Diabrotica virgifera
tagtataaaatatagtccattgcaacctctaggaagggattctgagtactgaatatttatagtccatctcacgtttttcgttcagtatgggttaaaagggaaaatagaacaatattgtcaatagttgatttatgtaactattttttgcgttttttcattttctcatatttttataagtcgagctatcttttgctgcagtataatatgtccttctagttttaataattctgctgacactacgctttctccatgatttgcttacacagtgtccagtatacaccgaagattcatcggtataatatattatataacgacctaacaatgcacattaaataaatcatacaaaaatatgaccctggctaccttgttctctgcatctgtttatgtttaatagatatgtatgacccaatcttattatgtcttctagtgcaaacaaatggttttttcgtccaactttcttatactcaaagccaataagtaaacagcctacg

SEQ ID NO: 13645 - DNA, 495 bp, Diabrotica virgifera
cacgctacaatcaaactgtttgttttcaagccaagtttcccgtcaatacacatttaagcggtttcacgggctcaatatacgccagaaataaacagctctgtatctacgttgaaatcgatcgcgcggccaacgtctactgaatgaatgtttacaacatactgccaaacctcctaacttgttttaagccgcgtgcacgtggcggcgtagcagaaactggcgtgttctcggtacacccggcttgtaagtcacttgcaaccggctcagctcgagtgtgcagtgaataaattaaacttatgtactgctgaaccgacagcttcagttcagcagcttcagctgctgaaacgtagcctgctcgcaactctcacgcagcttcgagcctaatttaccaaaggcacgacaatattatttgtacatcaataattgtgtatgtaagtgtgtgtccgggcattattgacttcggagtatataatcttcactcgccatttagacataacc

SEQ ID NO: 13646 - DNA, 492 bp, Diabrotica virgifera
agtaaattcgcatttataggctttatgttttggtaatgaatcgtttcgattttcgaaataacttttcgaaaagagaaatttactctggatctctcccttaacccattcgctgcctatagaagaggatacaactaggctaggagccattttattgaacggcacctaattgaagtaacaatagaactcgctggcgcttgaacggcacctgactgaagtaaccatatcactcgctaacgcgggaagcgaatgggttaaatcaaaaataaaaaaaaatagtgcacatcaacgttacagcacggtttggaacttcactaaacttactgccggtatccaccaaacgttacgtaatttttcagtagttcaaacgttacgtaatttttggcggaactaacaacatatcgtgtgacaatttttatgataagaattttggtaatcacctgactaagacagaaaacaataggactacgaataaacaactgagtccttaagaac

SEQ ID NO: 13647 - DNA, 493 bp, Diabrotica virgifera
tgcgtcgcgtcgaccggtaacatagtcaatacttatattaatagatctcgacagagaaacaaaataacacaattaaacaggttttacaacataaatttagtctacagtaaaaaaaataaacatgtataatttactatatttaacacattgcgtgccacgtcgctcatatatgagagacagatgttctgccaggggccacgtcgctcattattgatatacacgtacgactgactttcattgccgtggcccccgagagtattatcccgattaagacgtggcacgcaatgtgttaatgggacttaaccgcaatgtcacttgaaaatacgtttgatatgacgtttccatttccacttcgatcgttcaagatcaaattccgaagtgggaatcgaaacgtcaaaccatacgtagtttcaactgaaatagggcattccaagacgttgatgtttgggagtcaaactgtcaaacattgtgtttgcttatattatttgcacca

SEQ ID NO: 13648 - DNA, 496 bp, Diabrotica virgifera
  SmartBlast Evalue=6E-25; Info=RNA-directed DNA polymerase (Reverse transcriptase) n=1 Tax=Medicago truncatula RepID= A2Q4S9_MEDTR
tccatcagttgccttacaatgaaaattgcatctgttgttgatctgccctgcataaagccaaattgattattggatatttcggtttcttcatgtatcaattactttctcccatgttttcatggtgtagctaagtagttttatagccctgtagtttgtgcattgttgtatgtttcccttgttttgtagacaggtactaatatactgcttctccattcgtctggcatttgtctaacttccataattctgttaaatagacctgctagccaacttattcctgtctctcccaatgctctccatatttccccaggaatatcatctggtcctactgcttttcctttctttattttttgaagagcttgagccacttcctcgtttgttattctggtaaccattgctgttactgtctccgttaactcgacaggctgtctgtcaaattcttcatttaataaactgtcaaaataatttctccgtctctttttgacatccttttcgtgaa

SEQ ID NO: 13649 - DNA, 493 bp, Diabrotica virgifera
  SmartBlast Evalue=7E-44; Info=RAD50-interacting protein 1 n=1 Tax=Camponotus floridanus RepID=E2A6Y2_9HYME
gcaatcgcactctgaaatcatccagcagttccagttgcagatccaagaactgtaatctgtggcctggttgatacaacgactcataacgttctgtgatagtttgtaggagagtgatgaacgcgtctgcgcacgtggtgatctttaagtcctctacatccgaagtcagaggatcaaaagcttcaatggagtttggtggtaacatagcgtccattttttcagtggcatactttttctccatagctaaccatttaatgaacacttgggcctgtgtcaggactaccaaaatacttggctgattggcgggatattcgtacgtttccctcaactccttatcaaaacctagagcttcatctattgaatgggaaaatgtgaaatcatcgaactgcaaatttggtaggtctgaaaacagtttctccactgcgatctgaaccagtcccctgatgaattctagcttagcttcaatatgtagcaatcctaatttttccactattgg

SEQ ID NO: 13650 - DNA, 494 bp, Diabrotica virgifera
gcggatgtttcatccgcaatgaaaggtataaacatactcttcatctatatttcatccaagatgcacatccaaagtaaacagtgaacaaagtagaacgtcttcctactttcgatgaactggctggatgcttcatccaccgtgaactcctagtgtaaagtgtaaacttgtttttttcggatcattgaacattccatgccatcaaaacgcagttaaataattttttttttgatacataaaatggcttttcaatggaaagacgaacatatgcataatatatttctagaaatatatcgtaatcatgagtgcctgtggaatattcaatctgaggactaccataaaataaacatccgtgatttaaacattccgtttatcgggattaaatataggcgacataaaatcaaaatcaaaactatccacactcgctattgtccagagttagcaaaaattaggaagtgagaaagagtggatcaggaagcgaactgatgtctattctc

SEQ ID NO: 13651 - DNA, 494 bp, Diabrotica virgifera
  SmartBlast Evalue=3E-56; Info="Mondoa, putative n=1 Tax= Pediculus humanus corporis RepID=E0VQ02_PEDHC"
tgattcattctcttataccgcatcttaatcaaaatcctaatgctaagctaagtaaggcagctatgttacaaaaaggtgctgaatatattaggcagttaagggatgaaaggaaccaacttaaatcagaaatggaatctcttcgacaacagattgaaagccttaatgcggctataagcaactgtcagtcaatgttacccgccactggagctccggtttctcgaaggagggatagccgaatgcaagagatgtttgaagagtatgttcgaatacgtactatggaaaattggaagttttgggtctttagccttatttttaaaccattattaaattcgtttaataatttagtttcgagttctagtatagatgatttatatcgatctacaatgttatggatagaacaacattgtacccttggagatctcagaccagtggttttaaattcactaaggtatctatgcacaaagacggacattctttcggatccggataagtta

SEQ ID NO: 13652 - DNA, 478 bp, Diabrotica virgifera
  misc_feature (442)..(442): n is a, c, g, or t
gcccatcattttcgttgcaaacatttactctttcaagagtagattgaacagcagtctcaatttctgctctcgatatgctttgaatggcgtttagtattctctggataatgtattctagagtagtgtatgatgggcaacaatttgaatatttaggtcgtcactaagtagttcccctttgttctgtgttatatttaattttaatagtattgtttctctttatattgttgttttaattaattatatttttatacgttgacatctggaaaatgttaccttgctttttttccacagcacaccactttcgaacttagtttaccggtgatagtaacagttatgtatcaaatttacacgtttctcgagatatcttgagatagacaaaaggcatcgacatgcggccctcgccattctaattgctaatttaatctaattttataaagtatgnttaaaaatgcatacttgcatttaatactttccaaag

SEQ ID NO: 13653 - DNA, 494 bp, Diabrotica virgifera
  SmartBlast Evalue=1E-31; Info=glutathione S-transferase S2 n=1 Tax=Nasonia vitripennis RepID=UPI0001C4B5AC
acttgaagacctgaagataggtatctaattttcccaatacttctatcagaataatttgatcaaaaatgccaaattataagcttacctacttcaatgtcaccggaagagcagaacctgcgagagttatgcttcattatggtggaattccttttgaagactttcgaatagagcatgctgattggccaagcataaaaccaacaaccccatttggacaattaccagttttggaagttgatggtaagaagtatacacaaggaacccctttggctagatatgtggccaatgttgttggtttggtaggaaaaactaatgaggaaaacttggaaatcgaaattgcagttaatattgtgtctgagctcttaataactgcttatgaattcaagtacgaccctgatgaagaaaagaagaagcagcacttaaaaaagcttaatgaattgatggctaaatacttaccagttcttgatgaagctgcaaggaaaaatggaggtcatctt

SEQ ID NO: 13654 - DNA, 490 bp, Diabrotica virgifera
atcatccaaatgtgtccaataagatataaaatcccaccgaaagcaccaggaagagtgtccgcagctacaagaaattactctcgaattggagatattcagtacgagggattaaatcattttgtgatttctgtaacagaagaagatgcgcacggattggattttttaagccgagggagaaaagtgtgctgcaaatatgatgtgatcctctttatttgtattgactgttttcacaattttcataccaagtaactcttaacgaacatctatcgggttcgcgcctagtggtcccatatgggaacagtttttttctcaataattatttcatttacaaacaatttgcttcttgcgttttgtacaaaatactgttacatttaaagagtgttaataaattttgtgaaaacaaaaaaacatttttctcggcgataatgggttaatatccatccaactgctaaaaaaactgtacaagagtgtacagttcagagatcaactc

SEQ ID NO: 13655 - DNA, 493 bp, Diabrotica virgifera
cggaatggaaacatggacgttaaaggccagctccattaacaaacttgaagtctgtgagcgagctcccaggatagataactttttgattatgtaaaaagtaaaaagactacatatacttaggacaaatattacgaggagaacgctacacttttcagtaactggtattcgaaggaaagatacagggtaagagaggtctaagacgtaaaaatatgtcacggctgccgctgcgtaatattcgtcaatggacaggaatccacagctacgaaatgcttcgcaatgctgataaaaacaggatatttaatcctgtagtggagcacgcaaaatataattctattttagtgacgtcacgttgcctagcaaccgtcgattctcccattatgaaattctattttgtgacgtcagcaaaatggaattctatttggcgtgctctgggcccatatgacgccgaagaacgtcatatcgttacaatgtcaggtgcgcatgacgtcatatg

SEQ ID NO: 13656 - DNA, 484 bp, Diabrotica virgifera
  SmartBlast Evalue=6E-31; Info=Endonuclease-reverse transcriptase n=1 Tax=Bombyx mori RepID=D5LB38_BOMMO
tttagaaagggtctaggaactagagaagcattattcggagtcaatgttctgacacaacgatgtctggatataaatcaggacatatatgcttgcttcatagattttaaaaaagcttttgacagacttcaacatgaaaagcttttaagtattcttaagaccaaaaacatagatagtagagatctacaaagtatatcgaatctgtaatcagaaagcaagagtaagagtcgaaggagaactgacagaggaagtaagtatacttagaggagttcgacaagggtgcatactttcaccactcttattcaacgtctacagtcaagtgatatttcaagaagctttattggatattgtggaaggtattttggtcaacggaaatagcattaataatattagatatgtggacgatatggtcatacatatttgcaagtgacatggaagatttacagtacataatacaacacgtatacaatgcatgtgaaaggtacgg

SEQ ID NO: 13657 - DNA, 494 bp, Diabrotica virgifera
  SmartBlast Evalue=1E-28; Info=FK506-binding protein 4 n=1 Tax= Camponotus floridanus RepID=E2A2F6_9HYME
aatgcaaattgtttaaggaaaaaggaacaaactactttaaaaatgggaagtatgaatctgccgtgaagttgtacaagaggatacatagttatttggagaaggatactgatactgacactcaagaagacagaaatgccttgctactagctgcacatttaaacatcgccctatgtcaattgaaacttaaagagtactttgaagctcgctcagctgctacctctgccttaaatatcgatcccgacaacgaaaaagctctctttagacgaggacaagcatacattcaattgcgagagcccgagttggccagacaagactttacaaggtgtttagagatagatccgaacaacacagctgcgaaatctcaactaaccatttgttcgaaaacgttgaaggaacaactacagaaagagaagaagatttacgccaatatgttcgacaaattcgccaaaatggacacgcagagggaagaatatgagaacagaaaactgcccaat

SEQ ID NO: 13658 - DNA, 490 bp, Diabrotica virgifera
gtttcccaaagaacagatttgccggcagtctcctttaaaattgcagtaagatccaattttttgaacgacaagggcaaaccaaatgttatttcacaccacaattgtttttgttggtcttcataataactttgtgcaaaattgtaactatcaactacttcattatcttgttcttgattgtcagtttctttttggttcgcttgggtttcgttatcgctttcatcatcctcatcgtcagatttttctttctcttcttcttctggttctaaatcatcccttgtttcttggtacttatgactctgcttagcatcttcattatcttccacttcgtcatctgaggaatcaatttgattgtcaccttctctttcatttgtttctggtcgatcttcatcttcttcgttattagttgtacgtttcttgtttctttcttcctccatcattactatgtttgaattgattttactgactttcttgagtggatgacaaactattt

SEQ ID NO: 13659 - DNA, 490 bp, Diabrotica virgifera
ttacatttatttacttacagttatctacatcagagtcttcataatcttcatctgagtctgaattatataaaaactgcatcaattcctcaacactcagatttttttcatttctcactttcacggtgttacgtctttttacgcctgaaggtccagctttatttaaatcagccattattatacaaataattaaacttataatcacactaaaccgtttgaaacgacaacacctttgaaaacctaactatgtgagtaactgatctgcgacgccacctatgaatagctttgcaaacctaaccacatgattcaccgagccgcgacgccacctatgaatagaagtgacctttaataaaatgcggacaaagtttccttgatctcctgaaactgagtcaattttaaatgtatatggaaatcaccatatacataggccgctcatgtgcgccatacgcattttacaaagaaataggagggcgcgcatgtgcgctttacgcag

SEQ ID NO: 13660 - DNA, 491 bp, Diabrotica virgifera
acttttccgataagccagctttttattgagatgcggcttctttttcaatatatttacgtaaaaattttatgggggttttgttcctttaaaccccccaaatgtttgtgtacgttccaattaaactattattgtggtaccattagttaaacacagtgtttttaaaacttttgtgcctcttagtctttgttcataagtcaccttttatcgagatgtagcttctttttcaaaatatacctaaaaatgtaaattataaataaattttcagattattaacaggtctctataatcgtacttaaccatatacaaatatgtggtggattcgacaaatattcaaaatatctcgataaacactggcttctcaaaaaagtacttagaggcaaaaagttttaaaaatattgtgtttaactaatggtgccacaacaataatttagttggaacgcacccaaaagtttggggggtttcaattcatttattattgtgataccattagt

SEQ ID NO: 13661 - DNA, 492 bp, Diabrotica virgifera
cccatgcattttggatgtattaaagttgtgcgtgaagttaggcgtgttgacgacagttgatcttgtaggccgcaccttattctattatttgtagatttctacatatttaaattaaaaatttgactcacaatattgtttgtagttctaaaaaggttcagttagtaaaaagtattaagagttaaaataatattttactttctacaaaaaaatatactttttcatattttagaagcagtaataatttgtcatgaacagaacacgccacaaacaaagaagttctgaggaagatgaataagaaatagaagttttgaatccagtcaaagccagaaaattggcatattacacgaggagagagatacaactcattatgcagagaaagatccaaggaaaaaggaagcatagggagacgtagaacatcatggtagcgcaacctgagagactgatacggatgtacattaaatgaacttttcagagcagttgtctctacagtcg

SEQ ID NO: 13662 - DNA, 492 bp, Diabrotica virgifera
  SmartBlast Evalue=4E-17; Info=Endonuclease-reverse transcriptase n=1 Tax=Bombyx mori RepID=D5LB38_BOMMO
gccgtgcataataagttgtaataaataatgagtatttttgccctctcatcacatgtcccaagtactcaagttttcgtcttttgatagttagtattatttccggttgatttcctatccttctagttacttccacgtttgacattctttgaatccatgatattcgtaggattcttctataacaccaaaattcaaaggcggccaacttattcaaatggacttgtttcagtgtccacgctttcaagccataaagaagagtagagaacacgtataccctattccacgaacatacgactgttgtggattatctcgacaacgaatattctactgtgcaaattaggaagaacgaaagtaaattgcaaaatatattgttgtttattggaacaattattagagccatttactttcgcacttcttatgttgcacactaaaatattcgttgtcgcgataatcaaagacagttgtatattcgtggaatagcccataacatcgaag

SEQ ID NO: 13663 - DNA, 490 bp, Diabrotica virgifera
gacctagaaatagtactatcggaggatggagggagacagatttaaatcaaaacgaaactgtagattttcttattttactaatgccatactctgtattagagtacacagactcgtttcatacaggttctctgaaccgcaaattggaatattttcctagcggtgccttttggtattgtcatacctgggttaaacagagaacttgaatcgagtcgaaattcatttttcgtattaaattatgtttaacatgagtttttaatatatttgttgcaaataatgaaattttttatcgttcattatgccagatattaacagaacaatgcctgtccaggtcttgcaattaagttggtcaccctctttatgcagcgggcatatcattctctttagccatccttctggtatcaatttgttctgccatataagtattattattatatgaattgctgccaaaagttggtcagcctgttatacatttcagaacatatttcgtcga

SEQ ID NO: 13664 - DNA, 492 bp, Diabrotica virgifera
atttttgaaagaatacttcaaaggatctatagatcagtgagaacaagatatttcgaggataattataagatcaaaaattgataagagaggagaagagttaaatttgtaaaaccgagaaaactagcgtggaaagaagttaattcacaggaaaatattgtacgaaagaatggaatggggtggtacatcaaggaagtgatgactgcaggacgtggagcacgattttagagtgatgaaagacgaacggcggcgggagattgctaagaggggaggaaatatttatatgggcatatgaataccgcatggtggaaaatgtgttggaagtgctaaaaaatagagaatcttagttaaattgtagacacatagagtcataagtagaagcctctctgcactacgatctatagagatttttatgcgcaacgactttattaagtaaatgtgttgaaagtcaattttaattataaatttttaccaagtgggactaattgtctttac

SEQ ID NO: 13665 - DNA, 491 bp, Diabrotica virgifera
cccagagaaactttgacctctacttccgaacttcttgttggcgatccttatgtgaatcataccgattagttgctgacggtataagctttagtataagctacttatcaacgaaaagtgaaaaacattcagcggaacgcttagaatcatattttggaagttcctttttcaccaatacattgaccttctctcggcatgttttcttttgcttagtgatatgtatttttttctgatcctttacctgtccatttatctctcagctctgtgaatggaatgttttactgagaatcgggtaacagtatgccttcgtcattattttgcacatatatttgagaacaaggttgtaattgcgagccaggtaaattatccattgcctttatatctctatcatcagtcttcgtctgttaggatatcacatgcatttactggagacaccaaagcaatactgtctacaattgctactaaattttcatgattctccaatataccaagcg

SEQ ID NO: 13666 - DNA, 492 bp, Diabrotica virgifera
gtcccgaactgcctcaaactgtttagatatgcctacaggcagtgtgatggatagatcttgactataatttactcgctttagagtggcagcagttcaactggtagccgatgaattgaatatttcaagttaccggatcatgtttccaaaaagaaatagcaaactaaattcaaaagagtgacacacagaccttcggacggacttattggattattgtattgaagtgagtacggaaaaggcttctgaaagttgacctgaacgcaagaaaagcgaagacaaaacaatttctaacacagaaaatgatgacggtcggcatacctaggcttatgtcaaaaccatttcttcaacattcagcttcaattccttgaagctcacattaatcttttatgcaacttcacattattgagtgaacgttatacatacagtgggtgaatattattagagccatctagttcgaatgcagtagtgcagagctaatttagaacggcagtcaac

SEQ ID NO: 13667 - DNA, 493 bp, Diabrotica virgifera
  SmartBlast Evalue=1E-61; Info=Hemocyte protein-glutamine gamma- glutamyltransferase n=2 Tax=Formicidae RepID=E2AYU1_9HYME
tccgattttaatttgatccaaatcttgtaatgtgaattcacaatcttcggtttcttcatcaggcatatcaaagaacctcttggctgcttcagttcctcggacagcgttcagcagagacaaacgttctgcttttgatccttcctccggtttatataaacgtgttatatcttgacgatctctgtctccattgtaatcgtacatgaatggctgtttagtgagaatgtagcgaccaacatgatatttgttacaataaatcctcttgtatcccagtacattggaatgatctactttccaacgcatcagatctgcattgacggaagcaaccatgaagccaacatcaaagttataaccgacttgtccctttttgatagcttccaaagatgctggtccgcactggtaaaaaccacttgatggttcttgaggagttgcgtcaatagcttgccaaccaccataacctggaggaagatctggacgtgccatgtatacatcgttc

SEQ ID NO: 13668 - DNA, 493 bp, Diabrotica virgifera
  SmartBlast Evalue=8E-24; Info="NADH dehydrogenase, putative n=1 Tax=Aedes aegypti RepID=Q173P6_AEDAE"
ttttgattttgatcaaaaacaattttgaggggtactgaaaaagtcacataaaaatagaaattataatatacttgatcgattaacattcatttttcttctggatacacatattatggggggcgacggacacgggcatggacatggtcatggacccccatatacagtacccgattacaggatatataaggttaaagatgtgcccgaactgttggctactgaaagagccttatctgcccatggtttaaaagatccctggcttcgcaatgaagtttggagatacaatcccaaggaatttgggacccatagctctagattaaatacgctggtttttagaggattcaaacttggatttggagcttttgtggccacagttatcggaacagctatttacgataaaatgaatcctagtgatcatggccatggacatgggcatcattaaatgtgtgtatgttgtgaacgtaggatttttataaataggaatatataatataac

SEQ ID NO: 13669 - DNA, 493 bp, Diabrotica virgifera
gtgttgggatttaaatgagttgaaaaaatgacttaccacagattgtgcgttttttcactactctaaaacgtataaattgacatcagcgaccattacgacaacaaattaaaaaattaaataaaatcgtggtattcgattatttatccctttcgaaccggtcgtaatataagagcttatgtgcttaagagactgcagctgttacacatttttacaactagactaaacacactctggttaatgatataaacacaaaaaaaataatgtcgttcagtacagcgctgtccaaattttttagagctagaaaattatgcttttttccttcaagacctataccagctcagtaacctaagaaatgtacaaaactaccgctggtactgtgcgcagaaaaaaagataagtatattccttatggaataaattagctagattggctatagtcgctagaggtttcgagtttcgagtttcgaaattatgcaatgataattttactctac

SEQ ID NO: 13670 - DNA, 493 bp, Diabrotica virgifera
  SmartBlast Evalue=1E-54; Info=RAE1 RNA export 1 homolog n=1 Tax= Tribolium castaneum RepID=D6WQQ3_TRICA
caagcgagaagcgagtatattaaaaaattttttagtttgaaatatcttgtaaaccgcagaatattaatttgatttttgtagattcgattcatgtttaaaatccgttgagaaatatatttaaactcccaaaaatgtttaatcaaagcgggttaggtacatttggggcagctaccaccccaagcccagcaaaccccatgaaagattttgaagtagtttccccaccggaagattccattagttccatggcattttccccagcaacgttaccccagaattttttgatagctggtagttgggacaacaatgttagatgttgggaaattgaacataatgggacaagtgttccaaaatctatgcaaacttgtggagctcctgtgctagatgtttgctggagtgatgatggatcgaaggtttttatggctgggtgtgacaaacaagcaaagatgtgggatttggccagtaaccaagtcgtgcaggttgccatgcacgatgc

SEQ ID NO: 13671 - DNA, 493 bp, Diabrotica virgifera
aaatatatttcgttaaaatcgtataatggaagtataacgtcctacgtgcgtacaaagtacacacactttttttaacctacgtataattatgtaaagtattgtacggtatttgtaaaattgatgcttgccgaataacagatgcttcaaggcaattttcaaactaaacacatttcttacattcccttaagtatttagtaagtataattttactttttttcaaaataatattttttaatattcaaacgtcaatataacctcaaaattataagcaaaatcttaaaaaacatagtcataatgaataatacaatttaatacaaagatttatttgagttcctatttaagccataatgtaaacttgccgtataaactttcggactattctctgtaaatcttcaatattctctgccattaacacggtgtcatctgaaaagggcttttcattcacagtcatttgtttcgagcctgtcatatgtcgtataatccgtgtattaat

SEQ ID NO: 13672 - DNA, 493 bp, Diabrotica virgifera
ctaaatctttggaacgacgcctacttgcattggaaatggatttctggagaagatcagctagaaaattaaggcttgaaagaatacaaaatgaccaagtcagaaatataattaagtcaaccatcatagataaaattcaaaggagacaactgatctggtatggtcatgtagaaaggcttcacttattttccccgagttatgcatctagtttattgttactacctctatgtgaataactaaacatgtagttaaaataacacccatgatttataaattcctgaaataaatgttatttatattcattatatattgttacataattatattctctaacaagttcaagtcgattttaatggaacatatcatgaaaaagaaggaaatcaaaattatcatcgtgtcattatttacgctcaaagtagaagtataattgccaacaaaatatttagataaaccgtatcttcatcctataacaaagtcatttgtatttgagtagtat

SEQ ID NO: 13673 - DNA, 491 bp, Diabrotica virgifera
atctagaaagtggagtgcgtacgtagaatctttttctattattgaacgcctttttgtgttctgccatgcctttattaaaggttctaccagtttgaccgatgtaagtttttgagcagttaccacatgtcagtttgtatacaccactcttcagttgctttttcttttgactcttattgttttaatgtatttgcttatgtattgtatttgcgtggtttgtttgttgaaggcattttcgtaatctagaaagcagacaaatacggcaaagctccctgaattattaacatttggacactgaatagagtttcaagaattccatgaccatttttaaatcacttttgtgagaatataaatcagtttgtggtgtttttttgtcgaaggcattttggtcatctggaaagcagataatattccatatctacattcccagttctctgaatttacaatggaatactgaatagtacttgtatagttttatgactatttctatattc

SEQ ID NO: 13674 - DNA, 493 bp, Diabrotica virgifera
gttgggggatatatcactacttactacacttcgttgtctcccaaatagtgtttgccacctgcgatccaatgcctcgcaggcatggaagatatgattgactgtttcaagttccctgagtgtagcttaagtctccatgaaacagtcccatagacatttcaagttccctgctacagagtatgcagcttaagtctccatgaaacagtcccattgtatacaggtgtcccttaacccttaactactgacgtggatgtttcaggacgtagacacttatatgcggtatgtcataccgttgcctattctcctttatttccaatatggatttgtcttatagcactgtatttgttttacatcaactacggaatgattcttcacactgatgtaaaataaaatactgctccaaatagaataaactttattttttcaagaaaattatgaacgtatgcataatattaaaaaaattatggaggttcttaaaaaatctttatactgaatt

SEQ ID NO: 13675 - DNA, 490 bp, Diabrotica virgifera
  SmartBlast Evalue=7E-84; Info=Homeodomain-interacting protein kinase 2 n=1 Tax=Camponotus floridanus RepID=E1ZZ83_9HYME
agcaatcgacatgtggtcgctgggatgcgtggtggcggaactcttcctgggatggccgttgtatccgggatcttctgaatacgaccagatccgatacatcagccaaacccaaggtttacccaccgagcatatgctgaataacgcatcgaaaacgaccaaatttttctacagagacatggacagcacataccctttctggaggctcaaaacaccagaagaacatgaagccgaaactgggatcaagtccaaagaggccagaaagtacatcttcaattgcttagatgatataggacaagttaatgtaccaactgatctcgaaggtggccaattgttagccgaaaaagttgacaggaaagagttcatagacttgctgaaaagaatgttgaccatggaccaggagagaaggacaactccggagaagcattaaaccacgcatttgtcagattggcccacttagtagactacgcacattgtaataatgtgaaagcta

SEQ ID NO: 13676 - DNA, 492 bp, Diabrotica virgifera
tagaccaaaaaatagacctgtctcgtcatttgcctaaaatctaataaatactgcgaaatatcgaggtggactcttttcctttgcccaccgtgtatataaatataatgttttgaaaaacttttcttgtagcagcatcttagtgcagtaaatttttttttattaggaataagccacaatattactttaaagttaagttaatttatgtttcaatttccacttcggaaatcgttctcaaaatataaaacactaatacatacattaaataaagcttgggtcacgagtaaaatggtggaaggtaaagaataaggatttggatataattttaaaagtaggcctagagtgctagaggagtttaaagaaatacacttggcaaatgtacttggcataagaataaacgacaattaaagcctaatgttttctaattaaatacttcttatccaaaaatttcctccaaataacaaattttgttctggttatcaatataatttaatc

SEQ ID NO: 13677 - DNA, 492 bp, Diabrotica virgifera
tctgaaataacgcaagcatacggtttttagttatttaaactaattttattaacaaaaaaatgtctcatcacggcccacatcaccgtaggagcccatctccacctcaccaccatgggcctggacaccaccatcatgctcatggaccacatcaccgtaggagcccgtccccacctccacctccccaccattggcctggaccccaccaccatgatcatggaccacatcaccgtaggagcccatccccacctccacatcaccaccatgggcctggacctcaccaccatgatcatggacaccacggaccaccgccaccagggccatttccacgagaatatccccctggacaatatccctctggaccatatcctcctggacagtatccacctggatattatgctcccccaagataataatttaatcaggtaaaaagaagataattattattacattgtaaatagcatattttattgtaataaaaaattttatatcttc

SEQ ID NO: 13678 - DNA, 493 bp, Diabrotica virgifera
gtggaatgcgacacgtatgagcgttttgctccaaattaaataaaataattcgataatttgctgttggagaacacttttgtagtgataattccttgaaaaagactatcacgtttatatcgggtgtttttgtggataatgtgtgctaaagttcgtatttaataattttgctgttttttgagggggtgttataaacagtggcgtttcgttgagttgcctggtgtcagtagatgccgatggcggctactactcggccatgccgcccgctgccatgaggctgcaggaggaccatccccccgccggtgtcagcggcccctactaaccacttgatagctaatttagagacaaataataatagagcaactggctccgagctggagctgctcgcgaaactggaagaggccaataggctctatgaatccgacgccaaatcgctcaattcgttgagcggggcgtcggcgacgtcgggacattcgaggaagagctcagacacgtc

SEQ ID NO: 13679 - DNA, 492 bp, Diabrotica virgifera
  SmartBlast Evalue=2E-27; Info=BTB (POZ) domain containing 2- like n=1 Tax=Nasonia vitripennis RepID=UPI0001A46D3C
ccccgtctgcccctaatttttcacattactctcgtattttgactattagtatgtaaagttaaataaacttaaatgttgtctgttgtgtatctatcaaattaaaacaaagaattcttataacatcatattggagctttgaaactgcctccaaagcctggcgagatagaaaatactatagatctgaccaggccgtcgcgtaacgattctcctgactggttttgggcgaacgtaaacacgacgccgtgcgccgctgactggtctggataggacgccactggatagcaaccgggtttgttcaaaaccacgccgatcttgtacaccttatttttttgaatataaaccggtcgattgaaaactatttcaatcaatgacctgtatttaactcggctcgtcaagtgagtgtacgtcaaacgacttccgtctgcgtccaataagtgagcgtacaatatttccggataagagtgggcagcgggtgatctgtcttcgtccgtt

SEQ ID NO: 13680 - DNA, 492 bp, Diabrotica virgifera
  SmartBlast Evalue=7E-31; Info=Endonuclease-reverse transcriptase n=1 Tax=Bombyx mori RepID=D7F173_BOMMO
cctaattccaagcacctatctcgtccatgatggatcttctccaagtttgtgctgcgcgacccctctttctttttacttgcgagtttcactctagggcggtcttgacaatactggagttatttttcggagtgtgtgaccgatccaacccccctttctgaagtttatttcattttctaccctgttttgttcagtcacgtgtagtagatcttcgtttctgatgatgttaggccagaaaatacgaacaattctacgtaaaaatttgctaacaaagacctgtagtttgtctgtgagggattttgtcactttccaggtttcacattcgtagagtaaaacaaacatgacatttgactggaatatttggatctttgtccttatagtatacacgccatacctccaaacaggattgagcatgctgaatgcttgctgatcttttcgtatcctcatacgaatatcgtcttctgtacctccgttttctgttatgacacttccaag

SEQ ID NO: 13681 - DNA, 491 bp, Diabrotica virgifera
gttccgagtcgaagctgcccccctagggtctgtgcgttctcttatttcctgctggtgagtttcttgatttgcgttcttccttaaactccgtgcgtgccccttttcaccacaattgcagcaattcatggtcttcgttttcttcgatgtaaagcctttcaccatatttaccagctggtcaagtttgtcttcatcctcttcttttacagttcgaactgcactgtactcaccagaggcctgcgtagctgattcgaactcgagggccgcggacaatacatcgacccgcgtcttgtgacgagctaatcgcagtgttctctgcatttcaaaatcacgaagaccatcggtaaatgtttgaacagctaacatttccgtcatgtcttcgggagctgttggataagcaaatcgcactagcctggcaatatctagctcatattcttgaagagcttcatctttcttttgttcgtcgattttaagccgcgcctgatagacatact

SEQ ID NO: 13682 - DNA, 494 bp, Diabrotica virgifera
tcattggaagtttggaatgatgtggtttgtttctaggaattctacgagtctgttcttgaggatcctctcgtagactttacctagagtatttagtaaagataatattctgtcgataggattctgtggtctatagtttccctggtttgagaatcatgattgtccaactccaactccatggagttggaaaatagtttaacttaagtaagcaactttaacttaagtaagttttggtaagcaacgggatgatactgtatggaagttttttgagccatcttctgtgaataccatcaaggtcaggagatttgttttttccaatattacacatctgcctgacggtgtcctcttgcacaagagcaatatatcggatgagagaaggctttcatgtacggaagagaggtctggagtatttttcctctcaccatttggtattacttcggtgtctttcgttgaagtttggattatttgaggatgatattattaactattaagtattc

SEQ ID NO: 13683 - DNA, 492 bp, Diabrotica virgifera
  SmartBlast Evalue=5E-16; Info=Microtubule-associated protein 2 n=1 Tax=Camponotus floridanus RepID=E2ALN8_9HYME
tgatattaagattgaaaataagaagattgaacttaaggttcagagtaaaattggatctctcgacaacgtcaaacacagaccaggaggaggagacaagaagatctttgacgataaagaatatttgagacagacatcaggtggaagcatggatcaatccttgtcggcttctcagaattccataccttcacagccagacaaagtcccaatcgctgacgagaatttgaaccaggaacactaaatacgtagatagagttgttgtgtttatcgttatgaaggacttaatttttaccaaggcgtgaacagcgcttttcaaataaattaaaacaaaatactttgtcactaaaactaaagtatcgcatgtccagtatacattaaaaccatttttagtatgcacttttttgaagtaacgtaaagtttagagaatatattgttgtaaagttataattaacaatagttttcactaacacttcagttcatttgcgaacagacatc

SEQ ID NO: 13684 - DNA, 493 bp, Diabrotica virgifera
  SmartBlast Evalue=3E-11; Info=UPF0493 protein KIAA1632 n=9 Tax= Eutheria RepID=K1632_HUMAN
atatcagtggaacatgaagaacgggaacgacgtacaggtctttggaatgaggtattaatacaactgagtaaacaaaaaggaaaggtcaacgtggatcaagccattaagaaagcagcaagtgccttgaagattcctgcctttacatcgggatatctttccatctaccgatgggcccaacaagctttggatacaccattggatcatccgttactaccactattatggcaaaaattcttcactctacatctagctcgtattccaaaccctagcatcgtggaaaaagcctgtgttggagaaaagttcttcgagggcatggttaactttaccttccagaagaaaattaagagaagactccaagaatctgtggattatttcatgagtaaacttgatgtaaaggatgaagacaatccggagttaagtaaaaaaccattttatcagaaatctcataggatatttaaagctttttcgctgtggttagaggagcccacactgc

SEQ ID NO: 13685 - DNA, 493 bp, Diabrotica virgifera
  SmartBlast Evalue=1E-46; Info="NAD(P) transhydrogenase, putative n=1 Tax=Pediculus humanus corporis RepID=E0VR86_PEDHC"
tttcggaaaaattgcaaatacatatttatgatctaaatatttttggcacaaggttccgcagcgtcattaaagtttggcattcaccctgctataatactgttcaatgttccaatgaagttatgtacaaaaattaatgcctaaaaattaaaactattaacctattctgctgtaactttggctaataactgatcacatgtcttcttagcgtcaccgagcagcatagaagtgtttggtttgtagaacactgggttgtcgacagcggcataacctacacctagtgacctcttcatcacaatgacatgttctgcattccaaacgtttaatacaggcataccagcgatgggtgagtttggatcttccaaagctgcactgttaactgtgtcgttagctccaattactaacactagatcagtttctgggaattcatcattgatttcgtccatttctagtacatcatcgtatggaacacctgcttctgctaaaagaacattga

SEQ ID NO: 13686 - DNA, 488 bp, Diabrotica virgifera
gctatgtttaataatggtgtctaataattgatgatggagatatcacataggaagaagatttcttagctgttgttaatataatttcttttttgatttcaaaaaaatatacttctcatatgattataacccaatgatgcacataggtagctcaaaaataaattagatttctcagtgtaatggtatctatgctttctaccaaatgaatggtaatttataaattaatacctattgccataagtttcacttgttcttcattatgtgtaaaaatcaggtaaaaacaatttggaaaacttttcattagtttttttgggaaagaaattaaaaatattcaagctaaaaatcatcattactatttcaacataagtttttcttgaagtaaagttagcaactctgtttcttttattgctttcttatatttttgaaatttaaaacacaaaataattactgatacaaattaacaacaaatgcacatgaatcttaaaagaaaa

SEQ ID NO: 13687 - DNA, 485 bp, Diabrotica virgifera
ttgaacaccggtacccactgagcatcaatgaataaatgctcgcttttgatatttcacccgttacttgttcagagctaaacactctactcgttcagttcgttcggagaaaatgctcaagtcagtacgcaccttaaaaagtgctcaagttaaaattttcaagtgcaattgagatagtctaagactttttgcattaattttgttgtttctaaattttaaacgaaatgttaacccatgttcaacgattgaatttaaatgtttctggaaaatgttattggaattttcattttatttcattatttgcccgttttgtacttttcaagtaggccgtgtgactgttagaatgtgcatttatattataattgtatataaatttattgttatatgactatatgtgagcgaatttgaatgtgcagtaaatttattattattgcaagactgatattttgaatgttgtgcgttttgtgaagaaaataaaataatatgtc

SEQ ID NO: 13688 - DNA, 488 bp, Diabrotica virgifera
ccgctcacaaagaatgcgacgtgctgggagaaatctggcaacactgtcttacacattacatctccctctctcttaccccaccactttcgcctcgctgcattgttcagtatcggccaagaagcttacgaagattgaggtcgcggtcgctgttactcccaatgtgaaattcatgatacgatttttaaatgcaaaattaatttcacctattgcattcatcttcagataatggaagttgataataatagtcatgatgatttccaaccttcgatagaaaatggatcttggagaagaaagaagactaaactttattttaaggtatatacagatgacaaaaataatatctcatctcagtctctggtaaaacaaaatggttttctatttattttgcgatgtatatatcattcagtttgaaacaaagctaatgcttattatttaaacgcagttgatgacaataactaataaatagaagaatataacaaatgagtatc

SEQ ID NO: 13689 - DNA, 490 bp, Diabrotica virgifera
  SmartBlast Evalue=3E-22; Info="Retinoid X receptor, putative n= 1 Tax=Pediculus humanus corporis RepID=E0VYP3_PEDHC"
agttgatgttcctttcggctatacagaagaaaatacaacaaatatttttacgtctacaacaggtctctatgatgactgacactctggatggagacgtttcgacagggtgtgtcacgcacataaaaaaggattggatggctttcatgaatgctctccatcaaatagcgacatgtattcccccacaacgacaactacgacagtcttaaatgataattgtattaagtcttcaaacagtgaggtcgactttcacgaaaaaaagttatgaccgaaatatcagatctccgactagtcctgaacggcagtattgttcttcaacgactcaacctcatacagactcagggataggacacatggaaggagaaattaaagaagaagattctcctcgaagattatgtcttgtttgtggagacgtagcttcgggattccattatggagtagcttcttgtgaagcgtgcaaagcaattttttaaaaggacgatacaaggtaata

SEQ ID NO: 13690 - DNA, 492 bp, Diabrotica virgifera
cctggatttgatccaaggtgtttagttcagaggctgtgcagacttgatacctatagattttttttacaaaacacctggatgattgacaaaattgatggaaatttgggagtcccaagtgatcgtaaaccatctcaccaggtcctcaaaattttttaccatagtatttttatttaactttgtttatatacgagcacgcatgttatatgtcctataagtgctacaagagctgttaaatgtattgatttcttcaagtacttattattttttaattatattagaaaatcaagaagataaatcctgtaaatagggtttcttgcagctactttgattctatttggtttgtatttattgaatataatatatttccatccaccacatcggtccaaaatatatatagggtatgccatcctcaaagtaagaagcatggcacaccctgtagacatttacggcttcctaattaaagttgtgcctgtattcatgtgtgctaaaaag

SEQ ID NO: 13691 - DNA, 493 bp, Diabrotica virgifera
aaaggcttgatgctcggttttcctttagacaaaaacagtacagtttttgtaattaaaactttgcacttttgtggtagaagctggtatgttattcggttagttttttatgatattaaaatgtaaaaataaaaactagtgatattggatgtaactacggtataagtgtcggtgttgtcctcaatttttattagtagttatagcagtttttgctataactatcgaaacctttgccaactcgtatcaacaactacaattcttctccatactgccattttttacctgcgctttaggcataagtttgtaaactaaacacttttgatacctttatagccttccacctcactattcgtagtttcacatgcttcctacagggaaaaaagaagtagtggatacaattcctcttaaaatgaaggtagggcaacaaatattgactgtgagtttttctgttgtactatatgtgtattttctatggcccaacaataaaatcagtgtg

SEQ ID NO: 13692 - DNA, 490 bp, Diabrotica virgifera
cgtcaatttaaaatatggatagaaaatgattgggtatatctgtgttcagcagtaaacataggaagattgaatgatttacactacaaccaaagaatgacaaatttttcgtcaaaatctcagacttattgctatatttgagaagttgtaaatttttcaaattgttaattccacaaataagttacataggaaaaactaaaatcaatttccagatatacaacagatatcacggtctagaaacactagagtgaaataaataagaaataacttgataatctgtacattttcaaatatatagggtctcccacaaagtgggaaaaataaaacttggtattttgatgaaattccctgtacattatttaatttccaaatgagttagataggaaacactaaagggaaacaatttccagacatatggcagatattacgatgaagaaacgctggaaaagggtggaatggtcaaaaacaagcagttatcagacacatagtgacc

SEQ ID NO: 13693 - DNA, 490 bp, Diabrotica virgifera
tatgtcttgttttaatctgaatttgtatcattggtttataaattaattttgattaacattgtaaaacataaaaaaatccgccaaaacctttaacacaaaactttaatcaaaaatcaaaaagattagcaaaattataaaagtaacaatatatatattttcaaaaaaaaacccttttaccacatagtggtgtatacactatgacaatacattacattatgttacattataatacaatacaaaaacaacttaatcttaaatttaactaataactgctatacatttatattatgtacaaatttgacccattccttcttatttctagccagcgtccttgcttctatccacgctgttccccttttctcgattattttgcctagtgttttatcccatgtttgtcttggtctacctttcttctttcttctttgcgtttttgcctgccaaatttctttcaccggttttgtctgatccattctctgaagatgaccccacc

SEQ ID NO: 13694 - DNA, 492 bp, Diabrotica virgifera
  SmartBlast Evalue=8E-11; Info=Leucyl-tRNA synthetase n=1 Tax= Aedes aegypti RepID=Q173I5_AEDAE
gcagattgaatacttccgagtttttgtgggatacaagtgtttttgagcaagattggccagttactgatatggactacatgttggagttgatctgccaggtcaatggacatgagaatgcagttctgaagatgtctagacaacaactggaagatctttccaaggacgcagcatataaattagcattagaacaaaaagaagtgcagtcaacgctaagaacacgaaatatactggacagcaatttcaccttacgtaccggtttcgaagcaatacttaacctaataactgatcatccaccccctaaagcaaaaattactgaattagaagaagcccgagctagctgatagaccgtgaagattactacaggaaaaggtttaataagtatacagaacatgggagtatagggatgtcttagatatcatcatcggaagcgctaagaagaattaacaaatatgatattctgataaaaaattttgtatttaatattctaagttc

SEQ ID NO: 13695 - DNA, 488 bp, Diabrotica virgifera
tgtatttatttatatttcgtgtttcagaagttttttacctttaatagttttttagtagttgtattttccgaacattttgttgttgattttgtgtagtttttagttgtagaagtacttgaacgactttatttagttttaagcagtgaataaataaacataagtgaatattttcgaaagttgttggtagacaatacagatgttgctagtaggcacaagcaaaagattgtcaaataaataatatagattcatttttctcaaggagcctgagttaacctacagtggaaacagtttttgaagcgtaagtaacatggacgtagttatttagcatttttataggacattttatagcatttaaccattgtttttatctctcagatgatacctattgtggtgcttcgcagaggcttttttcagtgtgacacaagtgacagaaaaaaaggacgtctgtgatacatatacacaacatataggtcaccgtccagcatata

SEQ ID NO: 13696 - DNA, 491 bp, Diabrotica virgifera
attcattacgatcaaaattcgaaaggtaggtcagagtttaaggtaggtgatagtgtaataatcaggttagaaaaagaaaaacgttggataccaggggaaatagtagggaaatgtgatactcctaggtcatatatggttcgggataactttggcagagtaaagagacgaaatacttcatttttaagacaatcaccaaatgaatgtcctcccattcagaaagaagataatatgtttccatttattaggtctgaacctagctcctcacaaacaaagttaaatattaataactttaaacctgagatttgttcaaacgaaccaactgtttcaaccaaaattgtagctagtaactcaaattgtaatagtaacttgaatttaggtaatagtgagacagttacaacaaggtctggtagagctgttgttaaaccagctaggtataaagattagttataagttagacataatattttgtagatgtattcctagagtatagt

SEQ ID NO: 13697 - DNA, 487 bp, Diabrotica virgifera
acaaatatttacattctcagaaaaaattctaagataaaaatatttctctaaagaattaattccttctttctccaatagatgctatatctttaacaaaataatataaatattggagtgcatggtttaagaagtatcctagccctaacaacacacaacattccaggaatgtactaccaaagttctatcaatatttgaatgtcctggacatttagggaacattcggtgaacatctgtttaaattattcctggaatgttaccataagacattctgtgaacatactaccaatgttcctatattttaagttgcgaaataatacatacgtgtaacagatacaacattacttataacataccagacaaactaagtgacactttaggcctacagtgcaataatatgtcaaatttaaagagtttcccaagttcaattaatacaatattataaacatacaaatgtaataaaaattattgttcgcgaatattcaatttg

SEQ ID NO: 13698 - DNA, 491 bp, Diabrotica virgifera
cgataatcgtgtaacctgccacgatagtggtgatgtcatgctgtcatttgtcaaaataatcaagcaagattattccgtaataggtacttcagaggggagttaaggtaccttcatacatgataaaaaattgggaatggttgaagatacagtttgacaaacgaaagagcaagtttgaaaatcctacaatcgtcatgtggcgttatggcaactgtaagattttcaaacttgttcctaggtttgacaaactgtagaagtaaaaacagaccttaataagaattttgcgaaaatagttgaaaactattagcaatttacaatattttgttgagaataagccacaattttctttcagaattaggtttatgtgacttttccatttccacttcggaaatttttcgaacttctcgaatgatttcggaagtggaaatataaacatcaaataaaattaatttcaaagttaaacattccagctcttttaacggtcttgagaataa

SEQ ID NO: 13699 - DNA, 487 bp, Diabrotica virgifera
  SmartBlast Evalue=4E-13; Info=Cat eye syndrome critical region protein 1 n=1 Tax=Culex quinquefasciatus RepID=B0WWE5_CULQU
cgcaggacaagtatataaacaggtagaattgacccagaaaatgatcagaagcagtgctttgttgttatttgttccctcaaattcaaatcttagtgtaatatcgcttctcgcagtgttcacattaacaatagtgggagcaatggccggtgaaagtgacgactatatacaaaaacgacaagctatactacacgcagaaaaaaatatgttcattggcagccagataaagttaaccgatagggaaaaagaagttaatgatatagttttgaaagtaaagaaatctgaattacacgaaggatacaaaaatgtgtcgagttttttggctgcacaacacttttttgatgcgcggaagaagatagaacaatcggaaatgttttcgattattaaaaaaattcctaaaggtggctcttgcatacgcattatctttcggcagtttcagtggactttatcataaaaacattacgtatttagataatatctacggttgtga

SEQ ID NO: 13700 - DNA, 492 bp, Diabrotica virgifera
  SmartBlast Evalue=5E-59; Info="Hydroxymethylglutaryl-CoA lyase, putative n=1 Tax=Pediculus humanus corporis RepID=E0VUT1_PEDHC"
atcttctgttgcaacattgcctgtagctcctctggcatatgggcatcctcctagaccagctactgatgaatccaccactgatataccattttccaaggctgtgaaaatattcagtaatgcttggccatatgtatcatgacaatggatagctaaggtatcagctgatgctacagctagcacatcttttaacatcttattaactgaatctcgtgtccctactccaatggtgtctcccaaagatatttcgtagcaacccatgcttagtagagattctgtgagctttgcaacggctgctggttcaatcattccatcataagggcaaccaacaacgcatgatatgtatcctcttactttaatatcattctttttagctagttctatcacttctttggtcctattcagactttcttggattgtacaatttgtattttttcttgaaaaaccttcagaagcagccacaaacactgctacctctttaacaccaacttgtat

SEQ ID NO: 13701 - DNA, 491 bp, Diabrotica virgifera
aagaacatcccagttccagttgaaaaaccagtaccctacccagtcaaagtacatgtcgacagaccataccccgtaccagtagaaaaaccatacccagtaccagttaaagtaccttatccagcaccatacccagtagaacgaccagtaccagtacccgtcgagagacctgtaccatacgcagtgaaaatcccagtcgacaggcccgtaccttacgctgttgagagacctgtagcagtacctgttgagagaccagtaccatacccagtcaaagtaccaatcgcagtaccagtagagacccaccacggctatagccacgctggctatgacgatatctacgatggtggatacgagtatggtcacaaataagtttttgtagtaattcgcactatgtgtgtttaccttttttagagtatctatcaatcttgtaaagctatttatatttttcccttttatgttacctgtttctcaataaaagctgttatattttttat

SEQ ID NO: 13702 - DNA, 492 bp, Diabrotica virgifera
aaagactacagaacgcttctctgtagatttagaaattgtttgttgtaataaaaatttcaaaatggttcttactggaaaatatacagtggttggcgaagaaaattttgctaactatctcagcgcaatgggttttccgtacaactatgtgaaatactcaattgatattaaacaagaccctgataaagttaccgtaataaaatcttatgaaggaaaatcgaaagcagtcgttattccattgggcgtagaatacgaagagactaatgccttaggagtagtagttaagtgtatggctagattcgaaggagatattcttatagtccaagccggcgatgttacaaagacctacacctttactcccactggtggaaatattgtttataaatctcccatatcctccggaaaactcatttttaagagcgatgaatgaagttttgttgaattttgttttgttattgtttgaaacgatataaaataataaaaacttagaatatg

SEQ ID NO: 13703 - DNA, 490 bp, Diabrotica virgifera
ttatgataatattatccatttcacttcggtctggtttcgcaataagaacttctttgctttctgaaactgaagcctgattattattgctaataagtaaactattaggtttctcaattttactatgttctaaagaattatagttctttttaaggattgatataccatatttagaaaatttaggtgcatctttagaagcatttctattgtgtattgcagctgaattttttagttctttttgggaactagtagaatcttcggtgatactaagttcatatgttttgttaatgagatcatttttttctggactgcctaagtcaattatttcgtcacaaatcaacttctcatcactattactatctaagtcaatgctattttcatttgataaactatcacacataactatatttgtaggttcaacttgcaattgcccatcgcttattttaaaatggctatacactttaggtgtggtaataattggttcagtattagg

SEQ ID NO: 13704 - DNA, 492 bp, Diabrotica virgifera
atggaggctatgtacctagcgtggaggctagattgtagtatacttccaattaatcaggtggcgctgaaatacgtgacatattttttgaagagtgagatcgcattctacccaatcatactaaaacttttatctatgattgctttgaagtcgactttttcattgttgtttacgatgtttcagtgttctttttacttttttctcgttttattattaaaaatctgtggttttaactgcaaaaatgtcatatattggatattatgatacccttacaggggatgtgaaacccgatataatcagaaaatcagtattcttaaagaaaatctttcttaggtttatttagtacaattttgtatccttaccttttatgaaatgtctggaatatattataagatgtcgtattcttcaagaaacgttcggaaaaagagccccattttagagctttgactcgtaactctagtcgttcttttgagagtgtatttaaaatatctccta

SEQ ID NO: 13705 - DNA, 492 bp, Diabrotica virgifera
ttatgagtagatatgtcaagagactctcatagagcagtaaaatctttaaatagataaagactattgaaaatgatacaatagtacccagtaggtagaacaccaaaacgatggtgagaatgctggacctcatcggccggggaaaacttgatggcaatgaacagtcagtagcctactagcatgatggatcatgctagaaagaagaaaatacaatagtttaaaacgattacattagcaagttgttcacggtcttgctaatcggaatagttcttcggcactgcgtattcctgtccaatcgcgaatgttcttcagccatgaaaccttctttttctttaacacatttctatccaactttatcctaggccttccccaaatctttccatatctgtctgtccttggctgcgcttttccagtgagttcttgcagcttttataatatcgtccttccatcgcatctgaggtcttcctcttcttcctgtccacggtctccagtttg

SEQ ID NO: 13706 - DNA, 491 bp, Diabrotica virgifera
tgacctagtggtatgttagtatctttcacggtattgttccatcctaatactgtgattgcgaaccattctaaagacttgtctttatgtggaaacattacatcaccgaatacataattttgaaaacctactggttctacaaccttgccagttattgtacttttacatactacaatatctgctcgggaaaaatgtggcagaataaaatttatatgcataaatttttcaccgccaactacactactaactgcatcaatcgtatctaaaattaacttatcagctgctgtcaatttcttccactgattgtagctgggagtaaattcagttaaccatttggcagctttatattttaaccgaggtggcagtctattgcctttatagtctggacattctatatcaatactgcaatccaacgaaagatttctctaggtaacaacctggctccttttccatatacactagttatgtattcttcatctaaaattctattcatt

SEQ ID NO: 13707 - DNA, 485 bp, Diabrotica virgifera
  SmartBlast Evalue=8E-34; Info=Glutamyl-tRNA(Gln) amidotransferase subunit A homolog n=2 Tax=Murinae RepID=QRSL1_ MOUSE
gtttagaattttaaaataggaaatgctactatttaaaattaaaaaataactactatgattaaaaacattttacaaaatggacaagttacttcacacaaatataaaaacagtttcaagattactatttgatggggccgtaaaaccaacagaattattaaacttagccctaaaaaagattgaggaaaccaaacatgtaaatgcttttatatctgttacctcagaacaagcaaaacttcaagccaatgaatcagaaaagaggcagaaagagaaaaaacctttatcagagttagatggtgttgtgatagccgtaaaagacaacttctgcacagagggtataaatacaacatgtgcctcgaatatgctagaaaattttgtaccatcatataacgctacagtctgccaaagacttttcgatgctggagcaatcttgataggaaaaaccaatttagatcaatttgggatgggctctgctactatagattcca

SEQ ID NO: 13708 - DNA, 492 bp, Diabrotica virgifera
agtttctcgcgaaaattatcatttaccgtcttatttcctcttagttttggtttttgttctttggaagagaatgactgttttcgtgtagttaggtgcagtagttgatcaaatagtaagttacccagcattgggaagctatgatcaaatgtttaaattaaactccactaagcgatctcattcgccacgatctagtccttaaaagagcaagcagcactagatggagtgcaagtgctaatgcaacaatagctttgtctaaaggttacaacgccttcaaaactgctgttcatactcttgctgatgacactaatcagaaagatgaaacagttcggaaggctaagtgtttgtaaaaataaatgtcaaaaagagaaacattcatgttgaatgagttttgagcaacaaattttagaacgcatcaacgctgtcagtaaatcattacaaacagagagaagagattggacttcaaacttcagttcagtttcgaaattcactttt

SEQ ID NO: 13709 - DNA, 486 bp, Diabrotica virgifera
tgttgtctttttacttaatttttctgctgagtcttttccttcttgtatcacttcaccaattttactttctgcttgttttaccgttgttgaaacttcttgcttaattactttgtcttcttctttaagttttctttctgcatcactaacgacttctttggcatgttgtttagtgtctgctattttctgatctgtttcttgaattttagttgtaacagtttgttgtattttgttagtttcttttgataaactgtcaactgtatctcttacttgttcagatacagcttcatgtttttgtttactaattctttgtcctttttaaattctttttctactttggtttctacagtatcgattgttgtagagacggcagcggctgtagagtctaatgtatcatctgtttttctcaaaatttcagtaccagattcattcatactcttcgcagcttcctcaacgtcgtatttggcacccgtttagttttcgacctaa

SEQ ID NO: 13710 - DNA, 490 bp, Diabrotica virgifera
  SmartBlast Evalue=2E-41; Info=Putative pre-mRNA-splicing factor ATP-dependent RNA helicase DHX16 n=1 Tax=Harpegnathos saltator RepID=E2B4E2_9HYME
aaatctgatggcatatcctacttcgttacctaatttaacactcatttcttgtgctactctagcagctactgacatggctgctactcttcgtggctgagtacaaccaatcttcttcccatcttcacagaaaccagcttcgtataaatactgtggaatttgtgtggttttgccagagccggtttcaccttcgataatcaaaacttggtgttccctaatggcctgtattaagtcgtctttaaaagggtatatcggaaggcttttctttgtttcttctatagtaagttttttcttttctgtttccgttagttcgggttctttcttatcagacactcctggcatttgtagtgcttgtataaactgaatttgatcttctaacactaactcatactcttctttttaatcccatcttttgctccaaacttaaacactgccgaggccatctgatctttttcccatttcttctgttcagattgtggtaccttctccaagt

SEQ ID NO: 13711 - DNA, 480 bp, Diabrotica virgifera
tctccattttctacgtcccgagagtttgcagtgagggaatgtattttttgtctgaattttattgttttgattccatatgtttttatacatgttctagcgtgcctgttattattattttcattttcttctatttgattattgtattttatcgaaaaaatcctttttagttttacttaatataagttaaaaatgtagctaaatttacaaccgataattttatcattgttaaacaattatatttatttaaaggtgttagttgttatggaaattttagagatatttatttatttatatatttatttataattttatgatgattttacaacgacaaaatacttagtaggccagtacgtaaaataaaacacaataatgtctaaacacgaaatagatgccgtttcaggtcttagcttcattgttgccatatttctaacttggtggcaacataggttggaaaagttatttaaccaacaagtgtattaa

SEQ ID NO: 13712 - DNA, 485 bp, Diabrotica virgifera
ggagattgttgacagacgtaaaaattaacctattcataaaattcaattttttctatacaattatccttttttttattcatttgtcaatctttgccaaattatttttaattaatttttctcagatatatttttctctgtattcctcaatagctgttaactatatagtctggatctttgtgtaaatattatattattcacgaattattctttatgttacatctgctaacataatctaatgccctaaccctataggaagacatcaaataacgaggcatcagcactgaggatggaagatttattccgaaaacgttctggtatttagcccgaaaggattcttttaaataaatataccctttataaaggatttcttaaataaaatttcaaatttactaattattagattattctacatttaaatgttttaaattgaatgatggtgacgtttgcgcaaagatccaacagactatctatagagactactatcg

SEQ ID NO: 13713 - DNA, 489 bp, Diabrotica virgifera
acgaaggacgtctatgctaattttgcaggtggacatcttttacaccctagcactgggactgctagcaactatgatcacctgggtttgaagatccaaatttataaacgaacaaaacgaacaatttaaataaattgttctataaaacgaattctttcgccaatatgcaaatggttccaaaattaaaaatataactttggaaccttgaattaaaatatttacattttcgatcatgattgatgtgagaatgttccaaattttaaatttaaattttggatttcttctcaacatcaatttaacgaaagtgtaatacggtacttaatcttgatgcattgaaaatcaccagagatgaatcttgatgcattgaaaaatcaccagagatgaatcttgatgcattaaaaaaatgaaaaatcaccaagaagttgacaaaatatgccatcttcatattattttcattactatcactgaactgaaaattatcacaaatcggat

SEQ ID NO: 13714 - DNA, 491 bp, Diabrotica virgifera
  SmartBlast Evalue=2E-20; Info=Retrovirus-related Pol polyprotein from transposon 297 n=1 Tax=Drosophila melanogaster RepID=POL2_DROME
tgtctgttgtacactttacaaattacttccgtccatatctatttggagttaaatttcgattagtcacagaccatagaccacttatatggcttttaaatttaaaagatcctaattctaaattatcacgatggagactgaaattaagtgaatataattttgatattcagcatatttcgggcaaagcaaacagagttgcagacgctctgtcaagaattcgattaaaccatgtgcatcaaaaacaaaatgaatataccgaatttgagaatgttaaaactaacttagttttaaataatttttcctactctaatgagcaaatcttagacgttaacaataagagtattttatatctatacgatgagaatgacagaaatataaatcatttcgaaattatcaatgataattttcccacagttggtgactcggattttgaaaaaattttaaagttatataacgaaaatcgtagtagagagattaatatagttaaaattaag

SEQ ID NO: 13715 - DNA, 486 bp, Diabrotica virgifera
ggcggcttcgtagacggcaacccgaatcacactaacgagttcaaacacgttcatttcaatcacagtaaccatcacaacaaactgaaacatcaaaattacttgcgaaggccgccaaggctaacgagaaacaaattaaggagaataaagacttcgaggagcatcaataaaaccattgaacacgctctcagtacgcctgttaacaacaaacatcatagtcatcagaaagacagaagcgaaaagaagaaggagaggatttcaaaagaacgtaaagaaaaagggttccataagaaatcattggagaaaaacaaacaaattcacaatgaactgacagagaaatacgacaaacacgacaagcacgagaaacacgaaaaaacgagaagcacgagaaacacaaaaaccctctaagtttcaacgtcccccttccaactcccatgacgtcgacggtatggggggaaagtcgggccaagttcagcgacgtcgtggcga

SEQ ID NO: 13716 - DNA, 489 bp, Diabrotica virgifera
  SmartBlast Evalue=4E-47; Info=NEDD8-activating enzyme E1 regulatory subunit n=1 Tax=Harpegnathos saltator RepID=E2B689_ 9HYME
gttttagttatgaatgaagttgaagttacaatatatgtgttataaataaataataataaatataaaaattaaaagtcattgagttttatcaaaacagtttatttttgggtttaaatcttttaaaaatgtcttctccagcaccaaaatctccagaacaatcagataaaagcaaaaaatatgaccggcaattaaggttatggggagatcatggacagaaacttttagaacattccaaagtttgtcttataaatgcaactgcactgggaactgaaattctaaaaagtttaattttacctggtattgggtcatttaccatagttgatggggaaaaggttacagaagaggatataggttcaaattttttcttagaaagtgatagcattggtacatcgagagctcaagtgtctactcaatgtctgcttgaacttaatccagatgtaagaggagattttatagatgaatctccagaacatgtaatgtctcatacac

SEQ ID NO: 13717 - DNA, 488 bp, Diabrotica virgifera
  SmartBlast Evalue=4E-21; Info=Phd finger protein (Fragment) n=1 Tax=Aedes aegypti RepID=Q0IGB2_AEDAE
accagccggagaagtcgcctcagaatccaatccccagtgtttttatgtccccaacgaagctgatgacaacgctcctccaccggtacacccagttaaggcgccaaaggtggagaaaagggaagtgaggaaaatacgaagtcctagagtctctgatgccagcagatctccggagaagtctccagaaaagatgaagtcccctgtggctagtcctcagaagaaaaccgcagctcttggtggaaacctttgtgatgtatgtcgcggtgaaggagctcccagtaactcagtcaagtgtgatgaatgccagaaaaattaccattttgcttgtttggatcctcctctgaagaaaactccaaaaataagaggctactcctggcattgcgcagattgcgatcctacaggatctgaatagtgtagtcaagattttttaagtatttataaaatgcagttgctgtattatgatattgagataaatataaagttctgtaagt

SEQ ID NO: 13718 - DNA, 487 bp, Diabrotica virgifera
tgtgttacacttacacacacacacacctgctaattgctttcgatgtacacataattaatgtcaacaccgacaactaaactataacgaaaaagtgaagaaaacccttaaaattgatattttcttcagttaacttccaaatgtccattttttaatttaacgtttatttgacactagaacttactgtttgtataataaatttggtcaaaaatggtaaataaaaatattacattaacgtcaaatatgtcataatatgtgtatcacatcttccaaaaatttcaggcgattacgctaggtgtcgcgtcagtcatgcacggagcgaatagccgtccatttattatatttcaatttgtaaacgattatatttactcgaaattttaacttaagaatttatgtaacattatattttttatatttcaatttgtaaatgattatatttactcgaaattttaacttaggaacttatgtaacattccattttttatatttt

SEQ ID NO: 13719 - DNA, 490 bp, Diabrotica virgifera
  SmartBlast Evalue=2E-30; Info=DNA-directed RNA polymerase I subunit RPA1 n=1 Tax=Harpegnathos saltator RepID=E2BRL5_9HYME
ttatcgctccaaaatttgcatcaggttgatacacggcttctatgggatctgggcatttctcgcactggtcggtgaagtttgtttttatgtccttgtccatttcataccaaagtttcattaacttctccttggttaaaaggttgttatctccagtcctattttgaacatatttagcaaacagggaaaatggactattccttctgtgatttaatggattcccatgatgtttcttccattcttttaccgcttttccatgttcttttacagcctcttgatcttcttcattcttcaactgtttaagcgtatcagaattacctaacaccttgatattttcggccaagaagctcatctgtttttcattgaaaaactgagcttttgaaatatccattccatcctctccatacaaaaactgtattacacttttatcactgtttctcacggtcatatcataaccaacacgtagaccttccaaatgtttgatgagacatct

SEQ ID NO: 13720 - DNA, 489 bp, Diabrotica virgifera
  SmartBlast Evalue=3E-25; Info=Tafazzin-like protein n=1 Tax= Camponotus floridanus RepID=E1ZW45_9HYME
attttctggacagttttttgtgcaatattccacatacctctgttatgtaattaagtactcagtgttcaaatgtagtgaatatgttaatcacatttcgtgaaaatcaaacatcctaaataattctaaggtagtctggctacctaaattagtcaaatagatagtttagaacacaccatacaccatgggatacaacttggactggatcatgcctaggctaaggagtccaacaacattttggaaagtggctagtgcactgactgtgtgtgctgtgggtctctttagcaaaattttaatccaataatttattgaatagagccaaagtatacaataggaatgtaatgagtaatctacttgacaataggcctaagcatgttccattaatcacagtatctaaccatcactcatgttttgatgacccaggaatgtggggtaccttaaaactaagacaactcttgagcccgaaaacaatgaggtggtcattagcagcgc

SEQ ID NO: 13721 - DNA, 475 bp, Diabrotica virgifera
gcccctagcaagtagaataagaagtaaaaatttggagctgcagactcacgtcataaaggagttacaggcctgaaaaaatggtcaaaaatcaaaatggtcaaaatttgagcgtttgcggacagggtaattaaaattcaaataaactgtctaatgaaataaaaattaatgtattttcaccagacctcacaacgaatgcaaatctatacagggtgggccaaagaaaagagttcacctcgatatttggcaatagttacctattagattttaaggaaatgccgaaatagatcatttttattttattatattgcaactttttgggatatatttcatactacgtgacgtcatccatcagagcgtgatgacgtaatcgatgatttttttaaatggtagtaggggtcttgtggcaactaaaaatacattttattgctgtcagaaaatagaaaaaaaatgtttatttcacaaataaacatttaat

SEQ ID NO: 13722 - DNA, 489 bp, Diabrotica virgifera
  SmartBlast Evalue=1E-61; Info=ANKTM1 n=1 Tax=Culex quinquefasciatus RepID=B0W5K8_CULQU
ctgtatgtagtacaacctgcatagctaatcttttgagttgagcatttcttcttacagactcaatatctccaacagccaaaccgatgagcagattcatcaacaggatcggcatgaggaccataaacaatcccagtatcataaatgctggaataggaaacggtagaaatgacctgtcttgtccgtcattggtcaaatagtacggcttaacgtaggtgcctaagaaatcgatctctcccagcatcatggagaatgtccggactaaagacatcgggatcgttttgaatgagaggtgttcacccctcgagagcaaaatgtagaaagccaatccaaaagcgatgataagtatcgaaaacaccatcagtaccttaatgagggtctgcagaatctccaaaaacatcaccacatagataccaacttgatcgaatcgttgtaacaacagtaagagattgaaccagctcaaaaacacagtcattgaagcgcacggaaaac

SEQ ID NO: 13723 - DNA, 482 bp, Diabrotica virgifera
gtggttgatctaatacgggagctgcacttataccggaaggactaggaacctcagtgtcattttgaaaaggcaggtttttgttttgaattagggaattctcacgagtatcttcttcttggtcagaatccgaggaatcactgtctccgaggcttttgggaaggctatttagctccttacaccacgtcagatcagaatctgagtcatcactaaagccttctagttctgaatcatcatttataatgttcattaacgcctcgacatcttctggtttgttaaagtcaaaatatgtataaagttctaccatttctggaaggccgcgcagttggttaataactcctttcttaatattgttctgaagctatatattaatatcattctgtcccagctttaaattgtggcatatttcccagttagaataataagctcctttatttcagagtcgtccatcattataccttcaaaatatccgttaatttttaagg

SEQ ID NO: 13724 - DNA, 491 bp, Diabrotica virgifera
  SmartBlast Evalue=7E-36; Info=Putative pre-mRNA-splicing factor ATP-dependent RNA helicase DHX15 n=1 Tax=Camponotus floridanus RepID=E2AV08_9HYME
aaagtaagacatgtaggtgtcacttgttccccactgatcataaaagtactattcggcttgccatcagtgcttctcaagtcccaaattttcatctgacccctcaagttacttgttaatacttcattatgttttaaaaatattacacagtgtatagagcagctatcagcgttatctattttcctgacaaccttcggagacttagcattcaacaaattaatagttccatcttctccgactgtgacaatatcgttttcatatgtagttaaagaagtacaaggactctcatcaccatttttaaactcatgtatcttactccaactaacttcattctttaatgttgtactttctgtgtatgaaggtataattttcttaagatgtgcagatccactagacgaagatgttacaaagtaatcagcattcaaaaactctatttcagtcacgtctccacaataaggttcattgaatactaagaacggatatacatcatcttc

SEQ ID NO: 13725 - DNA, 481 bp, Diabrotica virgifera
ccctttttccttcgaatttacgtttcataatcagatgtaataactcgtacatatcgtttctaaattgtgacgatgagataattttatcgtcaagagtacgccaatgaattaagtaaaacgtgtttttgtaccgtcttggacgatataaaagtcggatcgaacccctagttgatttattattcttggagcgttgatcgaagaacaataaacaacagcgaggtataagaggtgagtttatgtaggtagtagttcccgaccattctccgctgtcgttttggcgagctgagcgaatccgacagtttcctcttacctatccttttatctatccttatacgagcggtgatcgtatatccctaatatgtcttttcatctggcgagctgagcgagattccctttcttccctttccttatacattttgtcgtattaataaaagcaattcctatttcacgcgatcgtcaaaatcattcattcatgtacaaa

SEQ ID NO: 13726 - DNA, 491 bp, Diabrotica virgifera
atgtatatctttttttcaaaaatatgcattctaaaccggtcaaaattattaaaatcattacttatgctaatataaagaagctattgtaaggattattataaattttaatttttgtggaaatggcgtatgttttatttttcactttttcctaaaaaattcgaaagggttcttttattttcatcataacttgcttaattttgaagctattagcttgttctgaagctcatttaataggtatttcaaaatatgttgacaaatgattggcaggtatattttatacattgcatcgttttcccgttatttaggcttgaatccttagatttgcgtactcgtcgaaaagaatacacattcaattgccaataactcacttttaactaatattagttaagttctttaagtgaggagtgtattcagttttttattatcatcaatttcagtatagtggctgttttgtagaagcttgtagtttttgagttatacatacgtgaaaa

SEQ ID NO: 13727 - DNA, 488 bp, Diabrotica virgifera
cgcatatgcgttgtaggcaagtttaaaattataattcagcggctcaaaatacataatagtctcccgttttatactgctttcgtggttttgggattatagcagggtagtcggctatatctagggcctacggtataaaaggaaggtaacagggccagtgctacgcttcaaccgcctattattacgcctggttttacctaagttactcattttattcaggctgactcgatatggggcttaaagacatttttaaaatgtctagttgttcttgccggcgctaggatttgaaccccggcttaccagcactcgactcaagcacactaccgcccgagctacgccggccggtcaaaatatgaaactctgtggactttcatcggcgacgaaacagccctattttcgataaacttgtttcataatatacagggttgaacctaacttaccttagcacaaatgtgctcactaaaaaaagcagctctttgaagttacaaatt

SEQ ID NO: 13728 - DNA, 486 bp, Diabrotica virgifera
  SmartBlast Evalue=8E-55; Info=S-adenosylmethionine decarboxylase proenzyme n=1 Tax=Tribolium castaneum RepID= D6WXD9_TRICA
aggtgcgcaatggcagctactgaagtgttaaacggtttgcaatttttcgaaggagttgaaaaacttcttgaaatttggtttactacaagtgatggtaatcataagacagctgacttgagaaaaatacccagacataaattggaggcgctgatgaaaattgtccgatgcgaaataataagttatgtgaaaaatgatcaaattgatgcttacgtattaagtgagagttctatgttcgtctctaagagacgctttattttgaaaacatgcgggacaacgacacctttgttgtgtttggagcctcttctgctgatggcagagcaatacgcggggttcacagaagttgaagatttatattattcaagaaaaacttcaaacggcctgatttacaagtgacaccccatcaacacttcgatcaagaggtggctttgttagacacactgtttccggatggagctgcctattgtttgggagcggtaaatagagatt

SEQ ID NO: 13729 - DNA, 490 bp, Diabrotica virgifera
atcatctgtatcattttcattctttgttggctctaaactttgaattactaataatttcttttcatttgataaggtcttaacgcgaaatctctatgttttaaccacatacaaatgtaagagagttaactgcctatttacttatatgaaaagtaatttccataattttttgaccagtgtattaaacatgtccatctcattcagatactaaaattttaaaatgcgttttttgcagatgttttacaatttgagaaactgttaatttaaagcttgttttaaaaagttagaggtatcatataattggatttccagattgttaatttttatccttctgttgtttaatatagagacaactatggagaagtgtcttattttattattatatatttaaattttttaaatttttattaaataaatatcaatgtttaatccatatgtacaggtttggtgcttagtttctcaaatagttcgactctcgtatatgaaatttata

SEQ ID NO: 13730 - DNA, 491 bp, Diabrotica virgifera
  SmartBlast Evalue=7E-38; Info="Mediator complex subunit, putative n=1 Tax=Pediculus humanus corporis RepID=E0VEA4_PEDHC"
actaatattcttaaaacacaacaaccacttcaaaagtaacacttacacctaatctcccgatcattcaaactaatgtatccttaaaataaataaaaaactgtaaaaaaaacagcatagacctatacatatcttgctctctttcaaggctattgagaatcactggatgaactgctgcttgaatcggtagacatcacttcaacgtcttcattttcttgcttgtggtttcttgtatccataggaactgttccttggcccacactgatgtgcatctctcctgtgggatgccaggcaaattgattttgttgagcagcagggatttctcctgggtgacctggcctatgtaagtctgacatgttattctgctgtgacaaaagatgtccattcattggatctccaagcctacccaacaatcctaacctcatttcaatatccgtaggatatggcctacgtggatctccttgttgccaagttaaaggagcacaaatggcatt

SEQ ID NO: 13731 - DNA, 488 bp, Diabrotica virgifera
gaaaatgatagtttatttgaaatagatcataaaagatataataaatatttacaaaatccaaaataagatataacagttaacatatatcatatgcaacaatattttgatcaaagcagtacctctataccacaccagttcaactcacaaaatgattatcttacttttacaattttggtataacatcaaatacagtctaaacggaactgatttgatatatttgaatagattaataaaaatattactctagctgattcacgtggagttgacagtgagctgtcaaaaatcgacggtcactatggttattaagtggaagatttgtcatacagtccttacaatatagataccgttgcacgtcatccgcatcatagcacgtgacgtcacatgataccaatacgaaatatttaagtggtaggtactgttccttttagaatcgtttagccgactacactggaattacagccactagacatactttattatattcgcat

SEQ ID NO: 13732 - DNA, 493 bp, Diabrotica virgifera
atttttgaaatcaagactcagccgaactagtatctacacacaatggttctttctggaaaatacagtgtaattggggaagaaaacttcgttcaatatcttaaagactatggtataccagaagaacaaattaaaaatagcggtcaattttctatcgaattcaaacaagacggtaacaaagttatagttactgaatctgctgccggcaaatctaaagttacctcttttactcttggagaggaatttgaagaagaacgttttggtcacaaaattaagagcaacgcaaaacttgagggtgatatccttgtaatcactaacggagaccattctaggaccttcaacttcactagcactggtttggaaattgtccataaatcacctaaaggatcagcaaaactcattttcaagaaagactagacgacaaaaacttacgtttgtttatattaaacttatgaaaaatatgtaactttaatttatataaaatacttttaatatt

SEQ ID NO: 13733 - DNA, 490 bp, Diabrotica virgifera
aagttactagaataattcataaaatttaacacgtccactgccactttatttcgccatgttttatttgatcttgtgccctgaattttatttgctagggttcttccggatatttcgtcacccattctcattacacgaccagctcatcgaagcctcataatctcttctggtcggccgctccacattttattgtctaaatctcttctgggctgtatgtcgttacccaacctcactctgtgaccagcccacataagtctctttgggtctaactaattaagaaagaaattcttcttcttcttcttgtaccctctcctcatcggatgttagcaaacatcaactgaaattcttctctatcttgtactaatcctctaattgggctgacatagccattggcgtaagtctcgcagccaagagaacttctttcgtccaatgcctcgtcattcttcgatctttctttcaacgatcaactgcaaaaaaccatacttcttctttt

SEQ ID NO: 13734 - DNA, 489 bp, Diabrotica virgifera
  SmartBlast Evalue=3E-11; Info=Nuclear transcription factor Y subunit alpha n=1 Tax=Camponotus floridanus RepID=E2ADU8_9HYME
agctgtcagagtctgtggtactacttgagaagtgggagatgccaccgtcgtttgagtaactccattcgttgttgctgcctgagctgtccccgctatttgtaccaagttgccatttatgtttagaactgttggagcagtttgttgtatgcctccttcaattgtcattggatggtaaataaaagtctggccgtcagatgtttgcactagttgcggttgttgttggggttgaactacaacgtggccttgctgtagactgcttacaggaaccacctgtatctgttgtaatccttgcgctcctccagctacttggagttggccattagagggaactgcatgtaccattatttgctggccatttgctccttgtataacctggccagtattcatctgcatcacctgcacctggcccggcgccacgccttggatcggttgtaggacgacttggccatcagctgttgtggctaactgctgttccatggagctgtgttc

SEQ ID NO: 13735 - DNA, 490 bp, Diabrotica virgifera
attgttagagagagatttatttgtataaattaaatatcacaaacgcaatctagtggcaacggtaaagttgataccattttcgttaactgaacactttctagatagaaaaaagtaacaattaaagctacaccgcgtttttgatgtcatctgtcaccccttagttattttccaatgaattacagcactccctgtcatcccggtagctcaaagagtaatataagacgtctaaatcattagcttgcagctcgctttgtcattcctaataactcaacagcgtaagaccattactttaactctattactcttcgagccacccgaataactataagacatatgcgcataaatatgtatatatataaagtacggttacatgacatctagtaacgcaacggtccgtaaccacacaaatggtaacggacaatccgtaacgccttaattcgtaacgtcgatagttcgtaacggtacaattcgtaacgccaatactttttag

SEQ ID NO: 13736 - DNA, 488 bp, Diabrotica virgifera
  SmartBlast Evalue=1E-25; Info=UDP-N-acetylglucosamine transferase subunit ALG14 n=1 Tax=Culex quinquefasciatus RepID= B0WA66_CULQU
tttacatgttaattacattaaaatctcaattatttgatagaaataaatggaaacacatctaatcgtggaattatgtatattatcatttataatagtgatagcaagaatcttgttttgatccacaaaaacactacaggctacagtagatatgcaactgaaaagagaaccaaagcttgtaaaactgtaatatgtataggctcaggtggacacactacagagatgttgtctctaatagaaaatatagattttaataagtattctccaaggtactacattatcgccagtagtgatactactagcttaaccaaagtggaaaaattggaaaaagacaagtcttcgaacggcaacaaaggagagtactatattacaaagattcctcgcagtagagtcgtacatcaatcatacttcacttcgatttttaccaccttgttttcgatactttacagcattccaattgtattgaaaattcggccagatctcattttatg

SEQ ID NO: 13737 - DNA, 482 bp, Diabrotica virgifera
  SmartBlast Evalue=1E-49; Info=Leucyl-tRNA synthetase n=1 Tax= Culex quinquefasciatus RepID=B0WM19_CULQU
taacaggttcgttagtgtctttagtaatagctttatttctcttcaaatctaaaattttaacttcgttttctcggacatatcttccagttccctttatcctatagcttcttcccatcaccattccttgaacgagcaatctcttgaagggttccttttctggcaccaaccctaaactgtgcaagaaatgcataataaacctcgcataatacatgtgaagcacagcgtgttctttaccaccaatgtacaaatccacaggtgccactttgtcaattgcttctttgctgaagatttccttttcgttatgaggatctgggaatcttaagaaataccaagaactatcaacgaacgtgtccatagtgtcggtttctctagttgcggtgcctccgcatttgggacaggttgtgttgagccagcctgacagttcagccaactgtgatccagattttttggggattcgtgttttagttctgggagaatgactg

SEQ ID NO: 13738 - DNA, 489 bp, Diabrotica virgifera
caagtatgaactcaagacaagaaaccacagtacgaaggcgatacaggccacaaaccgaagacgatgactggatacctccctcattggataatagactttctcttttgactgacatcgacattagcacatacgacgatagtaccataggaactccttctgtgacgtcgtacagactgagcgacgatgttttttgcgtacaaccaccatcacttcgagctatgggatcatttagatcgtccagagaaactggagcgatatcgaagagaaatgataatggcaatattcctgacaccaaatattttaaattcagagaacgttcatacagcgacatccaacgagtctaaaatattcaacacattctcacacattgttgaactagtcatttccaaagttataatatgtggtcaactcataccaaatgggattataaatatgtgaatcgaaatagtaaaatagtgaatttttcattgtaatgctaggaagcaatcg

SEQ ID NO: 13739 - DNA, 490 bp, Diabrotica virgifera
agcttgtctatagttcgatatattttttgaaattagtacgtacaatgtctaaaacgattcttattttggttttcgtgtcctgcttcgtagcacatatccaatgtagaatctttatagattgtctagatcctgataatccaggatacctgcagtttgacaaacaaataatagcctcttttcctatgagtatttctgtacattttcctgcaactggatatcaacctgactcagactattcgtgtttaaagataaactgcgataaagatactacagtgacgctaattgacggaggagttggattcagatatgcaaacattaaagttgattttaaatcgtggcaaacattaacctgtggaattcaaatttatactttacagccagaagtttcatccgtttaaatgacaatctaaattgtttttataaaaaatgtcccatttcattttctattttgaaattcattaatttaaaattaatacactatgaaaatatt

SEQ ID NO: 13740 - DNA, 480 bp, Diabrotica virgifera
tttctcatattttgattgggcttgcatattagaacctatcgagtaagtatcttcgctaaatattatttctttaagattttcatctatctcaatttcatagttatcaagctcagtattcatactttttcgcgttaataattaaattatttaatgtgaccatttctccttgaaactgaatttctttggcatatatgtgttgttttgttttagtttctaacgaattgaagtgttttttatcttttattatttggactggtattttactcttttggaattgatgttctttgatgattataaacacttttttagttgaatcttccttaataatcgtacatattttctcatataattctaatgatttatcttcatcaagagctagaaacgaaacaactaaatatttaattttgttacatctaaaatgtgtttatcatatcacatacaactttatattccattgtatattccattcgatgtaatgta

SEQ ID NO: 13741 - DNA, 479 bp, Diabrotica virgifera
aaatgtacagttgtttctttaatagtgttatcaaaacgtattacgttaaagtcgttctcaattgctattactttgctggaacacgttctttccctttttttttttaatttataaatattgtatttgaattgttttcatgttgacaaaatcgtcaaaccgaaaaaacaatctgctgttgctgtcaatctagtgttctgccttccaccagttttttcgtgctttccgtatctcagtggctagattactggcttaacaaactggagaactcggtttgattcccttcggacactccaatgtctaatttatcttaaaaaaaaacattgcttaaaaaccctaacactggaccttaactaaaagcttacacgaattttactttaccagtttttagggcatatatctagcaacgaaatatccctatgtaattacccgtcatcatcatcatcatccacagctattccatccattgtctgctgtaagcc

SEQ ID NO: 13742 - DNA, 479 bp, Diabrotica virgifera
tcttcgataaggcagtgtttatcgagatatttttgaatatttgtcgaatccaccacatatttgtatatgaatgactatagagacctgttataatctgaaaaatttataatttacatttttacgtatattttgaaaaagaagccacatctcgataaaaggtgacttatcaaaaaaagactaagaggcaaaaagtcttaaaaacactgtgcttaaccaatggtaccacaataatagttcaattggaacgtacacaaacatttggggggtttaaaggaacaaaacccccataaaatttttacgtaaatatattgaaaaagaagccgcatctcgataaaaactggcttatacgaaaaaatactaggagaacaaaaaagttttaaaaacgttgtgtttaactaatgataccacaataatgaattaattggaacgtacacaaaagtttgggggggtttaagggaacaaaatccccataaattttt

SEQ ID NO: 13743 - DNA, 490 bp, Diabrotica virgifera
ctcattcttttgtgaatgtttgcttcgcgttctcccgtttaccgttccgtgttgacaccgtagaatattgactgatctgtagtttgaattattttttaaaaacaatgatgtgttcatgaactattttctttgttaatgtgtaaatgttgcaacaagctgatctaaaatagagagcaatggaatctgcgatggaacagtgcgagaccaagcctttggaaactctatcaagtacattaaagatgtttgacacttttaaatctacggaagaagaccatgaatcagacgaggaaagctttcatcttccgttattaggatgtgatgatgaagcggaaaacggcatggaaatatctgaactaaacgaagaagatgaagatgccatactaaataagttcgacacacgcgatgaaggaatggacgtggatgaatgcagcaacaaaaaagacagcgatgtttctaaaaacaatgttgtaaatgaagttaaacttagtga

SEQ ID NO: 13744 - DNA, 490 bp, Diabrotica virgifera
gttagagtgcgttaggcgctctgtgaactaaataaaataagacggctcttgtttcgcttcacaacgaaatgactatttattatttaattattattatttcgtgcaaatacctgttaacttaaaattttcacccattttggtttatttttaaatatttatttactaataataaaattgttttctattacttctatttagcgcgcctatgagtcaattgatcagataattgtcaaaatattgattttactaggtaaaggtagatactatctctcgaagttatattgatgacgcgctactgtatgctcttaaaagtcaaaatattatttttgattttccaaaatggtatctaatattgctgatttgtcgagtcagagcttgtgctctgacaacttttactaatatagtaaagctctattacagatgtttatgtatagtgaaatgtttccaaattccaaaagtacagcttgttggcactgtagatacaaaacgt

SEQ ID NO: 13745 - DNA, 490 bp, Diabrotica virgifera
  SmartBlast Evalue=9E-17; Info=CG9034 n=5 Tax=melanogaster group RepID=Q9W380_DROME
tctatctcatttagtttatttaatttgacttaaaatttgtaaaatacttcagctgcacatttgaatataaaaattactttaataatgtatttattttaagaaagttacatgaaataaagttattacaggactaaatattttataaatgtattatggttttaattttgctacccttggatcatcatgtctataaacggtgtactgatccttatactttctgttgtctccgtccttttgataatataaatacactgaataagctgttaatccaatcccagctaacccaaaagctgaactgcccatgatttctggaatttcattccatcctcttttaaaaagccccactaaacctctacttggaactgcactcattcttattatgtaggtatagaattatagattattagaatttgatttttcttcaaaatctaacagattattataaccttagtttttgaagtttgttatgtaatgtaagagaccttaaccc

SEQ ID NO: 13746 - DNA, 489 bp, Diabrotica virgifera
  SmartBlast Evalue=9E-10; Info="Histone acetyltransferase type B catalytic subunit, putative n=1 Tax=Ixodes scapularis RepID= B7PSE2_IXOSC"
tattcagtattaatcataattaactattgtactaaagatggccggtacaagcagttccaacgggcatttagaatgtgaagatgaagaaatgagtgtatacaggaaggattccaatgctgtagtcaccttcaacatagtttttaacgagagacacctgactgaaccctgtttaacatttaaacctattatgtctcatcaagtattcgaaaatgaatgtatatttggctacaaatctttggccattaagcttacttatttgcataattcagccaagtgttatgtagatgtggtctcctcaggaatcattgaaagagatggtcataagccagatgatgtaatggaatgcttgaatccttggttgccagaaaactacacgacagatagagatgagtttactcaatggataagtaaagaacaacatgatgtgatttttggacatatcatacacgaacatgtttttaaaggtgaattttttgaagatccttcagt

SEQ ID NO: 13747 - DNA, 489 bp, Diabrotica virgifera
gttcaatagtagctttaaagtaaccaaaaaagttatattttacaatgaaaggtctagttatctttgccttttgcattgccgtggttgtatcccttccattggatgtcattgaagatgagagtggacaggaatatcttgtagttccagtacacagagaaagaagagacttaacctggggtgccaaccaaaatgggtacactcttggtcaaaaaggaaatctctgggaaaatggtgcccacaaatttgacggtgcttacactggttcgaaagcttgggattcacatggactgaaacccgattcttttgggggtcgtttagaatacactaataagccaacaaaaactactgcctttgtaggcgcagacaggactcctggatatggtactgatgtcaatgctggagttaaatataactttgttcaagataaaaacttaacattgatttgacaggacaactaagtcagcaccacggtggaccctttggtaaata

SEQ ID NO: 13748 - DNA, 489 bp, Diabrotica virgifera
aggaagggacgaaactcgaggggagaaaagctggaggcgagaagtggaagaaaaggaataaatcggatctagaaccaatgcaatcaaaagcaatggaaaagacagagaaaataagagggaaaagagcgaaggaagagagaaacagcaaaccaagagagaagaagaaagaaagagaacaggaagagaaaaagagggagaagagtacagacagacagacatttcatttattaaaaataataggtgaaaatagtttctatccttgtggaatcggtactcaccagaaagacaacagacgttcagatataattagcgtgtctttggaaagacgatgaagtcgacttttcaaagaaataagacatttactcaacacattacttctgcacatttcttaaaatactagtatggtacatttttctaaagtgttgaaattggaaggagggcggcaaatattaagatgcacacaggcggccaacattagcggcggccctg

SEQ ID NO: 13749 - DNA, 491 bp, Diabrotica virgifera
  SmartBlast Evalue=2E-43; Info=Mediator of RNA polymerase II transcription subunit 1 n=1 Tax=Camponotus floridanus RepID= E2A6Z0_9HYME
gaagttgttgctttgttgtcctaaagatgattatattataatatttagcttttaaatactatttataatgaataaaatacagaacgccaatggaatttccattccacaaaatgacaaaagtaaagactggcagttggagatcttaatggaaaagttaagatcgaaagcttcacaatttaaaactttaccagaaatttctaagaatgttcgaatgacattacttgaaaaaagatatgcttctgatagtgtagagaaaagccaacatcaaaaatgtttagatactttacagtattctatcaaggttacatcactgcaaagtatggtagaaaggctggaaagtttaaccaggcaactagggttaaaatttgtggtcgagccttctggagtttttatatcgtctgatatgttttatttggagatagtactaaatccaaatggatgtgtagaagatgtaaagatccatcacgaaggcaagaaagagcaacaaagtt

SEQ ID NO: 13750 - DNA, 491 bp, Diabrotica virgifera
  misc_feature (27)..(27): n is a, c, g, or t
tatccgtaaaattaataaactttattntaaaaaatacataactagcaagttgtttttctaaaagtcttagagcatttataaatgacatttagacattgttataaaaatataataagcaagtttcaacagaaaaacaaatggggggcccatattcggaccagttcctctaatgatttaacttactctgtacataatttaatgtatatgataaagagatgacttactatttaatatcttactcattttattctaaacgtaacacacgcctttgttcatcacaatgtacacagaaacaaaattttgaagctaatgagatttctgtaattgcatagatagaataatcaagaaaaaggcattattggaccatcaggaatatttatgaacatattagtggtaagagagttacttaatacaacttagtatgtatatttaaaaataggtaatgcctggttgcatcaacaaagcttaagctccagcttagcccagctcag

SEQ ID NO: 13751 - DNA, 489 bp, Diabrotica virgifera
  SmartBlast Evalue=3E-55; Info="Zinc finger protein swim domain containing protein 4, 5, putative n=1 Tax=Pediculus humanus corporis RepID=E0VLB3_PEDHC"
catagcaatggatggtcagcttcggaaacgttggcctcagacctaaagccgcaacagcagcttcaaaacctaatggttcatcggacatcattctcaaattgacaagtttcgatctatctcttccagtaatgtttggaataactagagcgtcgaaaatgaaactggccaacatgatcggtaacatggcttctccccttgatctcagtgtaccttctttgagttcctcagccctttctctaatgatttgaagttctttatgacctagcggaatccttttgagcaaattaaccaaatctgcttcttgatttgctagtttaacttctaatggttttgtactagcgggaggtcgagccatttctaggccgaacatgcccactcgaaaggctagatggaaatgttcgctgttttcagctaggacagaacacaaaaaggcacattttgatagagtgccagatgccaaacagcttaactgatgggtagcgggattaa

SEQ ID NO: 13752 - DNA, 490 bp, Diabrotica virgifera
  SmartBlast Evalue=1E-10; Info=Transposase n=2 Tax=Danio rerio RepID=A9X5I1_DANRE
aatgtgacgttgagagttcaggtaagtctgactagctaaagcttgtctgtgaataatgcagtgagaaccaattatcctagggttcttcttttttgccaattccataaatccatatcaacagcctgtcatggcttgggccccatcagtacatatgccaattactttctcccatgaaagctcattgattactaaaaaatcttcaagagcgttaatggtcttgttggtaaaccttaacctctatttgaagatttgtatttgtacttagctgccagttgcaaacaaataaaatttagtattagcgttaaaaagctaattacttttactctcttttacattaatatgatattttggaagattccaatttcttgttcgatacttcaattagtgatttttagttattttcttacatcttgggatatataaatataaataatggtagcaaacacatcgcaaattttgcttatacgtataagtacatgtatatatttcg

SEQ ID NO: 13753 - DNA, 488 bp, Diabrotica virgifera
  SmartBlast Evalue=2E-22; Info=Choline/ethanolamine kinase n=1 Tax=Camponotus floridanus RepID=E2AJ33_9HYME
agagtaaggtgaagattactgattcggtgatgagggcctccaatgcgccttctccgtgggtttgtccatagacacggatcagaacgtctttgggttcgtgctcgacgttggcatcagccgtctttagagagtccggaagagagacgtggaacagatggttggagagccctccgctgatatgcttgaaaccaatgtttttggcattgaccttcttccaggccccttgaaggtaatccctgcaaattctcgccgtcagttctttcatctcgaagcagtctccagcagcaggcttattctttggcacaatatccaacatagtgaaaaaatcacaaaaacaggaacttagaaaagtgtataaaaataaataaccgaaagttagctacaggtatattatcacagtaacgtaagatctcagttgaagtgtattttaatctgaataaatcagttaattaagtcgattttaattatgattcacaactttaactttc

SEQ ID NO: 13754 - DNA, 487 bp, Diabrotica virgifera
cacgggcaaagattcagggattcgactgtatgtggaaaaataaaatatgctatcgataaatattttattacaaattcggatttttataacatgtttaacaaaataaaaaataaaatattttttcagacaactggagaaattgttacatattattcttatgttattcgatatgtaagattactacattatttatcaaataaaaaacacttgaacctggactttgttttcttataacctaaatgtaataatatggagatgcgtaggcgtatccataagatggccagtaaccatacgaataagacacagggtatccatatgctccataggctaaatattgtgggttaggatttggatgcggaacaggtgctggagctggagctgcagaggtcatcatgacacaaagcatggcaacaaacaacaccagaaaaacattgaaaagccccatgtttttcatatcgactgctgtgtattcttagcgttagataag

SEQ ID NO: 13755 - DNA, 489 bp, Diabrotica virgifera
tatttgagatctggctcatcttgtgccactactagcacaacaaggttatctgtgaatgcgaaggcggttataccgtctccgtattcatagttcataactccgtaatatagcgacgcgcccaagcttctcctttgtctttattacctcgttccactgcagcgtattaattgcattcctaacatcgaacaacagcagggccggccagtggtattaattccctctgttgcgcagtgcgtcgaataccctcacgattacatcaatcgtgctattccctttccataaaccaaattgaatcgggtataagtctcctgatgtctcaaacatgtcatcgatacgtccttgcaacatcctttcatacagcttaccgatgcacgaatggaggcagataaaaaaggtctgtacttccagcagtgcattaatgcactccagaagccacacaggctcagcgtctcctagatccgtcactctctcaggcggtatttgatccag

SEQ ID NO: 13756 - DNA, 486 bp, Diabrotica virgifera
ctagattgaatagtgaatactgaatacaattataattttaactaagaaagaaatatgttttgataacagtaggaaacgtatgatgtctgaatcagcgttcttcagttcatggacttggatcattatcctattacagcttaatgacagaaaacgtgtcattaacttatatgtagttattatctatcaatagtcttaataatttctgtcggtaattatgtactaagtcgaagtataacatcatctgccaactcaaagaacaaatgatgcacttgaaacaacatttgatgatacggactcatatccgcttctggatatataaaatgtagatgtaggtgatctacagtagtatatggtggacaatggaatcctattctggagtctttactattgccatttttttagttctaggactcttttaccaacttccagcattctttccactagaagtttatcttcatttgttttaaactgtttatattaggaatg

SEQ ID NO: 13757 - DNA, 485 bp, Diabrotica virgifera
gaaatataaagattgtgctgatattctatactaaattcacaatcaagatgcagtagaaacaaacaaaccaggacacattaaatgccactaggagcactcccgaatcataattcacaatgtatatacattgtaaatcccaaatcatgatttccaaagtttatacattgtaaactatgattcggcatttatgagtagcatttaacgtgtttgtttatttctactgcatcttgattgtaaatgtagcatttaaaataaaagtcaatttatcatatacaacagtgaacaaaatcattatccgactttttaattttttgacaagaaaataatttatacttgaatgtaaggacttaaaggcaatagtcaataaaattgtaatacatcaacatactacgtcggtcaataagtcccgagactaaccatgagatggcgactctaattagtaatccacatgatatttcggtagtgtcatccttcaaaggcatact

SEQ ID NO: 13758 - DNA, 489 bp, Diabrotica virgifera
atttattcttatatgtcggttttaccataaagttagtgtcttaatatttaacattcaagtctacacattgtgtaaaatccatttctttacacatctaattactgtatttgtctctatatttttaacggtattgagtctaaatatggtattcattcaatctacaaaatattttgtaatccgaaaagtattgaaaacctgatctaataaacccaaccaaacctaacataacccagccaaatctaaccaaaactgacctaacttaaccaaacataacccaactaaaactaaagtattcaaaccttactaaacctcaccacatgatctcgctcgcttcaaagagtttaatcttgaacctcatcattttcatcgctgatcaatattgattgtcgagatctaggtacctataagcttcgccagaaaagctttggaccttagaacggcatttgatgggtttaattaaggtcgttatccatttattgtacgcaagag

SEQ ID NO: 13759 - DNA, 482 bp, Diabrotica virgifera
gttaaagctacttaacaacggatacattttgctcataaaaacgtgcttgtttacactagatgcaagttgaagggtctttttcatctttaaaaatattttgtgtatttaaaaaatacatacacgagtatgaaacaatttgaaaaactattaagcttatcacgcacgggggtgacgtcacggccaactgcggctatagtcagtgttgttatgatcacttttccaaacaaagaataaagattgaaaacacgttgaaaagatacccaatctcaagaccttttaattcgtataaagttaaaattttgcttcctctgctactttttatgttcaattatagtgttttttaagttgacgtacgtacactgacaagtatctgtcaaagttgacgtaaactggaaagtatatctgaattaataatagacatgcactgtatagctatctctgtcgttcagagccacctatggtgacaataattttggatcaca

SEQ ID NO: 13760 - DNA, 489 bp, Diabrotica virgifera
  SmartBlast Evalue=6E-78; Info=Serine/threonine-protein kinase tousled-like 2 n=3 Tax=Aculeata RepID=E2BA69_9HYME
atgtatgttgtactccctcaacgcatgctttatatagttggcttttttatcttctttccagtccttattgagttgatgtaccttgcaggcgacgtacctctgttctttgagatcaaacgccttatgtacttcactgaacccccctttccctaacagcatcagcagtagatacctatcattgagcaccgggtgattattaaacctactctggtcctcgttgtggatacgttttaactccctaatatgaaggttcctctccctctccaatttctccatctcgagctggagatcagcgtcttctttcttcagcgcgttctgccgtaacttcaggatctcgtccgcctcgtagtactcctgtaacgttagcgaacccggtaccgcgtccggctttaagaacccggagtctgttccgtttaacaacgcactagaattgtttctctttcggccactttcgttattcgaaggcctcttctttaacaacaatttttt

SEQ ID NO: 13761 - DNA, 488 bp, Diabrotica virgifera
  SmartBlast Evalue=3E-20; Info=Integrase core domain containing protein n=1 Tax=Brugia malayi RepID=A8PKZ9_BRUMA
aactgattacgagctcccaaaaagttcgtagcgttgtcactgaatatagtctgagggaggcctctacggctaataaaacgttttagagcgagaagaaacgtttctgtagaaaggccggacacgacttcgatgtgaacagctcgagtcgatagaacaaacgaaaagagcaatataagattttatcaagggagctttgcggagtttggaagctttaatctgaaaggggccaccaaaatctaatccgacatgagcgaatactcgagaggattgcaaacgttcctttggaaatctgccataatctgaatagcgggtttggcattaaatctaaaacaaaccatacattggtgtatgacctttttaacttcacgtagtccatttaaaggccaatatttaagtcgaatttgagataaagtattttgaggaccagagtgacaaagtctgatatgttctctctgaagaatgagacgtactacacgattttttgaggg

SEQ ID NO: 13762 - DNA, 488 bp, Diabrotica virgifera
ctattaaattttgtaagtctagagaaatttcgggggtatttaaatcactaagttcaccatgttgctggtattgctgcaactgatgctgttttaacagagcttgtgtctgtttagagctaccgttgttattattaagggtggtaagattgttgttattattgttcattataacagtctttttagcatcctgattaaccacagcgttattttgttgatgctgctgattgtcgtacatttgaggtgaatccatcgtccgaaattttaactttcactcgggtccactttcaccgaaactcttgtttaaattttaaatcgtgtcgcccgcactttcacttttaaatttttcaacataatcttgagagaaagaggtcagaagacactttttgacttttactatttatttatcacgaaggccgtgcgaccgctaaaaacaattgcccgggaagaactgtcactgtgtcggagctcacttgggtaccacactgtcg

SEQ ID NO: 13763 - DNA, 489 bp, Diabrotica virgifera
  SmartBlast Evalue=9E-47; Info=Cullin-2 n=1 Tax=Harpegnathos saltator RepID=E2C3F0_9HYME
cagcctcgataggtacagtcagtgtctgttttgctcgatcttggtctatagcctccaataaaagcttcaccaatcgtaagcccaatggagcaatcatcccactttgccatatttccaatgccaattcaccaatttccatttgctcgcctccagtagagtctggacttccatagatgatttcagcatctgatagcttctgtgttttaatatgttgttggtttaaatacaaatataaactgtgcaaatattggctacctacagagtactgagaccaatagaggaaatagttttttatcaagttttgttcgccttcttcttgaaccttgttcaaaagttttgcaacatgatctatgaggtactgcttagtttctgcatacagcctatcagccataggctctggatgtgccacacatattgaataaacatcggaaaatctatcattccagacaggccttgctacgtgatttagagtaatcacaccattgatgg

SEQ ID NO: 13764 - DNA, 489 bp, Diabrotica virgifera
cacaactggagcagaagaagctgctacataagaagaagttacattctacaatgaatgacgaacatttaatcaagtgcttcaaccaaagctacagctacagctagccattccatgtttgtaaaattaatttttgaaacccactcaagacactcgcaaatacaacttgcgtcccgtcgccgtagcataaatcaaaaccccgtgcggagccaggttgttccgcggcccgtgtattacacgtcccgtgctatcataaatcagtttttagtcgttaagatatgatttgtacgtttcgaaagagagactaaggtggaagtgcaactggatttgattttttcggcggtttgggtggaggagtcggtgggacgttttcaagttctatgtctagcgtctcctccgtgtacgtcaaggtgtttctgagtgtggaattcctgtgcgagtacagaaaactgtagttttcgtaaggtaatacattactattctcactatctc

SEQ ID NO: 13765 - DNA, 488 bp, Diabrotica virgifera
tatgtctgtttttgttatacattttaatgtcttgtgtattagccgagtatataacatattctaaaaaactctgattttaccaataataaattagctatagctaatgttttttaataaacactgtaaagcaagttggaaccgctttagacattaactaaaagtatctacactttcagcgagttcttttagaatagtttctgaacgtaccaaaaatcaaaatatacatttgttttagtaatgggacatgatattactaacggtgattcagtcaccgtgatttagaaatcaccgataactccgctctttgctaaccgtgaccagtgaccagatatatcagatagtaatttcacggtcaccgtcctacaaaacgtttattatattataaatattataatattctcggtgtgatttggggaccgaagactaatatatgtgaattttaggaacagcgaaatacgaggtacttatgttattatctactgatatta

SEQ ID NO: 13766 - DNA, 487 bp, Diabrotica virgifera
ttttatgctcgtaaaagataaaaataacaaacatcatgattctatctgttaatttcaaaagccattaaatagagaataataataatacattatatactaagtaagtagtttagcgacatcctccagtgagctgattcttctaccattttgttgaccattcagtttgacgtaaacttgaccataatttgtccaaaccacacctgaaccattaatttttttcactgcctccgttacatatttagctgctctctcgttaaatcctctcgaattattatatttgtagacttcagtgaccttttatttttgtaaacaacatttttataataatttgaggaaaatttcaccaaaactggtctacttttgtgggtttctttcttgttcagtcgatagcagaactctatacttctttcatctaattccagatgcattgtagttgtaaatatagcaagcatagtttttagacaaattttcaggacccgatggttca

SEQ ID NO: 13767 - DNA, 488 bp, Diabrotica virgifera
ggatattatcaaaaattatcagtttaatttttatttctgtagctttctattggtcagaatctcctatgaatgaaataatcacgttaattttcaataattttccgattttgcttaaactccctctgaactctgagtaatcaaacttcctttctaactttatttaatttcacaaatctcgtgtgttgtgttacttgatgatgactggcttggcaacagtcgatatcgaatacgtatgggcgaattttcagcccgaattgtttcagtccatcaaagtttacttattttcttaacataaggattccttaccagcacagatcaactttgaatgtcctcctagtatagggtgaccaaatcacaaatttgaaaaaacgggacacatccaaggagcagtagcgcacctagaacttttctctggagtaccgaaattttttcttgtgaaggactagttacattttcctactattttttatatatttttcatatgctct

SEQ ID NO: 13768 - DNA, 488 bp, Diabrotica virgifera
cattctgcgttaaatttcttaaaaacatttattagtttactcaggattacgaaaaaaaaaaatgaatatgaatatgaaatgaatttaaacaacattggaccatgattttgagcctactcccttaatattaaagcttaatttaacatttagtcttttagacctgaaagtctttttaaaacttttgatattaattagaattatttggatttattatcaaaaatatttttttatttagcaacgttttcagcacttatccatttttaagtttcagaaagaaattaaaaagaaaaaaaatgtagaaaacacacatcaaattatatatgaaatattaaatttgatatgctgtaagtataacactgccttttctttcctttttttttcatatatgatttaacaaaataataattttgcatttaaaaatctgacgatttcatgactattgatacttttgaataatctggcaacgctgtaagttataatactaatcg

SEQ ID NO: 13769 - DNA, 488 bp, Diabrotica virgifera
  SmartBlast Evalue=1E-26; Info=Gamma glutamyl transpeptidases n= 2 Tax=Aedes aegypti RepID=Q17DD8_AEDAE
gtgatagtttaagtaataggtgtttcttacacgaagtaaaaatgttaggtgtttctaaatcctttaagtgtgcatgcttagcggctgcagtggtgatggtagctatagctggaattgtccttcttgtaatattaaagccaaaagaagttattaaccacaaaatacacagaggtgctgtagtatcaaattcgccaggatgttctgatattggggtagacatcatgaccaaaggtggaacggtagccgatgctgcaatagcaactctattttgtgaatctgtaggtagtcctcagtcgttgagtataggagcagggtttttaatgacaatttacaatagaaccacaggagaagtaatcacattaaatgctagggaagtagctcccatgaaggcaacacaagacatgtttggaggaaatgctatattagcatctattggtggtttggcagtgggagttccaggagaacttcggggatattggcagctgtat

SEQ ID NO: 13770 - DNA, 487 bp, Diabrotica virgifera
  SmartBlast Evalue=4E-17; Info=Protein NEF1 (Fragment) n=2 Tax= Formicidae RepID=E2AZS5_9HYME
agattttatattttatctatataatttattgtaagttctcttattcttttatagcttttccacgtttgcaaataccggctataatcaaagaattttattaaaaccagtccatttaacagtattagtttatagttaacctgcatttaaataataatggtggacacagcacgattgacacgatatgcatcacctgtaaacccagcaatatttccccacctgacactagttttactaggaataggcatcttcttcacagcatggttcttcgtatatgaagtgactagtacaaagaaatctagaagtctgaagaaagagctgctcgtagctcttgtagcatcaattttttctggatttggaatcctatttctactgctttctgtaggaatatatgtataatattttaagtgttatattttcgtaagattaattttcataagtacatcattgatatttgttaatattttattatgcattaaacttttaatag

SEQ ID NO: 13771 - DNA, 477 bp, Diabrotica virgifera
cgccgcctggcccgacgccagctcggcttcagggttggtttccctgcatctatcgcggttgttcacgtacccagacagaactgggtacgggatcctcttgatgttctcgttctactgacctaggggccggggctgcccgatgtagattccaaagaactacaccttgcagtgtcgataccctaacggaggcacagtagacatcccgtaacgggctcacgtcgagcccgttattgctttttccgctaaccgatgtctagctgcggcgtctcagagaattcaataaaatcaaattccctaagtttcaccacatccagtcaatcggcctttgcctctccttctcgcctcagagagtgagaagcgctccactgctgtcttgcttgcattcaagactgaactgaaaagttcacagtcaagccactcctacttcgttggctgttgtcgctgttttccgctccgctgctggcacgtcttgttcct

SEQ ID NO: 13772 - DNA, 487 bp, Diabrotica virgifera
atgttttacatataaatcaaaaatagccataacactttctcgtttattacttcgagctgtacctgggtaaaaaatatctttacttaacagatatgatgaacaaaaccgcagtttttgttattttggtactccttagcgtctcatgcgtcaaatctgatgataacatcaaccgtttcagagacctaacacgccaaccaagaattttgaacgaccttttgttaaatgtacaaaatttagtcagtaatgttcttaatgtaggttgcacaataacagaatttttcattaacattataacaagtgttcagcgtttcattgttgataaaataattgtagcactactaaattcaatccgcggtgttctgtttgaggcattagcgcctctgatggatcttattataaatattgtaaatgccattgatgcagctataggtgctatatttcaaggaatatctaatctaagctgtggtacaactaatggcattgcttc

SEQ ID NO: 13773 - DNA, 488 bp, Diabrotica virgifera
  SmartBlast Evalue=2E-23; Info=Hemocyte protein-glutamine gamma- glutamyltransferase n=2 Tax=Formicidae RepID=E2AYU1_9HYME
agatctcctggataatcgtagaccactggttcttcagaactgtttcgcactcgtgtttcgacttttacagcccaaagaccaactggaataccagggggagagtagatctccaatgttaagctttgtcctctcgcttctaaaacgtttccaaaccacataggtttttctgtatcaatatttgatcttttagcaggatcaaccacaaatataccagcagtacccttaatcggatgagggcgtggaccaaagttaaacgaaattctaatcatgtcggtctttggatcataatctctgctaaaccttaaagctacagtaaacttttgtcctctacgaagtacaggaacgtcttcttcatcaaccaattcatactgatcagttttgtgtagctttgcgttctccttggggtacatgtaaaacatatccgttcccaaagacatcttggatgagttgtttaaatattagatcttggaaaaatcaccttcacacca

SEQ ID NO: 13774 - DNA, 482 bp, Diabrotica virgifera
tttaaaaatttgaattaaatggctagttttccatttatcaggaagaatgcctaatttcaatgataagttatatagaacaaacaatggttgagtttttacaagcacagtctttcaagaaaaaatcggcaagtccatccggtccagctgttacattattagaaagttttgacaaaccgtcataaataacttccgctgtcaaagaatcacactttatagatgaataataattattaaatgtgtcatgacttacatccagggaagaaatacatatcaatacatgtatcctacaaattggtgcggaagtcttgaaaatcggagtacaaataataaagttataaaaccatacaaattgtcaaacttgatcggaaaattttgggtggcggagttttgtgccggtgagtgtagaatcgcaccgccaaacttttgaggaatcaggtaacgtcttccttgacttccttgaacatcggatcggtagtgaagca

SEQ ID NO: 13775 - DNA, 487 bp, Diabrotica virgifera
  SmartBlast Evalue=2E-30; Info=Chemosensory protein 12 n=2 Tax= Tribolium castaneum RepID=Q0MRL1_TRICA
attgactcctagacatcatgcaaatttcaattttctttctttttgtgttagttggagtttcgttttgcgaaaagtactcaacaaaatatgataacatagaccttgacgagattttaaaaagcgacagattgttgaataattatattaattgtattatggataaaggaacgtgtacagcagatggaaaagaacttaaagataacttggctgatgctttgaaaactaactgctcaaagtgcagcgaaaaacagaataatgggtctaagaaggttataaaatttttggttaaaaacaagaagccaacgtttgacgaagtggcagccaaatacgaccccgaaaataaatatatcaatgaacacagagaagaactcgccaaggaaggaattgtagtttaatataaataacgtttattcagcaaaaagttataaaattttgatgaatttgacaaaatattatatttgctagtaaaatcctgttctgatttgtt

SEQ ID NO: 13776 - DNA, 487 bp, Diabrotica virgifera
tgtcggctgtggctcacaatttaaatttgacctcttcgtcttttgtctctgttaaaacgggtttcactcctctgtctactgccctgataagttagaatttgtgaatttcggttttgttatccaaagttgtgtttagtaattctatgatctgcacttttacaagcatgataaaaatattcctaacttactgggttatataccgtttcattctaaaaaggtattgccttttagaaatgtatattttcttcacaataataaaaggtaataaaaacaaaaaaatacggctgtttagtacggctgttgagtaaaagatatgtttagcaggtagcagatgcagatacagttgtagacatttaaataaaaaacaatgtcatagcataaatttgaccgctattattaaaagtttcgtaattatagatcacttttgaattgatgcagttattctagagggttttgccacaatcacttaataaacttatttaatatt

SEQ ID NO: 13777 - DNA, 486 bp, Diabrotica virgifera
ccacacagatgttggggatttctgtatacaggcagtttatttatagccattactgcgctaaaaataggtaaagaaacatattcttcgatttcatttttcctcgttataaccaaatatgcctcgttatagaggtgttacagttcaataggaatttcatgggacatctagcgtacctcgttataagcgaaacctcgtaataaccgtgttcgttatagagagagtcttatgtattaccttcttaccttttttcgggttttacattcgaatgtactcgaaataagtacccgagaaattcgggtaattgtactttgagtattgtactctgagtacttttctggagcaatgtactcagtactctgtactcgttcctttaatatgaaaagcacccggtactctgtacccgagtacaatttatcagtacccggcccagctctgactacaggtgcctgttgtttccgataacacgacaatgaacgtcgtgtgcca

SEQ ID NO: 13778 - DNA, 484 bp, Diabrotica virgifera
ttaaaatcctttatgaaaggtatataacttgttaaaattcccttgtagggctacatcacaaatgcagaacgttttcgatctgaatacagatcatcatcaactggcaactgatggcaactgatgggcatggaccgttcaagatatgaggtagctgaacctcaggatgtgtcccaattcaggtgaggggtcaaatggtgcccggtgcttaatcatgtgttatttataacatccatgtcatttaaaataatttttgtcaatgtatcaatgactgtatcattttaaagggtctttacccatatattgtcaattttggtggcttagcatgtgaacatcctgtaagtgtaggcctgaactttttttagccttcgtcaacattttaaaatttttgcattgaattcatgggttgtgcttattttgggttcagcactgatgatgatctgtatttccttgaagagactttttattaataaattatataggtacc

SEQ ID NO: 13779 - DNA, 481 bp, Diabrotica virgifera
ttgtaacgaaacacgtatccaataaattttatttgacgaataactattcaccgatttatttgttgttggtgacaccggccctaatttgtgtatgattaaacatgggccaattttcaaaataaaatgcacaaaaatgttctttgtctatcttatctcaatggggaattcaatgctaaatcgcgtatgttcagttcaaattttgagcctgtgtatacagtaatgagcgcgctggtaaccggcaaaatgacgcaagggatggaaaacataatacattgtgaaatgaagagagatgacactggtagaggtggagattgtcgatataaacgtataaattaacattaaattacttagtttttcacctttagacgtatcggaggagtatgactgtcactgtgacaggagaatttatgtaatgttaatgtaatgttaatttatacatttatatcgatgatttccatctctactggtttcatcacttttt

SEQ ID NO: 13780 - DNA, 486 bp, Diabrotica virgifera
tttaggcaatgtatagtcatatcgtgatgacgtcatccatttttaaatgaaaacatatttttcctgtcaaaattaaatagacaatgaatttctatgaacagcaatatgtatcactattgccataaagttactttccatatgatatcaaattcaaatatactactaaactatttgaattttaccgataagcaagtaatataaacattatattaagtatatagttcactagctcacatcacaatcaagtcttgttcaattgaaacccatctttgcctgggatatctacagcttccggagtgaaccatggccgatgacagacgctgtcgtcatagtgcagaagaatgacaccatgtgagcgattatcttgaagttttcgtcttattgcttgatgacaagataatataaagtaataatgatacctagattagattggtcgccagaaattattaacgaaagaaagtcattaccgttttgattttacgtgta

SEQ ID NO: 13781 - DNA, 482 bp, Diabrotica virgifera
acggaagaagtacttcctcattccccaaccatgccttgtcaaggaactcagatttggtatgaaaaagacgaccgcctgtatgtttatacttcgaagggaatcagagagcactcaacccagaacatccaataccttccactgggtcgagcaacgacgacactgcctccttggagttcaacctggttggctgatgagcaactctatttgcgtgcagacccttctttttcaccagtactagaaacctcccgacaagttgaggagctgagacaaaccttgtctgccacccagagaacaggatccacttggtctacattaagtctaatacctctgatgacggaaagctggtgggcgcccattttgatcttattgcgttggggatgcaacatcggtgggtttctctacatggtatcctgcatcagaaaccgactacctcttcgtcgacctgttgagtatcacgacgaggagtattctagattcatggc

SEQ ID NO: 13782 - DNA, 487 bp, Diabrotica virgifera
atttaatctcatttgcaatctcattcattctcaacatgtgttcagcctagttccacttcatgtgtgtaagcctttctacataatcgattcttgttctggctcttataatgtcacctgtaactatattattattaatctcaacgttgacagcttcacggcttgctgagtattttaatattttctacagatattttagtaagtgttaaaagggctcctgtagatattcgttgtttcaccggatagcggatcatcaataaacagagattcatgtacacatagttggagtactacttccgtcagttttctgtcactatacagatcaactttctacataacatatcattaactccatatcaatattctgcattgctaatttcaagtaataaacaggtataaaacaatcaatttctagaaaggggacgataggttctgtaacatctacatacacatatcaatacaataacgtagctgatctcacatttttgca

SEQ ID NO: 13783 - DNA, 488 bp, Diabrotica virgifera
ttcttagaaacttcttcatcatgtcttagttcttcatcagtcatcgtttgtaattttcttgatatattaagcagcagcaattctaaatgcttcaggctaaaattcatagggcaatggtttggtacgccacacgcaaaacacggtaagaagttttcatagcagctaaatgtcttgtactccattctgactggacgtatcacaacaatatgactattaagaaatctgtgctgtaagattttagctgtattttccaaattccactgcacataatttttattatctctgtgactgagcatgttttctgtgaagtcctgaacatctccgccgaagaatacacagagacttgagttttcggtaacattttgaggtctgcaatacactatatcgttgcatctttgttcgtaaccagaaatattagttaatcgtacaatatccggtagctgtttgctggtcatagatttaaaacttgataaaatatgttaatgaag

SEQ ID NO: 13784 - DNA, 487 bp, Diabrotica virgifera
atcttcaggctcttcttcttggggtttcttgggttcacctttctgtaaaatagtttcttcagtttctggaagaggtttggttttctttttcttgacatattttggtttatctttttctggtttttctggttcttcgtcttcttcctcaggtttgacgtattcttctttttcgatgtcatcgcgatcgatatcaaatggtttaaagtcgattttatctttaatttcttttggttctattttttctggtaccagctcttctttttcaagtttcggtttacgtttttctgttgctacttcttcttctggtgtaggtttctttggtgttttctttaaagtaacattttcttcgggagtttcggggacaggaactttacctttaccgattttaatagtaataggtgtttcctcttcttgttccacaggttctttaggtgttctggtaaatttaacctgttctggaagttcttcaggtttaggttgttcaggt

SEQ ID NO: 13785 - DNA, 487 bp, Diabrotica virgifera
cccgtatttatttgaatggcaagtacggcacataaacaatctgccgagcggtgatctgcaaacggcaacaagacacgtagaccaggcgcgcatctgtaatattagtaacattaatttggacgtcgagaggtgactcatatttgtttgcagaaattgcttgaaaataactcatataataatatttgagttatcctcccactcaaaatggtccggaacattgcttagataatcaaaatgtcaaaaaatgaaggaaaaattcgttttttttttcttcaatttttcattataactttaaaagtattcacttctcgagaaaagttgcactgacacaaaagttgcgtaaccaaacctcgtacaatacaggattagttaaaaattctaaaaattgtcacccttgctgcaacacagcaacacattgcgaaaaaatcataaaaaacaagtattggcatttcaagttcttcaaccgcccatgccacacttaggaccc

SEQ ID NO: 13786 - DNA, 487 bp, Diabrotica virgifera
  SmartBlast Evalue=0.000000004; Info=CTTNBP2 N-terminal-like protein n=1 Tax=Camponotus floridanus RepID=E2A0A3_9HYME
ctcctctagcagccgctgcgtttttcttgggaggggtttggggagctgtacctgcagtctggaattgtgcatgataggcacctactttgggcggtgttcgcatcaaaggcgcctgtactgatatgggagttggagatgctgatgtagtacttggtttaatgggtatactaggagatggagctattgctgtttgacggagagcttgccctggtaaaactgactgtgcaattccagtagtaggtccagaaacaggtacacttgacactgttgcagtaggctgaaccactttagcaacactactgatcattgctccactactgtcatttggtacagaacgacctttaagaacttcaaattctgccttaagtctctgtagctctgcttctaattcgtgacacctatgttcttttctaataattgagtcctaagtgacttcttttcattttcatatacataaagctgtttttcaagttctgcttccatctga

SEQ ID NO: 13787 - DNA, 487 bp, Diabrotica virgifera
tattacatttttgttatctttctaagttttctcaaaaagaaattgtttatttcatttttaaactaaaataattcagtgttttttaaagattacatcctaggctttaaaaaaatatcaaaaaaattgtattagatttattcaaacttgagtaataccgtcttaaaatggtgggaattctgtaaaactacgaagttttcaaaaattacattttttgagacatcgtattatttgaattaaatttttgagatttttttttgaatgaaacatcgtttagtaagatgattgagaggtaagttgtgcaaatttgagagttttataagtaaaattgtattagttacacatttttaaatcattttaaacaaaattcatgtaaggctcactttccgcccacaccgtacttatgtccatacattttatttctttttattacaaccataagatagcttatttcatcttctttcatgtccaatttgtaaaaatttctttt

SEQ ID NO: 13788 - DNA, 488 bp, Diabrotica virgifera
ataaaggcttatattacatataaatcaacctaactaaaattattaccgaaattttaaatataaaacattttatttacaaaaaccactaaataatacataaatatcattcttaacgtaaaattcataaccaaagatatcggaactatgactgaattcctcagaatggtgttttttgtgatacttgacttgaaaaaaataatgccagaagcttattagaaacacttttacaagtttactgacaaaataaagaaaaaacaaaatgtaattcatttgttttctagtatatttcgctatcttgaatggacagtagataaataaattagtctgtttggcaggttattgtctatttcttgaaaaccaggaaattataggtgaagtggcaacactgttcaagcttttttctgtggacttgcctctatttcctctaaaagtttagccgaaatctacaaatagcaatatgtattttttcattcattccccaacacaat

SEQ ID NO: 13789 - DNA, 488 bp, Diabrotica virgifera
gtactggtattataagaaccatattttaacataaacaaaacaaattattatatatgtttcttgctgggatttggattattaaacaatggacaacaatccacgtccagtaccagaactcggcaaactactacaactaaaaaaaattagaaagtgttttaacagatttgatagaaaaagtggacaaagaaattatccagactgatgtggaatggctgcatttgaaaagtgttgtggaaagtaataaaagaaataaagatattcttaagcaaagcagtgagaagtcggagaaaactaataaacaagagtgttcatatacccaggaaccaaaatgtattaaatatgagccttatgaattagatctagacgtttgtcaaacagattctaatttagatgaaattgaagaatttgatagtgattaaacataattctcgagtgttttctacaaatttgaggtgttcttaattcggctacaactgtttcaggacaac

SEQ ID NO: 13790 - DNA, 484 bp, Diabrotica virgifera
attgatcattatataatgagttatcgatatcgcaggaatcaacatcatactctgcctcaatcccaatgtttatgtaagtattattcattttaagtcaaaagcactatgattggtcgctacctaacacgtttaaggtatgataataatcatctttgactctattcctattcgagatcccacaaccctaattatatttgccatacgtgtctatcttgacatcccaatattaatgtgtcatcatgtattttttgccagcctctcccactgtttccaggaactcaatactccgtgattcttaccgttgtaaaattctcaagtttataataaatttaataataaatattcattaaaattatgggacaactagtttatcaatggaattattaaataaatgtcgatatatacagagtacttcatagcgtgcagctaaccatattggtccttcgagccggattgaaccggcgacctatggatcaatttagct

SEQ ID NO: 13791 - DNA, 487 bp, Diabrotica virgifera
  SmartBlast Evalue=1E-34; Info=Cirhin n=1 Tax=Harpegnathos saltator RepID=E2B6P4_9HYME
gcccttcttgtttatctaagaatttttcgaaatatactccatctttatttacgctaaatatattcaaatacccttgttctgttccaatagcaattttggaattagtgttattaatatctaagcaatgggctgcctccccagtaactgcccatcgattttctatacaaagtttagacaaattgtactcgattaacaatccatggagtcctacactaaaaagtcgattatcacaccacacaatatcttctacactaaaattctctgtactaggggctagtgttctttctaaaaaccatgtttcctgtaggttccatatttctatagttgcatctgttctacataaggctagctttttggtggaattctgaatcttcatacatctaattccttgaggttctggattatagaatctaatattatggattttacactgtgccattctaattctttctagtatcacttaaaatatagtttccttacattatct

SEQ ID NO: 13792 - DNA, 483 bp, Diabrotica virgifera
  SmartBlast Evalue=4E-18; Info=Chemosensory protein 14 n=1 Tax= Tribolium castaneum RepID=Q0MRK9_TRICA
ctctaaaatgaatcgttactgtttatctgtgttcttagttgcgcttgcagtactaggcgtagtactaggcgccccagagaagtcgttcgaggaaaatttggcaattctcaggaaaataaatttggatgaagtacttccgaatgaccgccttgtcaaaagttttgtcgattgtatgtgcggtacaaaaacttgcacccatgaaggaacggctttgaaagcaacctggaaacagcttcttgacaatcgctgtaaagaaaagtgcaccgaagaagacaaggcaaaagtaaaaaaagttataaagcatctgtatgtaaaacaccgcaattggtgggacgaattagctgcacaattagataaagatgaggaataccgtaacaaatacaagaaacaactcgaagctattgttaatgatgattctataaaagtataaataaataatagtttttatttaatatttttgacaagtttaatatgtggagaata

SEQ ID NO: 13793 - DNA, 487 bp, Diabrotica virgifera
  SmartBlast Evalue=5E-82; Info=Ryanodine receptor (Fragment) n=1 Tax=Biston betularia RepID=E3UKP4_9NEOP
accgtcactattaacatcgatctcctggaatccagccgatgacgtcagcactttcaacttcaagaacatatcaaaatacttcagaattaattctacgttaccggcactttccaccaaagtgtccaccatctgcttaccgatggtaccattcaccacgttaccttcaagcatagataacatcatggtgatcatgtctttttgcaaattgagaagttctttgagcagatcgacttggttggagtgtttggaaagtttgtcttgcatgtgggagaagaggaagaagaaacctcctacggcgtcccacaatctggaatgtgctagagcttgctgattaagggtgcaaggcccctggataacttcagtgagggtgttgaaaacttggctggcaacaccgatagctttaaagaaattcgctttaccggcgggatctatgagttctttgctagagtagtgccaataaaagtccataatggactcttgtagtctt

SEQ ID NO: 13794 - DNA, 487 bp, Diabrotica virgifera
  SmartBlast Evalue=1E-29; Info=CCAAT/enhancer-binding protein zeta n=1 Tax=Camponotus floridanus RepID=E2AQB4_9HYME
caaagctgtaactgctttgtccttattactgtccacagtatcatgagctacagcattcaatgccacaacaaaagtggcatatatttctttcagttgatcttcaaaataccaataacttaagatttttctcctgctaactgcattgcctgatgagagttcatttagagctgaaagtggtctttggtggaaagctttaagttttctattaggtattaaaaggttagacaggaataattcagttaatgtttccataacagttgtacattcttttttctttccaacttttaccatgccaacaagatttcttatagtatccaagcaagcaactggattgtcctgtatcattactgtatgagcagctattttgtctgatagtgtacccttagacatcactgttttcatccattgaaaatcagaattggtcttggagtttttcgtattataatgtaacacctcggaatcgtgacattttttagcttcatctttg

SEQ ID NO: 13795 - DNA, 487 bp, Diabrotica virgifera
  SmartBlast Evalue=4E-26; Info=Endonuclease-reverse transcriptase n=1 Tax=Bombyx mori RepID=D5LB38_BOMMO
ggccggtgtacatgttaatctgaaaatggttgtcattaaaagttacgagttggcgcgtgtcctgagggattgcgcatttttcccctctcaggattatcttcgcccaggtattaatttttcgcacgttgattaattctctcttagtatttgctgttcttaaaacttcctcgtttctcaccctatatgtccatggtatgcggaatatatttcgcaaggtccacatttcgaaggcctccaactttttactggaaaatattttcaacgtccatgtctccatgccgtataacaatatggaccatacctagcacttaaccattctgtaacggaggatgaaggaaatattgcggttacaaagtagcagtttaaatttaataaaagcgtgtcttgcttgttaggtatggcattttatttcttgttgagaatcccattggtcattcaccatcattcccaagtatttgaatgatttaatttgctcgattggagcatt

SEQ ID NO: 13796 - DNA, 458 bp, Diabrotica virgifera
gtcacactaggccagtggtcggcaaagggcagctccggagccgcatgtggctctttggctccttaggtgcggctctggcacaaatatcaacggaaagtgcaataatattttccgttcataaaaattggtaggaaaaacgttacgtcttattctgataaattattttttatcaaacttacaaactttagcattttcaaaaatcctcttaatgctacaacagagttgaaactttctccttttgaaattggcattaatagctttgaaatacaatttctggatttaaaaaacaggaggtatggcgctttaaatgcgaacgtttttgtgttgaattggaaatattgaagaagaaaaatattcacaacacaagaagtggtctgcttagaatgacctggagtaggaagacatgatcattttcaacgcttctaataatattcctgattcttgtactcagctaaaaa

SEQ ID NO: 13797 - DNA, 484 bp, Diabrotica virgifera
  SmartBlast Evalue=2E-39; Info=Probable multidrug resistance- associated protein lethal(2)03659 n=1 Tax=Harpegnathos saltator RepID=E2B3S7_9HYME
cgttttgcaagatcagcatactggtacatatgtctgttttcttgttagtagtacagcctttggactttatttggacattatcagtacgctgtttttgggactacttacctatcaattcttaattttcagtgtcgatagcactgcgggaggaaatgtaggtttggttttatcccaaagcttaattttaaccggaatgttacaatatggagtgcgacaaactgcggaggcaattagcaatatgataagtgtagaaagggtgttgcaatacacaaagttagagaaggaaggaccattcgaatctttaaccaaacctcctagagattggccagagaaaggaaaaattatttttaaaaatactttccttagatattcccttgatgtacctcctgctttaaagaatttgaatattgaagtcaattctggagaaaaggttggtatagtagggagaaccggagcaggaaaatcaacattgatcgcatctttg

SEQ ID NO: 13798 - DNA, 485 bp, Diabrotica virgifera
cgaatagaagctgcttactttgatatgaggaatccgggtgtgaaatgaaaactgggggtttccatttaagatttcaaagttaccccccaccccacctctagggggtggagtggggggccgagtttggtgtcattcgatagattttgaaaattgttgaacatgtgtttttcagtttttcgatacgatgttgtattttgagaaatattcgaccgtcttttgagacaccctccctattataattatgagctgtaacttcttctcatcgtaaaatatttggaataatttaatattgagatacaagaaaatagtgaattatttttgcgcatgtttttaaggagtcattttagtggcatttattaagtaaatagtgacagtgacacttccgacgtacgccactgaagggatagcaagctccaatcgtttcgccgatgcgagaaatccggtgactcgcggcgaaaatacggcattgttataattagagtttt

SEQ ID NO: 13799 - DNA, 486 bp, Diabrotica virgifera
atctgttggtagaggccggtttggatttgcttcttgcttaatattaatgttttgatcttgagaagtaacaaacacactttttaagttcttatcaagctcttcatttttctttaaactttcttcaaactcctttggatactcttgcaacattctgtcatactgatcctgttctcttttatgccgaggtgcaggtataggtttcggttgtgatatcactttatgagccctgctttccacattaaaattttttaatggatttttcagagaggagtatgctttccccataattattttgtaggttatggcacgttatgttattatgtgtttcataatattgtcatactcaaattcaaattgtctatgctttcatcttttataaatttctacagaaaccggctggttttaatataaatttgtgacaagaattggttaataaacatcaatcatgaattttttgtttcttttaatatgtcacgcctctcgcat

SEQ ID NO: 13800 - DNA, 487 bp, Diabrotica virgifera
  SmartBlast Evalue=4E-36; Info=WS beta-transducin repeats protein n=1 Tax=Culex quinquefasciatus RepID=B0W7T4_CULQU
gcagaagtaacgtgttccttgagtttttccttggcagtgacgatgccacatttgtatccggtaacgttgtgaaaaactctgatttgcttgtcgccggcagtaagcaggaattttccagttgagtcgaacatgatggcagtaatgttaccttcatagatgttttcaatcttgtggtccaattcagtagtccaagtagaatacagagcaacatcattcgctgtagcgattgctacgacctccgcatttggtgatagagcaattagtgcatagttgccagatttttcgtattgtccagatttaagtaaacgagcattttctccctgcttgtagctaactttggtgtcataaagatgccacgatccgtcctttgaaacagtggccatgtgcgatgaatccacatcgaagccaacatcgtaaacaccggaagtgtgtccccccaaagtaagctctttgatcggtttgacttcttgaaattcgccagatttat

SEQ ID NO: 13801 - DNA, 481 bp, Diabrotica virgifera
tatttacttgtttttttgcttcacattttatacattacatttttttctagtctttttatatcactaaattcttcatttgtgtttcatttatatagctatattgaataaaaattatacctcaacattttgttttacaacgaaattcttacaagtagtattttaacccttaactggagaggcctaattttagtacacgaacagagacatgcggtctgacagactaccgttttttaaggagataataaacgcgtaaataaattgtttaaatctattattcattaatatagtaacgtatacacattatgttgattataaggtagagtaaataaatttaaaataaatttaaaagtggaaagattattgacagtaacttatataagcgcttaaaatgggtagcttttcatttatcgttaaagaaacaaatggaaatacttcaaatatgtatttttttggtgataacgctagaaaatagtacaactta

SEQ ID NO: 13802 - DNA, 482 bp, Diabrotica virgifera
acatctttatcaaatccgttttatttgcttcacttattggaaaggtacttttatataactttggtaaattgcccggagttggtaagtttatggttgctttttgggatgaaatgtgttttagtcttttagggcataaagtaggagttttttttaattcaaaccaatatcttctgatatttttattaactagttaccgatttccgctattgtcttctttagaatatcatccagtagaatcactgttagatacagcatttattatatcatctgagaatatacacagcgttttttaaaaaactttgacacacttgaattcattcatggtaagctagtggaaagaaacatttcttatgaaatgttcgttcctttttttgggaagttttagggacaagtctagtaataattaagtttgacagttatattgtacaaataaacttttttctagactaactactactactagactccagtaatttctacag

SEQ ID NO: 13803 - DNA, 477 bp, Diabrotica virgifera
  SmartBlast Evalue=5E-44; Info=Endonuclease-reverse transcriptase n=1 Tax=Bombyx mori RepID=D7F175_BOMMO
acttaacgactgcgtaattggatataatactattgatgacaggataatatcccttaaaatgagaatatccaccaataccctacaccttgtccaggtatacgctcctacaacagctgcacaagaagaagacatcaacaggttctatggtcgtctagaagaaactgttcgcgctattccgaatcgtgaactcatcataattctaggagattctaacgctttggactgggacagagaaatgagaatggcgaccgtctagtggagttctgtgtagaacaacatcttacaattacaaacacgttatatcaacatcatccacggagattatacacatggcgcagcccagatggacgaacaaggaatcaaatagactacatcctcataagatcaagatggaagtcgtcgtccatcaactgtaaaacatatccttgcgcagactgtggaagcgatcatcaattcctggcattgaaagttcaactt

SEQ ID NO: 13804 - DNA, 486 bp, Diabrotica virgifera
aaaatatcaacattgtggcttaattgaaaaataatgaataataaattccttatataattaaagcggctacgtaaaaatgagaacccattcataaagattcaagcctgtaagcgaagcgtttcgaatggtttaaaatgaatcgcaggaaaagaaagtggaaaactgtaaaatgaagataattacttttaccctttatacattcacaatcgcatatttatttacgcatcacacgatcacatcagaagctctgagcaaaagcgaaaatgaaacagtcacagaagattttatcgagtcccctttatgctgcaatctcaccacagagagggtggaactcaactacacatcaaaaataagtcgaaaatgaatacatagtaatgttcaacgcttactacaaaagcaacgcacgtgaaaactacattaacacagctttaaacgcatcaggaataaaaaaatggaagatcttgagccgagaaaacccagctagcg

SEQ ID NO: 13805 - DNA, 486 bp, Diabrotica virgifera
aattaaatcaatatggcgactgggaggcaaacaaaaatgttaatctatcagttattaatgtgttttagatcattttagttgagtttctttgtaattttgttttgtacaaggattaatttaacattttcactggaagaattaatttaaatagataatatgcctcgcttctgttgtgttttgaagtgtggaatgctaagtaatcatgataaagtttagtgtcgtatcgtatccttttagtttagtatcggttaccatcagtgctacattttaagcataaaaacaactaaataacttatcatctgagagacaaaacaatggataaatgctattaaacgtcctataaaaatgctaaatatttatgtccatgttactgtcccttggaaaactgtctcgaccgtaggttaacccaggccccattagggaaagtggacctacatatattatttattttgcttgtatctactagcaacatctgtattgcctacc

SEQ ID NO: 13806 - DNA, 481 bp, Diabrotica virgifera
  SmartBlast Evalue=2E-44; Info=Probable adenylate kinase isoenzyme F38B2.4 n=1 Tax=Caligus rogercresseyi RepID=C1BPN7_ 9MAXI
ttgccttgcagtagttgtatttagctcacttcaattaggagtaatttggagtaattgtttttgtagattgttgtacgtcagtgtttaaaatggcacccattccagctcttaacgttccaatagtttggattttggggggaccaggctcaggtaaaggcacccagtgtgataaaatagtcgaaaaatatggattcactcacttatccagtggagatcttctgcgagcagagactgaaagtggaagcgaaaggggaaaagaactttctgcgataatggaacggggtgaactagttcccatgcagatagtactagagctcattagaaacgctatcgttaaagccctgccaacctcgaagggattcctcattgacggatatcccagagaaagggaccaaggagttttgttcgaggaaaatgtagcacccgtcaacatgatcatattcttcgaagcgtcagaacaaactctgaccgatagattact

SEQ ID NO: 13807 - DNA, 487 bp, Diabrotica virgifera
atattttcttcactcgtgaatttaaactaaattgaaaacgatgtataaatactttcttcttgtatttgcagtttgcgtactgaccgctgttgtggctaaggctgacgaagaagataacttatttgatccgtatagactacctttacccgaaaaagaaatcgatgaattcgtatttaattggtataaacaaatctttacgaaagaagaccgaactccggaacagaaaaaaaagagtatcgcatcattcagagcgaattttaaactgctaatggcctgccttaacaagtacagtgtggatgaagaagccctgaaatcttgtagtattaagtacaagttgccaaatggtatgacactagatgacggttttaacacttattttattctgagaccaacaggtttttaacacagatagtttaaatcgatttactgttaaaaataaattgcaactttgaattacttactagtttaataaaaataattaaaacgt

SEQ ID NO: 13808 - DNA, 485 bp, Diabrotica virgifera
ggaggaatccgtggactatccattactaatcaagtcaaaatgacgagatcctcagaagaattaaaagaaccaagagatactgaccaccatcaaataatctagaacgttacaatacttcaaacacattattcgaattgaattcagatatgtttcctgcaagccatcctacacgaaaaaataattggaaagcggggtccaggaagaagaagaacatcttgattaaagaacctcaatacctggttcagcgcaatatgtgtgcagctttagctaatctagtcagggagactataggagcttcgatcaatgacaatttttctgtttgaaaaatcttgaaccactctcaggatatttgttctactcaaccattgacgtgcaggaatataatatacctatcggagacattaaaaaggttttataatacctaagttgtacctattttatgcatttttatagttgaataaacttgatattaagatttcgaatgt

SEQ ID NO: 13809 - DNA, 487 bp, Diabrotica virgifera
ctccgttttattccgttgtctatctctataggttcaataagttgtcaatttattctgacttccattttgttgttttggcagatctttttaatagtttttatgacatttttgaatcttactctgtcaaatgctttcttcaagtcaatcagacccagaaaaggttcatgtatgagggcaattttttagaaatttacgatattaagagttatactaactatgtaaaaatactcagatagaaatcaataataattcacacgcatcttgtaacaataaaaagcagagaaataatgtttaatgatgatctctgggtctgaaacgttctaacactttgtaatactaaagattctttcttaaaccatggtggtagtaagaaaattaaatatttctacaataaaatatccgattctatttgaaagttctgcactaacaaatgtgtaagatgtgtttatattgtgttagtaaacatttaaacggtttgaacgattta

SEQ ID NO: 13810 - DNA, 486 bp, Diabrotica virgifera
  SmartBlast Evalue=3E-16; Info="Pupal cuticle protein, putative n=1 Tax=Aedes aegypti RepID=Q16IX7_AEDAE"
gttgtttaaacaatcaaaacatcaaacaatcaaaatatcaaaatgaaagtgctcattgttgtcgctttaatcgctgtggcttgtgctgctgcttatccacaatacaatcaataccataattctccattccaagctccagctcgtgctgcggtacattccgtgcatccagtacattccgtgcatccagtacaaccagtagcccaaccccaacatcacgctagatctggtgcctacgattcatccaaagatgctagagttttacgttacgacagtgaaaccagtgtaggaaacgacggatacagatttgccgttgaaaccagcgatgggcaccaaagagaagaacaagctgtccttgaaaatgccggaactaaagaggaatcactctctgtatcaggaagatacttttacccaggattgaacggcgaaactttcgaagtcacctacgttgctgacaaagacggctatagagctagcggacctcatcta

SEQ ID NO: 13811 - DNA, 490 bp, Diabrotica virgifera
ttacatactgtaatacttatatacaatacatataaaatagagatagataaatgtacaattttatagagtccacatgtaaaattaggtatgaacatttcattaagaacagtttttatcactttgagctaaaatcactggtttggttttgtgttccaactcactgacccacacgtatacctaagttaaataagttagggttaacgccaaccttaacgccaacgccaggtttgccaacgtcaacgccaacgttaacgccagagtccttgccaacgccaacgttaacgccaacgccaccgttaccgcctcctccccattgaggattcggcgcaggtactgcggatatagtttggattatcaaaaggacgacgcagagaggatgccactactgcagacacacattcttcatcttgaactaattttcaaaataaacaaaatataatatagtatacgatttctagtatgtatttattcgtcgagtagtaatttatcg

SEQ ID NO: 13812 - DNA, 489 bp, Diabrotica virgifera
cctggcatgatggtttgtagcattaaatggctcgttttctagtaacaataatgttttgaggttgaatttcttatgtattctttgccatatgccgtcttttttcgttccgaactgttgacaatcaaccagacaatgcataatcttccttcaattagatctctcttataatccttgatataactatctatgaatctactcaacagtacaatattcatgaaatataatatcgtacaaccaattcttttatatggccaccagaaacaaagtcgttgtctcccccatatgactatgtcgtccacttcatatgtatttttgattttctcattaatggtgaaatttcgtctacgtgatacgttgggtggtagggtagctccacgtttatgttaatggtcaccaaaaataaaagttatgagaaaatttaaaaaaatatagatatataatatgtaaataatatacgaaaatgaatattaagaccttcgtctatctcgc

SEQ ID NO: 13813 - DNA, 487 bp, Diabrotica virgifera
  SmartBlast Evalue=5E-21; Info=Endoglucanase n=1 Tax=Phaedon cochleariae RepID=GUN_PHACE
aatataatataattatttaaagactgcaaccagatctggcaacgatttcagcaggacattggacttggtcgaagtgcattcttggattgttagcattctggtagaaatcaaatctaaagtaacatccagactgtaaagcttgaggaagggtagcacattcgcctctgttatgaactccaccatattggtcaccccaaccgttccatggggcattccattggtcatgacaaccttgagtgaaacgtccatacacctagcggagtaccagttgcctcatgcgatagatctggagtgaacagggttgatgctaatgcaaaatcaggttgtgagggtggcggcagtgcttacatgtgcaacagtcaacaaccatgggcagtaaatagcactttggcatatggttttggtgccgcgtctttcagtaacggagttgatgtatcctttgaagctaagtaagaaacaagcgcaacataaggatacatcaactccg

SEQ ID NO: 13814 - DNA, 487 bp, Diabrotica virgifera
tctttaagataaaataaaacttgtcgaccttaattgatacgagcaggataactatgaagctagaaggtgtcgcagaaataaaaaaatgattatgtataaagcctagttggccctaggctaacaattttgtagaatttgctattcgttcgctcatcggtcgagtacactactcaagtgagtggtctttggcaagatgatcagacagcaaagtaatatagcaaataagtcctttccacctgtttagcttgaaatttttgtcatttaaagactttttaagactgtctcttcgctcaatcgtaacattcttgcgacagctaatgatgtcgactgaaatgatagattcgaagtgtttgcaaaagaagaaaatggtcgactatactacatttttggtgttaaaacagtcagtacctgaattcgactacataataaagtactagtgtaaagtagacttagaataacagttaaagagtgatataattatagtttt

SEQ ID NO: 13815 - DNA, 484 bp, Diabrotica virgifera
gcttgacccaccgcagtaggtatgtgtctctacacaatcacagtggttagctgtgaaaaatttagtattcgtaaattcaaagagatttttcagcgctacctctccgtctataatagtgtctcgttaacatataaataattataaaaaaattaaaattttagtactcggcatcagtcaggaaatattcgaatattcgtgcagaaaccgtaatgacgttgtcagattattaaaaatgacgaagaatatttttattttcgcagttttaaatgattactttctttaatccagaaactatcataattaccatagttatgttcaaagaagcatctgtgagcttttagttagaggatattttttgtaagtggaaaactattttgtagtttctttggatagtgaatattgagtgttcggaaattgtcaagtcctagttgtaatagaggggaaataagagtaaaatgttcgaataaaataggttttatacttt

SEQ ID NO: 13816 - DNA, 487 bp, Diabrotica virgifera
  SmartBlast Evalue=2E-19; Info=Nuclear pore complex protein Nup205 n=1 Tax=Camponotus floridanus RepID=E2A0N2_9HYME
ctcagaactgggagaagactccccatttcaaatcttaaaggtccaccaaccgttgttgaaggaaattttagataatcttacgaagtggctcatggtttcagacgtagttaacggagaactgcgggtgaatttgtatgcctctttggtttcattcttacaattgaccgataaagatatacctcaagaggaactgacgttcaataacagcttgtttgtgagtcgtttagacagttccaaactggatccatcagaagaaaccacgtctttggagttctcgtctgaagtgtttaataagttcggcgataaactgatagaaataatttgccaggactgcgttgggcgccaagaagtttgtaaaattctgtcaatgtctgcttttactcatttaatgattctctcgggcagcatagactggatgatgcacttatctggacgaggctacttgaaacacatcatacaaagtatagaaagcagcaataacgaacta

SEQ ID NO: 13817 - DNA, 486 bp, Diabrotica virgifera
  SmartBlast Evalue=5E-24; Info=Sugar transporter n=1 Tax=Aedes aegypti RepID=Q16SU5_AEDAE
cataaagaagccttgaaagtactacagaggcttagaaacacagatgatgtcaaggaagaactacaagagataacaaaatctttggaactacacgcagcagaaaagaaaggagtcttggatctgtttagagacaaacatctaaggaaggctttgatcatagtagttgggttggtaaatgctttgcaggtcgctgggatcaacccaatagtggcatttttggaagccattgtccgagcaactggttccaacatgtctgtttatttaacaacaaatgtaacaggactcctgcaagttataggtactgttatcactgtcttcatagcagaaaaatttggtcgaaagactttgttgatattttcaagtgtcggtattttaatgtcccatattactcttactatatatttctttttaaatgagagtcattacaacgtagaaaatatatcttggctacctgtagctagcttgttcttctacatgttaatgttt

SEQ ID NO: 13818 - DNA, 482 bp, Diabrotica virgifera
ggacctaaccctctatttatggtcgacggctgcggctgtttattaaatgaatacggttaaagatcaaccagaagctgatacagacccttccgactcgactaggaactgatacggtcagtgccgtggttattttgaggtctaacgacggtgtgttgaaatttttatcactgtatgaattaaccaacttactaaattctctaccgccaacactggtggtgtaccctcgatactcgaagagacaagcatggtccgaccgattttatcaaaaagaaatattattaatttcacggtgacgtgggatgcctgccgtgctctcttttcttttcactattatatattttctattcctctttgccgacgtaaactggtgaagcgtgccgcgccacacttcatcggatcccggcttttaacatattgtaaagattccctacattatctttattagtttttggttaaagattttaataaaatcggggtaaaat

SEQ ID NO: 13819 - DNA, 482 bp, Diabrotica virgifera
  SmartBlast Evalue=3E-16; Info=BIR-containing ubiquitin- conjugating enzyme n=3 Tax=melanogaster subgroup RepID=Q9VH01_ DROME
acgctaaagtctacattgttaaaagttacctaccaattaacgaagccgtcaggttcagtagcgtgtagattaggtcccctcgacgcccaatgtaaattattacaaactatgttgtatttagattttactaattccgatttgagcatagcgatgagtaccctggaagctacagcatctttggttcatagttacgtgataaatacagaaagagtgaagtgtataagtataggtgaaaaacaaacagttatgaaccacgcctttagcgatatatttgccagtgtactaggctcagactcgaataagcaagatcgaccagtgtcatacgaagatttgttaattttactattaaaattgttgggtaaattggttcaaacaccgttaccaagtcaacaggaagcaatggataccgaatctgcagcaacatcccaaacggacgagagcaaagcagaattaatctatcaagaaaatgcacgcgttcagca

SEQ ID NO: 13820 - DNA, 478 bp, Diabrotica virgifera
  SmartBlast Evalue=4E-21; Info=UPF0493 protein KIAA1632 homolog n=2 Tax=Danio rerio RepID=K1632_DANRE
aactgactcctcaattccgtctcccagattttctttcggtaatcctccgtcgctcgatttagaatatctacagcatgactgtctacgctgtgtaagaagtaaaatatcttccacagacccttcaaagataccatgttgtatggtactacggcgaggaattgccaggcgccgagtttttgggaggagtagagatagtatatggctcgaaggaaaaatgcgtcatattcgacttgaagacgttctaacatcgccttgtcttcaattttttggaccttcaaatattgttcccactgatcagtggcatactgcgccacatgacgaatgaagcggcttaatcgttttgaaaattgattgtatcttggctggtcatacgtttttattcctttatgcaatattctcaaaactactgtagagaaagccaaatatctcaatatgtgatgttcggtaactgctgctacatcataaacatcctgtaaag

SEQ ID NO: 13821 - DNA, 484 bp, Diabrotica virgifera
  SmartBlast Evalue=3E-45; Info="Probable tyrosyl-tRNA synthetase, mitochondrial n=1 Tax=Harpegnathos saltator RepID=E2B667_9HYME"
ccttaaatatcttccagcacctccaatcagatctactggatccatgacttggtaccaactggcattgttgagtatactaacaggtttcaaggaatttttttctttccataaaaacttctcatgattcaaaaatattgtgctaatattattacaaagtccttgtatattttcggctatgaaagattttgatatctcttcacgttctgtattacgaccactaggatcacctatcttggcagtggcacctccaaccaaagctattgtttggtgtccacctctttgccagtgcagtaaattaataagaattaacaaatttcctacatgtaaactatttgcagtgggatcaaaacccgcgtaaactgtttgtgggcgagcattcattaaatcagtaactacattccctgaattatctggaaaaaatatcctcaaacatgccacgttcttttaattttagtatatttctattagaatactgcctgtggta

SEQ ID NO: 13822 - DNA, 482 bp, Diabrotica virgifera
aaataataagcccaatatattgttcctattttgatgttttctgcgctggtattatgtggcggaattcaacaatattttaataatgaattgactaaacataattttacatcattgagcaaatgtcaataaactataaaaagtttaacaaaaactcatctgcagtaaatgccacgctactagacacacgggtacattgaggtaatacagccctgaacccttcacttgttgtactgtttacttttatgtctagtgacattatagtgacgtccagaacgtttatagaacagtttgtatttgaaagttatagttgtcattgtattaaagttgtaaaagttataaagtattgtaatattgttggtgtttgaaagtttttttaaagcagagtaacaatagtcttaattaatgtatttttgtatggaaaataattattttgaatagtttcatgacagtcacatgacataacagatataaaagttactggt

SEQ ID NO: 13823 - DNA, 477 bp, Diabrotica virgifera
aaagattatggttgttagtaaacaggtaactgtaactaatattaactataacgtaacaattggtaatgactagggagcggattttatgctaaatgcatattgcatgcatatttcgcatatttgaaaactttactaaattttgcatatttttaaagaaacatgcatattttgcgcctatcaaaaaatatttaagtccaaaaaaatttttaaattttttaatttgacacaaaatatttccccgcacgggctgtcgtatccgtatctattaattcgagaactacctgaagagagacggctcattcactgcctttcattttttcttagaaaatacccgatctttacacaaagtacttatagggtgcttatagtacgccgttataaaatgattgtaggatgttaaaatgatgaaggatggtttaccgggaaatccgaattttacttacttttattatatttagtacaattcttatcccaatt

SEQ ID NO: 13824 - DNA, 485 bp, Diabrotica virgifera
  SmartBlast Evalue=4E-36; Info=Myoblast city n=7 Tax= melanogaster subgroup RepID=Q9VCH4_DROME
ttgtgagcggatttatcaggtgttatagttatatctgaaagtctgctgtcactagttatactatagtggcgtctcatttgtacttcattttctaattttacatcacagtccctttttccatatttttcctccacagcctctttcatctgggcaaaacattcctctaatctcttctgcaaaggtttaagattttcaggaaccttctgcttatgtatttgtacgcaaagatccaaaagaggaatctgatccgctatcaaatctttcaatttttcattcaatattttatcttcaggatgatgagttgcgtagttagaggtaaaaaatacatcttcgtaatttttaattccacccataacagcagcatccaaaataccatttaatgttaaactcagcgggtttatctgcatatttttatctttattgtaaagtattacataattcatcagagttttattggttctttccattgtttctatggcgtttct

SEQ ID NO: 13825 - DNA, 478 bp, Diabrotica virgifera
gccaccgtgtggaatattctagcaggtataaatactgaaattaaaacccaactaacctttttcttaacattctgctttttgactcattcgcctatgttcgataacaaaaagttagttaaaaaaactatccttgttttcatcaatacagggtgccttaaataagtggaaaactttaaggggtaattctgcatgaaaaaataatgacagtttgcttaattaacccttaagatcctgaaataatttatttagaaaattttaattttttttattttgatgtattcaggagaaagttttaaaacaaaataaatacatttttttcttaattatttttgattttttagaaaattgccgttacatatatgtaacgcatatgatataggaggagcaaacatatttaaaatatttccgattataaatttcaaactaacagacaaatacaaaactagataaatgaaaaatcataatcaagttattgtag

SEQ ID NO: 13826 - DNA, 467 bp, Diabrotica virgifera
cttatctaaaatgtgtcactcaagtccaataaaatttacatgaatagattcgtctcgaagttacagtcatttcatataattgcaccaactctgagtgctaaaatcaaataggtatgtaggtgagctagagagaaaaagggtattttgtgaaacggcacttcatacatatttctgcatttattaaggcagtggcttactcttatcttatagataataaagtagatataatttggtcagtcgtaccaaagtatatggttcgtgtaatcgagagctcacgctcggttagctagcgactaaactactagtatttatgaatgacagttctatggacttttacaatgtatgccgttattcatcaaaattctgagttggcgcaatgatatgaaatgatatcaatctcgggacgaatctgtttgtaattttattgcatttgaggacattacattgtccataagatatgtacgatg

SEQ ID NO: 13827 - DNA, 485 bp, Diabrotica virgifera
cgtgcttcttgacaataattgctttgtttgagatcgttgctatgcctttaaaatattaaaacctgtacataacaggtatttaggcaccgcattgaatttaattcggtgttattagatcgtcggcatgctaaccagttatatagaaagtttggttttgacaaccctgtcaaagatttaatttgtgtatgtatttttatattaattcaatcaattaatttggtcatttttaaatgctcgtagaaaaaatattgttcctaactcttgcagaaagtctcttttccgcactcgactgcttgccgaactccgcttcgcttcgttcggcaaactgcaatcgcgtgcggaaaagtatgactttctgcacttgttaggaaaataactattttagttatatcaggattaaaaaaatgaatgcatttaaaacacattggcgcgaaatttttatcctacgctcttaacgaaattagatgaaaggctgcatggcttta

SEQ ID NO: 13828 - DNA, 483 bp, Diabrotica virgifera
tatggtcaccagaaaacctttcttgttgaccataagaggcaacaagactatcatagaggtgcagggtttcatagagaccgggattatcaacgatatgataaaggctccccagaaaagaataatgattggagacaatatcctcgtggcagagaaataatgcctccaatgcccggagggcaacctatgggaatggggggtggttattatcctccaaattataatcaaggacagggctatgcacctgagcagccctttcctcctagggatcgatttccattgggcgattggcgaccacccgatcgtgggggatatagatacgacagacgccagcaatagttttacttaagttgtagtgccatttcatgtaaactcactataattatctattaatttctattaattgctctgcaatgaaaattgtaccatttttgttgattttattttaagaatgttcttcggcagatatgaatagaaaaggctact

SEQ ID NO: 13829 - DNA, 480 bp, Diabrotica virgifera
ctggatttatcgggtcacacattcccgaccatttggaatatataagagcgaataaaataacgctggtcaacaaatttttttttttgagtctgttattcagtaaatatgttctgtttgtatacatctaaaattaagcagaaactcaataaataataataaagtttgcttttctacctttagataatgaaaaataaatatacggtgttttggcagattttttgaggatccgttgtatttaagatgccagaaaggggtgagaggggactgtgggtgtgaagcgagatgtggcacactaataaatatggtagtgtatgcgtgagcattgcagtggaataacgtatttatctgtggcaaggcctagaaatgtcttccaaaaagtataagaactgtttttgctaaatttgtggcgaattcattaaagtggaagataaaaaattttgtttgacaactctacaagaagcttaaaacagctcttcattc

SEQ ID NO: 13830 - DNA, 486 bp, Diabrotica virgifera
tgatgtaattcatttttgtatttattgacaactatcaaaatatgactttctcaacatttttcttaaaccacaatatgtgatctaatatttcaaatatgtgatccatcatttgaaagattttgtgtgactcggtatacatctagaatgtctaaaatgttttacgatcattgaattatggtaattatcttagactgagttagaactaaaaaggattaacaaatgggagaaaaacaacttaaaataatctgctacgcagatgaccaaatactaatttttcaaagtgaagatgatttacaacgtatgctgcatcaatttaatataaccgccagaaaatttaacatgttaatttccccaaaaaagacaaaatgcatggttataacagcaaatcgaatgagatagaacaaatgattgagtttaagtatctaggcatcacacaatctagttacggaaagcttgaaacagaagtggaagatcaagtgaatagag

SEQ ID NO: 13831 - DNA, 477 bp, Diabrotica virgifera
tgttcatagcattatacccttaaaatcgacctttctctgttattttaggttgaagacatcgatttgagcatgcaccaagaaaatctcctttcacctactatatctcgttttgtgttctagctagaagatttatgaagaaactaatctcgtcgatttttcataatctacaaaaaagttttatatagttttttttgttggatgcgtagtttttgaggtattcgcaaaaaaccgtccgaaaaggtgtcatttttcaatgataatggtcaattttccaccacgaataactcaggaagtgttgcgttttcgaaaagaatatagaacagtttttgcttagaattgggttctctagctactcacgtggttattttgaccaaaaaattttacacccccttgaagggctgggaaacgccccaaaataagcgccatagtatatagggtagactttgtttcttgagctattaagaaggtagaggaagc

SEQ ID NO: 13832 - DNA, 487 bp, Diabrotica virgifera
cctgtagaaataaaggacctgttactatacgaggccgtctaagaagtgtggttagatattttgccttattttgcaacttcttgatatctatgactagaacaattttttcaaacattccctacctctttttaactgctgctgaagacgaaaatgctacagaagatgtagctgcagaagatgtagataatgaggaagaaccagaaagaacgtgatgaaataggaataattaaactaataaagtaagaatgattgattgataacgaaaagaaaatgatttcatatttcatattttaagaagatatagctttttttaatccataatctttttaaatttatcacaagatagtctgtttgattatgattttttaattattgttatactatactactatacattgtaattttacatatattttttgtttttgactttgtaactggattctttgtatatatttaatcttatttttaacaatatagtgtgtattgt

SEQ ID NO: 13833 - DNA, 486 bp, Diabrotica virgifera
gttctgtttctagaatagtatgtggacttgatggggatacattggataatattagtcgttcactaggagtaattaatcttcttccttgtataatttgattgttaactctgatttttccttgatgaatattgataaagttgtccactaattcttctttagataaataaatacaaattctgttattagatatacgtgagatgaatagtatatcttttggagatataactgatccaagtgatataaggtaatcttaaagttttacattttccaatgaactgaacacaacagattgctttctggatggaaaactagcattagaaggagtactggtaatggatgaatacgtttttataggtgttggtggtggaatagagctcctttcttgagctaattcggaattgatgttatccatttaaataaatgttgaaataagtcatttgatctgattacggtcctgtattaagacaataacaagccaattaaccg

SEQ ID NO: 13834 - DNA, 479 bp, Diabrotica virgifera
  SmartBlast Evalue=3E-15; Info=Endonuclease-reverse transcriptase n=1 Tax=Schistosoma mansoni RepID=Q4QQE8_SCHMA
taaggctttagttatttctatcatatcctttctattccattttctttaaacatttccatatatcttcccttcttattctatcaaaagctttttcagatcaataaagcatatatgtatctctttgcctttcatcaatagtttttctcctatttgtctcaatatgaaaatcagatcttgggtactccttccttttctgaagccatgctgggattcttctaattttatttctagtttttcccttagccttttttcaattattctattgaatattttggcaggaacgcttgtcaatgtaatacccctataattttcgcaatttcttgcgtctcctttcttaaacagtggtactattatatctgttttccaatcagatggtatttcctttgctgtgattatttcatttagtagttctcggaattttcttttgaattttcactcatgtactataacatttcagctgtgattttatcttggcctgg

SEQ ID NO: 13835 - DNA, 484 bp, Diabrotica virgifera
  SmartBlast Evalue=7E-33; Info=Myosin-VIIa n=2 Tax=Culicini RepID=MYO7A_AEDAE
agtctaaagatattttggtaacgcatcccttcaccagaatttccaattggtcttccggcaacacgtacttccatatgaccataggaaacttagttaggggatcaaaattgttgtgtgagacctccttaggttataaaatggacgatcttttaacgtcttacatttcactcatgttgacgaacatgaacaagcaaaggagtataaggataaagtagtttcaaaaaaggcaatattaggatatagaaaatataaatatgtttgtatacctatacatatctaaacaacaaaaactaaacgatattagattgttatggtagataatttgaatttagtacacttttatttaaaatctacattaaaattagcttttttatatttctgttctgttgaggaagctgtaaaggtaacaatcgttataaataagctcttataaatatgcaaattttattaggatcatctataaaaaaaaagctctatctatata

SEQ ID NO: 13836 - DNA, 481 bp, Diabrotica virgifera
  misc_feature (481)..(481): n is a, c, g, or t
tgtgaattttgttgtttgttacattttctccggcattacaaataatcgttatgaagaagttccccttagtgctgacatttgttgcatttctgtggatttgggaggctaatggatttaccgcagaacaaataaatgaaattcgtagtatttgtagtgaagaattaaaaaaaattccacgtcaaaaaggtgataggggttttccgggaattccgggtgtaccagctccaccatcttttggggcaatcggacctccaggaaaactatatatggtctcccaggagcacccggaatacccggtccaatgggagctcccggtgcggcaggactacccggattgccaggagttaaaggtgatgtaggttcctgtagcagaaaataatttggaagttttgaatgaaaatttaaaactattcttacttttgacatattatgtagatatttgctgttgtatcatccaaataagtatcattagaacgtatcn

SEQ ID NO: 13837 - DNA, 483 bp, Diabrotica virgifera
cttcaataatatcattttgtatatgacttgaaactctcgaaaaaaacagatgtttctagatgttgacaaaatttttgatcttttttggcaattaatgttagcaattccccgtaattgcctcgattgtcagagtcgtcgcactcaaaatgatcacgaaacactagttcttgtttggcccaaaaacatacagtatctcttataagtgtgctaaggatataccatatacctatctatttttgaacaaattcattatgtttagcaatatttgctttaaaagcttggttaagagaacttctgatttttgttttgccaaactgaatcaaattgggtatacatcttacatgtaggtaacggagaaatttcatgtctcctttttaaaaatctaacactatttaaatcgtgaacctggtccacccatttttctgtagaaaccagaagacatggccaacaatatagtataatatttttcttgcaaccataata

SEQ ID NO: 13838 - DNA, 485 bp, Diabrotica virgifera
tccattgtgttgggatattttataaggtttaaataatatatacgggtgtccagaaactctaccgacgggcgaagataggaggttcctcagataattttgagacaatttggtcaaattcacctagtccgagggtgcttcctgagggagctggagctctttgaggatggcgccatgtaattagtttttcttaaatatctccggagcgcttctggttggaagggcaggggttggtacgcctatttatttttcggggatgaatcgattccatctatagcgaatttgtagtgccggtcatgggcgtccgttttgggtagggtaaaattattttgtcgcatgatttttttgtctttaaattttaagcatctttaactttggattattaaattgtgaggtgtgctagtactaaggggtactcttgctttagtcggtaggacacaccgttttctagaaaaatcgatttgaacatttttcgtctcttgaatttg

SEQ ID NO: 13839 - DNA, 486 bp, Diabrotica virgifera
aagtaatattagtaagttgtacatcatccgaatcactacagttttctttgtactgaataaaattctgctgaaaattttgatacaaaattttgatatattctacttttagatgttcactttgcaacgctgataaatctccactaattatttcagttatttcaggatcaggaaggacagtagcaataacatcgttgttcggtgaactgtatgtcatgttgtctcttctttcggcattcaagtagtaaagttcatctccattaaaaataaataagtgggttgtgtcttcaacctcgtatccttccactggtcccgtgtaaattatttccccatttttactgatagtataaaaagaattatctagcattttaattttctggcaaaccttttcttcttttgctgatgggaaaggtgcaacggctacaagaaaataaaaaaacaaaaaatacataattttgaacacgtaaaaccatatgaactgataatgtt

SEQ ID NO: 13840 - DNA, 485 bp, Diabrotica virgifera
taaaaatatcttattagcaaatatccctcgtttctaatattgttctgtcatcatttttaatacagaatgtacaaaaaattcaactcgttagaacttgatcgttttttagacacaatacattattttaccataaggcaataagtttttgaacatcacatccaaataattaaatcatcaactaaattgtggcaatgaaaaacttatttctgtacatttctatgtatggaaataagtaaagtacccacagcttggttaaataatgatattataatgctggtataacatacaaactggatagttaccagcctgtaatcaggcaggttttagaaaaggttatagcatcttagatcatttacaattagcgagaatacaatataacattctggatagctgtgatatattacaaaaaggcatttgaatccatagaaatttggtcaatccttaatgacgtaagcaacaatatagttggtgaccaatatataaaa

SEQ ID NO: 13841 - DNA, 487 bp, Diabrotica virgifera
atggaaagaagtgaaagccctggccagaaacagaggagaatggagggggactgtagaggccctatgttccaaatggaatcaagaggagtaaagtaagtagtaagcagaataccaaagttatacttcagtgtcataaaaaactaaactacagtggatcccaaacccttttttccgtgcgtcatagtttgtcgaattcgctctaactcattaagctctaagtaaaaaaacgtacatccgtgattattatacatacaacttcgaaaactatgtgttcgttggaagggtattttcatattaaagtgacttatacttggagatgtataattggttaacaattacagtactctaaatagataacaaattcatgatgcgaataaagataattttgaacaaaattaatctatcgtgacggtacttttacaatattaatggataaaatgacaattttgtaattctaggttaggaatttgtcaacgtcgtaaatata

SEQ ID NO: 13842 - DNA, 480 bp, Diabrotica virgifera
  SmartBlast Evalue=1E-38; Info=Barrier-to-autointegration factor n=3 Tax=Aculeata RepID=E2A9L1_9HYME
tagttaaatagtattgttttagagatttttccattttattattataaaaatgtcgagtactacacaaaaacatcgcaactttgttgtggagcctatgggcgataaacctgtaacagaattagcagggattgggaaagtacttggtgaacgcttgataactgccggatttgacaaagcctacgttgtactaggtcagttcctagttttgaaaaagaatcaagaactttttagggaatggatgaaagacacttgctcagctagttctaaacaatcattggattgttggcaatgcctcaacgattggtgtgaagaatttttgtaattgtatatagtagacctaagcatactgtttgtattaccaaggtttttatttataggattttattcttgtaatgttaatatgtgtaagtccaaactctctgaatacttatgaactgtatataaacaaaaggcatttaaatacattgcattatttttctt

SEQ ID NO: 13843 - DNA, 485 bp, Diabrotica virgifera
attggactcggtatgttcataaatatgtaatcaagtaatgctacagtatattaaaaactccacaacacaaaatatgctaataatattagcatataaataaatattatttaccaactaaacgtttaaaaatctaacattagatagatttgaacattattgaagttattttgagttatttttttacttatttatattactgaatttattatataaaccatagtttagaaaacgtacttactttttgtaatatgtatttatgtacaacaccgcaaaatttatttttatttatagacgttgtcgtttttattgaaacaaaagtattagtaggggtgcacggtgcattcgtattcgtgacaaagcatctcgtaacgcgacagctcataaccccataaatggtaacggacaattcctaacgacgccacttcgtaacggtataattcgtaacatcaaaatggtggaacacaactcttattaagttgcagtag

SEQ ID NO: 13844 - DNA, 486 bp, Diabrotica virgifera
cttttcctgatgtcaagagttctatatatagggattaaaaagcgggactttcataatttcgaaaatatgacttacaccactttcattttaacacccgcatatattaaattcaagcccatcaagcagattggcaatcatttttcctattctattgtttgaagctgctgtacagttttttttacatttgaaccaatatctaagatttcgttaccttagactttatcaattatgtttactctgtattttcaactactatatacagtaaacgccaattattatggtgaagtttcaaggaacatattttaaaagcatccattacgtaaaacgtgaaagtaaaacccacaaaaacagacgcatatgtaaggacacttcactgtcatttttttattaaaaaaggtagggaacagttggggaactactactacggagtgcgcacgagatctcctctttaccactgcgactgtaacatctctcatctacaaacta

SEQ ID NO: 13845 - DNA, 482 bp, Diabrotica virgifera
  SmartBlast Evalue=2E-28; Info=Alpha-amylase 3 n=1 Tax= Camponotus floridanus RepID=E2AMD2_9HYME
agctcgagaatacgatgtggtagagcaggcaattcttcattggatttctaatggcgtggaaggattttatataaaaggtctagaaaaactacaagaagattcaaacttggttgaatctataaagcgttggaaaacaattcttggagaacatagagttcttatagtaagcgatacttttatctcttccttgaaaccacctgcgttaaactttattctagataaggttgatttggttgatatcaggctagatgtaaagcaaggagttaattccgtaagtagacaaatcaaatctttgcaaaataatacattatattcgaaacctggaatgccatggatacattggtcagtaggggatgttaattcccaacgtttagctaatattttaccttctggcaactgtaccctaggggttaccctcctccaactaatgcttccaggtactccatcaattttttatggtgacgaaataggtctaccggaaa

SEQ ID NO: 13846 - DNA, 483 bp, Diabrotica virgifera
ccaacaggaacaacatctttgtcatctaaaatcaaattcccctcagaatcatggctaaatttgatagtttcatcactgacgcgtaaaatgtaactgtcttcgcaattcagtgccatcatttttgccccatcggagcaattatgccctggtgccaactgattcggaccattgcagcacatagatatcgcatgtattaatcctacgtgtgctataattaatacgaaaagaattttggagatcatggtctaggtgatagttttccaattgcttttgatttccttaccataaaatattgcgaaaaaaatttctggtttatttattaaatatatcgtcttccgtatcttcgttttttgtattacaagaataatcaatcatattgggaagtttgtataaatcacaaacagtattggtattttggatactatcaggtaaaaaatcgataggtaatcaaaagggttttattatcataatgtcaataaatat

SEQ ID NO: 13847 - DNA, 483 bp, Diabrotica virgifera
  SmartBlast Evalue=1E-40; Info=Ftsj1-prov protein n=2 Tax= Xenopus RepID=Q801N2_XENLA
cagctcttttaaacaaccagtatggggaaagtatcaaaagataaacgtgatatatattatcgaaaagcgaaagaacaaggctggcgagctagaagtgcttttaaactactccagattgatgaaaatacaatatttttgatggtgtaactagagctgtagatttatgtgctgcccccggaagttggagccaagttttatcaagaaagttatacctaggagaatccattgatatcagagacacctgctatttgttttacagtgatatagaactacagagtaagttagaggaactcgaacctagtgaatcctcctctaaaaacgataatgttaaaatcgtggctgttgatttacagccgatgtccccacttccaggtgttattcagcttcaaggagacatcaccaaatattcaactgcacagcaaattattggacattttgaaggtgatcatgcggatttagtggtgtgtgatggagcgccagacg

SEQ ID NO: 13848 - DNA, 486 bp, Diabrotica virgifera
  SmartBlast Evalue=5E-47; Info=U6 snRNA-associated Sm-like protein n=1 Tax=Bombyx mori RepID=Q2F679_BOMMO
gttgggttataattttaaattttaattttaatttaagaactaatggcttcatcaggagaaaaacgggataaggcggcggcttcagcgggtgaccagaaagagaaaaagcgcaaagaatccattctagatctatccaagtaccttgaaaaaactataagggttaaatttgctggaggtagagaagctagtggagttctaaaaggttatgaccctcttctaaaccttgtattagacaatacctccgaatatttacgtgacccagatgatccttacaaacttatagaagatacaagacagttgggacttgtggtttgtaggggaactagtgttgtgctcatatgtccaatggatggtatggaatcgattcagaatccctttatttcacaagattgatataggattagttgttaatgttaacattcatttacaataattttatgtaatataattgataagttataatttaagtctgaataaatattccat

SEQ ID NO: 13849 - DNA, 476 bp, Diabrotica virgifera
  SmartBlast Evalue=1E-24; Info=Endonuclease-reverse transcriptase n=1 Tax=Bombyx mori RepID=D7F170_BOMMO
catcggtcaccaattcactgttgataactctacctttgaagtggtggacaaattcgcgtacttaggctcactgaccaccaatgagaacgtcatgacggaagaaatcaagcgaaagataatcctagcaaacaaattctattttggacagagtctatattatgagaagcagaaacttaagccaaaaaacaaaaataaccatatacaaaacccttatacaacccatgttgacatacggatcggagacatggaccatctccaaggcagatgaaaagcttctgcttatatttgaacaaaggattctaagaggaatatttggtggcatctgtaaaaatggaatttggaggaggaggtacaactacgaggcatactgtaacacattaaaggattagaaagaagaagagctcgacacgttaaatgccaaattaaacaaaatataaaaatatacttggtgctaccaaatactatggactgtcaaa

SEQ ID NO: 13850 - DNA, 485 bp, Diabrotica virgifera
  SmartBlast Evalue=2E-32; Info=Proton-coupled amino acid transporter 4 n=1 Tax=Camponotus floridanus RepID=E2A7X2_9HYME
catttgtgtttttctcgtcttcttgtacagctcgtgcgcacttgttaccagcacgtaagcgcagtgagtgcatatcagagaaacaaaaatagttaaaaatattcccatagacagaccagaagctttaaaagcggcaggcatagataatataccagttcccagagaggcttttaataaatgtgtaagggtatcacaattcgagactgggtgagctaactgtcgagccttaaatggatcaaaacctgcatgatttgcagctgcttctacatctcctttcgatgatattttgtactttgtgactccatttgaattagagttgtcctgaggcaggaaactctccatctcagtcgaaccattttgaggtttagccatttttatagatttcagttgctatttgacggtaaaaagtttcaaggttgtggcaaatcaattatttaagtctggaatcactaataatataaatatcactcactaattaacttttt

SEQ ID NO: 13851 - DNA, 485 bp, Diabrotica virgifera
  SmartBlast Evalue=6E-22; Info=Larval cuticle protein LCP-17 n=1 Tax=Camponotus floridanus RepID=E2A8I2_9HYME
aaaatcggcaaaatgaaattgatcttagcagttctagccatttctgccgcatattgcgtagctgccccagcagaacaaaccaaggaacccattccaatagttaaattcgaaaatgaaggagtaaatgcggacggatcctacagttggaattatgaaaccggaaacaacataattgcccacgagcaaggaacagttaaagccggaggaaaacccgacgaatctgaattggaggttgtaggaggttatgaatacaccgacaacgagggcaacaaggttcagatctcctacatcgccaacaaagacgggttccaacctcaaggagacgttctccccactcctccaccaatcccaccagcgatcgtcagacttctggaatacctcaaagcacatccatctgaagaagacgaaaaagaacaaaacaaagtttaaagtttagttagataaatggcagtttttgtaaatattttgtaaataaaatatatttt

SEQ ID NO: 13852 - DNA, 486 bp, Diabrotica virgifera
  SmartBlast Evalue=1E-15; Info=Cytochrome c oxidase subunit VIb/COX12 n=1 Tax=Rhipicephalus sanguineus RepID=C9W1I0_RHISA
atagttcctcttcctatcgaaatgtttcacccactgcgcggaacacgactcttcgtacactttccggaatccggcacagacgttgttcttatccttttggtcttttgctgctcccgaatttttatccaggcagtcccaatactggtcccgggcgtcccaacacttggcgcgttcctctcgcgtaggaaacgacataactggctagagtcgaagcttggactggcaggctactgttcagttaattcctggaaaaggtttcaatttaacaatttctcttcgttttcagcaaaatgtccgcagagtgacattcaacatcgcgctgaagcaggaagcaaataacctaaaaatccctactgaaagttcttgtactgtcttcccttcatctcaattttttacgtcaatatgtcctaatcgaagatatttttctacacgccgtttatttattccttaggaaatcgacattgtaatgattttaaggtgaaatct

SEQ ID NO: 13853 - DNA, 481 bp, Diabrotica virgifera
acattgtggtgatgatttcccacctttagacgtatcggaggagtttggcaactgccactgttacaggagaattttataaaatgttctaaaattctcctgtggcagtttgactccgattcgtctaaagatgggaaactatcagtataatgtaagtttatgggtttctattgctaatttcccacctctacaagtttcatctctttttgtttcacagcgcattgtttttcgtcttttccgttattttgccggttattagcgcgctcatcactgtatacacaaaaagaggataaaaaacgcgtcatcaatacattttctatacgtatatctctgttatgttatgccctattttgttgttcatcaaataagacggggcaattgtttataattgaaattcacattaattttgaagtttttaacagaacagctttcattttccgactgtatacttgttatatcaccctatttaacataattttccatg

SEQ ID NO: 13854 - DNA, 482 bp, Diabrotica virgifera
ggttagcttaaatcgacctattttggcctcaggaatctaaggttgagctgtggcccattctttaccaaacaccctgtattggattgtccatacattcatattatcttcctcttccactctactagcacgaaaagttgtgcaatctacttgcaatcagctgcttgcaagctagttctcgttaatgtatacacatgtcatttagaagacaatagctggtaggtacaagttactgtcttgttttactaatgaccatacgtatggaacaatagatatgataaattatattacataatcttcagatgttttgagtacagtcttaccaaattcactttgtatttgaaatttggatgcgcattggtgttgacgtttggaaaattgaaaattttctcaattttattttggtcacatctcaccacgtaaaatacctgcacggagattcttttcctgtctcgcttatgagttccgcggtctccgttctcttt

SEQ ID NO: 13855 - DNA, 485 bp, Diabrotica virgifera
  SmartBlast Evalue=3E-27; Info=Cytochrome P450-like protein n=3 Tax=Tribolium castaneum RepID=D6X2T2_TRICA
agagtgtagagtgtagtgtcaataaaatgattctgttggtcctactagtgttactcttgccgctgttgattagttactattttaaaaagaaaaaaagatatgaggaactatggaaatatttggatgttattcctgaaccgaaaagctatccgatactcggaactaattacaaaatacatacaagagaatcattatttgtaagagagagactaagagcgattgacttgtttcctatttataagttatggtcgttcgatatagcagcagtgattgtaatgcatcctgaagacgttgagttggtggtaaataattcaaagcacaatgacaagagtttgatatacagctttcttcatgattggctgggaactggtcttttaactagtggaggcacaaaatggaataaaagaagaaaaattttaacgccggcgttccattttaatatacttcaggaattcgttgggatgttaaacaaagaaacacaaata

SEQ ID NO: 13856 - DNA, 480 bp, Diabrotica virgifera
gacatagcatcattttcagattcttccaactgtttattaagaatttttaggtttgagtttgcttttttaacggcgtcatttacttcaatttcgacttctttttcagagttcggcaattttacttgttgatcaacaagtttttctttctcaataatttcaagtgttacatccatatcaactatttcacggttagacgtactagggccagtaatttgatgttcattagattgtatccgtttgtgccccacagcttcctcagctggttcttctgtttgcatttcataagacacttgcttgttcgattctttgctttcattaatttcggtagcgatatgttcctctttgagttcatatggatgcctgtccaattcttttcttttaaattatttttaagctctatttttctgcgcttgtggaaacgtccaaaacgactctctctattttgaatatatttccctttttgtttaactgccgccttgg

SEQ ID NO: 13857 - DNA, 485 bp, Diabrotica virgifera
  SmartBlast Evalue=1E-12; Info=10G08 n=1 Tax=Ips pini RepID= Q5FYF7_IPSPI
ctgatcatagctgtatttactatctactattccagatttctttaaagtgctactaaatatttcgtagtaatatttaagaagatattcgaagtgactccgaaggtactctatttgaacgctagtaatgaggaaaaatatgagatccgtagcacagctgaccgatctatacatttgaaaatcaacaaacacagtttgtactggatttccgtcttcaaacgtttgcattacattattggtccacatatcgtaatgcaccaaagtctcaaaatcatctctcaccatcttcccaaagaaattatcagtattttttgcaaggcttgctttcaactgtacaatgaagcttttaaactgtcttaattgactcctacactcttcatcagtttttaatatgtcttcgactagagtcaacaagtttacaggctgctcaaaaaattcagctcttttcttcaaatcagggtcgtttggttttagaccttgagcattgg

SEQ ID NO: 13858 - DNA, 482 bp, Diabrotica virgifera
gaaacaagtattttatataaaaatttaatattgagtaaattttgagcaaagtttagaaaactttttaaaataaacattaataaaattgctagaagtcttatttattgtaaaacattccaagtataattttgacatcccgacctaccagtttttgagcctattcaccatccattgagctttcacataataaaaggaagcaagttgcacaaagaatattttgtctatttgataatacaaatttagtatgtaaattactatttacttggtcaacaactagttttaggttaattttacatatttaaacgtataattaatttgttacactaatttggtttttagttaaagtaattctaacagtcaaggtaattgtaagattacagctctaatatgtctacttggtatgtccatctctaattagtgataatcatcaatctagcgcggcaaaaaaatgtagactaaatttcgtataaactagtctactt

SEQ ID NO: 13859 - DNA, 484 bp, Diabrotica virgifera
tagtgacgtcttttcttgcacatttgattgttactggtaatggatcggaaatggttagcaaccataaatttcggtcaatttcttgaacgttgtaaccttgtgccaagagcatggacatctggcaagtttttggcaagttgctgagaggtttcaaaagctgggcttcgcatatagcatcggtgtctatggggatacggaagaatgtctgtacacattctttggttttgactgatttgattgcatttttcggtgtccatgggtaagacatatgaaattgaatcatcatctcgcgctatgtatttatgaacagttgaaagtatatgatgaaaaccagtttgattatctaatattggtattgaatatagttgatacaaagtgaagatttcgggatcaactaacggaatttcgagaacaaaaacaatttttgaatcgagctgataagcttgtagttttattatgtcaatatactgagctatatttgaca

SEQ ID NO: 13860 - DNA, 483 bp, Diabrotica virgifera
aacgggctcttactctctacagttattttacgatcattcagccaatgaatattccgtgaaaacgatcattaggtagtgtcgatgaactctgcttgcattttcttggttgtgaatatattatacatttaaccaagtaacctgtcgtcaacgagtctcgggtcactttaaagaactataattcggtaaaaaataatcagaatacaatgaaattttgacagttttcttttgaaggttgggagaactgaaatgtcaaatggaaaatttattagagtcgctatctcttggttaggcccaggatttattgaccgacggattagaaactacaaatgtattagttttttagcaaaaataagaatctgtcgatttcccaatgataccaactgtcccgttatatttacttatattcttaattttattctattttaattctgtaattagtagcgactgaaaaaagttaaaaatcctagaaatatttttgtaagc

SEQ ID NO: 13861 - DNA, 485 bp, Diabrotica virgifera
  SmartBlast Evalue=5E-52; Info=Topoisomerase II n=2 Tax= Tribolium castaneum RepID=D6WF48_TRICA
gcgatatgttatcaatggtgaaatcgctattctagatgatgacagattagaaatcaccgagttgccagtcggtacttggacccaaaattataaagaaaatacgttggaaccaatgttacatggaaatgagaaggttaaatcagtgttaacagattatagagacaactgctcagatgttacagtaaaattcacgataactcttcaaaataaccaaatgcaggctatggagaaggaaggtctacataaaagctttaagctacaaaatctcattactactacttcaatgtgcgcctttgatgagtatggatgtctcaaaaggtacgattcagtgatgacgatcctgaaagaattctacgatcttcgtatgaagctatatggaaaaagaaaagacttccttttgggtgctctcggcgctgaggctgaaaaactatcagctcaagctaggtttattttggagaaatgcaacggtgaattggtagtagaga

SEQ ID NO: 13862 - DNA, 481 bp, Diabrotica virgifera
ggtgataactggcgtcttgaatcttctgtatggctgaggtctcatgagattcactgttaagccttttctaattttgaaagcagctgacacttttggcccaacggttttatttgaagattatgagtattcagttaaaaatacgtacctactgatctgcatttttatttcaatacgaaggacagttgattggagtttctccaagatatattgttatatcttgcggatccccacagttggattgagtaactccatacagcctaatatttgatttatatatcaaaatttcgttttatatttaatattttattgggaaatgagccacaatttaacttaaaaatccttattgacgtttcattttcgacttcagaaatggttatcgaaataaaatatcgaagtggaaatcgaaacgtcaataaatttcattttttacttaaattgtggcttatttcccaaataaaataatgaattgtctaagatgcca

SEQ ID NO: 13863 - DNA, 485 bp, Diabrotica virgifera
cgttaagtttgtccatcagaattgaaaaggacacggtgacctctatttggcgcctagactatatgtatcgaataggatggaactcggctaggagccattctgttaacggcacctgacttaagtaaccatatcactcgctggcgcgtgatcggcacctgactgaataaccatatcacgcgctggtgcgcgatcggcagcgaatgggttaatataattcactgatggatttaaaactgcccatgataaaatcatgagtatttgggcaaacatgtaactataataagacagtctaggtcaatatataactgtgttccaagcttaaggttttgctctagtggccttcattcatgaaatcatggatggagaccctacagcaaagttaatcaacatttatacagataaccacgcggctattccggcagaaaagaatatattcaccaaatcaaaactggccaggaactgcaaagatctactcaacaatctgg

SEQ ID NO: 13864 - DNA, 485 bp, Diabrotica virgifera
cagtcgtggatttttgttagcagaagcgatagtgttactggtgcgatggaaggataactctgttgttacaatagcatctacgagttgtggtggttcagcattgggcacggtaaaaagattttctcatgaagaaaaaggccacattcaagtaagtcggcctcactatattgctgaatacaacaaaatatggtgggtaccgactggatggatcaaggtgtttcaacctaccgagtagcaatttgcagtaaaaaatggtactggcaaattgtaacatggttgttggatgttgcagtccataattcatagcatttatataaaaaaaaaaataaaaaaaatatatccttgctatcgtttaggagagaattggcccaagttcttctcgcaagatatggaagtcgtcccttatatacaggaagacctagtctacatagacagaacttgccagatcttcgttttgatcgcttcgaccatttgttacatcaagc

SEQ ID NO: 13865 - DNA, 485 bp, Diabrotica virgifera
catcaatttttcttgaccattcttgtttgtcttggtctatactccatcatcattctttttggagcctgtgctgcttcttgatctagcaaaattttgtttgcaacttcctcttcaatgagctgttcaaacttcttggaaaactcggccaaatcaacttgagtttcagcccaaagtttttggatttcgacagctttgtcagctagaaattgttctagaatacttatttgttcagttaactctggatcggcagcatcttctgcagtcatttctgcgttgccaacatccaatgaatatgagccatattttctttcaggtggggcaataatcctaagatttctggacggtggcatctcttctactggaactaaattctgtatatcttgaacatctctcctctgtctgggccaaaaaatggctgatgtttgctggagagcaatagcaaacaatagaacaaacactgctaacttattcatcttgcaacagag

SEQ ID NO: 13866 - DNA, 484 bp, Diabrotica virgifera
ctctctgttatattttatattaactcgaatttgttactgagttgattttagacgaatgattcaggtattagtaattactaaatgattctaacgaaatttaggtagaatacaaatccggaactcaagttctcgatttgtgcctttatttataatgtttcaattcaatatcgtgtttactgacttttttgttacaacatgctttttaattagtacaagaaaagtaggaagcagttaaaaaataggtaaggttagcgccagttaggaagatataaagccatgcaactactatatcctaaacagagcggtctcatgctttttatattaataaaacacttaccaaaacaaatcatttattcttcctcatgatgacttttccggttctctaaaattgacaagatgtactgctaattcttctcttttcttccgaacgacgttttgcgaagcattccaacacatttcctcctaaattctgtgctctcttaaa

SEQ ID NO: 13867 - DNA, 485 bp, Diabrotica virgifera
gtgacgtcgtgctgctcaacactgctgcagacggcctgcaggttgatgacggcgtcgttccacagcttgcccagaggttggagcgtgccgctcaatcgattgattcgggagcggcacacgaccatctcgaccgttggatagctgctacccaaggctgattgctaatgccatccaggggcccgcccatagggctgggccataggcaaatgccgacccccatggtgaggggcgatgtttgcgaacaagggtgacgatgacggccacaacggctccgaggatggtggaggagagcaaagtcgtcatcccggcgcggacgaaatctgggtatggggagagtacggccgtcgtcgctcccaggaagccggtgcccgccgcaagcctgacatcgccgtatccgagggatgaattgagtcgccacatgagccagaagaaccctgttgacactgccgcgatcagaacacacgcaacgagccaccgtgcacgtg

SEQ ID NO: 13868 - DNA, 480 bp, Diabrotica virgifera
  SmartBlast Evalue=8E-26; Info=FACT complex large subunit n=1 Tax=Danio rerio RepID=A5A4L9_DANRE
aaattttgcttcgtcgctgtctttatcgcggaccaacaagtttagttggatttggttctcatccttctctttaagttcggcttgccgaagaaattcaaccttctttttactggttaagaaataagcttttttctctacaagaaccataatagtatctgtaagttcgtagcccaacagccatatttgcaatgcacctgatttgctgtacacaatatcatcgtctttgccgactgcagtgactaaagcatccatttttgagaaaccattttctccatcggtattttgccatgaattgtagagcttctttaatctacggtgaaaagactgtttgtctaaattgacattagccatgtttgtaaaactaaatgatttaaattgatatacgtatacgagaaaccagtatcactatcattacaataaaacacacgaaaaaaataaaatttagaatctcgcttcaacctttattcctccggaatagcg

SEQ ID NO: 13869 - DNA, 484 bp, Diabrotica virgifera
ctttggattatcaaaacaaaactcagtcagtagagactggagtgtacgcgaaatatatagtggaaacaagggacgtggtcccaggaataggcgcccaagaaaggacatataacgtaactctaaaagttaataccccatttaaagctttgccaaagttgaatttgtttggtgctttggagactgagcagaatttttatcacgcaaagctattattcaacacaaataggagtgatgtatcagtggacgctactactgagattgacaacggtcggttggagtttacgtctctcttccatgtcacaactccatccattaacattccgtcttgtgaattaagactgacaaaattattctcagaagcaaataattacgttgatgttaatgtaaagatgccgcagaaactgacaagtgatatatactctcgagtatcttggatgatacgatctgggaacgagtttggtgcgatggtccaattggaaactcc

SEQ ID NO: 13870 - DNA, 484 bp, Diabrotica virgifera
tgttttcgttttggaagtttaaaattttgaaaataagatgagtacaataaatcagaaagaatatctaaagaaatatctcaaaattggagccaagacaggagagaaaaagaaaaagaaaaaatcggagaaaacagctggaacaagaatgaaaattatagatgacgacgtagatacactattatcacaagaaatacaagatgatatagatgctgccaatgaagatgcgcctcaaatagtagcagttattgatgaaagacctcactcattaattgttgatgaaaaaacaaacaatactttatggaagccaatagggcaagcatcaaataattctgaatttcaaaattttaaaataggtagtattaaactaaacaaaaacagagatgattcagagaaacatagattattggggacaaaaagtttttcaagttcaaaacgaaacgataatttaccatcaacatcaacttccaacaattacaacaaatta

SEQ ID NO: 13871 - DNA, 484 bp, Diabrotica virgifera
cgaagacagaaaagtgtacacatacgtggcatgaactttaacaaggatcattatgagactttggatagtggtccagtgatcttcaatagatgaatatttacataaatgtaattattaattattaaattattccaacaggttctttttgtctaatttcttcaagttgttgaagaaaataatgtatttgtggaaagataacttccggaccatattaacaattttcaatttatttataataattttgtgatagattgattgacaagataattttagattttcagtttgcaataaataatgtagagtgtgtttgatgatatattaaatctcgatttggacttttcggaaaattaacacgttgatggacagaacgtataggcgtctaatttccattgatgtaatgtgacacaacgtctatagacatttttaaaataacgagttgtaacaaaaaatccatgtcagaaaatatcacatttcatctacagag

SEQ ID NO: 13872 - DNA, 483 bp, Diabrotica virgifera
  SmartBlast Evalue=6E-22; Info=NEFA-interacting nuclear protein NIP30 n=1 Tax=Harpegnathos saltator RepID=E2BZR0_9HYME
aacactgaattttggatttaaaaagttcatttatagaatttagctttgtagcattttatttacggcattcagtaaatgcatatattggagtaagttactttatataatttataaaatcgttattaaaacttagcaatctacatttctacataatacaatgagttcaggatttataactgaatcggaagtaatagaaatcaggaaacggcggcaagaagaatgggaaaaagtacgaaaagcagatgatccaaaggaacgtccagaagaaccgtacgataatagaagtttgtatgaaaaattacaagaacaaaaacagaaaaaggaccttgagtatgaagaagcacacaaattaaaaaatatgataaaaggtctagacgatgatgaaatagaatttctagatctggtggatcgcacaaaaactgaagctgatcgaaaaaaagaactagaagaggaacaagaactacgagattacaggaacagggt

SEQ ID NO: 13873 - DNA, 484 bp, Diabrotica virgifera
aaggcagtcttcgctcccttattaatgttctaaatgttcaggcgtataatacctaatgatagctctatttatacgaaacgtgtacgaaacctcgcacgattaaagattacacttctttgctgctacgctagagtacagacacggcagttttaaccgaactatttaaccatagccccctaacaaattgtattcttctcactataggaccactattatatctataaataggccctccatttgacagctcgatagggttgtcgcatctaatacgacggcctgttcaaatcaagacggccatgcattaacggatcgacgttatggaatagtgtagaacacagacttgaaggtacgattttctaacgtatttaaatatatctgcctataccaaatactatagactgtaatacatacaactcttgacatttcccattaattttgaggaagcaaaaaactagcgccatctagcggtatgagtaggataacc

SEQ ID NO: 13874 - DNA, 485 bp, Diabrotica virgifera
ggtgtatattaactacgaatctaattatgttctatattacctaattatctaatataaagttagattctatatatttatgtattatcgttgagaaattaaacgaatgaacaacgtgaaatattaaaaaagtattacattgacccaaccaaaattattatatttctttcaatacatattatcgtgttcagattatttttagaagtcattaaaatattttaccagtaaagttataagcgtttgtttaaacatacagactattaaattattatacttttgtcgattttaaaaccatatgttccgatttcatgtatcccattacttaaacaatcgcgaaataggaaataacttcgttgaaatcacaaaggggaaaccccaaattatctaaatacgcagtgagcgaattgacaacactgtttgagtctataatgttgtgtatatgaggccgtaacaccacaatactgtttaaaattatactcatgaggctg

SEQ ID NO: 13875 - DNA, 478 bp, Diabrotica virgifera
gattttcttcataataaatgaagaactgaagttattgtaaaaccagtggctggacattctcctgtcaagaagaacaaccgattaagcaagtgtgcagaagaaacaatgaaattgtgaaatttgttttaggttatttacctgtgtagattatttgaaaaaacatttaagagcacacactggagaaaaaccttatcaatgtgaaatctgcattaagcaattttctctaaattctcgtctaaatcgacataaatatatgatagttcatactcgggaaaaatctcacaaatgtgaaatcgtttaccactgtgtgtcatatgaaagcacattttagaacacacagtggtaaaaaaccttatgaatgcaacatttgtagtaagcaattgttgactgcaaaaacaaatttaaataaaaaagtgacaaagatgtgacagaaatttattgtcttcttagttttataccctcaatcagcttgtaaata

SEQ ID NO: 13876 - DNA, 477 bp, Diabrotica virgifera
ccattacctatattatatattattcactgttttccatagatctcagtctatatagctctaccaaatcaatataaagaaatgctttgtccattttatcaattagtgatataataagttgataaaatcatctactcaaaaccaacagatagttattttatattccatttaacccttgcctttgtcaagattgattgtaaaattttacaaatgaaggacgttatcatcgtaaaaagacgtaaaaatggttttatgtgtttggtaagttttattagtgttctaaaataatgtattgtctttcatttgtagaattttagaatcaatcttgacaaagtcaagggttaatgccgaaacgttgattgtaaatgaaaataaaatctaactatattgtaacgagttatatttatgaattttacacaaacagttgtttcctatgagctcaagttccatgatgtattattatgacaattcagcttagtt

SEQ ID NO: 13877 - DNA, 480 bp, Diabrotica virgifera
gcccatattgtcatattaaatccaaaaattcggtccgtgatcatattttttaattttataatttttttctgcgttcggattaccagggttcggattatcgacgctctactgtacatccttctaattgaaatattctgaactataaaggtaaagtttgtttcgcagtaaatggttgacttcaattagtgcggtcgtaaatattattaaatttatctgacttggcccattgtcaagacccattggcaagaccggtccggagcgataagcaatcgaggtagacagagttggtcttttgacaattaacaccgactagacgatactcctataataaagcaaaggatccacaaaatttacaataattacgacgacaaaaggaaaaaactgatgtaaaatatattgctttgccttatatacccgaaattaatgttttcaaatgagctttaaaataaattaaatccactttaattgctaagattatag

SEQ ID NO: 13878 - DNA, 470 bp, Diabrotica virgifera
attgataattgtcgataaatggttcaaattcatagtgtattgtgaacactattatctataatattaatatttaatacactattaataataatatttaacactaatatgtaatatttaatatcattaattattaaacacgtatgtatcataaccaagaaatttcaaaataaaccacagagaattaacagagacatggtattgcaggaaaacctttgtctagaatatgatattcccttataagagccgtaagagcttgtcacggttgaagagctatccaagctcgataattctacgaggtcatcgagtgtaagctaaggacagctcagcctcaggcgacagtcaggctccatttgccttctcccaatactagaacctctgttatgagcgatcattatttccctagcttgtcgtgaacaagaacaccaataataaccagacattaagcgtggaagaaaagtactaagtttaca

SEQ ID NO: 13879 - DNA, 481 bp, Diabrotica virgifera
gactcaccctgtatatataggtatggagataaatacttggcgtataagttctagtggaacagtaataaaataactatgatttttggaataatataattcaatgcatccatgtaaaagctgttgaatattccattgtcatatagttctgagctgttttaaattgattacaaaatttttcccggagaaagtgacaacaaacaagtatatcaaaagtatatcaaaaaatatttcgataaaatatgtgtactgtagtaagaacgatcgccatcatttaacatttatacaatagttttgttacaatatcgatcttccaacgcagacaatacatataaatatataaacacacctataaataaaaaagaaataaattttaataattaaagctttaatttttttcagcgtcctgtgtgatggctgcgtagcattgacacaagtgatccaggaccacttagaacaagacttgccattggtaagctttttg

SEQ ID NO: 13880 - DNA, 482 bp, Diabrotica virgifera
attgtaatccaagaggatataaagcaaaacaatagaaatacatgactaaaaaacgagtcaaaataaccaagctcaagtcaaaatgccttggaaccagtcaatggaaccagtttaaatttcaagataacgtcacgatgtttcatatttaactcatttggtcgactgcactgaactgaggtgccccaccggattgcatcgattgtgcaatagcaagcggtcaaagggattgcagtcgaacaaatgaattaattttcaaacatcgcgacgttatattgaaatttacactggttaattgcaaatcagagatctcagttcggtgcagtcaaacaaatgaattaaatatgaaacatcgagacgttgttttgaaatttacactggttaattgcataacatattaaaatataatgatatcattgtagttacataaatggtaagatacagagctacagacttgtttacaactgaaatatcttctatctttg

SEQ ID NO: 13881 - DNA, 484 bp, Diabrotica virgifera
gagcacaccgggaaggaagtttaacccttggaatccagacgtacactatggcttaactgtaaatgctgcagaaagaagtcgaccagagacacttcaagtggtacagcctcaacaggttatgcaaacagctactcccacagccagttcgaataatcccttcccttcaaatttagtagtggtgaaaactgcttcaggaaagaacatcgtgttgaaggttatatcccaatcaacggagattcccaaacagtacctactgaaatcgaagaaatccgccacacccgtggtagcaccgctcgtagaagtcgttaatgaagtgcctatgggaaaccaattgtcgttggatgaacacgaagtaattgccggtggagaagaaggaattatgacagaggaagatacagaaattgaaggtgtcgaagaattggaaacgatagaaggaatagaagaagaggaagtggaagaagtggaaggtatcgatgaatccatg

SEQ ID NO: 13882 - DNA, 483 bp, Diabrotica virgifera
  SmartBlast Evalue=6E-45; Info=CG7712 n=12 Tax=Drosophila RepID= Q7JZK1_DROME
tttattatattatttacacaaactacacttaaaaacaatcatattaactctaatctttgccgttcaagaattttcccaagaaatctttgggttttggttctatggtatccttgaagtaagacataatgtgacccttttgcttccaaatattcacaacttctttaagctccatttggcccttgataactaacatatcaatcagcctaatgtctttaatgtcatcaaacttggtaaattcctgccttagcttttctcgacattgctcaacattttttggaatatcataattctgaacaatgtaagggagctgtctgtaccaggctttatataagtttaagactcttttccgtgcttcttcacggtctaaagaaagaataggtttaacttctttaacacttcgtctgatagcttgtgaagccatctcaaatttgtattttctttttaaaaatctgaaattagtgatgtaacttaacctcacacttt

SEQ ID NO: 13883 - DNA, 482 bp, Diabrotica virgifera
cctgaatctcgccgattctaactctgtcattcggcaattaaacaacgatagtggactaagcaatgttgcactgccttcagtcgcctatatctaatcaaaaactggacgtattgtatgaaaaaagaagcaagacccttcaagaaacattaaagtatggtggttttgaaatcctttaagtgacctgcacgtaaacagttacattcagattattaacgccaaaggcattttcgaaaaaaaaaaaagagaaaatggaggttaaaggaagttacaagaatttaaaaatctgaaaatctcatgcaacttggcaacgttgcaagagatcttacattatggcaggaataaactatgtgttaatggaataagtatatcaagaacggaagacttcataaatggctatgagattttcaaaaggcgttagaaataacagatctatagagtaagctcaattcttatatctgtatcataaaatatcgcgtgcagta

SEQ ID NO: 13884 - DNA, 483 bp, Diabrotica virgifera
  SmartBlast Evalue=2E-36; Info=Kynurenine/alpha-aminoadipate aminotransferase mitochondrial n=1 Tax=Camponotus floridanus RepID=E2AUG1_9HYME
cgttaacattcagaggtttaatgatggcctccgttccagcataataaggattttgcaccagcatactatcattttcctccaaaaccatctccagaacacgactcattccatcttgggatccgttagttatcagagtttcatatttttgccaaccaggagggttatgtacatcttgagtaaaggtcttgaccgatttcaccaacgctggatagccttgggttggaatgtattgcagagcggaagctaattcttggccgacaatgtcaaacttcgatccatcttttaggtttacagtaatagactcaaacggaaaagtgatttcatttggaactccttcggcgagtgatatttgttccttggggccaccatattgccgtttagttatttctcttgtcaaagccggtcttcttctagccgatttcgagttaatgaagtaggaatagtcaataatagtcgacattttcgtatcttcgatcttcgtaa

SEQ ID NO: 13885 - DNA, 475 bp, Diabrotica virgifera
agacggagtataggtacatatcttcggaaagtgaaaatctcactggaataaaacaattttaaaagattactaaaaatcatatatgtaataagaacgcaactattcaaccaaccagagccaaaagacttgagaagcaattgccagaaaacttggttgaattactcaaatactcgagtccaatcgttcctcttgctccaaatttactaattatgatttgtattgattgagtataatgtaaatttcaataaataagtaaatgaaaactatataaagaacagcctaaatgtattttcgtaccaacgcaacgcttgacaattttgaaggtgtgagaggagttattatttgtctgttgagatttttttaaattagaaagcaaacattgcatctctaaattaaggatacgggatttcatttcatattcatagtctagaggctagagaattacaaaagtcttcttatttttctaatggcccta

SEQ ID NO: 13886 - DNA, 484 bp, Diabrotica virgifera
cgttgttgtagtagacaagtatttaaaaaattaagtgctgttttcttgttttttaccatgaagttcttactgccagtttgttttgccatgttcattgcatttgctattgctgctgatagtatagaggattgcaagtgttttgctgaatttaaaccagaaaaagaaggtgacaactggctctgcagaggtataaagaatcatagaatatattcatgtggtgaagaacaacctcctctttgcagatgctacaaaaatggaaaggaaaccgttttggatattggtgaaaccaactgtgtgggtacaacaatttatgacagtttacattgtgcaccaaccagtgaatggaaccaatattatagcagacatcctcagagaagaatagtcaactaaatattgtagtatatacgtttatcagtgccgtgaatacaaaaatatatgatatccaaatttatgtttcatccaaatcaacattaaacatttttga

SEQ ID NO: 13887 - DNA, 484 bp, Diabrotica virgifera
gattcgcctatgttggataataaaaagttaggtgctttaacaacgagacatgttttttatcaatacagggtgtttttaaaaaattttggcaaagttcaaggggcaattcggcttgaaaaaacaatgacagtccgctactaaactcatgtccgcaatgcttcgttttcgagatagagggtgccgaaatcctctgacaaactgacgatttatttcttgcttcaaaaaccggttgagatatgcaaatgcaatttggtgggttttatgatgtacccattgcacatttcctgacatagaattaagaatttaacattcaccattggcgcgcacacgggtaatataagccatcatatcacccgtatgcgcgccaatggtgaactattaaatgctcaattgtatgccacaaaatgtgcaataactacgtcataaaactcatcaaattacatttgctattctcaaccggttttaaagcaataaataaatcgcc

SEQ ID NO: 13888 - DNA, 480 bp, Diabrotica virgifera
  SmartBlast Evalue=2E-12; Info="Putative gag-pol polyprotein, identical n=1 Tax=Solanum demissum RepID=Q6L3N8_SOLDE"
ttaagattaacaatgaagccaaagtatatgaaaatgagaatctagcagcagttggtataaaggatagaaacaacacatataaaatgatgtttcgcacaataatatataatgcatgtgtgactacagtagatgatttaaagatatggcatgaaagattgggacatgttaataagaaatatttagaagaaatggtaaaaatgaacttaatcaaaggtgttacagaaaagaaacaagattttgtgtgtgaaggttgtttgatgggaaagcaacataagaagacttttaaagaggaccacacactaagttacctcctggaaaagcatattcagtgatgtttgtggacctatgcaaactgaatctgtacgaggagcacgttactttgtaacattcaaagatgagtacaccgggtatagagtagcatattttatttcgacataaagcagatgtactagattgtttcaaagtatataatagaaaatt

SEQ ID NO: 13889 - DNA, 483 bp, Diabrotica virgifera
  SmartBlast Evalue=1E-34; Info=Diapause-associated transcript-2 n=1 Tax=Leptinotarsa decemlineata RepID=Q8IT92_LEPDE
ggttgaataattctaatagttcttcaacagtggtgtggcaagcttcatctacaatggcagtaataattttttgtcccaatactggaaggtctttggattcctctggtaagcagctagtgatgaggtcgatgagtggtttggagcattttgcgaggtttttcttaacaagtgagcagaaagtttctgatcctaattcaatgtcgtccatacatttgtcgactttttcaactacctcgtcaattttgtcttcaatatttggacacttgtccttagctttttcggccatttttataacatcgaggatgatggtgctgttgaatcttttgttcaacaactgtgcaatttcggcaatgtcttcttctgaggaagagctgctgctgctaacggatgcagcatgggtagttccaatggcaactacaaatgcaaacaacacgatgaatttgttcattttggcttttggaccagtaactgaaaacaatgaac

SEQ ID NO: 13890 - DNA, 480 bp, Diabrotica virgifera
  SmartBlast Evalue=6E-28; Info="LINE-1 retrotransposon-like element, putative (Fragment) n=1 Tax=Aspergillus flavus NRRL3357 RepID=B8NZ53_ASPFN"
acaaacagtaaataggaatgaagaacaatcagagccaccctcatacaacgaagtattggcgaccataaacagattaaagacaaggaaagcagcaggaccagacgacattataaatgagttcttcaagaaagggggagaggaactagcccacagaatccacaagctgatagaacgaatatgggaagaagaacgcatgccgaacgactggaattgcggtctgataacaccaatctctaaaaaaggtgacaagacgaaatgcactaactacaggggaatcacgctattaaatacaatgtacaaaatattaactaatttgatcagacaaagaatagaaaaagaaacgagaacaaaaataggtgaataccaacatggattcagagaaggtaagtcaacaatagatgcaatacacattgtaacgcaaatcgtgaaaaaagttacgagcacggaatagatctacatatactgtttattgactacaag

SEQ ID NO: 13891 - DNA, 482 bp, Diabrotica virgifera
ctatattattcaagtgcgaccaagtgaattattagtaaaaagtttcattgaattttcaatcttggactttgaaagaaattttaaatcaacaagtaaaaaatatggatatttttccacacctatttcaagacaacttttgggcacctaactgtcctggccgtggtgcagattctggaaatcttgtgcaaaatattacagatgtcttaaattccatcgcaatagctaaagccatgttctgtccagaatatgacatcaacaaccaagatgtgaatggtaattctgaagtgccacaacctagtacctctgctacgactgacaaaaccaatcttgaagccaatccaggcgacaattttaaagaagatatcttaaattccattgcaatcgctaaagcaatgttctgtccagagtatgacaacaatcaagatgtgaatggtaattctgaagtgccacaacctagttcctctgctacgactgacaagacc

SEQ ID NO: 13892 - DNA, 484 bp, Diabrotica virgifera
  SmartBlast Evalue=2E-20; Info="Aldo-keto reductase, putative n= 1 Tax=Pediculus humanus corporis RepID=E0VK94_PEDHC"
tatctaattttcttaatgattctttaattgcatcaaatgctttttctccttgatcagatggatataattttgtagttataaatacatcctccctctttaagttatgttttggcaaaagttcttttaaggcatccccaatttccttttcattgtcgtacatagcagcagtatcaaaaagtcgatacccagcctctagggccatgtccatagcttttgagacaccatttccttttaacaaccaggttccaaaccctactgcgtgtaaattggctccattatttaaggtatatttcacatttttcagagacatgtttgtatgtaatgtatattcaagtacaactaaaactaaaaatacatctgtacttgtatgtttttacttaattaaagatgagttaattatattttcacgtacgtagatgttgatatttgttttgactaaaaagttatgagtcgtgctcacctacgagtatcttttcatatcaag

SEQ ID NO: 13893 - DNA, 472 bp, Diabrotica virgifera
gcgctgatacatacataacttgaaagattagcaacgaactacatactgtctgtgtgcgcatgcgcccagaattatacaatttcactctcgatcgtaaagaagtataacttcaaaaacccatttgtaacatggctggatcagtgtcccgacaaaaaccttatttacctggactaacttccaggtgaactgaacagaaaatccgacacttattcaaaacaacgactggtttgtatgtttttcttgggattacagaaaagctttcgatcttgataacatgatggacaactacaactgatagaagctctgcaaaacgcaatactggatttgcaagtaaaaaataacctatattgaaacatgaagcacatattcgaatagaataagtcagggtacaataattgctaacaggtcaagtaaaaaatctctccaaagaattcaaattacttaaagaatgccaatatggatgtatacagtt

SEQ ID NO: 13894 - DNA, 480 bp, Diabrotica virgifera
ggttggtagagggatagatttgactgtaatatattaacaaaacattggcaggatcttgaggggattagtacgaaaacacgacattaaaccgagaaaacgaaattagttatatataaagtgatgttattttttattaattgtatagattttattgatatagggttattagatgttgtataggatgttcaagaacttgtagatgtaaaaattgggtgtgcaattttttagataagattggtcggatatgcaatagttgtgatctgattgtgaaaatttgtttgatttgtttgaaaaattgaaattgtaaaattagtaatttgctaaaatttttatattaaaagtgtcaatcaataaaatcattaatagctaattcagaattaaagtcaagtgtataggtaatgcaatagatgatatattaaatttattgtaatataaagttataattatctgtagagcaatgaaactttatggaatataact

SEQ ID NO: 13895 - DNA, 483 bp, Diabrotica virgifera
cctcggactgtgtttttacatctacgtaaaaatttaccaaaccggctacacaatgttatttgttttaatactcgtaactttcataatgagtactaacgcagaaggtaacaagaactgtacagttcgtagacataaagactccgatgttgacatttactgctttccacagcaaatgcagctcgatggaggggaaatacctctagctggtgatgtgacagctgatagaatatttctacatctggtagaagttaaagggaagattgtggagacctctttttccaacttgaaagaagtcactcacattttgttatatggctgtaatttgactgaagccatttttccagaacttccaaaaatctactacttagaaatggttcgaacaatcttaccaactatatcaaaagaaacctttaaaaatttaaaaggcataaaaagaatggggattggtaaaaatgaggctaaaatccaagatggcgcctttga

SEQ ID NO: 13896 - DNA, 474 bp, Diabrotica virgifera
tgtttgtgacattacagagaggggcaaaattataaaataaatttattttcttttaaatggacgattttgaaggaaaatcgcgaaaggggtgattttaaattaagtacaatttttttagcatatattttatactagtgacgtcatctatctgagtataataacacgtaatcgatgattttttaatgggaataggggacgtgtgatagctcatttaaaagttagttcaattctctattctacaataattctctaatacaaacattaacatcattatttatacagagcgacaaaaaaataatttttgaatttaaaattaattgacgcaaaggaagaagcaatatgtaatttgtttgactcaaaatagcattgaactgctgtgagaacgtagaaaaaatgtttatttcacaaatatttttttttttgtctaaactaaatctcgaactgcctcttggcagtttgaacatttgatttaag

SEQ ID NO: 13897 - DNA, 482 bp, Diabrotica virgifera
aagtcgattagtaggctattacttatataaaaaaaatagagctaaaaggaactacaacgttaaaggggtttttattgtttcatatgttcaatggaccctcaactataaaaaacctcggagtgctactgtttaaaggagtgtgcttttgagaaagtggcgaattagtccctttggtgttaccagggtagaccctggtgaaagagtagtacttttcgaacatatacatctacagaaaagttgtttaaaattaaatttcgtatcaaaaggtcactttctaaagtcaacaatttttttttttcacaaaaatatattcataacacgaagcaaaaaaaaacacagaacacgatttggtttttttgccccagttttttcgcaaacattgttctataacttcttttagacagttttaggtgtgtcaatatgcaatggtacaattaatagaaagaaaaatcaattactattgaaatgatctattgtagaag

SEQ ID NO: 13898 - DNA, 479 bp, Diabrotica virgifera
atagcgtgctaataccccattaaggcatactgatctaattcacattttaaaaacagggattctaccgtccgattttatttatgggtttttagtctttaaacttatgagatctactgcacgatttagttttatgtttattgtatgtagtgcagtgcttaagtaaaggtctgttgaaataagttttggtttgtgaaaatacttttttataatggataaatggtaaaattaaaaaatgaagctaatatatatttgtttcctaatttaaaaaaaagtattttcattgctattacttctaccattttcaaacgctaatgtcaacggtgtaaccaggaaaatcctaagggcggggggttacaactacatactggagggtttctaggggatatgaaatagtaatggtgttaagcgtatacctagggctcaaagtacatcccaatgggggggaaaatccccaaaaaccccatagttacgccactggc

SEQ ID NO: 13899 - DNA, 483 bp, Diabrotica virgifera
  SmartBlast Evalue=2E-26; Info="Tyrosine-protein kinase pr2, putative n=1 Tax=Pediculus humanus corporis RepID=E0VHV9_PEDHC"
taaacatacgggccacgtcggtttagacggagcgtattttggtgatctcagttggatggatggctccaaaggaaactatggaacagttccaacacaagttgtggctccttaccgacctcacaaagacttagaagctgctcctttacttgaaggtgatctagtatcggctccagttcctcttcaagaccatgaatatcacgaaatcagtgatgaagaaaatactaacagtcctagtttagacttaggtccatctttaatggctgaaatggaaatgatgttcagttccttaggtactcaaaaccattcgttggatcatgaaggatcgaatagaagtaatgaattgcgtgaaaaattaaatagtaaacctaggaaacaagctactgtgaaaccaatttcagcacacgatcaaaaaactttagataccgctattgcaatagcaaatgaaataacatctcgatcaatgtcagctcctgttcctactac

SEQ ID NO: 13900 - DNA, 482 bp, Diabrotica virgifera
agtatattcttatattttgtagacattgatacatttatagacttaatcggctactattgtcgtaggcatcacctttttcaccagactccagaaaataattcataactcgaaaagtattgtcgcgcaattcatgatgatcacttttttgtcaaactttcctttgggataatatgatgttggtgcactccggttctcgtttttattaaatttttaagtgttgtttccttggtggcatttcttggaatattgcaataattttgtttgtcttgggacttatcaaattttttcgaaaagtatcttgccataagactttgtattaatttcttttccttattattaaatggcacattcacatttattgtaccattgttaccttgcactgattctctcaattttttttcgtatttaataatgattttcttgtacatggctaactcatcgatatcgttgtcatcttctactctacttccttctgcgggtag

SEQ ID NO: 13901 - DNA, 482 bp, Diabrotica virgifera
gtggctgccattctgtgcctcctagcaaagagaagaaagaagacaacatcgcactccagcggctctatctatagcggaccctacactaatacagcttatagccatactagttaaatagtttagacagtagttccaaaagcaacagttagagtttctagcatttattttctacggaaagcgtacttaatttatttgaaatctttcaaatgattcatgaactctaattgattgataaaatatttcgtcaacttttagttatactgccatgttcgttaaattccaagtttttgagatagctcaaagtgccataaacttggctgatattgctcacatcgttttctgaattattgatgtcagtttcataattaagaaaaggatgatgcttctgctgtacacatatacacgtcataagataccaataacttaatatgtcatgaaatttttgagaagactatttgtgttctcattacctcacctacgat

SEQ ID NO: 13902 - DNA, 475 bp, Diabrotica virgifera
ctacaaagaactgtaggtgacaagagtttctgtgccttgggaaagaaactaaacttgtgccctgtgtggacctcgctgacatccacagcagtaacacaagtgacataccagggcagacacagccttgtcacctcgttgcctaaccgcgagcggttctcaaaaactaaacaaatcatttgagctctaggctcagcagataggcatctgcctaaactccactaaacgcctagcgagtttcagggaattttgttggcaacggttcagcaaaaatgaggatttagaatctccattctaaatacctcaatgagacaacgtaatcttaacatttgtctcaagtcgagatcggtaactttatgttaaacgtctcacagggaatatactcacttcaacaactagacctaaaataaaataagactatcaaaggggtatacaacaacaacagggactaaatcaaaacaaattcatacaagggggt

SEQ ID NO: 13903 - DNA, 483 bp, Diabrotica virgifera
tctacttcttaaaatgggacttttaagatatctgtgatctttaacatcggaattagttctttgcaagatggttttttagtttctgtgtgaagagattcaggtagcaaaattattacgtaaagaacactcgtaattaacagtatcgttgatattagatataccatcgtataactagtagcgtacagtacgtaagaagaagcgagacttgcaagtatattagcagcggacatcgatgcatcataaagtcccattctaacaacccttgtctttggagttgttgtatctgccaaaatcatgcctgctataagagatactgtaccaaacgatccagtcaagactgacggcattgatgttgcaataaaaaaccaggtgaaatattttcaaaatgcgcaaccaatgtatttagagcatttgatactgtaagccctgcaatacatagaactaagaatggtttcgtccttattttatcagatattattccaa

SEQ ID NO: 13904 - DNA, 483 bp, Diabrotica virgifera
attatataaaaccacaccaccagcttacatcacttctcagtttaatttgcaaacatgaagtcttgctttgtattggccattttagtttgcgtcggtcttaccgtcagcgcccaaaagaatgatgacataagtgacgaattgtgctatgcctgcgaagaattggcaaaattaatccaagaaagcaaacaaaggggaattccattggaagaagttgacgaaaaagtgagaaaattgtgccatcttttaccaggatttttggaagtattgtgcgattatcagttgattccagacatcgaccaaatgtacaaccagacggaagacatatctcctagagatcaatgcgtaaagttggaattgtgtaataattaaatttttgttagaatattataataaaaaactcaaaattaaagttagaaaagtgttgttttgttatgaaaaaaattaacacaaattgtgcttcctatacatattattagacttagg

SEQ ID NO: 13905 - DNA, 483 bp, Diabrotica virgifera
caaaagatggactgtaatttaattgataaacaattactatcattgtcctgccgtggggtcacaatatggtacattaattgaccttgattattgtgatgaatagcatataaaaattcagtatggattttatttaacccatgcaagtgataacaattatagtttacaaattcaatatttaaataaatcgaaactaggtgaaatcaaatcctgtatattggacatatgacatcaatatcaataggaaataattatattgatattaagaaactgcgtctactcactttgaaatcggctgcccacatcaacgatttttaaaattccaatttttactttatgtttatacctatataattagaaaataacaataacatgaaaaaccatttgaaccgtaacaacaatctacaaaaaattggtgcaaacgataatgaagatgaggatgataatgagttttatgatgcgttagctgaggagggacattcttca

SEQ ID NO: 13906 - DNA, 479 bp, Diabrotica virgifera
  SmartBlast Evalue=7E-15; Info=Dual specificity protein phosphatase 12 n=1 Tax=Harpegnathos saltator RepID=E2B2B0_9HYME
gattgatagtaactataaattcaaattacagatcagatgtatatatatatataaacacgcaaaaatgcttggctataaaatgaaaaatgtaactgcaatattaggtgacgttatatataaaaataaataaaatctgctgttgatattgtagttcattagttttgaaaaataagcagtactaactttaatcttgtgccaaattagttttattgttaatattaatattttcacccaaataagagaaatggatgacgtgcaactgggtcctgtgagtattagcatgatagaagataatttatatttaggaggattggcagctgcgaaaaatttggaagttttaaagaagtacaacattactcatattcttaccatagatatatgtccattaccaagaactgtaacagaacaaagaaatttagttaccagatttatacagttgtcagaccaaccaagagaagatttgctttcatattttgatg

SEQ ID NO: 13907 - DNA, 480 bp, Diabrotica virgifera
  SmartBlast Evalue=6E-35; Info="Spectrin beta chain, putative n= 1 Tax=Pediculus humanus corporis RepID=E0VWK4_PEDHC"
caatatcttcggcaccaatactttccaggcgaacttttgtgtgtaaaaaagccaaactttttgttgacgttttcgattttatgtactcgcattcttccattatttggtttggctaacttttctccagatattatctccagaagtttcaatagttttttgccgtctgccaagtcgacgaataaatcttcgacctccattcgggccttctgtaaaaatgaattcatccatttggtaaaggttttcttctggatgtgaagacgttcttcttggaggactcgaatacggccctgttcgaacttttgaacttcatctctttgactcatattgtttcttctctgatagcctggatctggcttaggttcataatgtatgctcgcaactaatgattattcctgactagcctcaatttcctgacatttcacacactttttaataaacacaaaaattacttattcatgtgaaacggtccgtttggtctac

SEQ ID NO: 13908 - DNA, 477 bp, Diabrotica virgifera
taatttgactcaaactttttaaaggcggtaagcagaattgctattttgttttttgttcaaaggttgttcgggttcaaaaattgcagtttttcggttttttgagggttcaaccgcgtttatctcgcaaaacaaaacatttttttttgtatttttgggccattctaaccaaagagtgttcctataatttttttcgtgggatgcatagttttcgagatgaacgcggttgaactttcaaagggtcgaagagttgcagtttttgaacccgaatagcttttgattaaaaataaaatggcaattctgcttaccgcatttgaaagttcgagtcgggttatatcggttttgattatttgtattgctggaaatttattgttttattgttgaaaaagctataaacacctagtgcttgagtgatgttttcaatgatttctcatttaaaattgaacgagtaggtagaagaggtaaaagtgcaagcggggc

SEQ ID NO: 13909 - DNA, 478 bp, Diabrotica virgifera
aacaaattatacaataaaaaatattacaataaaaattattagaagaatgaagacctagaaaaacctaaaaacttttaaagtgttatgctatctgatagcacacatgaagatggtaactttctattagatctaaatcatttatcagatttatgaattacagtgaactatattatgctcactataagaagaatatgagtcacagatgccgttgaaagaatagccatggctaaatgtgctgtgtcatattgccagattgacagatgatagatggaccaggaaaatatctgtgaaatgcaatttggattccgccattccatgggtacacgtgaagcacttttcaccttacaagttctacttcagagatgccgcgttgttggttgtgatgtctatgcttattttattgactacgctaaggcatttgaccgatgctttatgcaagaggtaattcatttataaagtaatatcttctattattttt

SEQ ID NO: 13910 - DNA, 481 bp, Diabrotica virgifera
tcaatacaatacaaataatgaataaagataagtagaatgatttcatttcaaaagttttataaaattcattagtttgtaaatcttagaaagtctaattaaaacatcatgaaatgtctaagacctaagatattatgcaatatattatcttggtttttcgctttttaaacgattttttcttatcgtcatcgtcacttttggtactatgcaagtgaactagattcatcatcatcaccatccagccttctgcatccaaagctgaagataggtctcccataatttcttccagttttgccaatcttaggcttcctgcaaccaattcccagcaatccccaattccctagaactagattaccaagaagtaaaatatatgctcgaatgcaccgttgctaaccaggacctcgatttttgacccttcgcttcgttattcaacgtattcgcttcgtatctgtttagtgtacagatagcggatgatcgataacgg

SEQ ID NO: 13911 - DNA, 478 bp, Diabrotica virgifera
  SmartBlast Evalue=1E-40; Info=Nuclear pore complex protein Nup93 n=2 Tax=Culicini RepID=B0WEZ2_CULQU
attagctatatcaaatagatcaatagcttcttcaaaaagaccttttttcaaaaggttttctgctgttaattgagcaatggtttcacacgtaatatttgcatatgtaaactgatcaataaggcatttagttctaataccattactttgtactttacctaaaatcagttcatattgtttagtttcgacagctagataagcaacactgactttaaatagattttcaccctctgggcttgtgtagtttctgaggaaatagaagtaatgtagtgcttcatttggacaaacaagttcaaatttcttaacataaagcatgacaaatctaggaacgtttaatctgcatgatggtttttcatccataggatcaacactcaataacggagcgcctgtatctagtgggcctccaagcatatatagctcatttaatgctaaagccatatgcaaaccgtggattttgtacttctcagttctagacaaaaac

SEQ ID NO: 13912 - DNA, 479 bp, Diabrotica virgifera
  SmartBlast Evalue=1E-19; Info=Lethal (3) 87Df n=8 Tax= Sophophora RepID=Q9VG00_DROME
tgtgcaaaagggaatagcttttttaaatatttttaaagaaattagtatattatatcattaagtttaatatgtcggaacgagaggataagagtcttattatatttggaagggatgtctccaaaataccttgttttcgtaacagtttgctctatggaattggaggtggacttttttgtggattatttagatttatgtttacaagtcatacactaaaatctgtaaacttctctgtttattcattttcttttataactctaggctattggattcagtgccgatataattattcaaaaactaagtttgaaatgatgcgtttacaggaaatgttacaaaaccatgcaatattagaaggcacacaggaagcagaaatcatagaaaaggaattaggaacaagaccagtagatgtgtaactatgttattgttaatatagatagttttagtttattgttttactaatataaagaatgttaaagactgtt

SEQ ID NO: 13913 - DNA, 479 bp, Diabrotica virgifera
ccgacagatactctgaagaaccacatctttacgaatattccaaaatgtaaaactcagtattcaataaaacatgataagaagaaagatgaaatcagcaaacaattggcggaagtacaagccaaactttttactttaaaaaataaattatggttcggtgttggcaatggagatacaactttaagttggggtaaaagaagcttcgtaaatgatagtcacaagaaatcagctcaacaaaaagaagggaagactaaaagcgcaaacctgaagaagagccaaaaaaagcgaaaagaagtctaatttgaagatgaccaaggatgcagaatctcagaataaaccacctgagaatggattaagacggaagacagttgtcgacctcctgcaaccacaaaataataaggaaaaggcgaaactacgtaaatccaggagtttaccagacgcctcttcattcgagaacattgccaaaaagttgacgaacaccg

SEQ ID NO: 13914 - DNA, 482 bp, Diabrotica virgifera
agtttttccatccgatgtttagttcgcgaaatattcgaccgttcccctacttttgggacacggttgcatcataaatcttagaacaagaagagctttttatgaagaataacttttatttgtcaaattaaaaataaaagagttataaatgaaaatgttcttggtatccataatttgagaaaaatcttcaaatatttttttccattagaaggatgtacacagacacaatactggctagtgattttagtcaataattttgccaattcgacaaaaaaataatttctaaatagttaataattattactaaataattagtaattttgccaatttcggcaaaattctcaaaaaacaaaaaaattaccttctacaatcactatccagttgtgtcgagtttagggaacgactaggtatacataatattttaattttatagcaaatggaacagtccatttatcataaaggggaggccgtatttatactggtat

SEQ ID NO: 13915 - DNA, 480 bp, Diabrotica virgifera
gtcccatgtttagtaaacagataatttggaagaatcctgtttagtgtcaacgccgaaaatgtttttgaatcgtgtgttcatgagtaatattatgatattatgttgtttatttatggcagatcaataaatggagaggcataatacctactaaaattctttcaaaatgttttgctggaatttctcgtcgtatgagtgcatgttactctatgaattcatgtgttcgcaaaagtggtggttcatttaaaacatgtgttttcatcttaaaatatgtaagtataattcgtttaaaattatgccatatttcaactacattttaaaaaaattatagtaaacaaaaatagtaagtattaggttggattattttaaatactgtaagacacaaacgagttcttattcaccagtgcgtaacatgttgccagattatttaattttctgaagattaaaattcaggtatatggaaaccaatgtaatctttttttt

SEQ ID NO: 13916 - DNA, 480 bp, Diabrotica virgifera
gctcctttagtattccacagcagttaacagcgataatcctctacaagtatctgcctaatactacctttcacggtcgctgccgtgaagagcggcaacgttgtcaagaaaattatcatttcatttgcatggggctatacttgtacattgcatcgcatgtttgaaatacgctgtagtgatttagtttcacaaatttgtatatattaatattccgtgtagcttatttgccattttatttgaccactagaatattcttagtttttctcaacagcttacaaagaatggttaataatagaaaaatataattcatcatgcactggctgatgttacgctgaccaagaaggtcaactcataaggtaccggaatactgaggtatttaagggaatgaaatgcttctcgacgccctgacaggacgggacccatccactccgcccgttggactcgaacctgtggttggagtgctcttcagtactggcgaggttg

SEQ ID NO: 13917 - DNA, 481 bp, Diabrotica virgifera
ccagatttaatgcaaatatgaagaacctaataatttttttcattttgggcttattagtctgtcaggtatttacggcagcaatagaaaatggaaatgaaaggaagtacgaagtgaagcgtaatgttgatgctgtaggcactttgaaagagaaaactgtagaggttgtgcaaaaagtcaagagtggtgtaaacttggccagatgtaacttgcacggtgtgggcggcaaagtgttacctcatacccacctgatcgatccatgtgctggccaagaaaatgttgaaataaatcacgttgacgacaatacaggaggcgaacttgtagtgcaaccacaacccaaacccctgataagtgaaaataaacatgaatgtccagaaggctttgtcgccgataggaatggcgtatgcagagaggtattctaatatagcaagaactatctatattagaataaacagtactaaaaaatatgaataaagaattactt

SEQ ID NO: 13918 - DNA, 470 bp, Diabrotica virgifera
ggatattggtttttgaaaaacttattaaaccatgtccagatgaaattctataaacaaagcaccaatgttcttgaagtatctaatacagcagctaaatggatacaaatatcgcctaatatgaaggaaatatcgacttggtatatttattagaaccgatgaataggaagcgaaatattttaattggagctaccatgaagcacactgaaatgattcgaactagtattggaattaccgtagtatagttgtttttccctatataccaattataacatttcatatctaaatgatggtgctaattgtagaaggattgtcagacgctattgataatgagggtctttataatataaatatctaagagaaacaggaagattaagtcagttccatatgtgatgtgtttgctggtgctgcatttcctttcaacatctattttactgctatcaacaaacattttcaagaggcagatgtgttat

SEQ ID NO: 13919 - DNA, 480 bp, Diabrotica virgifera
  SmartBlast Evalue=7E-41; Info=Myotubularin-related protein 13 n= 2 Tax=Formicidae RepID=E2ADV6_9HYME
agtggatcgtcagcagctaagagaagagaatcgatactcaacgaactgtctgacatgccccatgatctatgcgaaaatgtaggtgttgcgcaaacaatcgcagaaaggtatttttcctgttcaaatgaagacgttgtttctgtagatgcagccggtgttgggtgactcttcaacatacccataacacttttaccatgatgaccagcccctctgagcagtaacgctttggttcgtggatgacgccaagtaatgctaggaatgcgaccttgacggtaacatcgacagaatcttcgaatgctttcatcagtaacagatgcaggtaccactagtaacgcgggataacttctacataccatatacaaataattaacagaagttattctaaactgttcagccactttattgttagcagaaccaccattattacatatacccaatcgctgccaatctctaacataactacgctcttgtaatctttcc

SEQ ID NO: 13920 - DNA, 477 bp, Diabrotica virgifera
  SmartBlast Evalue=0.000000004; Info=Endonuclease-reverse transcriptase n=1 Tax=Bombyx mori RepID=D5LB38_BOMMO
ggctcggtgacctctactcaccgtcaaagcacttccgcttcccaatgaaacaccctgtataaaccttaaaaaacacgtttcacaactgtttttgaagttgaaaaatgttaaaaaaatcacaattccacagagataaagaaaacaaagagaagcagaaggctttaacagcatctgtgaagctcttatatagttatttacaaaaagtactttcagtatttcagttccagtgtaaaataagaatgttcaattacattctttcaactctttcttcttcttggtgtgtttatccgtgacgaatgttggcgatcatcatggcaatcttcactttatctgcagcaacgcggaaaagctgcacagatgttgtgttgaaccaggttctgaggttctttaaccaggacgtttctctttttcctgaacctcgctttccaaatatttttccttgcaggatggcttgtagtagggcatatctggattcat

SEQ ID NO: 13921 - DNA, 482 bp, Diabrotica virgifera
ggagaaggataatgatgatagaatgaaaggtaaaggagcgtttattcgaatagaaatatgaaccaaagattcataggtctattggtatttacaaagtactatttattattttataataagttcaatgtctttaagtagataatttatgtatttgtatgtagtatttttgtgtaatgatttatccaagctagtcgctcgcaacggcacaacagcaaaaattaagtgttggtaaatacgttttgtgccgttgcgtacctgtatttgtattaaaagagagttgggggtgataaggacgccatctcgccttgtgatagtgtactttactaggtagatgcttgtggaactgactgatcgtgactaacgatttaaaaatggtgaccgcccttgccactcaagactctccttatcctcatttgtgtgttgtgtttagtttccagttttccaaaattggcttttcttatagttgagtggttttgctcgaa

SEQ ID NO: 13922 - DNA, 480 bp, Diabrotica virgifera
tcttactagtatcactgtcacttacctcaatctttctttctgctttggacgttactttactgtattcttttttcctatctgttttgctatcagttttactgggttcctttatattcactttagtactgtcagctttaacgttagtactatcaactttaatgtgttctttctttacagtatcagatttagtagagtcgagtttttttgttacggttttgacaggtacgatttcctcagttttcatagtagcttttacagatggagtttctattgatttttcaggtgtaacattgacttttggtatttttcactttttctagagtgttcaagctatctgtcgttatagcagcctgcagcaaactttttaactggaagttcagaatcacaggttcagaaggactagaaggtactggcgattctgtaggcgactgttccactgttttgggagatccctccagtgaacttggacttgcttttgca

SEQ ID NO: 13923 - DNA, 481 bp, Diabrotica virgifera
gcaacaaccataaataatctaactacagctgtgccacagccgccatattgaataatttttgacatgtcatttgaacatccaatcagaacaaagttataatgcgcatgcgcccggtcgctaggttttcccatataaaaatttaccctctatcgccggtaaagaagtataacttcaaaaataattgaacgtattaaatgagcgctgaaagacgtatgtggcgccctctgggtaatacatcatttttggtggaaaatttagatttctcatcccatgttgtcccatgcctgtcaggaaatattcaagaataaataaaataaaagtttaactttgacaccctgtatttcggttatatcaacttttgtactaaggtaagttagcttaaatcgacctattttaacctcaggaatctaaggttaagctatggcccatggcccattctttacaccctgtgcctatataggtacgtacatattatattata

SEQ ID NO: 13924 - DNA, 481 bp, Diabrotica virgifera
actcatctcatatgaagaccctattaggaatgttaaatgtccattaaaaactgtctgctcccattgttttataatataccgagagagttgtgaattttgactgatatttcttttggtcaaaatgttttaggaataatttcgaattgtctcatattgtggtaaactgtgatttattgaaactaaaaaaatcagggaccccctaattaactgattcattgatgtttaaaaaaatcaggggcggttttaaaaaattagttctttttgttcacacaacaaatttgtggatttcatttcgaaaatctgctacaatttttaattttgatttcgttgtctttttagatttttgtgcctaagttttattaggtgaattgcctattattaagtatttagagttaaataatagacttattagagtttttaaaaaccatacacagggtgaattttttttatgaacaaaacgaactaattttttaagaccatc

SEQ ID NO: 13925 - DNA, 482 bp, Diabrotica virgifera
  SmartBlast Evalue=3E-14; Info=Insulin-like peptide n=1 Tax= Tribolium castaneum RepID=D2A273_TRICA
tagttttaaagatgcatcttcaatacacacttatctttattttcattaatctctattgttttacctgctcaccatattatgcaaataacctttcaaaacgcggagaaaaatactgtggcagtcgattaacttctatgcttaatttggtatgtcgaggaaggtattacggaccaagaaacacaagaagtacacataacgatgtaatgaacatggacagtgactttgtaaatagcatagactcagattacagcaacaacgatgtattatatccttatgtttcaaaggattctgtactctctcttcttcccaataagattcgaaagtcacatggaattgtcaacgaatgctgctataatccttgtacggtggataccatgaaagaatattgtgattactagatcaaacgaactttgtgaagattgtttactaaaacatttatatcaagttattttaattaatttgtaataaattgcataaacatt

SEQ ID NO: 13926 - DNA, 475 bp, Diabrotica virgifera
tgctctttttgctagcctatcctctcccattcttatcacatgtccggcccattgcaatctttgtattctaatgaagtctgacaggggtgcttccttataaagttgatagaggacgttgtatcaacttctgaagattccgttttccctcacaggtcctagttgttggtttcctctaattaccttgacacaaaaaggtaatatttattttttacatctttgtgtatttccactaattaacgaagtcacgagttgcgcaagaaaattaaatgcacttttaaaatttgcccattacactgtttgacgcgaaaaccataaaaatataaatttcagagattcatacagctacttattcttaacagcttcacctacacttccgctccttttagatttctcaaaaattcaccccaataaaaattgtttacggttcaaagacactggttttatgactcagggaatttgaatgggcaacttcgag

SEQ ID NO: 13927 - DNA, 474 bp, Diabrotica virgifera
  SmartBlast Evalue=2E-28; Info=Putative uncharacterized transposon-derived protein F52C9.6 (Fragment) n=1 Tax= Harpegnathos saltator RepID=E2BUQ3_9HYME
ctattgaacgtgttcatcattagatgccttcacatatctggggcacaaaaatcaatcagaagaattccgtaagtagcgaaattaatgcacgtatttccagaatcttacacactattctaataaaagattgatgacatcgaaattattagacaaacgaaccaaaatgactatctacagaatattggttagacctgtagtaacctatggctgtgaaacctggataatgacgaaaagggatgaagcccaactcaggacattcgagagaaaaatactgagaaaagtatatggcccggtgcaagaggaagacggaacatggagaatcaggagaaacaacgaggttaatgaattgaatgaaggttacgatattgtacaatttgtgaaaagtcaaagactgtcatggctgggacatgcgcagagagaagacgatgaataaacaacaaagaaaatattacaatggaagccgataggaaggcg

SEQ ID NO: 13928 - DNA, 482 bp, Diabrotica virgifera
gtagataatagcataaagatagcattgaagaggaactacaaaaaatatctgacagtgatgagaatatgtgggagaatgatgattgggagccagttagctacgaaaaggatattaaagttcaagataacaaccaaaaacatgaaactcctgaaagcaaatcaaaggaacatgctgaagacaaggccgaagaaaatatgtgggacaatgatgattgggaatcgtttgaaaaagtggaaccacaaaaaccagaacaacctgcagaaccttcatggtcaggttggggtaattggggaggtgtatcatcaatttttacaacagctacccaaggtgttacaactcttacaaaccaagtatctcaaggtttaacaagtgttttagaaactagtatgggaattcctgatcctaaacagctagctaagttggatagggaacaggagagcatgattgaacaacatgaatctgaccaagatgaatccacgaat

SEQ ID NO: 13929 - DNA, 481 bp, Diabrotica virgifera
cctcgtcgtaatgcttttctgagtatagactaatacagattaaataatagcggtgataagacgcaaccctgtcgcactcctcgtcggatttgtatatcttcggatgttgtgtgctctatttcatatgttgctgtttggtgccaatatagttttgaggtaattcgcaagtcttgctgttttaaatttaaccgaatgaccatggacaaatttaacaacttattggcgcatattggcgcaaaaacaaaatacttcgacgctttatcctctatcgtcactatgaaactgatttcaaacaaccacgattgcagattgcttgccggtaaggtattcacacttctcgtgatctgcacggcacatgctaggcaaatattgtttcgaaagaacgtcgcatgcaaggcccgtcgattaccggtgcctggcacgcatagtgtgaattaaatcccgcgaagttaataagattttatgtaaatgtatcttgccg

SEQ ID NO: 13930 - DNA, 477 bp, Diabrotica virgifera
  SmartBlast Evalue=6E-18; Info=Zgc:101800 n=2 Tax=Danio rerio RepID=Q5PRA4_DANRE
gagccactggagcgttaggaggggtagctatgtttggttgcagttcggcttcaataaagtctctgtagatgttgttaatgtgggtaaaggattcttgaagtttatctagttgtagtttttcttgatttatatgattcattagtacctttaacagaacggtctttccattggtcctctttaacatgacctgagtgcaaatgcccaagtcagttatgtgatcacacaattctggtaaacacaacgaaatgtgccaaagacatcctaattttgcatctattataatattgggctggaacactacccaatttggagaatataattcgcacacatgtgtttcatttgccatgagaccaggtagggtaagactagcaggtttcattgatttagcaggagctatcggtgaatgatagtgtacagtaccatcactctcgcttggtaacgaaatatcaaatatcacagagcttcttgaggcttgat

SEQ ID NO: 13931 - DNA, 482 bp, Diabrotica virgifera
atttatttttatcgttcctgctattgtttgttccagttgtttcttttctatagcttattattactaatccacaaggactttacttattattaccaacttccatattttttattggtcaccaaacgtcaagtttgacccacccatgctatgactcaaccagtagatactccactattataagactgctaaaatacctttattacaatcaagtagcctctatccaaattggagatagtcgtactgaaaaacccatcaaacgtggagtacgacagggttgtgttttgtcacccaatctgtttaatctatactctgaagaaatctttgggaggctttgggtgacagaccaggcggagaagtaattaacaatatcagatccgctcacgatacagcagttcttgaagaagatttaaaactaatatttagagacaaagtggatggcagttggaaagattaatatagatcaaggtctactttctcttcga

SEQ ID NO: 13932 - DNA, 482 bp, Diabrotica virgifera
tcttattattttttggactatggccttgacaattatccagtaaccaggactaatataattggccaatataattaaaagtgcgaaaaatgttgctgagcgtagaaaccaggtgtcgttttgcggaagttacacgttcccaatacttattcttaagtaaaatcgttttattgataggattggtgaaaaagataattatacaattttattatatcttttctcataccacctcattatacagctttcagttttgttttcacgatggtacatttactcatcagagatttgttgaaaattacgaaaatgtaacattattaacacgttggcttccgtgacacacaaatgttttgtctcaatagcatagaaacggaagtctcgtggccgtagggacccattttgaagtgaatacttcttatcgttcggtatggaattttggcgggtgtaaagtcatattggtcgtcattcaaaatcgagacgcaagagtg

SEQ ID NO: 13933 - DNA, 478 bp, Diabrotica virgifera
gccggtggcagccaaaatcccgacatgcaacaatcctcgcataagtaaaaattccgaccactacattttgaagatttattgtttccttttcaaatgcaataccaaatcatattatagagtattgaaattgaaaaataattacttactaataagtacaggtactaattattattatgtattttaaaagaaaaaattattaaacacttcattttataatataaaagctatacttactgaaatggaaggttgtaagtgacatgataatatctattatatgaaagtaaacttgaattcaggatttgattatacatatattattggactatatattggcaaaaaaaataatttaattcatatacccagttagaaattttatttagaaaattagttcatattaaatggtaaatacttttgtttagtaaaaaaaataaaaaacagatggccataaacaaaaaaccagaaataaatgtaatttatg

SEQ ID NO: 13934 - DNA, 482 bp, Diabrotica virgifera
aaattttttatttgattcgtatgcatatcatcgatgacgcatgggtattctttcatttttccgacgaatttaccatcgaaaagataacagtacaacatagaacagaaattatgacaaaaaaacagtaggtatttgtgtgaagacaccagctaaattgttcagttgatcccaaatggtcagtaaaattgtctttgaaattatttttggactctgatttgtctcaaacatttgttcattttgggacacttgattggcatttctgaggctgtcgccaccttccattgtttagccaacgtcttcagtgatttttattctgccatttcattctcaaaggtctcgtctttacaagacaacatccacttcattcctcctgtaatgtgaatagtcgcatgttagattctatttcaaaatacgaatttaaatacgaatttacaacaaatttttattttatagtatttttatttacttgtgatgttatgaat

SEQ ID NO: 13935 - DNA, 478 bp, Diabrotica virgifera
  SmartBlast Evalue=9E-23; Info=AMP deaminase 2 n=3 Tax=Aculeata RepID=E2B347_9HYME
tactccactcgtgtcttctccagaaatggaaacacgttggaaatgaggtacatataaatcatgatcatcaagttcatctacttcggcagttccttgaattgatggttcatagtgactacgcttatcttctaataccttgttatttaattgtctttgaatggccaatttcttttcaatctgttcaatagggaattgtgggacttcatagggagcagaaatttcatttgacaaatctggttcgttggttgcataaactgcatttgcgccgaacgtggggctttcatttccttctctcggctctaatatatcattttcatatccatccccttcgccatctggaaactcttcataaaaagcggcaacagattccggttttttgatgccatttacacacacatctgccattttgtccaatcacacaattaaacacaaaatgaaaacaaaaataatatgttgtctgcgtgcggatacacttatg

SEQ ID NO: 13936 - DNA, 479 bp, Diabrotica virgifera
ataatgttcaggaaggtcccgactaaccggacaactgcctcgaaagcgatgatgactagtttagtttacttttagtgtgtttcttagtttttgcattttatatgccaatttttactttttttacaaaaattctttgttttgttaatcatattatatttaaaaaaaataaagatacaagtacagtccaagtatttaattggaagagagtgggtataagtgctgtttcttattctaaactgtcttataacatgctaagtttttttgaatctgaataattgtactattacataaaagtttttgaagttaaaaagaccagccaatcactgtcccttttgaaaaacagcggtataatttatgaaaggtgttaaacttcaaacttgattttctcatttactttttatagacacgtaggtttaggtacataatctaaaaatacatttttttaaaacggattttttttgagatgtctgtaggtataa

SEQ ID NO: 13937 - DNA, 482 bp, Diabrotica virgifera
  SmartBlast Evalue=5E-32; Info=Nuclear receptor corepressor 2 n= 1 Tax=Harpegnathos saltator RepID=E2C0W0_9HYME
tcgcagcttgaagtactggaaccactttcttcatcagtagataaagctggttttcgatcttcacctaaacattttttaagcctctttcggttcgcggcaacgtatattttgaccgtttgaggcggtttatttaaacgttctccaatcaattgccaattgtagcctagttccatcaaagctgcttctagttcattgaactcttcttctgaccattcttctatcggacccaatcgtctttgaattctgttataacatgccgaacagcatttcgttactccgcttgggattcgaaattcagctaaaagaggctcttttacgtctagtggtagatcttgcaaccgctcgggcaatgatcttaacctcttaattctccctctagaatttggacacgatggtaaaggacagtgtgtgtaccgagaccggaccgtcttacatctacaagtattacaaactcttgcatttggcggtatttgatcctcacg

SEQ ID NO: 13938 - DNA, 482 bp, Diabrotica virgifera
catatttattctattctgaagtttcctatacaatgagtttttgcaaaatgcttactcgtgactcctttagattgagcattacatcatatgactataatgagcgagagaatagaaaaaatatgtagggtgatttaggaagagtatttacttattggtatttgaaaaattgcattatacagggagtttcagggtgttactaggacaggtaaaaaaattgaaaaattattggagtttccttagttaaaatcttttgtaacgccatccgttttcaagacatagggcgttgaagaataacaaattttacacacttttttacgattttgacgaaactactggcaacattgtaatgaaatttggtgcgtttcaagaagtagttattgagcattttttgacatattaagaattttatattcatcattgacccccatacgggtaatagtctgaattaaaaaaaaaatagtatgccactgagacatttcaaa

SEQ ID NO: 13939 - DNA, 482 bp, Diabrotica virgifera
aatatgtgcataagtgtagtgcaggcgggaaccgggacttacaagaattttgttaaaaaatgatttaaaaatgtgttactaatataatgttacctataaaacttttaaatttcctcctctagttgtgaaaactcctcccgcacgcctcttgtagaatgagccactttatctaggtatgtcatcaaaggccaacaccacttttgaaccttgtttggcgaaaccctctatctgttccgacgatattttacttattgcatcttccaaggcaaaattgaacagcaatagtgacaaggtctgagtcctgatattatactaaatggtggtgatgttgtatcctatctttataagaaaattattatttctttctataaatccagttcttgatttattctgtcttattttattacagccaatattatttctctgagggagacctatatccagcagtggatagatccgggttgaatgatgatgataatgat

SEQ ID NO: 13940 - DNA, 483 bp, Diabrotica virgifera
tgtataacagacgaagctaccacattttacaggcagcaatgtttcaaaaacgtttttagttcttgtcgaaaaatacttggcgatatattttaagttaggtcaattctaatatagaatgtatatgaccacaatgacatatcaataacaaaaaagataaaaatgttcacagcaacaataaatggtaactgtctatgactggtatcatcaaacaatttgtctacaaaaagtaacttttgtaaagtgtttcatatgcaataacttaataaatttttttcataaatctgaaaaaaattatgtataaatataaaaactcacagtttcgacgagaaatacaaatttgttaaaatcttcacgaactatgcctacctattaatttataaaataccaaaaaagtagtataatttactaagtgcgtttctaattagtgcagggtacaaaataactcagacacaagtaatgaccaaaaggttcgtgttccctact

SEQ ID NO: 13941 - DNA, 481 bp, Diabrotica virgifera
  SmartBlast Evalue=2E-26; Info=Zgc:101095 n=2 Tax=Danio rerio RepID=Q66JN7_DANRE
aaagaacatgtcatttatggagagaaaaagagtctcaagaaaattattgaactaccaatgattaacagtagaactgattgccatgtattatccaaagaagtcgttaaccagtgtgaactgatacatcattctcgcctaccagaagtagagcaaattatttattatctgaagaaaagaaaacttcaaaatggtggtaaaggaatgggacccatgggcgatggtgataaaaataaattcgataattactccaatggagtacacgaagctaactataacagtttgtctgaatacattgatctcctttacgagggtatggctgaaaagattaggggagcacaactcatacagttgttggcacgagatccggaaaacttggaagcacttgcaactaatgaaacccttgactcagtgccttaggaagagtgttgagggaagattggaagaggagcattgccttaagtacccatttagtgtttacatt

SEQ ID NO: 13942 - DNA, 479 bp, Diabrotica virgifera
tactgaagcatagaaaggaacacgatgttgacaagccgtataaatgccctcagtgttcgcataatttctcgaatgttgatgatttctccgctcatctgagactacataagggtaaacacccatacatgtgcccaaaatgtgacctaggcttttggactaagagtgcttatgaggctcatcaaccagttcatatcctcaaaaaagcaaaacaacctgtaaagaagttccgttgtgatgtatgtgcaaaagagttcagcaaactatgtgatgtggagcgccatactcgtgttcatactggagaaaagccctgcatttgcaatatctgcaataaacgctttcagcaagcacacaatctcagtaagcatctgttgacccatttacacatcaaaaccgttctattgtgaaatttgtaacaaacaatttggaagaaacgatgtactgagaagacatttgttgacacattcagttgataaacctgt

SEQ ID NO: 13943 - DNA, 481 bp, Diabrotica virgifera
gtaacttttacattttaacacaatgacaactacaaacttcaaatacaactgttctataaactgccaactttctgtgtttatattggtttttatacattttctgaagttttagacgccactagacataaatgtaaacagtgcgtcaagtgaagggtccaggagtgtattagtagctcaatgtagtggagctgtagtggagctcaatgtgtctagtagtgtggcggttactttataatccggggacaaaactgaagtttttgggagcagtaaggcaaagttgtttctgaaaagataattggctattgaattgttgtcaaacgaaaaaaatgtgtctgcaattttgttataattagaaatcagtttgattgtgtcatttactgttttagtaaaacaagagaaattgactattattgcctctagagaggtggactacatcttctgttgtattgtgtttatcaagcgttacaaattgtacatctgg

SEQ ID NO: 13944 - DNA, 481 bp, Diabrotica virgifera
  SmartBlast Evalue=7E-12; Info=Cathepsin L protease inhibitor 2 n=1 Tax=Diaprepes abbreviatus RepID=A7LFV3_DIAAB
tgtgtaaaaatttattgattgaaacaaccgttataataactctaaattaattaatagttaattatttgtatcacatccatcactccatctatttacctataaactgtactttttgttttgatcattgtgtacattaattgtgggtagcagttttctgggcaagttttccccgttgctctacccagtttttcatcgtgtatctgctttgaaattcctcgtgggtaagatcagcgaactgatttatgcctaatgaataagaaatttctcctttttcgaatttggcgttgtgctctttgattttatttaaagtattaacgaaaattcctttacggcgctgttcttcattaggagtagcataatttcggttgaagtctttcttgaatttttcaaactcttcgtcgtcagacaaatatgtgtcggcagccaaagccacagcaatcacaaaaagtaagaaatatttgaacattttgtattaaacagt

SEQ ID NO: 13945 - DNA, 480 bp, Diabrotica virgifera
ggagtacttggatttttaacgacactagatgacagtataccgggtaatttgggactcaaggatcaacttctggcccttaaatggacacacgatcatatccataaatttgggggtgatcccaatcaagtaaccgtaggcggagcaagtgctggaagtatgtccactggatttcaattgctaagtagagcatctaaagggttgtttaggggaattatccaacaaagtgggtcaccgttatctcgatatttttatccatgggatgacagagagcacgcatttgaatttggcaaagccttaaatagttcatttacatcaaccgaatcaagtgatttattagaattattacaacaagcgtcttacacagatatactagatgttcagaagaagttttcagctgggatttcaattgtaggatttacggatagtttaattataagccagttctggaggatgaatccaacgatgatgctttcgttaccg

SEQ ID NO: 13946 - DNA, 477 bp, Diabrotica virgifera
  SmartBlast Evalue=5E-10; Info=Transposable element Tc3 transposase (Fragment) n=2 Tax=Camponotus floridanus RepID= E2AKN2_9HYME
aagaaattaatgtgattacttgatatccatgtagcgtaataatagttttcttttctgaaatcagcatggaattatttttactgacaatcaaagtggatgctatcgattatttacacaccactgtttactttttcttcgtagatacagtgtaggctctttcattattcaaccattgaaaaagataagtagttttgttaaaagtagcagaacttgaattagtcttcacagtatgtccgatacatgttcgattggcttgaggtcgggtctggaagctggccaattcatatggaaaattccaacatcttccaagtattcattgacgatgattctagcacaatggggacgcgcgttatagtctataaagataaaattaggtcctataaatagagcaaaagagaccacatgttcatctaaaatgatcgttatatacattgctcctttcatagaacctccatccacaagaactatagaccaggg

SEQ ID NO: 13947 - DNA, 481 bp, Diabrotica virgifera
tcttttggtcaatttgttccttaaaaaaacctgcatatatgtgcctaatagatctgaagaaatgaagaaagcgtttgatagagtgagaattcgggacgcgatacattatttattatatgaaaaaggaatgctccgttggtgtgttgacggaatcaatgaacttaaattaaaataagtgtaaaaacaacgaacagtaatatatttatttattttgactaaacaaacgtgcttcgtttatatctcgtaagggtttgttattttagcgagggtgtgactgtgctgcgtgctcaccgttacgatactggccgagaccacaaatgctattatgtcatcatgtatgcggttctaccatgtggacagaaaaggcgataaattactaaatctggcgttttaaaagctcatttcaagttgacataaagagcgtggccaatctggcaatttgtgtttccctgaaaaagacattaatgttatacaatctggt

SEQ ID NO: 13948 - DNA, 473 bp, Diabrotica virgifera
gcggctgaaccctcaaaaaatcgaaaaattgcaattcttgaacccgaacaacccttgaataaaaaataaaatagcaattctgcttcaccagctttaaaagtttgagccaaattatatctgttttgaatatttgcattgctacaaatttattccttgattgttaaaaaaagctacaaacacatagtgtttcccgtgcctaatacatgcgttttaatgcatgctacttagaaatagccccgcttgcacttttacctcctctacctactcgtttgattttaaatgagaaatcattgaaaacatcactcaagcactaggtgtttatagctttttcaacaataaaataataaatttcagcaatacaaataatcaaaaccgatataatccgactcgaaccttcaaatgcggtaagcagaattgccattccattccttaatcaaaagttattcgggttcaaaaattgcaatttttcgact

SEQ ID NO: 13949 - DNA, 480 bp, Diabrotica virgifera
tttgaatggcgatatacttcaggtatttcctttctgatagaatagtaagtcattaaatttttctttgttttgtctatattgtacttgcaatttgttgaaaaaaaagactcaagaatgttgtcggttggcatttcaggaaaattttgtgttttaatccattctctgagtttttctaatagttcgaatagttctgtctcggttttgccccagtgttttcttatcttgtctctgtttatcactagaaggggctcagataccccttcatccataactttaataacactcatactttttcaacaaagtatctaattctaaataaaaacaatggagctcattacttgaaccttccaccgtggttccggtttgtaaacagtttgatataaaaatatgcgaagatataaatacacgagacgaaattcgctattagttttttctgtatgtaattatatattttatgatcgtactaggaaatctatctgc

SEQ ID NO: 13950 - DNA, 481 bp, Diabrotica virgifera
  SmartBlast Evalue=3E-40; Info="Organic cation transporter, putative n=1 Tax=Pediculus humanus corporis RepID=E0VD76_PEDHC"
cataatctctgacttcaacctagtctgtgataggaaaagtttacaaaatttagccgaaatgatgttccttgccggagtcgctcttggaggtcttgtcagtggtatcatctctgacaaatatggaagaaaaaggacgttgatgatatctgttactctacagaccatactcggtaccgctatcgcatttactccttggttcttcttatacgtcattctaagggcgtttttgggattcatctccgtatctgtggtattcagtggtttcgtgctgtccattgaacttgttggaggagaatggaggactgtaactggcatctcgtatttacttccagtgtctatgggctacgtgaccgtagctggtatagcctggctgttacgagattggagacattttcagctagcaatatcacttccaggatttctcttcattgtactttggtgggtccttcccgaatccccaaggtggcttctcgttcttgga

SEQ ID NO: 13951 - DNA, 479 bp, Diabrotica virgifera
tctaaatttaattatttggtgacatatttatttcaaagatatctcattgttaattccgaaaatattcgatgagacgatccaaaattcgtcttaaagaaaaaaaatccagatattgaatacggtccagagaagtgatttagctttggccgcgacgttagcgaaaatcagcataagaaaacctcgtgattatttaaatttgttactaaaatgaagatttataaaatgtccacgttaaatttgattattagaagctctaagactgctaataaattaaatttttccaattaactaaatttgtgaataaagtgaggttagtctttttttggactttttctataaaactgtgacgtcatttccaagaaaaacgcttgtgtgactaattgtttaaattaaagaaaactcaaattggtgcaacattttctaggattcgccatttggtattaaatgtatttatattcaactattatgtatacaagtga

SEQ ID NO: 13952 - DNA, 471 bp, Diabrotica virgifera
cttttaatcacatctacaaggaggtactacatatgtgattcattcatgccttaagaagtgaatttttaaagtggttaatacatatagcaaaactttattattttacaggcccatttcgccgatttaagttcctataggcaacccaaattacacggcacaaagtagtgggtcaggctgtagtcgttttttatttttatacgtccatgggctgtagacataagttactcgtatggttagttattctgtgctcgtatcctgagtgacaagaggtgacgagcacagtagctcctatccgcgtactcgtcagggccgtgccgtgctatgatgcggcgaggcagtcgcatcaggcggcatcacaagggggggcggcataatcagtaaaataaaaagaaattgtcaggttgtgtaaaaatgttgtcagaaactatagaaaaaatgaaaagttacagataatatggctaatgaccaaat

SEQ ID NO: 13953 - DNA, 478 bp, Diabrotica virgifera
taggaatatgtttgtaatgtaatcctgttattttttcttctatatgataacaggcgcccggaccttcagcactttgccatccccataagttgaccgagaatcctccactattttttaaatgatgcatatattgttcatcatacttatgatttctcggtatataaacttttactcgaccattgctatatgactgaaatactttttcatcggaaaatgcaaccctagaccaaaagtcttcacggtttataaattcattacaaaattcaactcgtctcctcttgtgatcctcagtcaaaaaaggtcttctgccctcttgaaccgtccaactgtgctatggagtgaaaattatcccaactttgtttaattttccatatgcacatatggctcacgttcagatctgcaggaactgcccttagttactcacctttttcgattttggcaattgctcttgctttttgcgcatcattcaaatgcgtta

SEQ ID NO: 13954 - DNA, 474 bp, Diabrotica virgifera
gtgtccatcgaatgtacactagatttttttttctattcgatatagattgaaaaaaatattgggatggccggtaaatgaactccgattgcccgttgccagatcaaattagcgtcgtaaccactataactacataaaccatttagggaataatcgttaattggattatacttttgtagcttaataacttctaaacggcttaaccgattttgttcactaaacatgagtttgaaacgcattgacaagtagtatcttgatgcatctaagatcaagtatgataactgaagtattacaggaattattgagcttgaaaaacgtttttcccataagaaatagatttgatcatacttatgaagcctataacttaaaaattcgaattttcccggatataaggtatacaccgttagattcgtctagagtccttctacaaacgctcagttattggcgcaattcgtaggttgaaattttgagtaattg

SEQ ID NO: 13955 - DNA, 481 bp, Diabrotica virgifera
  SmartBlast Evalue=2E-24; Info=Tether containing UBX domain for GLUT4 n=1 Tax=Culex quinquefasciatus RepID=B0WHV7_CULQU
ttctctctagccaattgaataagatcgacattctgttttttctgaactttctctacattggttggttggccatctgttttatctgaattatcctgattatttatagaatctacatttggttctgtaggctggtattttcttatataaggtttttcttctacaggttttgaaggtataatggatgaaacattggcttgttgttttaggtcttcaggatccttatcaataactcttatcatagctcttcctcccgttaatcctaaactttttaaagttacactattaagttcttggccatacatttctcttctggtgtaaataactactggacttctattatcaccaagacactctgggcacattttggtaagtatgttaattaaagtctcactaggattgaaattaccaattaacctacttccattttctaagtttactgccaaagtgacttcagtgtctaaccttgctttagttgcactaa

SEQ ID NO: 13956 - DNA, 478 bp, Diabrotica virgifera
cccggcaaaccctcttcataaattaaaacggcatatttctgtgttgctaagaaaattttgtaaagagcgagtcgattttaaaagttttatgaatgtacctaaatatgaaatgtgttcgtaaatgtttgtgagagctacacttttgttcttaataaatggcgtttgaataaataacgtgtgcacttattaatccataaatgtatacattacgaaatcatcccgttgttttcttttgaaaagctcatgtaaataagaattaactctatggttttttcggaagccgtatattataaactggtcctacttcaacaaattggcttattgtacaccttcctatttattcattgtaccccttctagtgcagtcactgaaggttttcacctccgatttcgttgaacctccatcgattttcatgaaaattggtgagcagtcagaggatacctcaagaacaaaggtgacatgatgccaactttgcacc

SEQ ID NO: 13957 - DNA, 484 bp, Diabrotica virgifera
  SmartBlast Evalue=2E-20; Info=Endonuclease-reverse transcriptase n=1 Tax=Schistosoma mansoni RepID=Q4QQE9_SCHMA
ccgcgttgtcggcgaagtccaaaagaagttaggtgggccatactgagcctttcttcataggaaggtcttctcagtcccaatggaattcgagtggcttttctttggacgttttccaacaaaattttgtctcgaaccaaatcaggataccacgttgggccagcatattcaagaatcggtcttatgtaaatagtgtaaagtttacagaatgactgcattgaagctctcgaaaaacacctccgaataagatatagtctggagttcgcacgtttacaaatagactgaatatggtcggaccacgttaggctgctgtttacaataacaccgaggtcgttatacgagaacactgaatctaatggttgtccgttaacgaagtacggcacaagtggattatttttaccaattctaagcactaaacatttttccgcgtttaagggtagtaaccactgggaacaccaataaaatccaagtctctttggatggttaa

SEQ ID NO: 13958 - DNA, 474 bp, Diabrotica virgifera
  SmartBlast Evalue=3E-11; Info=Zinc finger protein 294 n=1 Tax= Camponotus floridanus RepID=E2AF87_9HYME
aacttcggttggcatcaatttaaacagattgtttaaaaaagtgttcaataaattttcattcctgagccaatcagcatattggaaacgaagttcagtgctagcactgtcgcacagcgtcaaaagaacatcccaaagaagtagatacgccagagtataagtatacgaatctgtcatcggttcaactctgcaactatcttcacccaacttgaagcccatgagcatgctattaataatttcgcgtgtttccaccaatttttccttaaactgctcgaaaatcaggccattttgatgcggagtattagtaataacagcttcattatcaattttgaccaaacctggtaccaaaaccaacaacattttatatccccaagattgcaagtttggctgcgagtttaccagcaagacacaaccttgctttaagaattttgtccactttggtaattccgattcgctttagtttaaatattgtatcac

SEQ ID NO: 13959 - DNA, 481 bp, Diabrotica virgifera
  SmartBlast Evalue=2E-80; Info=Chitin deacetylase 2A n=2 Tax= Tribolium castaneum RepID=A7U8D0_TRICA
tctggccttatactttatacttcaggatgccacataagtgcaacggaaatgcccacaactgtcccagcagaagccatcccgtttgggaaatagtcatgaacgaattggacagacgtgatgatcctacttttgacgaatcactacctggttgccacatggtagactcctgttctaatgttcaaactggagatcaatttgcaagactactcagacacaatttcaacagacatttgaattcaaaccgagctccgttgggtcttaacttccatgcctcatggttaaagagtaagaaagaattcaaagaagaacttattaaattcattgaagatatgttggcccgaaatgatgtttatttcgtaacaaacagtcaagtcatccaatgggttcagaatcccacagaactcagtggattaagagacttccaagaatggaaagaaaagtgtgacattaaaggtcaaccttactgttcattgcccaattc

SEQ ID NO: 13960 - DNA, 478 bp, Diabrotica virgifera
ttattatttaatataagtatttgttttattacatttattgtttttattatttatttaatataagattattacttaattcttgttttctatttttaatgtttttatttacttacattgaatattatctaatttgttttgttgtataatccacttctgcaattacatatatctgatttaaaatgaattcaggaattttttgtaatttgacaacaaagtcaacttagacctctgacgtaggtaatgacatgcaacagtatttatattgtacggactgtatatgattcaaatatgcaactactttacctttttaaaaggaattgtacactatttcagatcacatttttcataaaatttactaatatcaattttcatattactacttctttggtggtccttgtttatcttgatttttttcttcattagctgcaccacttaatttgtagtttatgcttcttgttaattgtactagttgagctcc

SEQ ID NO: 13961 - DNA, 478 bp, Diabrotica virgifera
gaatggcatttgtgtcaaccacgatgtaaatatgttggttttggcataaacgcctcatagtttttaaagaaattcagtgtgtttacgcttcaaaaatcaatacaaattgaaaatattgcagaggtaagtaatatcatgttacttatccataaaaattgtaaaaatacatacctttactattattactggaccgaaatgtacacaatgataatcttacgggcactggcgattatgtcaatcggtgttcacgtcggtgttcacgtgcgtgactagactggcgtttataaaaaatttaaacctatattacacctatttcactttttctgcggttattccgcgttgactgtctggtgcggaaattaaaatccttattttttagtgcagctaactaaaaagtggtcattttggcgtttatgccgttttggcttggcagcgtcgaagttatgacctatttttgtttcgtaatccctatgagatt

SEQ ID NO: 13962 - DNA, 479 bp, Diabrotica virgifera
cgaatgagccaaaatattggtgtttgagagtgttgccatcaattattaagggtcagataatagaataagtgatggagtttaaatacgcagacatcacgctacctttacagctttttgttaattattattttaatcgtattattttaattatttattattattaataaattaatatttttattattaataaaatcctacgggcttttaattgttatttaaagtctatttttttgatatttttaattttgcactgctttatatttgataataaattaataacatgccgcacaaaatcctaggacaacatgaagcagcattcttcgttggatattcacttgatttctatctaaaaataagtcaaaagatgaactaaccttacatatccttacataactacagagttatctcataacttgaggtttaacgtcgcgttataaagtgacagttgatatatcagataactcaagaactgtcaagaa

SEQ ID NO: 13963 - DNA, 483 bp, Diabrotica virgifera
  SmartBlast Evalue=4E-30; Info=Vesicular glutamate transporter 1 n=1 Tax=Camponotus floridanus RepID=E1ZZ31_9HYME
tgtatacttctaatgaaaataagagacagcgctcctctgtgtgcaaaccatggaattataaagtttgccgaaacacctacaaaatttgacagtccaaagaccttcttggttccaaatttatttgccaggatgcctccaggaatttgcgttatccaatggagccagaaaaagcttcctatgataagcccaagttctctctcattccagtcgaagtattgttgctcagacggattttcgaataatgaagaatttattatattttgtgaggttatgtttacattatctgtgaggttcaaaaatgaaatattcctaatatcacttggcacgggacttaacgccacgcattcacttgttaaagaaacattgtccttaggtttaggtcggaccatcgatactatagctatgttcaggttcaatcggaccatgtagtttactgcgaatcctccgaacactaagtaccaaaggacatcgcgacaagagcaa

SEQ ID NO: 13964 - DNA, 480 bp, Diabrotica virgifera
  SmartBlast Evalue=7E-63; Info=5'-3' exoribonuclease 2-like protein n=1 Tax=Harpegnathos saltator RepID=E2BLM1_9HYME
tttctgccagcctgtaatatttccgaaattgaaaaataatgtaaaatacgaattggagtaattaattatttcactattttcgtagtttaactcaaaatcatgggtgtaccagcgtttttcaggtggttaagttcaaaataccccagtgtgattgttaattgtgtggaacaaaaacctgttgatgtcaatggagtgaccataccagtaaactcggcagaaccaaacccaaatggcatcgaattcgataatttatacctagatatgaacggtataattcatccttgcactcatccagaaagtaagccagcaccgaaaaacgaagatgagatgatggtagcaattttcgaatgtatcgatagattattcagaattgtaagacctaggaagttgctgtatatggccatcgatggtgtggcacccagggctaaaatgaatcagcagagatctaggcgttttagggcatctaaagaaactgttgag

SEQ ID NO: 13965 - DNA, 480 bp, Diabrotica virgifera
  SmartBlast Evalue=2E-10; Info=Colon cancer-associated protein Mic1 n=1 Tax=Loa loa RepID=E1FIW5_LOALO
gagatattccagaaactggacaccgaaaaggatgtggctaaaatagagtggctattggtgagctatttgacttcactttcggagtgtagcatactaacccaatataacttgaatgaactcctagtgacttgtttggccagacaaaagaaattcaccgtacttcaacaaatgcttcagtacggagtcatttctgactccaaatctttggcatgtcttttactctctttaggaaacatgcacccgggcacctcccaaatggcgctggacatgctaacaagattggacgcgaaagaagaaatccaggaagtgttgttgagcgaaggtcaaattctgacagctttaaaactagcggacaacgctgctaatcctaggaagtttttgacagctgcggaacaagatggagatgtcactcttcaacatagcgttcttatttatttaaaaaataatcctgaatttgaggctgttttccaaaaagatgag

SEQ ID NO: 13966 - DNA, 465 bp, Diabrotica virgifera
caatcgatacatatgttgcatcacgtacttgtttatttttatactccaaaggtttgaaatttcataagcacgggtgtgacttatacaactgaactaaactttattgtcctatctgagttccatttgttagctatttttgagaatcacattcattaactcaagtcgtctcctctgataaagtggtaatgtgcagagttacacagcgagtgttgttaacacataccgagtggattggcgagtatacgattgaagggtgggaggtcgaagactcggcctagtaaatagaataagatccgagtgactgtctcgccatatgactgggtcgagtgctcggccaagtactcgttagtatgtttagaccaaacgagcactcggccgagaacactgtctcgctataatactcgttacgtgtaatcaaggttttagtgagaaacgttaaacaactgttcgccttctcttgtgtag

SEQ ID NO: 13967 - DNA, 478 bp, Diabrotica virgifera
  SmartBlast Evalue=1E-20; Info=Minus-C odorant binding protein 3 n=1 Tax=Batocera horsfieldi RepID=D4P8G4_9CUCU
aacagaactaaataacacattaacaaaatgaagtatttatttgttcttgcttgtgttgttgttgcggctgtggctagccacctgcccaacttacccgaaaacgaaagacttaaactagctcaagttcacagagactgccaagccgacccaaaaacttacgtcgacgaagacaaacttaggaagcttccaaacttcgttgaagacaaacaagtgggcattcatatgcgatgcatggcagtaaaggcaggattaatgaagcaaaatggagacctcgacattcctagcattacccaaaaatttggtttggtgatcaaagatcattctaaggttaacggattcgtccaacagtgtgctaagaaagcagatacaccagaaaaaacagctattcttcttaccttgtgctgtgtcaaaaacgacattcagtattaccataaattgtaaaaaaaatatccatattatattagcaaatatataagtc

SEQ ID NO: 13968 - DNA, 480 bp, Diabrotica virgifera
cggttagctgaagtttatggttgcaagcagttccagtacaatttaattcagttttggtttctggattttttagctgattgtttgtggagagtgcaggacgagtaccagttcaatgagaaacaacagcaggttgtgttggactgggtaatttttgtgtttaatttaataagagcgcctgatttgaaattatcaagaaagcaattgaataaaatcttttctgaagccataaacgtagcagaacaccacatagagactggcgcctcgtcaattccccctccagaggagttatttagcgtaaaacatttaaacaccggcgaacctacagttattaatgagaaagaaaatgagtctggaagtggttcgtcaatatgttcatctctagaggaaaagtctggtcatgatgataagagttatctagcaattgaattggatcaagaaataaaatattacgatataccttcgaggatatgtcaatgggac

SEQ ID NO: 13969 - DNA, 480 bp, Diabrotica virgifera
gagccgaggagagaacagctacagagtggtgtttgcaaactgacttgtggtgactgtccgagcttacatcggtcaggctggcggagcctttgacggacggatggcggagcacaggggggctttcaacagtggaggggcagacacttcagcatgcgcacttcaccttctggatcataatcgttcttttaatgaacagtttcaacttctgcatattcaaaatgcgaaacggctgtagtcacatagttgtggtaaattttgtggaagtatggaaaacaaaagttttcagtgttttattgttagatacaatgaacttccatcaagtaacggtcgaatccatcaaattttaatgaaattagaatagaaaaaagaggatatattcagccgtgtgataaattaccgaagttatttttaacatttgcgttaaagtataactatctccataactattataacatataactatctccataactataaaac

SEQ ID NO: 13970 - DNA, 475 bp, Diabrotica virgifera
  SmartBlast Evalue=3E-44; Info=Mesenchymal stem cell protein DSCD75 n=2 Tax=Culicini RepID=B0WZW2_CULQU
gaactatttcataagaatcgcttttactataggattcagcaaattttttgagaaaaagaagaagcttgaggatggcactcatatatacggagtctgcacatcacaagatatggacatatttttctcgcatatgaacaatgccagatatattcgcgagctggattttgccagatttcatttttactttgtaacagggttatatgacctaataaaaaagaataagggccatgttttacaaacagcttcaaacattcggtacagaagaacaattccttggttcaacacttacaaagttactacaaaaattgtctattgggacgaaaaaacaatgtacattgaacaacaattcgtcactttgcacgacaacttcataagggctgtaattcttagcaagcaaacgaccattggtttgaatgtgccagaacttatggccaaactgactggttgtgatgaaagttatagaccaccacttccc

SEQ ID NO: 13971 - DNA, 479 bp, Diabrotica virgifera
gtgggaaaatccacaaagaagccccaaagaaatgtcacagaacaaactgttatcaaccctttcaaaaaagtgaaagaaactcctgcagtcaaacagccacaaactgaagcagcccaagaagtaatagaagaaactcctttagaaacctttgatgacaccttgacagaagacttcgatgatgatcccatgtttgaagagctggataaaacaccaaccccagttgcatcatctcaaaaggttgcaagtcagactattgagactgatttaactcaggatgactttggtgatgatttcgatgtcacccaaattgaagaatttgagtcacagccttctggggatgtcgaagaagccagtgaaaagctttcggatgagctgcaggctgaattcgaaaccgagtgggagaattttatgaacaaaactgttgatattgataacaccaccgaggctttattggataagagtgatatacccacaataga

SEQ ID NO: 13972 - DNA, 477 bp, Diabrotica virgifera
  SmartBlast Evalue=1E-47; Info=Uncharacterized conserved protein n=1 Tax=Glossina morsitans morsitans RepID=D3TPL8_GLOMM
ataattggcggatgacgacgcattttgttcctctttcattggaatgccagtaacagtagtgctggctaaatcgtagtgttccagaataagtgatgataatttatttggtatctgtggagcttttatggaatgcacttccgttgtgagtatctgcgaaagattttttgctggatggttgttaacttgtgactccatattaattggaaacgtatttataatcaccaagtggcaatggtggatagtcaatagcttgtctgacgtggtagacaatttattttgttgattcaatactgttaaaaatatatcttctaagcgtttcatactatcattatctcgcgctgaagttatacagataacccttgtgttgttaataatttttggaccatcaccagcatttctcgttttttccaattgtaaatctgttggttcacttaaggcttcaatagcggcacgtaaaccatgtaatactgtatgatc

SEQ ID NO: 13973 - DNA, 479 bp, Diabrotica virgifera
ggtactcaaaagtaccgtctggagactaaggattaacttaggtagtcttgtgacgtgcttactgcctaaattacttttaattaacatttcttccaaactatttatggcaatccatcatcatatatccatattcgaggtctgtcccaaaagtatcggactttcgtccataactttgcaatgctaaattcttcgtcatccagctcatggaatccatcgaagtagtatctgtacgatccaattacacactccattaggtgctttaaatcactgaaacaattctgaaattaaatttttgtaatgagcttcagtttcactgtctcatgtaactacaacaccgtttgaatcggctctattatggactgtacagagacttgtcttaccttgtgctccttgccaaaaacggtggttcgccttgtctgaaaagcttcattgaatgtgctggcccactattgtgatgaagaaaccagccgaagatcgcc

SEQ ID NO: 13974 - DNA, 480 bp, Diabrotica virgifera
  SmartBlast Evalue=9E-12; Info=Endonuclease-reverse transcriptase n=1 Tax=Bombyx mori RepID=D7F163_BOMMO
ctccgagtcaatacttctttctagtcttagcctcttctctactattttcgtgtatattttaaaacataccgatgataaacatattgctctataattttcgcagttgacgtgttctccctttttgtatattggcactataaggttactttgccagtcttttgggatttgctgcttttcccatgcctctttgtatattttcaacaaccagtttatcccttcttctcccacgtacttgaccatttccgggtctatgtcatcatcccctccagctttacctatttttacgtttgatacttcctgtattacttcttctctacttatttgctctatttctttgttctcgttatcttgatatatttcatttctatcatctattgtttcatttctaaatttgttttcatagtattctttccatactttagctatctgttctggatttgtttggatttggtttgttgtatcccttacggctgttatttc

SEQ ID NO: 13975 - DNA, 480 bp, Diabrotica virgifera
  SmartBlast Evalue=1E-12; Info="Zinc finger protein, putative n= 1 Tax=Pediculus humanus corporis RepID=E0VHY6_PEDHC"
cagccactcaataaactagttgatactgttcgattcacaactgtaaatagccaatcattctctgaagaagagccaattgacaagagtattataaaaaaagatgatgataagatagattctgatagagaatctttaaaaaatgaaccccgtacttctaagaaaagcctgccccacaaaaaaagaatttcaaggaaactcaagaagagcactgtatcagcttccaaaactatagtctgcaatctttgtgagcaatcgtttagctctaatgatgaatttgcacaacacgaaatcttatgtcagaccacaatcactccagtcaaccaagttaacgcgtttaactgccaaatttgtaatgaaccttttacagaacaactcaagttcttcgaacacttaaagaaacattatgaacctggaggaggcggtttgccaactggacctccgaaagaaatacctagtactaacagtactattatagataag

SEQ ID NO: 13976 - DNA, 480 bp, Diabrotica virgifera
gaaggcatttcggttttttttgaccacaggatcgtcagactttaaattacacaatttttggatccactttttgcaaatatgtctgtctaaaaacaattactaatgtttacaaagcctgacatatcagtggaaagcatagacatctttattaaagatgatgaggaacgtaagtcctggctatagattgtattagcgatttttttttgtatatagttcttctaaactccatagtgagtccaagcccaaacacagtagatgaatcataaaacaatcttcgttttacaacaataaaacatcgtttttgttttgatccattttgtaaataaaacaggatatatactctgggctaattagcaaaatacaaggaaaagttatttaccagcaattttattgctggagtcgagtcttatgattctattaataatataggtatgcaaagtccgcacatattgtgctactttttttataaacaaaatggcg

SEQ ID NO: 13977 - DNA, 479 bp, Diabrotica virgifera
attaatggcgcgaaactcaaacattataatgatatgacgtcacgaccaatgagggcgcgtgttgggctggctgcaataattggaatttttttctcgattttaatcgcctttgggggccaaacgaaagacaaaaacaacttttttttctttgatatacatatattttaaattatgttctgttatgatttacagcattttttcgaatttaaatttttatgcaagtttcctattatacaaaaatagacgaaaacattttggtttgcttggatacaaacatagtccagttgtcaaagatttgatcaagctttattgggattacaaaattgacgttctcagcaaaattcagcttgtttgtatgatttttagaggtttagttgcattttcgtctctaaagactggactaactttccacgaaacagacacaaatttatccaaaaaaccttctttgtctatcccaatagaactctcagaaactctaa

SEQ ID NO: 13978 - DNA, 480 bp, Diabrotica virgifera
  SmartBlast Evalue=4E-15; Info=Hairy/enhancer-of-split related with YRPW motif protein 2 n=1 Tax=Harpegnathos saltator RepID= E2B5C7_9HYME
tgtcttggttaaacctcagtttgatatcggtcttatatttgtaggacattgcatgagtttctgggtgatctgcgtgtttctcgtactcagcttctgttaccatctgactattgggggttactatgtaagagccgttgttattgttgggttcggattccattttgggcagagagtagcctactgtcttgggatttacgtcatttgaaattggttctggtatgttcggtactggtacaatgtgttctgtcaacaatgaagaatggtggttcccgttgaacgaggcagcacgggaaaacgaatctccgtgcttttgtaaatgattcaacagtctgacgcaaatggcttcacgtggaaaatgtccttccacttctaccatgaatcgcatcgcttccgacatacattcttgatatcctagccgatagtgctcagttggattcccttggtcctgttgtaaatatttcatatgttttatagccattt

SEQ ID NO: 13979 - DNA, 477 bp, Diabrotica virgifera
gtttaacaggtcatgggtctataggtcagtcattctcgaggtctgagatcacccttttaaaaatgatttagacatatgttgaacaattcctttatattctctaaaagctcacttctgtaacgtgaacagtcgcgtgttacattctatctcacaatacgaatttacaacaaatttttattttatagtatttttatttacttgctatgttagaaatattatttctaacaattattaaagctaattggctctccccaaagccataaattccataaaaagaagaagaagaagtcaaaatacttacgcattactacacccttcctcgaggtacttacgaaattttttcaaaattgcaaaaattttcatcaagttatcgcgaaaaaggataaaatgtgagattctatctaacggcgcgactagtcgcgggttaaatagtccgcacatgtttgcaatataataacaattgtgttagtgtgatat

SEQ ID NO: 13980 - DNA, 474 bp, Diabrotica virgifera
gttagtaagtgtacattctgtatagtatttatttaataatttcgaaatatcacatataatttttgtaaattgtttgtaactttctgtgatttttataattttagtgtttttttttcaaatttgttgttaaacgtatgtacctaaatgataatgtgcttgaaatctacagctcagtgcaaatcaggacgagatatatgaaataattattaaacatgtagaattagctctaaaatattaaaacctaacccaggatttgtctcagcggaaatttgtactatactattaagataattgaaatgtgtagaaaaacagttgtatgtgttaatgtgtaaaaatatgcacaacaaacgtagtgtgcgctttcaaatctgacaagcaatttggtaaaatccttagacgatacgaaaaaagtctacctccttactctaggacttaaacgagtgttgaattctcttcgataattgcattgccagt

SEQ ID NO: 13981 - DNA, 479 bp, Diabrotica virgifera
tattactcttttttgtttgagttatatgtataactctaagtctctgtgttggttggggtaaactgtcatggttctcagttttggtatcagtctcatcagtatctagatcttctgtggtgtgaacgtatggaaattcttgtttacatggttgactctctgattttaattggttattacttttgtttttgctttgtctgcatcttactctttcttggcatatcattgaagggaaacgctcttcggtgtatgaattatccacatccattggttctgccgtaatatcctcagtcttgtaaatatctcttgttttgtaaattggactgcgcaaattacctatttcattatagctacaactttttctaccatttccaaatattgaatatgtattgtcgcctaaattcccatttgatgaaacaatttcttcaacataaattctccttataatagaaaaacgagaatttgaaaaattttgctgtgga

SEQ ID NO: 13982 - DNA, 470 bp, Diabrotica virgifera
agcctgttttagaatccaactatgcattctagtctaggcgccaaatagaggtcgccgtgtccttttcaattctgatggacaagctcaacggtttcttatggatttttggctgctgattgcgaagtttcgagggtggatttcgatccgagtggtcggggaattgttatagacaatttgattgtttataacttgtttatacggctctggctcataaactaaaagagataaaaaggaatgtttcaaatagaacttgttcgttaatgaaaagcgaagaaaggaacgtttactaaacttgaatccagcaattggaactcaagatgttgtggaattggtgcacaatgcaaattgcaaattgcaaaatgggtgtttttcgaagctttatcgatgtggctcggcttctgcgcatgcgaatgaaccttagcaagtctcattttaaagctttattaatgggcttccatacagggttggtt

SEQ ID NO: 13983 - DNA, 477 bp, Diabrotica virgifera
attgggtgcgttcggtcgacctcagcggctgactgtaagcactaagcggctaagtggttgtatccagcggtactagggaacacttagtaaatctcctcagcggctgacttccagcggtgtcgtctaaatgctaccttttactcagctggccagccgctgaggtcgtctgaacgtaccaattattttgcagtgcgctctactccaccacaatcgcgtttaggatagaacaacactctagtacaaacattttaatgcgaagaagtattttaaatccgattttgtattaactttctgacattcagttgtgtaacttaagagataacacaagaaagattatcgaagaggaatgaagcaaacatttattaaactaaatgagatctaacatagttaatgacaaaatataacatttccaaaaaactaaggtgggatgtatttcgatcggtttccttacataagaatttcttggcatgctatgat

SEQ ID NO: 13984 - DNA, 475 bp, Diabrotica virgifera
aagctgtaaacctcactattgctcttcgaggcgacgctttggatgtcctccagaccatagccgtagaggagacagatgacttcgagcagcttaaaaagagactgaatatgcgatacgggcacgaacatttagagcatgtctatcagtcgcagtttaaaaatcgaagacaaaagaaagatgaagctcttcaagaatacgaggtcgatattgccaggttggtacgatatgcatatccaacagctcccgaagacatgatggaaaagttggctgttcaaacatttattgatggccttcgtgatcatgaaatgcaaagaacactgcgattagctcgtcacaagacgctggtcgatgtcttgtctgccgccctcgaatacgaatcagctacccaggcctctggtggttacagtaaagtgaggactgtgaaagaggaacaggatgaggacaaacttgaccagcttgttaatatgatgaaaga

SEQ ID NO: 13985 - DNA, 480 bp, Diabrotica virgifera
atgtgtatgtataagttagttttcgactgttctttctctattcattcacgcagcgttggttactttacatttatttataaggaagcacagaaactataaggtaagaaatatattatttctacaaacagcaaaacacgtgccggtgatgtccatagcaaccttagattgggaaacacaggggcgggcctatcgcatatcgactgtacgttaaatctaacgcgcgtcattttatatgtggctacagtacttaattctgaattcggtttaccaagttttattcgatttttttagattagtttactgtacaataactataagaatgataggagcaacggggtacttgtgcatgtagcatgtgtaattgaattacactgacataacttactaaataaaaaattttgataacgttgagggcaaaataatgtagttgtccgatccagtattctgcttattcgaatttcattaaattgttacacagat

SEQ ID NO: 13986 - DNA, 479 bp, Diabrotica virgifera
aaattgtttgaagctgtcatgaaatcattccatacagaagtggttgaatttttatggatataggaaaagtaacaaaccatttaaagaatacaattatttttaattttcttataaaaaagtttattttattctggttaatggatttataaaataagtaaaaaaatgtcaattgttcgcctcttaacaggattaatttggtctttgttgctactggcttgtcattttttctatatccaaagttagctgcattgccactataggtttttccagccacatctatagtggatgtgcatgtttaactgtaattttaaggttatagaatatatattattgtaattatgtatttatgtatagatgtgataaaatggaaatgaacctatatatcaataaataacgttataaaatatatgatatttctatatgtgtgaaaagggtacaatattcacagttctgtcaatattaaatatattgattggcct

SEQ ID NO: 13987 - DNA, 475 bp, Diabrotica virgifera
gaaaaatcgctcatagttgttaaaaaatatgtgtatttgagtcacgaaataagattaacgatagacaatcaaatatgtgaactaaccagaaaaataagtttaggttctgctgcattcggaaaaattaaagacgtgtttaaaataaatgccccaatccatttaaaaaggaaagctttcaaacagtgtcttctacccatagatataataacaatagattaggccaggtccgaaaaatagcataacgcggagcagttcgggtcggtggtctatctatttctctctaccggcgcttagctttctctctctagcatatgatggccgccgcgtctgtgtctgtgtcgttccattactcccacctcttggtagatacgctcacattgagtggcatatccctagcctggtctattgttaacatgtctctggttctaccagtcctcacatacggagcaaaaaccttaactctcacaagaacatc

SEQ ID NO: 13988 - DNA, 472 bp, Diabrotica virgifera
agctgcagccccttcgcagggggaccgtcccatgttcccggcttgagagagagttgtacttaatagttatttatgatatacataagtgttgaaagtgcgattttaagaattctgcaattcacatgagtgccttaaaaatgtactttttaacacgtatatcatacaatattttttctacaaacgttataaatttataaaatacaatatttttgttaattgctgaaaccatgaaacctatgacccgtaaaaggtagaactggttgtctacactcgagggaatgtctaaaaattcttagcgaaaatattataccgttacataaacttgttttttctacaaacgtgttaaaaatgcaataatacagtttaaattaaattttataaaaccttttaaaccacctttttcaaattgcgcaagttgtactattaatattaatgttaataaatgaaatataaatattttgacgtttcacaa

SEQ ID NO: 13989 - DNA, 467 bp, Diabrotica virgifera
taacatggtattataataagaaaaacgaaatcgtgattacattgagaattttattttttacattgagaattttaaattttatgaaaccattgtttaaggttaatactccagaaaataataattagatttacctaaatatattagacaatcgtacgctaatgatatgaaactaattacaaactctaatagggcttttcatcgactctcatttgtttcgagcttctgtcttatgttgtataatctgtatacagggtagcgagaaagtacggaaacacggaaatttctcggaaaccgctcgaacgatttttgtaaactttggtgagtaaggctgttgtaatgcggccgatattatagtgctaatcacattgttgccaaatcctccgcttttctggaaatataatgagccttcttacttcaaatagaacatcctatatatttttgcgttttgaagtcatctattaaaaaaa

SEQ ID NO: 13990 - DNA, 474 bp, Diabrotica virgifera
tttctaggtcttatgtccagctgatacgtaaaattttgagaaaagtattttcctgtaattttaggaataaaatttatttttcactaatcaacgatatctggtgcttattgggtgcctttactgtccagtaaaagctgtaaatgttcgttcaaagctttttcataattcttccctcttttgatatgtcgctactccttctattggctttagcaacacaagcttcatcgatattttccaactatctcgttgctatttgtccaatttttattcccataatatgcacgcaatgcatcattaaatattaaattttttttttcgaggaactaggtaattcagaattgttttccgcagtaaactaattatgtacttttaaattgtcttctaatattatgcttatttcgatgcgtccacttacttcgactgccttttaaatatcgtccaaatccagcttttagagttttagaacccaactgt

SEQ ID NO: 13991 - DNA, 477 bp, Diabrotica virgifera
gattcgtgccgagaacttcagtcgggagcttttacccccatcaagtggtcgaaatagtcatacaagttaaacgagttttagtgtgggaagataaataatacctagtccaaaaggcgttaaaggtcaaatttacttcttcgcatcaaagaattgttcattaaatatgaaggaagtgactttcatctggacctttgcactggttaccgttattatagcacaaatcgtaccagccacaactgcttgtaccaaaccattagcgtactcagacgaagagatctttaagtatgcgaaatgtgttaatgcgcactcctcgactatcaggtacggaaaacgatcaaatgaagatgatgatctattgcaatattctcgacaaaacgaggacaaccgtgtagtcgctaatttccttgaagaactatacgaatatttaaacaaacaaaacagttaaatgttagatatagattgatatcgatattctgt

SEQ ID NO: 13992 - DNA, 472 bp, Diabrotica virgifera
ctctattttacccctctgcgggctttttatatcttcctataatttggactttaaaagtaaacggtacgtgagtatccaagcggtacgcgaggttacccaaacaagctccctcaatcaaccgtcgcgtcgctttgtttgtgattgtagaaacaacatcttctgtaacgacctaattatgcttaaattatctacatttttttagatacatattatattatatagtaagggttttttccctatccgactgtacagtcggaagaaactttcatggctgcgtaatattggacaatggcgtggttcaacaatagaagaattatttcgcgcagaagcagatagagaaaggtttcaaaaaattgtaaacatgatgactgccaacgtttgaatacggacacggcacctaaagaagaagatatgaaaattatgaacgatatatatgagataaataaagtaaagtagtgaccattgtcttatt

SEQ ID NO: 13993 - DNA, 475 bp, Diabrotica virgifera
  SmartBlast Evalue=1E-22; Info=Phospholipase A2B n=1 Tax= Tribolium castaneum RepID=C0LTQ2_TRICA
agatgttctaacaaaaataatgtaacgaacgaaactgtcacaaaaagactgtcaaaatgacattgttgccaaaactaaagaatgtgacggtaatgttcgcgactttgctgttttgtgtttactcgggattgacgggaagtccatgccgtcgttttccttgaagtttcccgacttttcgaagatcgggcgccccgcgaatatactcgtcgtgcctaaaaattacacgggatacagggtgtcgcaggattccattcgaatggtgtatgtcaacgacttcaccgtagctattgtggaactaggagccaataaattgttgttaaattgtgaattaattgaaatttggaaaccggaacaagttatgcaggtgttgggtgaattaacggacactgccagaccgataatgatctcttttgaggaaatggtgactctgatgaagcaatgtaaacaattggaagaaatgaggataatgaggagg

SEQ ID NO: 13994 - DNA, 476 bp, Diabrotica virgifera
  SmartBlast Evalue=2E-27; Info=CG8503 n=4 Tax=melanogaster subgroup RepID=Q7K561_DROME
cttggaattatacaagtgatgacgtctatttggagtaccccataaaggatccgtataacaaatgctaagatgatcccctctcttgatatgagttccagctgttattactaatcctcctttattggaaaagctcttggaacagttggctgaacagctatgttctaacatcgacgcttgctcgtaaattgctatgtgattgggttccgtaagaggtacttcatgtgaatttaccattataattccacaaacttccataatctcttcttctgtaaaagtcccagctaatttaaaaaacttaagtataaattgagcaatttgtgtcctttcgtgttcataactttgagtcccttttctttcttggtcgtgagattgtaatacttctatctttttccacacatctggaaggaactgttttgataaagtattctcaacactgtgatgcattggtagtttggatgagtgatgccgaaattctt

SEQ ID NO: 13995 - DNA, 479 bp, Diabrotica virgifera
gattgttctttgatcgggctattaaccagtgctactatagtatgcggtttaccgtcgtgtttctactatcgtatgatatcataaagccgccaaaaagctgtacaaagtgaataaaacaaatcataggaaatattgctttaattttacaaattaatacttaataatttaatttgtcacatcaatttgctattttggttgggaataagcaaattttgtggcttattcccaactaaaatagtaaaatgataattcttctgacttgtgtgttttattcactttgtaaaggttgtttttgtcggtactgtatacatgtacagctaatcaccataatcttttctcagaaaggtttccacacaataatgaaaggcacctttgtaggcgaaaggtttattgctaagtactaataaacatttatactactactatttaggaatatacaataaacttcaggtagatcgcaccttcaaggtagacggcat

SEQ ID NO: 13996 - DNA, 478 bp, Diabrotica virgifera
acgataaggcaggacagttggtaaaggggattaacattgatatgacccaagatagaattatgtggagaaatgcaattagggaagccgaccccgcatagggataaggcaaagagaatgatgatgatgagcagatggatgtgtgcaaaattccaaaaattttaaaatgttgtttttaacaaccttttaactttaaatataacgtaaattcatattaaaactgtattttactcatattaacacgttgacggacagtgcgtcaaatgtataagcaagtgttgtgacaccaatatgtattttgccaagtagaatagggaaaaatacaacgtctattcgcgatgaaaaacacctgacctctggtggaataaatttaaactactataagtggtataaacaaaccagaaaattgttgatttgaatggaatttggtcactattaagaaatttttagtaaatttcagcattatgagtacactaaatta

SEQ ID NO: 13997 - DNA, 473 bp, Diabrotica virgifera
tctctgtcacaatctaagtaagtatgaccaacctcaggaaacttgtgatcgatacaacggaagtatcccttcacaataagatatatatcccttcacttaaggggaagatgcaaaatgtagcctgtcaaatttttcaatgtgttttgaatgtacctattcatttttttcgacttctgagaaaactaatgagtatttctaaaaaattcaaaggcagcatgaaagattacgttattaccgagggccaaaagtccctgaaaacttctataacgtttattctaatgagttatataggggtgaaaataaaagagaaaatttagtgtgattttcaattgcaaatatttaattcaaaagaaattttttattgcttctaagggacattctaccctcggcaataacgtgatctttcattctgtagttttattttttttttttaatatttattagttttctcaggattcgaaaagatgaatagg

SEQ ID NO: 13998 - DNA, 478 bp, Diabrotica virgifera
  SmartBlast Evalue=2E-10; Info=AT-hook-containing transcription factor 1 (Fragment) n=1 Tax=Harpegnathos saltator RepID=E2BYM1_ 9HYME
ttttcttctgctgggtgctctctggattttattataaattgggcctatgaaagagccgacattttaaaaactaactgtgataattactgtgttcctttatttgattattcacaaattcgattggataacaatgcgaatgttcttttgaatagttgtacaagacagataaatggtttgtgcgttctttataagcacattgtaagcaagttgtggactttcgttgggtgtttagaccaagttaagaaacatttaacaggattggaaatggtttctgtgtattttgaggttctccagtggttagtaaacgtaggactattaccagagtgtcatccttcagcttatcccagacctgacaattcggaacgtatcagtgctccatattttgcaaaagatctgacagaatattacaatgaaaaacgtgcccagttacggatattgacaaaagaaactttcggtaacacagatagtcttttattta

SEQ ID NO: 13999 - DNA, 479 bp, Diabrotica virgifera
gttaagcgaagtgagttaaaaacaaaaaaaaatgaagttgcctcttggaattcttgcagtgtcacttttactcgttttcacgatgtgtgaagcgggaactttaggattctatacagctgctactgatgttccgttagatatatggttaaaacgccttacgagtaccactcctcaaaatgaagctgcagcagacacattatttcatccagattgcaaaactgatcgtgactgtaaaattttttgcagacaatatataacaaaaacatcgtcatatagcaaacaacactgtaatgaaggactgtgtgattgtttttagaactcttatgtaatagttatcacgaagtattgttaaagcattagagaatataatttttttcgaatacttaattatatgtttccattactttttttttattaattattcaacagaaaattaatcaaattttattacaatacaaaacgaataaattttataccgc

SEQ ID NO: 14000 - DNA, 467 bp, Diabrotica virgifera
gcaatcaaacggcacaaattcaactttgaagtgggggatgggtagaatctaaatccaaattttcatgcaattaggagttgaccctgaaaattatgtgtgtttctttttatcttttaaatcattttacttaaaatcatttttaactatcaaataataattacatattgagttattttatttttaaactttaataatatttataaaaaattttactttcttgtaatgtatttttaaaacaagcaatcatttaaataattattttgtaacaatttgtattatttaagaatataataattacattttggtttcgtagtaagtgttttttaagaatattaatgtatagttttaaaatattgtattgcaaataattatcattattaaatggttattatttgtgaagtattatttttcttttttcacacccttatgtatgtaacaaaactaagggactttctgaaaggtaaatc

SEQ ID NO: 14001 - DNA, 473 bp, Diabrotica virgifera
ctcatgttattattatattatatattaacagtgttcagtgaccccaaaaacccactgaataacaaaatgtggccattaatatacagaaattcaaaggatcacaaagagctaccttgatggactgagaagtcatccaaatgatgaagcaagacagctaaacactcctcccgaattcgcaagacgactgaagaaactatggccaacagatttaataaattaaatatattatgatctaatgtaaaaattgtaataggagggttgccacagggcagcttctccctcatgtatttaacattcaaactatttacttatagcttcgatgaagcagattgtaaattaaaatattttgtaataataaaaattataaaaacatattatgtaataataaaacattaatatgaatactgattttgacatgtttatgcactagatgcatgttgtaccctttaaaatgcaattgttatgcatttcca

SEQ ID NO: 14002 - DNA, 476 bp, Diabrotica virgifera
aatacgtcaattttgttttattgtaatatagaaaaaatatttaaatttgcaatttatttacacccgttcaacttcttgtgggtgggcttgttaattgtctgggcaagatatgccagggcaacagtctggataaggcttggacagatctacaggtgttactacgcatggaggttctgctcctacagatccgcagcctgctttatgtataagcctgttcgctccacacgttaattttacacaatgaccttcttgctgcttggattcgcccagtttcatagaacctatagcagtggtgtaacaatcaccaagatgctctgttccattttcagagcgcgctattgctacccaagcttctacattaaaaaatgtaattgttacaatcaataaaatcaagaaagtcttcatcttatgtacctatatagacgcgacgtctttctaattacactaatacaacggttgttgcagatacgactcga

SEQ ID NO: 14003 - DNA, 475 bp, Diabrotica virgifera
acgacatcatcacatcacccagcccattgagtccactgtcttaatttctgatttcgcaatgctttgaatggcgtttcgtattctctagattctagatcatgttttctcgagtagtgggcctagcggcaaaaacaaggtctttaatccgtccccataaataaaagtctaaacagttaaatctgttgattgctatgcaatccactcttgtaagagtaaatgcttgcatcgaaaacgatgggcaacaatttgaacatttaggcagtcgctaagactaagtaagtagttgctttatttctttgttatattttatagtgttgtttgtcttattgttattttaattaattatatacgtttacatctggaaaatgtttatttgttttttccatagcacactacttttccttaacctcgtttaccggtgagttatgtttagaatttatacatttcttaagatatctcgagatagaaaaaaggt

SEQ ID NO: 14004 - DNA, 479 bp, Diabrotica virgifera
  SmartBlast Evalue=4E-11; Info=Cytochrome b5 reductase 4 n=1 Tax= Camponotus floridanus RepID=E2AN18_9HYME
tttggctcccagaccggtgaggtcctttccggaggccccgaggcggatccagtccatgagggaatgtccaggttgaagggagcatttgttacggggattgcctgtagcagatcctgcagatgctaattcagctccaacactagctacactcgctgctaatttgccaacttgttgcaaaacgggagaaacgaatgtcggagcctttagcactttctcgttcaataaagtgcttatggcacttttcttaggtttattagggcttctggaaggatccatcgtcaacaaaaaataaaaactgataactttaaaacgaaacgaatttagaggttagccaaaatcgatttcagctcagaaaaataaatactgtaactgctgctgaaatattacgaaaactgggataacacaacactatacacataataaattttaagcggtttattcacaaaacacttctgagagggcgagaatctaattttaaa

SEQ ID NO: 14005 - DNA, 478 bp, Diabrotica virgifera
  SmartBlast Evalue=3E-63; Info="Surfeit locus protein, putative n=1 Tax=Pediculus humanus corporis RepID=E0VWE5_PEDHC"
atattttcaaaataatgtctggttcacgaaatcttccacaaagtaaagaagcactcttaaagtcttatcgaactcgattaaaggatgatgtcaaaagcatgctcgaaaactttgaagagattgttaaactctccaaaggagaacacgatacacaactatccaggatgacacaatgtgagcaagatacttatgagatgcatgtacgagctgctaatatagtaagggcaggagaatctcttatgaaattagtatcagatatcaaacagtacctgatattaaatgattttccttctgtcaatgaagccattacacacaactcaaaagtttttagatctaagcaaactgaatgtgaccaaaaattaatgtctttgagggatgacatggctgctgatctttacgaccttgaagaagaatactatagcagtataaataaataatgatagagtttaagaattatattaaattattatttattagg

SEQ ID NO: 14006 - DNA, 478 bp, Diabrotica virgifera
tcagacggtagatcggtctgcctccttcagaattccctatatgtacgcattaggtggcgttaggtctggtgagtagcgatctcccaaaatgatcgtccagtattcgaagagactccctgaccgtgtgacaggttgccccgtcctgcttaaaccattgttgattttaagcttggaccgttttcgcgacattttccatatgaccgaaaataatactccacgataaaaaaaaatctgcaaaactgagaactatcctgaagcacaggcccggccctagggatttttccgccctgggcaagatcggcgactgccgcccactcccactccttggtaaacccaaaaactcatcaatttcaccatggctcttaatttgttgaaatctttcacttgatgcaataacggttgtgtctataatttttaaatagaagtctaagaagtcaacttaatatcgtgtctctggatctaggtccatacttttatc

SEQ ID NO: 14007 - DNA, 476 bp, Diabrotica virgifera
  SmartBlast Evalue=5E-40; Info=Zinc finger protein n=1 Tax=Culex quinquefasciatus RepID=B0XBC4_CULQU
aatccgatagagattgttcagacaatgaattttgtgatgaatattataactccaacgatgattttgatgtagaacaggtagacccgaagaaaaatgatcctgagtattttgaatttaattgtcttttagaagaacaggttgataggcttttgaacgaaactgttgaaagtctaagtaataatctacaaatatctccttctcttgcaaaggttttattacatagccaccagtggaatatacaagaagttactagaaaatttaatgaaaattctagaaatacacttatagcagctagaattgaaccttctacacctccaagtaatttacttttgactagatatatcggttgcccagtttgtgtaactgttcaacctttagataaattttatagtctatcttgtgctcatatgttttgtaaagaatgctggacaatgcattttaaagtacagataaagcaaggcatttctacaggtata

SEQ ID NO: 14008 - DNA, 477 bp, Diabrotica virgifera
  SmartBlast Evalue=8E-35; Info=Broad-complex core-protein n=2 Tax=Aedes aegypti RepID=Q16YU1_AEDAE
tacgtggtttattttaagttattaatttaaatagttttattttattcggtttcatatatatttgttttgttaatttaatgtttaaatcactttattttccgtcctatcatgacatcgaaacacttctgcttaaaatggaacaaattcgaatccaacattttgagtgcctttgaaagtctccagaacacagaggatctcgcagatgttacactgacttgcgaagggattaatatcaaggctcacaagtttatcctgtcggcgtgtagcccctatttccggacaatatttaaagaaaatccctgccctcatccaatagtaatccttaaagatgtagctcatgcagatctgatggcaataatcaattttatgtaccatggggaggttacagtgtcagaggaacaatttgcttcttttttaaacacagctgtggtactgcaagtattgggtcttatagataatgaagagactcatcaaaag

SEQ ID NO: 14009 - DNA, 474 bp, Diabrotica virgifera
ataataattatacaagacaaatgttttaaagtctctaaattctactaaataaatacattgttaatactttatattatgcttgttttatttatatcatatgataataattacgtgattcataagttaattaaggtcgaattatttacgtgaaccgaggacgtatctttcacgtgaatactaatatatacattccctaaaagatacgttaatcaacacgtatttgaacgtgaatttcccgaaacattttattgctatttaaggtaaataacacgtctattgaagacgagttgttcacgtaatttaaagacgtattttcaatgtgacattccaaccaaattgtcacgtgaaattcacgtaagcaatttacgtatattggtgacaaatgtacccaaaattcacgtaattaacacgtcggtctgtttgctgggatcctaataatatcagaagctctatttagcgtttacatacaaaaca

SEQ ID NO: 14010 - DNA, 477 bp, Diabrotica virgifera
  SmartBlast Evalue=6E-37; Info=Cytochrome P450 n=1 Tax= Leptinotarsa decemlineata RepID=Q3I417_LEPDE
cttcattggacgcagttaactttcattttacatcatgctgacgttctggttactagcggttattatagctctcttttactactatgctatacgaccaatgagttattggagacgaaaaggagttatatcagaggatggttattggctttttggaagtcaattaagggtactttttaatttagaaagttcttacgagatgttgcaacgagtctatcaactagctccaaatgcaaggtatataggaatgtacgaacttacaacaccagttctaatgataaaagatccaaagcttttgaaacaaatcactgtgaaggaatttgaccattttgccaatcataaagccgttatacccgaaggagctgattcactttggtcaaataatctgctgtcacttaaagatgagcgatggaaagaaattagagcagtacttagtccttctttcactagcagcaagatgaagatgatgttcgaccttat

SEQ ID NO: 14011 - DNA, 477 bp, Diabrotica virgifera
tgagttttttattttattatacagttgggaaactcgctctgcgaacttgtattaatttctttttaagaacaacataacgaaactgttccttctaatacacggaacatttgttttgccactaaggaaacagactaaatatattggagtttcctccatctggtaactcaacttgtcttacagacaataaaccaaaattgtctcgtggactagaccaaatcggtccgcgactatacactgttgtagctagatcttgactcctcgttcttgtcctaattcaatacaagattcctttcaaacacagacattacactcccattctggcaatcaccagatagttatcaaattgaaagaaaccaaatatttcttctaccaataaaatagccaggatatgttagtaactaagtcacagcccactaaattcgtaaatcttcttttgacgaatccaaatcatagagccacatcagctaaggctctcct

SEQ ID NO: 14012 - DNA, 475 bp, Diabrotica virgifera
ttgagaagtagtaaatataaattagtttaatatttcaataaaatataaataaaaagtatatcatataatagaagtataacttcttacgtgcgtacaaagtacacacgcattcttttttatacattttatgattgtaagtatattatataatttttttttaagaaaatacgtatttagttaaaattttcggcaacaattattgttcagaaatcatttctttgtggcatttttcaatgtgtttgtgtgtgttttattctcttataagtataacttcttacgtgcgtacaaagtacacacacactctttctttttcgaattctgagaaaactaataaatacctttaaaaaaattcaaacgcagaatgaaagactacattattaccaggggccgaaagtccctgaaaacttctataatgtccccgaaaactttgtggtacctcttcgagttttttctactttgttacttcgagaccaca

SEQ ID NO: 14013 - DNA, 478 bp, Diabrotica virgifera
gtggctatctcgaagaacgaccaaacacgatggtggcgggacccatagaacccacatgcttccatggtggaaacagacttcccacattcctagacatagcaattctacaaaatgtgggtcaacaatacgaaatatattcaatgaatgagggtgactcagatcacaacccaattgtactgaccctgggagcagtagaaacaaacaacttgcaaacctataagaaaaaacgaacaaattggccaaactacaaaagaatagtaagtgaaactattggtgcaataccaacaataaatacaaaagaagaactagaggaatgcgttaaacatctagaaaaaacgatacaaaacgctatcgaggccagcaccacagaagaaaaaactcacaacaacaaaaggaagattcagggaaatcagcaatgagctgaaagaactgataaacgagaaaaacaggaaaagaagaagagccaacagaacaagaa

SEQ ID NO: 14014 - DNA, 477 bp, Diabrotica virgifera
gcatatggacaggattccgatctggaatggcagaacactgcagagctgatcatacagaaaacatattttttgaaaacgaaccaaaactaaaagtcgcgaattttaacctacgggcaggtatagaggaaagcatattattgtgcatacacgacaccctttttcgtggctattgggacttaaatgaagaaagcggcttaatgaggtttgcagtgtactatttaggagaaccatcatgcgacaagaccttttactttaaaattacaatgttttgtacagattcaaacgaagaagtcatttccatgaccgggccctgttacccactcaagaatgattcattcgataacagattcatcgggaaaaagtatctgtccaccaattttgacatgattaaaaatctttataacactaatggtgattttaactattctgtaggaattattgaacggaatgttgttctaccacaaattattgaaactg

SEQ ID NO: 14015 - DNA, 478 bp, Diabrotica virgifera
  misc_feature (463)..(463): n is a, c, g, or t
  SmartBlast Evalue=1E-65; Info=Acetyl-coa carboxylase n=3 Tax= Culicidae RepID=Q176P0_AEDAE
atgtggttacaatcagttcttttcgattgtggatgcgagaaagcgatttccaattcatccatagcctctaaaattactcgttcaccttcgttttgtagatattcaaaagatgcttctttggtaataagatctgaatgtctgataatagatcgaataaagaatcggtaatctgttatttcttttccaccagctcctcttgctttgccaagatacaaatgcatcttttggttggaagtaggtaaagcctctaagctgtaggatctcattctgttcatctctaactggaaggcacaggctggttccaaatggcgataaattctgtcttccacgaaaccttctctagctctgtaggtgaagaatttgggtgactgcttgtgtttaagggcgaaaaggtaatccttcgaatgtgtcgagcgagcagttcgtccttatgtcttgcacagaatgcagcaaacattttacncatagtcgaatcgtc

SEQ ID NO: 14016 - DNA, 477 bp, Diabrotica virgifera
atttttcatttctaagtatggtaaactgtccgaagtaatcactgagtttgttattgaacaggaccacttaacttctagcatagtagttggtgatcccacaagtccttcaggagaagcagctcaagggatggtccaatgaaatgaaaagtccacaaataatgacatggttagtattagcctcctcgtaggcacggatagccatttttcatatttcttaccccaacctgttgagctagagcttaaagattttggttcaatagtaaatttacaaaacattttatatttttcctatctgtcatgtgattaacttttttccagtaattctcgcatttcttctcaattcgcttttctactcaaaatcagtccaagatccgtattttctgtcataatttattaaatcgcaatagttcaaataaaaataccttataagcttaagaactgtcaaaatgtgttgaccccaactacactagcgccgct

SEQ ID NO: 14017 - DNA, 471 bp, Diabrotica virgifera
ccttccatgattacgttaggctttacaagaaaatttaccataaagccataaaggccgccaaggaaatttattacaatgcaaggctggctaaatcaggtaatgttgctaaggaaacgtggtctatcgtaaatgaactgagagataagacttcttctcccaccacaatcccgacttctcctgagaccctgaacaattactttgtaaatgtggcaaaaaatttaacaaatactatacctccttctcaggatccgatttcatatctttcgcataagaatgtaaaaagtttcttttttacacccatagtattaggtgaactacgctctacaataaatgacattaaaaataaatcgtcatctgggactgatggcctcactcttaaaatgttttctgctcgacctgattgcactttaaaccatcttactaccttaataaacaggtcattcgaaactggagttttccaagctgccttaa

SEQ ID NO: 14018 - DNA, 478 bp, Diabrotica virgifera
  SmartBlast Evalue=4E-65; Info=TBC1 domain family member 9 n=2 Tax=Aculeata RepID=E2C358_9HYME
tcttatggctccccttccttcgtcattgaaaactccgatcaaataatctgacagcaactgcatcgcttctccttcatctcggcactccagaagcttctcttggttccactccagcaacataagagctacttgaaaaatgactttggcactgtcatagaagaaacaatccataacgttaacggcactttcgtaaggcatcacacataaaaatattgtcaggaaccatgataatgagatcatgttgatcatacctaattgattgagtttgtcatgcaaacttggcaaatgctcgaggatcaattcatctaaaattccttgatctactactgctcctactactctagtgttataatagtctggcaagagattctcgcacaatgtggccaatagccagaaagcttcttcttcattgcagtatatcaaaaggacggaagcaacaatgttcatagcctgacaataaccaatactgggattgtga

SEQ ID NO: 14019 - DNA, 467 bp, Diabrotica virgifera
tatgcacggaagtggctagagaacctaattctacgcaaaaactattctataattttgtttggaaaactcaatactttttgagttattcgtggttgaaaattcaccattttcattgaaacatgtcaccttttcggacggtttttttttgcgaataccttaaaaatgatccttctcacgaagaagactacacaaattatttttgtagcttatgaaaaatcaaagagagtcgtttcttcacaaactttggttatggtacaaaaggagatatggtaggtggagagcgattattttttttgggtatgctcaaatcggtgtgttcaccttaaaataacaataacagagaaatggtcgcttttagttataaaaaccatacaaacgaaaaaactaggaatatctaggccacataatgagaggagaaaagtactctctgctaagactcataaatccaaaggaaaaatactcgggaa

SEQ ID NO: 14020 - DNA, 477 bp, Diabrotica virgifera
  SmartBlast Evalue=1E-25; Info=Helicase-like protein n=1 Tax= Oryza sativa Japonica Group RepID=Q9AYF0_ORYSJ
atttaggattgcacgtcatcgttatgaaatacgtcggtttcccaaaacgacttacaatggccatgcagtcttgatagtgttccatcataaatcgcttacccccgtagtaagtggagggcagaataattgggtgcccgaattggacattacggtttgattcgtattgggctagataatcttgtaatccggaatagtttgtcaccattagcttattttggtttattcgtaaataattcatattgttgctctctattttcgtatagcaactaacaatatactgttgggttaatttagcactttctaaaagtggattgaatgtatcacgaaccataaacctgtacgcataaaaagcttttaatgtgacacgttttctgctagcgctttggcgtgttaataatatgtccttgcaccaaccacgacctccagttggatacaatagcacataacttaatggatcggccaacggtgacaaatgtg

SEQ ID NO: 14021 - DNA, 478 bp, Diabrotica virgifera
aaaatttaagtaatatatgttcataataagttattagatagtacggataatacctatatcttgaaaataaacaaccttcgttacaataaacagctttttgtttacaagataacaattcagttgcctcatatgaatagttcacagtttttttgcttcggttaattggacacacacctgcctttcaaaaatgatttccgatgtatggatcaaggggaattgtgttactcaaatattaacaaaacaaaaatttgagaaatacgggcatctactaaaatggaaaaagaacgaaagcattctcgagtttggtgcagcagatggaaatacttcagttaactcagtattaccagtattaccaaaggattacaaagaatatgttctaacggatatatcacctaatatggtagaacatatgaagaaaaatctaaatatacccagaagtaagatcatgcaacacgatattggtaccataagacttcaa

SEQ ID NO: 14022 - DNA, 477 bp, Diabrotica virgifera
aacagaagaaaatgtaggtgcttaaatttgctctgtaattattgtaccttacaaattagcaaaatacttgtgttttaatttttcgttaattgtttaattatgatagtaatttcactttaatttaaaacatttttgagttttctatattttggggagaaatatcaaaatatatgatacatattacacgtcctaatggcaggtcccagctgtaccaaaatcagaataagtgtttgtatctgtacgaaaatgacatgtattttaagatatggtttttatttcaaataaactggaaaaaatcatagaaatttaatatatgaggctatgcgtgcaacaagggtgaactccaatggcgagtttgcccttgttgcccggatagtctcatattcttgggttttgaggctgtttatcagtttgagtaggaagtaagtcaattataagtattgaatcattggattttcaatgatttatatgagtgat

SEQ ID NO: 14023 - DNA, 477 bp, Diabrotica virgifera
gacgtttcgctcggagctacaggaggtacctgttttagtggtccttctttcaatgtcagcgcgtcttcctcgcttggagaatgcaatccattggtgttcccgttagtgaggacgggaggcgggagaggaacagagtcgccagaggagacacaatcagttgctattggctcgggtactgactctactggaggtaaagacataggttcggcgagattttcagaaactggctctggaagagagggtagcgattctgttgagatgtctggtaacgaatctgcaggatcgaccacacggtctaggatggctgatgttggcggaggtaaatcattgggagatggtaaatctactggaaaatcgtctgatgcagatttttgctcagtatcatctactttagattcttctacgctttcaacagaagataccggtatatccggtaatgattctgggatagcaagaccattagaagattcttccgac

SEQ ID NO: 14024 - DNA, 476 bp, Diabrotica virgifera
  SmartBlast Evalue=3E-39; Info=Bromodomain adjacent to zinc finger domain protein 2B n=1 Tax=Camponotus floridanus RepID= E2AXF5_9HYME
aactcgttatcttcttcatctagcagatcgtctttgtttaaggaaggagaatctgctaatggatcttcatcaaatctcagatgagacttttctatgctttcagttctaattttcttattatggagtagagttaacttcctaattttcatgtcgagcaaccacttctcttttttctgttgtatcacagtttccaaagaattttcgatctgtctgataacggctttattctgaagcaattcattacaaatatacgccagaatttcagccttagtcgtaggacaaagactcataaacggccgggttttcaacaaatctgataacttgtatgtctgattgctgtgtaattgttcataatattgcgcattctttccagtctgagttacaaccatctcgtcctcaagttgatgatgatctgcaattctcttttcacgttctctttcgaaatgaattccagttaaagccttaatctccccagt

SEQ ID NO: 14025 - DNA, 474 bp, Diabrotica virgifera
gaagatattttaagtacaaatgatttgagctttcaaatgagatgttcacgtaccagatttccaaaacaaggaatgcgcatatcaaaatctgtctagcgattgtgtttgaacttcttgggaaatgttaataagctaacaacgaagtaaaaaacttctgttaaaattggtataaatatttcattaaaaattaaatttaaaaatccaaatggattacaattattatgtaatagcctgcaaatactttaaagttcactgaagatgaactgataagtccgaaaacgttcattctcaagactatatttttaaatttaatttccaattaaactacaacataagttttttacaatgttaatactttaaaattttcaaactagttgtcagtgctgtttcttttttaaattattactattatactattttatttatagttggaaatctgatacgtaaatatattttaggtgttaggattaattt

SEQ ID NO: 14026 - DNA, 476 bp, Diabrotica virgifera
gttggcgtagagcagatagcggtagaatttcatatacctacttcgattgtcgggccatgctccatagtcaggccagttgcagttcggtagtggaaattttttcgctgttgacaatgtgaaattcgtttatttgtgtagttttgattatttttttcgtgtagttttgcttttacttactttttgaacttttggattaatggtatttttttttattaggaacttctatgttgcagtacaataagaagaatatcagatagatatgaaacaattttttatgagtttgaacaaagtccaagaattacaaagcttccaatttatattcgtggtccaaaaacaaacccgtagaagaatccggtaacaagagcaactaaactaaaatagatcaaacaactatagaataaacaaaaagtagatcaaacaactatagaataaacgttttatatgataaatttgatcaagattaggatttgttcaaa

SEQ ID NO: 14027 - DNA, 476 bp, Diabrotica virgifera
gtacatcacacgaaccaatttgttttcatatttaaacatgtgcggaatattccatttgtttaattgtcgcaatttataaacaatattttggcaatggacataattttagctgactaattaaaaacctttgttatttttggcgtgtgggctatgacccaattcatgttgccaacaagaaataatacattttagaatcattctcaagaatcacttcaaccacgccagatgtgcctttaacttcactcactagaatcaatatgtagtatcaaatagagtcttcaactaaatcgcgtacaagtcacaatcagtacccaacgttctcccggggtaactaccctagtgtcggtgttataaataaattttctaattgctattggtgtttccattatctgaagagcctactccactgagcctcgaatatttgacctagactctgccgataaggtaaagtcgttgatgagttacagggctcccga

SEQ ID NO: 14028 - DNA, 476 bp, Diabrotica virgifera
ttaatattattaaataaaaacaaaccgccagagtaagaacataattcttgtaataaacgttcttcactgtttcttgttggatatggtcctccccaaatgacatatactctaatatttttcttcttgaaaatggctgtgtgtcctgccaagtcttcatcgttaatttttctgtcaatgaaaataactatggcgctatctgtaggtaaagctgcggcagcttgtagagtagcgaagaaagcaaccgctcccaagggctgtggaactcctagttccaggttttgatctctgattttgtaagaaatagcatcgtaaagctgctctgtatcactaccttttatttccaatattggcgcggaacctgtgctattaaatcttaaaacgctgaaagtgatttgcttagcaccagcagcgaccttgaatatgtttttcatgaaacctgtagccgccacagaactttcttttgtatcgtctactaa

SEQ ID NO: 14029 - DNA, 478 bp, Diabrotica virgifera
aaagaaaacatgaaaacagtgtatttattgtgagtcttgtgacttctagtgcgatgaaaagaaaaaattcaaaacaaatgtgctaagttcttggtaaagaaatgtaattttttgtaagttatttttaactatagtttcgcaaaaatgagcgattcggagacggccaaacccaccgaggaagttgttctaccaccgcctaattccacacaaacagaaccaagtccaccgaaaattcaaacaaaaaaaaactgggtgaagtttgatgaagatcgttcagcaaataaaagtgccgatacaccagctgttattaataccgaaagtgtccaagtgaatattgaaagaagccttaacagatcaattgatacaaataatgtggctatattggaccctaaacctttaagaaatgttgagttacctgtgctacagttgagcctatccgacaaggatttactaatggtgatattatagttaccctatt

SEQ ID NO: 14030 - DNA, 471 bp, Diabrotica virgifera
  SmartBlast Evalue=6E-19; Info=RRP12-like protein n=2 Tax=Gallus gallus RepID=RRP12_CHICK
ttccttcagcaaaccaagaacatggagaattgtagtctggccagcttggactgaagatacaaggactacaccagatgtgcttcccatacaagagtccagagtttgttcacagaattctgctgctctatcagcagccgggttggaagaaccttctttaacaaaatttcctgttgttattatagacataacagcatgctgtgccgcttttctccacttaggcttagtgtggatgcaaaacggattcagtaaggcattgaagatctgaattgtacttggctggttccaaactgctaactcttgtatttttagcaaagatcccaaaatgccaaatattgatttcattattgtattattttctgaatctgcgtaatcacttaatatatgcaaaatttttaatgtgatatcattgaagtgtttttttaaaacagcttctggaactgttttatgcccatattcaacaaggctaatact

SEQ ID NO: 14031 - DNA, 474 bp, Diabrotica virgifera
  SmartBlast Evalue=2E-58; Info=Lysyl oxidase-like protein 4 n=1 Tax=Harpegnathos saltator RepID=E2C1W1_9HYME
ctggagagggcagagagtcagatgaatctagcttcactcccttaagagacttacgcgtgccttataatctgtttagtcttatagacatttgtgatacacacaaagagataagagtacaagaaagagttcttgtttactacaaatatgacaatcatcctgtcaattgtattaaaatatttaagagtttttatgatattaaaccactaggaatgaggctgctacaatttgatctgtttaattctaccaccaagtatggaataccagaccttttgcaaatgtatgatggagatatttacaatgtatcgtctaccgtaattgatactatcaccatgacgactgggaatgagaaaaggttgttcaagtccagattgccaagtttgagtgtcaagttatttgccaatggagcatcttcagttcacggatttatagcggaggtggttaccttgccaatttcagccattggattcaaccgag

SEQ ID NO: 14032 - DNA, 477 bp, Diabrotica virgifera
atcaaattttggcaatttaagtgatagcttcggaacttttcgagtatcttctttatattcttcaggttcttctttatcattatcatctttgttattctcttcgtctgcttgaacatcattcaaatcattttgatcatttgatttgttacttgaagtatcataattatcattacaattattagtattttcatgatctatagtcaaaccaggactatgaatttcatcattatgattatcatcattatcatcatgatgattatcattatcatcatgatgatttaagtgttctaaaaaatcattttgttctttaaactattttctcagatgtattattttcttttgaagagtgactattttcatctatttcttcgtttttatattcgtatctatcttaggaacttcgtcgtctttgtatttttcattttcaatgctgtctgttatattttcttgcatatcattacagttttccataacttg

SEQ ID NO: 14033 - DNA, 475 bp, Diabrotica virgifera
cattgattaataagtacatagatacctcactctaaggtaaaaccgaattcagtgttaaactacgcccacttacacctctttgcccctcaagtctaagtactaactggctggacggtggcgacatttattgaaatttttccaagattgaaaaataaatttgagtcgcttggctggcgtaatagacaacgatataagggtagtattcagcattttaacaaataattttaacgcgattgtaatctctattttggaattccgattttacttcagataaaacgctaaaaattgattaataaaaatagtgaagaggtttcttaaaaattatttaattattaatacactacaaaaaaacaacaaaatagaaaatacataataaaattagcagtgataattcacatgtaaattattttttgcaatttgtaaaagaatgatattttcagaactaatgcgaaataaactatttgaagttgatata

SEQ ID NO: 14034 - DNA, 477 bp, Diabrotica virgifera
  SmartBlast Evalue=1E-64; Info=RecQ4 n=2 Tax=Tribolium castaneum RepID=D6WGV0_TRICA
ggattgccggatttttaagaacgtgtcttaaaggggaagaaccagtaaataacagtaataccaagaaacggaagcggatgaaccttcaagctgaaccgtatcacgcaggtttgtcggcgtctcgtagaaggactatacagaacgcctttatgtctggacaactgagaatagtagtggcgacggttgcattcggtatgggcatcaataagtctgatattagagctgtgatacattacaatatgcctagtagtttcgagagctatgtgcaagaagtcggaagagccggcagagacggtttaaaagctcagtgtcatgtatttttggattctaagggaggagatgaaaacgaacttcgccgtcacattcattccaattctatcgatcatcacgtgattagaaaacttttagaaagaatcttcattccttgcggctgtaaaggacaatgtccgaaacatgaagtagcattttcgatagaag

SEQ ID NO: 14035 - DNA, 477 bp, Diabrotica virgifera
  SmartBlast Evalue=9E-47; Info=Chemosensory protein 11 n=1 Tax= Tribolium castaneum RepID=Q0MRL9_TRICA
ttatagcaacttcttggtctgcagtctcagaaaaagcgaaatataccaccaaatatgacaatgttaatttggaggagatagtacacaatgagagactactaaaaaattacgtggattgtttaatggaaaagggaaattgttcaccagatggtttggaactaaaaaaaaatatgcctgacgcgatagagacagattgcagtaaatgcagcgagaagcagaaagaagggtctgaatatattataaggtatttaattgacaacaaacctgaatattggagtcctttgcaggaaaagtatgatccctccgggacttataaacaaagatatcttgaatctaagaaagaggaagttaaggttgaacccattagcaaatcttaggtttcctaacttgtgaaaagaagttgattcgatgttagtatgcattagtagagtattgctttaaacttgtgataaaacctgttatttttaatacttttat

SEQ ID NO: 14036 - DNA, 470 bp, Diabrotica virgifera
  SmartBlast Evalue=3E-34; Info=E3 ubiquitin-protein ligase HUWE1 n=1 Tax=Harpegnathos saltator RepID=E2BHC6_9HYME
gaaagcacccttctattggcctactgcagtgacgatttgctaccatctggttgtgatgttaccaaagaagacatcgggaaactgaatgcattcttcgaaaagtgtgaaggtagtccaccttcagatgcatcttcagctcccctagatatttttgtggctaatccaataacgatggacatagatccagagtcaagcgcttttaataagtcacaacgtaacttcagatatattaaacctctattgggtgcatcatccaggttgggtagagctttagcagaactatttgggttacttgtaaaactttgtgttggctctcccatccgccaaaggagaggtcagaatatagtagcagctcctcccatgccatctatgtttgcaaggaatgttgcttcagagttaaatctgcttttagcagagggtttagattgtgacaggctcccaccatgtccatcagtgaaatgcagacttac

SEQ ID NO: 14037 - DNA, 474 bp, Diabrotica virgifera
ctactgtaacgatatccttccgctcggcattcaacagctcgtccgaagacaaccgtacgctcatttccacttctactccgaggcatccaagtagggcagccgagagggtaattaagaagaggaaggagaatcatgtaatcagtttctcgcggtgtactgaaccgggaagaactcaaacggcagatatgcaatggaatgaattggaactctgccaaggtggaagcgctctgtagtgaagaggcgtttcggcgagaccgtaaccgcagtgagcggtagctgccagctcctggtggttcatcggccgcctcctacccggagctggccgatgcgtcgatgcttgattgtgatcatactggattgaagtgtgatttggctatgagtcttcatttatattacgtgacgagaatataaagacgtggatatctatgcatacttcattgattaccataaagaaaagcacgacaacctgatgga

SEQ ID NO: 14038 - DNA, 464 bp, Diabrotica virgifera
  SmartBlast Evalue=2E-19; Info=Endonuclease-reverse transcriptase n=1 Tax=Bombyx mori RepID=D7F170_BOMMO
gcagctgttatcactgcttcttttaagaccctccatttatctttgatatttctgacctgattttcatttacttgattatactgttcaattatgttttctattttcgtttcatatcttgctctcttttcctcattagaggccaatatatctgaagcgtatttgatcttttttcaccttcttctgtttctttggcggtaatttttgtttatatttaattagcacaaggtggtgatcggagctgctgtttgcccctctatgacttctcacatctgaaatgtctgaagcatgtcttgcttctattaagaggtggtcgatctggtttcttgttttcatatcgggagaaacccatgtttctttggattatttttatgtggaaattttgtactgcttatcaccatttttttgtctgttgcaaaatctatgattctttgcccgttgtcattacttatttcgtgcaggctatg

SEQ ID NO: 14039 - DNA, 477 bp, Diabrotica virgifera
tgcggggtaggctgtgcttatggtaataatattgaaattggaatggaatagacgtgtctatgtgtattaaatacaaattcgacagaaagtggagataaccccttttcataatcactgattcaattgcatctttaaccctgtttcaagtagctaatgtcgatgcacagtagccaaaggggaccgacgcctttaggtgaacggttcgttttctttgtaaaaatgaaaatgtcgtggtttgtgccgagactcgaactcgtgcgctctggcttatgaggccagtatcaactgcagagttacggccgtccataatttattacaaattgaactttaacgaaagttggagtggagaaacatctagcgatcgtgttccttactataacatttgagattgcatactggagaaaaaccttaaatgtactccacgtatatcatacgatatacaatggaaattagcattaagattcatattcattggag

SEQ ID NO: 14040 - DNA, 476 bp, Diabrotica virgifera
atattttttacttgtttcaactctgtgcattttacaaggtcatgcacagtttaactgctatacctgtatcggtggagcaaccaccggatgtgcgctagtgctaagtaacgatgaagttgaaaggtgttcaacacaatgtaccgaatcctatatcgaatatcaaaatggggccttgaaattagtagagagaagatgttggactccaccacaaaataccaagtatactaattactgtgactggcttagaaattcaaatattacaaaaaccgccaacgccaaaattgtaaattgcagaatttgcaagtccgatagatgcaacggaacaaagaatttagctccaaaaccccgtacttgcgtttatggagctttatagatggctatttgatttattttgattctgcatcaactggtataatattatgttgttaaaatataatgtaagagcgtttgcttacaatataaacagtaggtgtttt

SEQ ID NO: 14041 - DNA, 476 bp, Diabrotica virgifera
agtgagtgcgttttttgtgtacaataaaataataataattattattaaatattataaaatataaatattcaattattctgtgtccatgctgtgattgcttgagcgttaattgctatctattgtatgtattttctcgataatctttaatttgttgccgtttgctgtgccgttgtctaaacctgtgccttaattaaccactgccctagaatcaagttatcaaatcaagtgtaatcaaatgcaaaatggaagtaaaacaagaaaggtatgaaatagagcatatagacctggataatgttcttttgcatggcttcaaatgtgaagttaaagaggaatccaataaccaaagtacacatgaagcttatgattacttagactcaaaggaacaggaaatcaagtgtaaccaaatggagataaaacaagaaattggtgatgaaaaatataaatcagtagaagagtataatgaaatggatttaaat

SEQ ID NO: 14042 - DNA, 476 bp, Diabrotica virgifera
  SmartBlast Evalue=9E-33; Info=Angiopoietin-like 1 n=1 Tax= Tribolium castaneum RepID=D6WEJ6_TRICA
atgaattgttaatagaattgactgatcgagataagaaaaatgcatatgcacaatatacgtcgttttcaattggtcctgaaaaagatgggtatcctttaaatgtgcttaaaggattttctggtgatgctggagatgctttaacacctcatctgaatgccaaatttactactcttgatgtcgaccaggacaccaatccaggaaactgtgcacaaatatacaacggtgcttggtggtatacaagttgccacgcaagtaacttaaatggaaaatatatgaatattgcactttcggacgcctataaacaccacggccttaattggtctggattcaggggccacgaatacaatttggctggttctaggatactaatacggcccataggagcatagaaattgtgaacgatgatacaataagtaactatagtatacaatctaaaatttaaaatgtattaataaatttaaataataaataactac

SEQ ID NO: 14043 - DNA, 461 bp, Diabrotica virgifera
tagtctagaagtatacgttgtataagacacatcttaatttcttctgtttgtatattattataatacgactcggttataaaataaatagtttctttactttatttgtaccttttattatctgctatttctaataggttataggcctcagttacgttgttagctcacatgtattaagataataattaaaagtgtacagtcgcgaaattttcgtgttaaccgaatacataatggcggagagtgcgaaatataacgtcgaaaagttgaacggcaagaactatcaatctggagttatttagtgaaaatgttactcatcaatgctgatctatgggaaatagtttcgagtgagttaccattagaagcagatcgaagcagttcttggaaaaacaaatgataaggctttgtcaactatagccttacttgttgacattaatcaattagtgcatatccggaacagggaattc

SEQ ID NO: 14044 - DNA, 475 bp, Diabrotica virgifera
  SmartBlast Evalue=3E-51; Info=Cytochrome P450-like protein n=3 Tax=Tribolium castaneum RepID=D6X2T2_TRICA
agaggcaatctcaatagtgggagatcctaaaaatcctacttacaccgaattaggagaattgaaatacattgaaagatgcataaaagaaagtttaaggttatatcccagcgctcccatgatttctagaatagctggagaagacgtaaagaccaaaactggatatacaattccaaaatctgcgattgtttccatttgtatatacgatgttcaccacagtccggattattacgaaaatccagagaagtttgatcctgaccgatttttgccggagaatagttcttcacgacatccttacgcttacattccattcagtgctggaagtcgaaactgtataggtcaaaaatatgcaatgttggagctgaaatctgctctgtccggtatactttgcaatttcaaattggaagcagttacgaaaccttcagatattatccataaagctgatatagtgatgagaccgtctaacgaagtaaaagtt

SEQ ID NO: 14045 - DNA, 476 bp, Diabrotica virgifera
ttgggcaattttgtttgccattagtctgcattcatcagtctgaatcaatcagttcttcattcgaagaacatcttcattggatgtgaccatttgcgatacccacaaatctgtaaaatcctgtggtggcaccacaattcgaatacgttaagttgttcagcattctggattttatcgtctatgtcttgcagccgtacaataggatcgactacacatagtatctcaggagtctctcacgaatatgcattgatgtttctgtgatataggtttccatgtcataaaagccttccgtgacatttagatgctggttaatatctcttcgtcagagtcaccaatcacatttaacctgctgacactgatctacgttcaactttctacacatctacatccaactatcattttactgtctatttttactcctttcagtttatcatctattatagcttctaaaaatttcttcgggctatatattgttgtac

SEQ ID NO: 14046 - DNA, 473 bp, Diabrotica virgifera
  SmartBlast Evalue=3E-71; Info=Cell division protein kinase 8 n= 2 Tax=Apocrita RepID=E2AC03_9HYME
ggttgttgttgctgttgctgattttgtctttttgtgtctgatttttcttcttggtcgtcgtcagtcaggaactcacgttttggatacggaattggacaacctgcaaaaatatcttgcgtcggtaatggttcctcggtaaaatatggatcctgcatagcttgctctgacgtaattcttttgtttggatccattaacaataatttttggagtaaatggaaagctttactatcaggcttaatcttatgcctgtccatatatttgataagagagcagttcacgtagttcgctttcttaaagtctttcagtaaagttggatgctcgggcatcttcttgatgtcctcccagtctttttcatgtgggaatcccataacattgaatatcctatctaactgatcatgatggtaaggattacttgtcttaatatcctcttgacgacaatggaaattggttcagaagtaagaagctctgcaaag

SEQ ID NO: 14047 - DNA, 476 bp, Diabrotica virgifera
cctcgccaaagagaatagtcggtttacttttacatgaaaatatgcgtaatttctttaaacaaaatatctgtcccctcatcatatcaggacagataaaacagtgaatgagtgacttttcatgccatttcaataatattccttataagtgaatacttatttaggtcgtaatggcgcttgtatgtgatattaaaagcaatacttcccaggaggactcagccgaaaaaattgatcctctggacttggaagacggtgaaatagaagacgatgaagaagaaccacccgcgcctgaagttccggttgccgaagagcttccggttgtggaggatccagttcccattaatcagccagatgaagcttcaccacaacatgaaccggttgttcatggtgaaaagaaaaaagggaaagaccgatctgaacgatcggaaaaaaagaagacacgaagaaaagaaagaaaagaaacacatgactgaggcgga

SEQ ID NO: 14048 - DNA, 475 bp, Diabrotica virgifera
tatatgcccaatgtgttatcaattattccattttgtttggtgaccggtcatgtatgtagttgttggtgtctcatttattaattattactagagggtgcaataattaatatctcataaccatacatctaatgattttacgattatagtctaaccatgatatccgtcatggctagtcagtcgtccgattcaaacatcgtgccatcttgaattttcaatggttattcttaaactatctccatctttctctaccctccgcacctctgaagcaaaggtttagtggacaactcttttgtaatgtggtccacataccttgttactgatcttccccgactactccctacttgcaccatcctattgtaatttcagctttttcagaccatctctactgaccacattaccaaaataagcggtggttttttcggtcacaatgtttcgaagcttacttctaacgtgcagctgtcagaatagactcgtt

SEQ ID NO: 14049 - DNA, 471 bp, Diabrotica virgifera
  SmartBlast Evalue=2E-42; Info=Probable palmitoyltransferase ZDHHC6 n=1 Tax=Salmo salar RepID=B5X155_SALSA
cttaacattccaaccagaattacgtttttggtttaaaaatgtttgtaggagaatttggaaaaatagtccattggggaccgttaactgctttaggaatcatcaaggttgtcacagccatgactatacactgttccaatatgtggtggccaagaagtactataggtggaaaacttaattttttagtttttgtgggtttctctggtctcactttgtataattttctatcttctatgtatcatggtccaggctatttgatacttaattggagacctgagaaagaagagcactgtaaaaatttacagttttgtttagaatgtcagggatataaagctcctagatcacaccattgtcgaaagtgtggtcgttgtgttttaaaatggatcatcactgcccgtggatcaataattgcgtgggctggggtaaccacgcacattttatcttcttcttaacctttgcaactgctggatgcct

SEQ ID NO: 14050 - DNA, 476 bp, Diabrotica virgifera
ggttcgtctctttttatctcacaacttgatatgttttccatcttttgcgttgttttgccggttattggtacgctcatcactgtattatagcatagttccccgtcagtaacaagttttattacttggaatataagttagggatttctaggggaaattaaagctccagtctagggtgattctgaaatttcatctggcaaccctggcgcgcaggctaggtattgtattaaatgtttatggttatcacagtatgttatgtaacctaacctaacctagaatgttgctgttatcaaattatttcacgtgatttaattcattacttttcgtaactattttacccttaagagggtatggtttgaaatcaacatttcaagcgcttttatggttttttttttaaactatggtagaataattttatttttaaatgaaataaccatattcagtacgattcaaaaaacatttaaaaaaaatgtcaaggc

SEQ ID NO: 14051 - DNA, 465 bp, Diabrotica virgifera
ttataatacagatttagagatgactgcattataaaaagtgaattcagagatcaaattgttttaatcctatgttggtatttacaaatataaatataacaatatatttatgatcaaaaattaacaaatttccaaatatttaaatagtgagcagataattctttatttattctttatacaatcttagatttttgcttttatatggtatcatttgtttattttaaaactatggtggatatgtttacatttttaaagtagaattcagcagaacccacattatccatgctccacgggatcggacgtggcacagataattgaacagcatggaaaatccgaacatttatttcttatatgttatacatatgtatacacatacgtatctacttactataaaaaggtgaagaaaaaataaatcttataagtttaaactaacttatagtacaatcttctgtgcaagttcaacatatc

SEQ ID NO: 14052 - DNA, 476 bp, Diabrotica virgifera
tttttaatttactacaattttcaatttaaaagtttttctctaaaatatcctaagctgcaaaattaaaaatctttaaaaattgcaaatttaacaaatgaaaatcgtcataaataaaaaaccgcacaaaatttttggttacattttagtataagttattcctggcatcatcctttacaacacctgataggtttcaaaaattcctgaattatatcacgttttttcacccacagcgtgtggtactaggcattttatttgtatggcatataatagggtagccagaggaagaataatccaaaacacctcttatatctttgtacatacaaaaaaggatcactaggcttaacgatttaattaaacgatattataagagcttttcgtaccaacttaataaggtcacatttatctatgtcacacacattcacacagcgctgtaaacgatttatgtaacgaatatgttataaaataaattattatgt

SEQ ID NO: 14053 - DNA, 476 bp, Diabrotica virgifera
gctaccctttcaagaatgttatcattaccttctactatcaaatctgttttttcttctagacatctattacgaacatttccttctatatgattagttcttaatataccatttatttgtttaagaactttaccactttcttcgttcattattttgttaaaggtctcatgagcgtgataaaagttccagtcagacccctgtggtagactatttgagtgttttatggcttccattaatgttttaaaaccatccttcataaaatctgaaatgttatcaaatcccaacatttttactttatcttgatcagggacttgttttacttccatattttcagaaggcatttttactttaaagttgtaaatacaaaactattaatggtgtgaaagttgtcaatttcagctaataatatatttataaagatatacttgaatcagaacgaaaatattttgttattaaagctctgtcacttaccacctcgt

SEQ ID NO: 14054 - DNA, 474 bp, Diabrotica virgifera
atatgttagtgttttcagtaaatatatttattataatttttgtgtctttggatttgtcttcctcgggagtaagataagtgttaaacaaagccctgatggggtattggtagagcattcgactacagatcgcggaggtcccgggttcaaatccggacacggacgattcttttttctttttttttttattttggtattgttttaataaaattttttgaaagtggtagtatcaaaattagtttaataatgaaataaaatacaaataaactgttttaagtacattttgaagtataacttcttacgtgcgcacaaagtacacacacattcttttttttttgatttgataacctgtagttttttatgacattctgtaaataccgttacttttgtcgctgtaataaaatttttattgaagaaatgcatgatatattttcaatgttttacgtttatattggtattaaagttttttgataaaaa

SEQ ID NO: 14055 - DNA, 470 bp, Diabrotica virgifera
atttggtgaagagttaagtactttccgtcttcatattttctattttcctcaaagttttagagttgattttagagtgaacgacaatgtctgttagagaaataaagaatgttggtgctagtttgaataagctgtctcttaacgaaaatgccaatgaaaatatcaaataccagtttgtttctgtgtttaaaaatcctagtaaattaccaattaatcaaatacatctggaaagaacttggtatgagttgaaaaaagacatcccaaaagatttggacctattcaatgcatcagaagatgaactccaagaaaaagttatatgacaagagaactgagatcatacctgctttggataaacgatggctaccaaaagttattttatataactatgaaccttatgtatgtacccagtcagaagaggagaatataagttttataaccaaacaatagttcgttttattagacagtttacagta

SEQ ID NO: 14056 - DNA, 473 bp, Diabrotica virgifera
gcccttccaggcttatttgcaaactgagagaccaaggagaagtttccgtcagttattggaaaacacatgctggacataaagaagaattaagaaccatgcatctgtcaaaagcagaagaaaaaatggttgtagaaaaattgatagctggggtgccacccactagaattttaaaagattcaagaaaattggaagtaacacaattagatagacttgctgtaataacaagtcaaggatctcagtaaatttgatccacaaagtataatatacacaagaaaagagatcaaaatgatatggtagcatcagccttaaaggttcaggaatggaatgctaacaacaagaattatgctttcttattcaagaaagaaggagaagaacatgatgtgctgagaaaagaagattttgcataggatttatgaacaagataatggaggataagttacgagaattccctaacataatatgtgtggacggaa

SEQ ID NO: 14057 - DNA, 463 bp, Diabrotica virgifera
gtatgattttacaaataatcctttgcagtaagcacaaggatagtaagttggttcaccatctgcagttgattgtttacgaaccggtcttattttattactatttatatagaggttaaaattagtgtcgtatcgaaaggcagataaagcaattcttctttctttgctactttttggaagttgaaatatattaataagttctgtttcactttgatggcttctttctaaatgtctaacgaagttttttgaatacacatcttcttcacaaaatttacagtgtgccacttttttgttcttgcttttttgaatttttatttcttttgaaaacagctttacaggggtagcagaatttaaatctttattattgattaaaataggtcggacattatcgataatctcagagttatctgtatttgtactactaaattcagactgtgagtcaatcttaaaggctttatcatcattt

SEQ ID NO: 14058 - DNA, 476 bp, Diabrotica virgifera
  SmartBlast Evalue=1E-62; Info=Cleavage and polyadenylation specificity factor subunit 1 n=3 Tax=Aculeata RepID=E1ZVR7_9HYME
taggcgaacccaaatccatagggacgtgttgtagttgattggcaccttgtaacagtctgacagccactgtcgttacctggacaatatatttgttatttcctaagttaccggcatacactgttggtccgtgggttgcgaatccagtattgtcgatttcgttgatttcttgaccagtttgtagtatcatcgttccatcttcctgacttaatatcaaaaaggcatgctggtcatctccacttttcacagtccacatattggaacatcctggtagtgtaaacgtcgtgacgatttgaggtcgaatatttttttgtagcacacaaagggcaccattttttccgtaaccggctgtagttaccaattctagattcagatcgacgttatcgttaaattcttcgctcaaaaatgctggttcaccaattgacatattgccacaaggtcctatgttaaggaaactgtcacacacttcaaatatatag

SEQ ID NO: 14059 - DNA, 472 bp, Diabrotica virgifera
caaatggttgcagcttacaaagagatgtagagaattaaaaataacaaaaatagaataaatgattacaatatagtcattcattaaaactgttctatatcaaagtagaggtagggttactgcgttgagccaattacgaatgctactgtagatacatgtaaactaaagtataatacgtttgtggggagcattatatataaataaatacagttatgtacaacatatatatcacaactaaattatattaaaagcgttttcaaaatataatacaaaataatcagctaattgctgcaagaacaacaaataaagttcctataagtcaagttaagttaaacaattttatcaacaaaagtacaattcgctcctcggaagaaaagtgtcacaactcaaaaaacatcatttttcaggacagacaaatagagtttttagatcctaatttaactgtcagttttaaacggtaactgctaaaattttt

SEQ ID NO: 14060 - DNA, 470 bp, Diabrotica virgifera
  SmartBlast Evalue=2E-21; Info=Endonuclease-reverse transcriptase n=1 Tax=Bombyx mori RepID=D5LB38_BOMMO
tcttcttcttcgggtgctatgtccgtttatcgaacgttagcgatcatgttggctatcataactttattcgcagcagatctgaagagcgattccgaagtgtgaccaaaccattgcctcaaatttcttaaccaagatgttcttcttcttcctcggcttcttctgcctaatattttaccctgcataattagatgtagaatgctatatttttccggatgtctacaaacatgcgcaaaatactcgagttttctagactttatcatttttaccagttctctgcctttcttcatcctgctcagaataatatcattacgcaccctgtccatccagcttactctcagcattcttcgatagcaccataattcaaaggattcaaccatcttaagcattcttcctgttaaggtccatgactcaactccgtagagaagaacggaaacacgtaacactttaaaattcttgtcctaagactcaaa

SEQ ID NO: 14061 - DNA, 475 bp, Diabrotica virgifera
tcccccttcatcttcttccatggcttggtttagtaaaaagtagcattcttttaacctagatttattcccatcttcattaaccgttctatgttcctgaggtacattatttcttaattcatttgccctcgattgatacttgttggatttttcttgtagtgattgtgctttttcaggatcatctgtggctatcgataccaccaattgtcccaaaaaccgtgctgctgcttcataatagtaagcagcaattttttgctcaccttcttggtcaaactgcacagctttcttggctgcttctatagcattatctagcaaggcatcactattatccattgtgccatacactcattaaatcaaggaatatttaatataaaatacattcaaagtatcacagctttatggtaggtaaaagtaaaaaaagcaatgatctcatgcacatttattggaatgtttcccttctgtgtttcatgggcgaacc

SEQ ID NO: 14062 - DNA, 475 bp, Diabrotica virgifera
tgagaataataattttatttgttgtcctgtctgtagttggaacctacgctttcacagaggatgagaagacacaaattagaaacatttgtttaaacagaattggtaagaaagtcaatttaaaaggagaactaggtgatataggatttcctggttcgccagggctgccagcacctccggcacatccaggattaaaaggagtagatgctaaaattcctaaatacatgattggtgagcctggtttacctggtgttccaggactaagaggtgatgatggttctcctggactttcaggtcctccaggacaaaaaggcgattgtaactgttccggagatactagaaattaaggtagacattactgacaaggatctaaaagacgcaatattgttcccagagaaagttattgtacaatattaaacaataaattttgttgactacttaataatgacatggtttcatatggttgtaataaatagca

SEQ ID NO: 14063 - DNA, 470 bp, Diabrotica virgifera
  SmartBlast Evalue=7E-33; Info=Immature colon carcinoma n=1 Tax= Culex quinquefasciatus RepID=B0WIP6_CULQU
aattaaatcattaatcacaaaaaatgaatatttttaaaagggccactatcgaacttatacaacatgtcaagatttacaatttatttcagtcgactcaagtgtatagaccagtaacttcgtacaaaagtgcgctctcactggaacatttatatccaaacagtaccttgaaaataacaacccctcaacctccaagcagtacaaatgaatttactggatatattcctatggaagaattagatattacttatagtagaagcagtggtcccgggggacaaaatggaaacaaagtaaatactaaagtggacataccatttcatttgcagtccgctaaatggttgaatgagaaaactaaacaaaaaattgctgaaaagtttagtacccaattaaccaaagaaggatacctaatcttcagatcagatattacaagatctcaacagttaaatttagctgattttggaaaaaattaggaa

SEQ ID NO: 14064 - DNA, 476 bp, Diabrotica virgifera
  SmartBlast Evalue=6E-56; Info=Glutamyl-tRNA(Gln) amidotransferase subunit A n=1 Tax=Aedes aegypti RepID=Q17H91_ AEDAE
tacaggtggctctacaagaaatccagcttcttactgtggaattgttggtttgaaaccaacttatggattggtctcacgtgtaggacttattcctttggtaaactcaatggatgtgccaggaattctgacaagaacggttgatgatgctgtttcagtgcttaatgtcatagcaggatatgatgaaaaagattcaacatcactcacaagaccttatagaaaaataaggttaccccctgcatcgaaaatgagtattaaaggtcttaaaattggcatacctgtagaatataattcagaacatgtctgtgatgaagtattagctacctggaatgaaatagctgtgatgttacaaaatgaaggtgctgttattaaagaggtttccatgccaaacacagagtacagcgttgtgtgctaccacattctaaaccgttgtgaagttgcaagcaatatggctcgatatgatggcattgaatatggat

SEQ ID NO: 14065 - DNA, 467 bp, Diabrotica virgifera
caataaacttcaaatttgctgctgcaaatactatagagggagacatgaaccactgagcatatcgctcacacccgccatgggccaactctcccgcacacactttttggacattaaattttactcgcagacaaaaaatcaatgttagaaacacttagctcacgtccaacgacaataatcaggcaatacaatagtaataacccacaatgcgtacctctaaacgcggccacaatctcaaaactgcaaaaagtaataaaatttaactctgccgtaacaaaaacgcctttctgaacctaatagccaaatgaacttcttcttcaagtgccatctctgcgacggaggtcggcaatcatcatagctattcggacattggagacggctgctctgaaaagttcatttgatgtacatccgtaaccattctctcaggttgcgcagtcacgatattctgcgtctccctatgtttcttttcc

SEQ ID NO: 14066 - DNA, 475 bp, Diabrotica virgifera
  SmartBlast Evalue=1E-68; Info=Survivin n=1 Tax=Culex quinquefasciatus RepID=B0W6D8_CULQU
gaccgtgccttcttctctttcgtgacttcttgttctacctcacttatccatttttccacttgtgctaagatttcatttcgttttatatagaagtgtgcttggatgatttccttgaaacagggacaaggattgagaatttgttctaacatcgcccatcgaacagttgcttgacatatattaagattataatgttttgagctagctgttcccgctggggttcccctggcccgttcataacctggttcgttaaaataaggctctggaacaagtatcaaactctgaatagacactaaaacttgtaagaaactagatgtttgagcgttccacttttcctctggtctaccgtgccacgtgtttaatactgataaacacactttaccgtcattgtaaagattaggattaaatctgaccgtgtgatgacctgtcgtttctagatttatcatcatcggagacagcgggtaatcgtgcgggaaaa

SEQ ID NO: 14067 - DNA, 475 bp, Diabrotica virgifera
  SmartBlast Evalue=2E-13; Info=Endonuclease-reverse transcriptase n=1 Tax=Bombyx mori RepID=D5LB38_BOMMO
gggcccacgggttttgcgccaagaagttgtacctacatgcgatcaaactaacgaagttatgtttagaagaggcatgagcaccagagatgcgttgtttggtattaatgtattgacgcaaagatgtttgcatatgaatcaggaccgacatgcatgcgtcatagacttcgaaagagtattcgataaagtccaacaccacaaactaatagagatttcacaggcataaacatagacagccgatatataagaatcatagtgaatctttcttcgaaccagacagcaaaaattaaagtagatgatcagtttcctgagaaagtagaaattcttctatttatttagatagtgaagctaaccttgcattaagcaatgagcaaatagaaagatcgaaaggtataaatatcttgatagttaggcaaatcactggatcccttacatgaattctcctttatggttcagattcttgcggctcctgaaaggg

SEQ ID NO: 14068 - DNA, 475 bp, Diabrotica virgifera
tcaacagaattatcctcaacaaacaaccgctcatcaacagagcagttatccgacacaacagcagcagcaaccccctcaacaacccacttatactcaacagccgcaagttaattatacacagcaaccccaacagtcctatcaaggacaaccgtatcaacaaccagaacagcaacaagtatatcagcaacagtatgtccaacctcaaaatatcgatcattcccaacagtatattcagcaaccaatagaacctactcaacagtatatgcaacagcaaagtattgaccctaatcaacagtatatgcaacaaaagatagagcctacccagcagtatattccccaaagtattgatccttcacaacaagttcaatccatggaacagacacagcaacagccacctcagtatattcctcagcaagcgagccagcagcagccaataccacagcaggtagtacagagcgaacctaccatgagtgtc

SEQ ID NO: 14069 - DNA, 467 bp, Diabrotica virgifera
  SmartBlast Evalue=5E-60; Info=Protein kinase (Fragment) n=1 Tax= Ctenolepisma lineata RepID=D0URH1_CTELI
caagatctagagatgcgatttatctcgtcataaaggcattaacatcaaagaattagaaatgaaaaagaaaatagctgatacacatagcggcattacttacatcggaagatggcaaaataatgacattgtggctaaaatacttaacgtaagagacgtgacttccagaatatctagagactttaatgaagagtttccaaaactgcgtatattttctcatccaaatatattgcctgttattggttgttgcaatagccctcctcatctaattattattagtcagcttttacctttgggatcattgtataatgtactacatgaaggaagcggaggtattgttgtagatacggcacaagctcttcgttttgcaatagacattgcaaaaggaatggccttcttacacagcttggaaagaacaacgcctgaatatttcttgaacagccgacatgtcatgatcgacgatgatctga

SEQ ID NO: 14070 - DNA, 476 bp, Diabrotica virgifera
ggaaaaagtggcttttacatcctgaaagaatcaaatttttcataaatcgtatgatgtttattcaaattttggcataatgttacaaaatgggtaatttcattatgcaagttctctttggtttcatcaacatcgtttttatgtttctcgcgtaaagtattaattaacgtcttgacttcttctttatctgtagattaaaaaaacttctaaaacctgatgttacatcctggtagcattcaattcgcgattctgaaaacagggactaattttctagactctagattttctgcgacagcgatttttttgtcgctgcgactacaaatcgcaagtggagtgctcgccttagaggccactatataatgccaaattgcaacttttagtaatcactttattacttttgaatgtttaaaagagtgtgtacctattgtttgggtataggcattttcgagaataatctattatttatctataaattagat

SEQ ID NO: 14071 - DNA, 472 bp, Diabrotica virgifera
  SmartBlast Evalue=7E-49; Info=14 kDa subunit splicing factor 3b n=1 Tax=Bombyx mori RepID=Q1HPU5_BOMMO
cttaaatgctttatttgcctggtagtataatacaactaggtaccgattacatacattgaaaccagagagatggtcacaggcgttcttggcatcaaagatatcttcaaacactacaaatgcagtgcctcttgtttctggagtatttcctacccgaatttgtctaattgctccatatttaccaaatatatcatacatttcctcagcagtaattttgtatggaaggtttctgatatataatattcgattgatttctggtggcaaacgtacgtttgcctttctttgcattgctagagccattttttagtatattccaaatatgggtactgaaatatttctgatattttattaaagctagtatgtaagcttcgtagactaaaataaattcaattttatccttaaatctgttctgcaataaatttttctatttatttataatcaaattttcttttttttatatcaaatgatattgatt

SEQ ID NO: 14072 - DNA, 475 bp, Diabrotica virgifera
gtgttttgtgtaccaccgccaataatgatatgtaacaccagtggtacatgtaccacagattgagaacctctgacttatattatattgtatttatatgtgatttaatcccataattgattataattaaaattatattttacatttgtttttgagtcagaacctttatttaaggtatttagaatttcatcttaaaagacatgactatttgcctgtatgatcaaggccaactaagtcaactgtcataatcaacgtataaatacgatatttaacttaaacccgaaacaagaaaacagtttcagaaccacacttaccaatgatattttcaacgaaaacttttcgtttataaattcgtaaagtctgtgtgttattgcgtcgccgctcctgcaatacttagagtagatttatcgatggattcttatgtagttttgtcttctgaatccaaatctgaaaacggcatttcgatatctctaaacgt

SEQ ID NO: 14073 - DNA, 469 bp, Diabrotica virgifera
  misc_feature (178)..(180): n is a, c, g, or t
  SmartBlast Evalue=2E-24; Info=Branchless n=1 Tax=Tribolium castaneum RepID=D6W8C8_TRICA
gaatcactcactaacgacttttcagtagttaacttatttaaattagtctgttttcttctaatgttcacgtttctttggcacaattcactgtctttttcattattacacttacgaacatttcgagtattgtgcggcttttgtttgacaacccttaatattctttgacatattttggggnnntatatttcgtctttcgtacattttcgtttctttgcgttttcttctctttgggcagcgttgatgcgaagggtgcgtcgtttggttggggtgtggtatgggcaggcatacgtggccttgatgtctgattgggtggagttctggggctacgtttcttgtaagaactaatgtgtaggaggacaatctaccaagtggttttctggctcgtaggacgacctttctcgattggcctctgtgattcagtgctagataaagggttcttttctcgtttgagtatttactggaggaatac

SEQ ID NO: 14074 - DNA, 474 bp, Diabrotica virgifera
ctttggccttgttgttaaatctgtgaactaatatttgccgactatcgtcatcttgggcgacactaatgcgtcgtctgcgtaagagactatttttacttctttgtttattgttctgcagcctcctcccttgttacgcttttgatgatttcatccatgattaaattgaagagtggaatacagatctttctctgtattccgctgcctatgtctataggttctgtaagttgtccatctattctgactccattttgttgttttggtagatgttttcaatagtttttatgatttctaggggaaattctctattatacagaagatggattacatctttaagtcttactctgtcaaatgatttcttcaactcaatcagacagagaaaaatgctgctctattatacactaataatttctcagtaatttgctttataacgaatattgcatctgtacacgatctttcagtacgaaaaccctatcg

SEQ ID NO: 14075 - DNA, 475 bp, Diabrotica virgifera
  SmartBlast Evalue=6E-18; Info=Integrase (Fragment) n=1 Tax= Tripneustes gratilla RepID=Q9TWB1_TRIGR
gaacttgtgaaaagtacatgccaagtaatcgtagggaacccctattaccccactcagtcccaaaactacgttttaataaaataggagcagacatactggaatttggagcaaaggcatatctaatcttaatagatcatttctctcattggattgaaatatgtcctttacaaaataaaacttcagaatctgttatagatgcgatgcagaatgcgtttacaaaatttggttaccctcagcacttaatcgcagataatttaccctttgtatcattaaaatgcagggaatattacaagaacaaggatatcacagtctctacttgtacaccataccatcatcagagcaatggtttgtctgaaaaggctgttagcttaggaaaacaaattttacggaaaagtttagcagaaaaaagtgattttagagacttgctcttggaatataataatacccctatcattagtttaaaagcctccccagc

SEQ ID NO: 14076 - DNA, 475 bp, Diabrotica virgifera
cttgaaatattttccgtagaagagtggaaaaaagtgctggcaaagtgaaaatcattgaaggtgatttcatttcaaaggagccattacttgaggctaacgggaaacattttacgatataaatattttaagaatattcaaagaagacggaaattacagactggtcaaaatagcttggttagattataaacaatattgattatattgttacaaacaatgattcatgtaaaaatcaattcaaaagccaatattcctagtaatcgtggcaactctataatttaagcctcaaatgaattctgcatatcgcctctgcgcagggttgcggtgcgctgcggtttgcgctcagatcacgtctattcctattttggtcgtagtgtacaatagaaaaacagtgaaattcgtaggatgttaaataatgtgcagaagagttttgattacgcatggcaagaatataaaatgtgacttaccgatctctcgt

SEQ ID NO: 14077 - DNA, 473 bp, Diabrotica virgifera
  SmartBlast Evalue=3E-22; Info=Protein purity of essence n=2 Tax= Formicidae RepID=E2AZ34_9HYME
ctccctttctctaagatgtggtgatttttccgcagacgtactggaggtgagatgcgtttggagacccgaaatgagcacccatgccccagcaagtaaataattttgatacacatgacctcctgccctcgtagaagttttaataacatttccaataaaattatacatatttagagtctcttcgactaaagccactgcgtttgaatccaaatcgtcttctttcaaaccagcttgtgactgttgatttgagcacttaggtgaaaccactgagcccatagaaagaaccgcagctgctgaggcttgactaagggcgcagtgtagaactgccatagctaggctacacaatttgtctagtttgctcgaggttaacggttctaagaccggtaggtttatagccgacatggctaggttaatgtcagatagggttgacgatagtgtatttctaagagttgtcgcttctgcatgattggtaggta

SEQ ID NO: 14078 - DNA, 456 bp, Diabrotica virgifera
aaatctatcaaatcgattctaatgaaatttagtagaacgtctaagtaagttacaagaattttctaagcgaattactaaggttccaagtgcaaccaaagtggttaaggaacattgaataacaacaggcgtattttgccccattatcttgtattcattgctatattgcagaaaaggtaatatcttaagacatttttaaccagtcgcatatcattcaaaattcaattatctccattttacttctctaagactatgttccaaaacgaatcgctaaagttataagcaaagaaagcagaaaaagatcgatgttgttcaaaatttttaaacattttaacctccttattaatgttccggggacacttgagaaggagcataagtcaattattattactgaaggtgtcacctaactttatctgcaaaaatccgaatgccaactctcacatccaaaaatagacgttt

SEQ ID NO: 14079 - DNA, 474 bp, Diabrotica virgifera
cagtcttctcaaaattattggaaaaaaataacaattaagttaacaaaattgtgtatttaataattgtgacggaaaaccaaatgtctcctaaggaacttattacaggcacctgcataatatattcgcgttaaagggttaatagccggccgtaaaaacatttttattgcttttaaacacgtaactatttataagccataaatcaaacacctgcatttctcatcgttctatttttactaaaagtcgatcctaaaaaaacgatttattgttgaatgtacaaatgttaaagtaccaactagactggaatacacagcggcattaaaagtttcttcaaaatcgtttaaaagaggattacctactacaattccctataaaattctacttctttgccagttaacacaacttttgagtggtgtcagtcttctaaagaaattgaagttatgtctaaaataagttgtagtgttcttttaagttatg

SEQ ID NO: 14080 - DNA, 475 bp, Diabrotica virgifera
gactgaaaacgtgaaagtgaaaatttcagtttattattattattattgttggtcgttaagtaagtttatccatccaacgtttacttcgcttaataggcctttatcgatattattaaatagaagtagttaatttacacttctcaacgtaattcaaatcagaatggcaattgccaccaatgtggtttttaaaattccccaagagccatgccccttaactaccttagaatcggacgaagaatctttcgttgttttgggtcagtctattccagatgctagcactgaactgtatccagaaccgattggattgtccgtcatagcagaagcaaaaaagattaataaattttgagctcgaagctatcgaccaggcgaaaaataatgacgaaaaaaaaggggtgtctggaatccaataaagatgttttaaactaagttcgtctacaatggatacatccgaaaattttcctatgatggcaaatat

SEQ ID NO: 14081 - DNA, 477 bp, Diabrotica virgifera
caaacgtgctatttggttttatttatttaagtttatccaaacttttgtagtgtttaaaatggaaataaaacagcaaatatcacggctacttcaattaactattagcggatttggaatgttatcaactttttacatggttacagagttaatgtattttttatcttttccgaaaaaaattgatcaatacataaaagaatcagaattaatgacatcatgggttctcttagtaaatatggggttgttatcactttttattcttcagcattcattactagcatctagtaaagtgaaggaagcatttaatgctaatggatttcaagtaatttatcgaagtgtttatgtagtggctacatctggaatactgctgtatgtattacggcattggaaaacaactccacatgcaatcatgtgggccttcaatctaaatttaacagacccatcttctggatatacgcatcaatacacactgtagcttgg

SEQ ID NO: 14082 - DNA, 471 bp, Diabrotica virgifera
aattgacgtcatttttattaccttttaaatacgtgatatcaaaaacgtagtttttatgtcttttttagattatgtttcattttatggttttaaagattcacaataattattcatatgggcattgttggcattgtaatttttcatttaaccgttttaaaaagcaaattggaagactctctaaaatgtatagaattacaatatcctcaatgcaacatacctataggtatagaatttttactttttatatatatttaccgtgtcaaaattgaaacaacatataaactaataaataatttattgttaatttaattaaactcgataacacatccaaaacaaattaaaacataacctcaaccgttttcaagaagaattattgtattaaacttactcactcgagaaaaacgaatgaaaatctcttaattaacacgtttcttcaactaaatatctaaatgaacagtcttattttaccac

SEQ ID NO: 14083 - DNA, 469 bp, Diabrotica virgifera
atatgagaaatctcaaaaaaataaaggtttactaacaagaaaattcaagactgtcgacgagtcccgcgccaaccgataagttcccataaagttatttaggttaactaagtttatcgaattaggttcctgtaagggtaggtaattacaagtaacagtgccgtgtgctttttgatccctcaggatcacgtgatagtccttgcgtcccatttttagtgttattcaggaacctctgtaaaaatgtatgttcttccaaaagttttattgcttataataaattttacacattctcctattttgtaatcattgttaatttcttcggaggtatctaaaagctttttgatggaagaaataagatgaatcgagatttatttaatttgaggaagatcttaaatgtgccttcattataattggtttttaattaacttttgttttttaaatttatctgtaactaacaaatttttgtaataaa

SEQ ID NO: 14084 - DNA, 470 bp, Diabrotica virgifera
tgttgacataaatacagtggatattctttacaactatatcgtttaaacttcttgtaatcttttcatcttggtgaatggtgtacagtactaaatccctttctgaaatcaatgtagttcctttgtggttatttagtaacttctagataaaatccaggagcttcattggaaatttttatctgtcaggagttttttttttgcaaaattctatgtccaagtgactaaaaagtttttatgaagtaaaagtagcatcacatatgcttttcctgatatattttcattataatccttttagtttaaaagataactgaaatgtaacatcagtgatcatttattagctataaatatttgtttaataagcaaaaaactaatatacttctatcaaatcgtcggtaaaatgttccacgttccttcacctcgtataaatatcatactttttttgataaatgtaatatttctacagttgctgtttg

SEQ ID NO: 14085 - DNA, 471 bp, Diabrotica virgifera
ctaatagggtagactttgaattaggagataagaggctattacccaaaatttcattaaaatctatgcagtaggattgaattcggaggtaatatcgtattcttgctcccattgactggcgtataaggagcatagtgtattgtcctgaggaaaaaagggattttttttctcagatgccgaaacacctatgtaatgatcttttccgccgatgatagtgaatccaactttcatttattgtacagtatggacgcaaaaagtcactttagttttttccaaaaacgtaccaagcacttttcggaaagagtcacgagaatgcgcttctgtcccgcaatgagcgtatgtaataatcatcttgcgcaattttttttcatagactgttcctggtgcaagatgtaactaacgcgtttctttgatatcctttaagtatcagtaatttcacgaatctttatacaccgatgtacgaacaaagtttgc

SEQ ID NO: 14086 - DNA, 474 bp, Diabrotica virgifera
  SmartBlast Evalue=7E-57; Info=Prip interacting protein. pimt n= 1 Tax=Aedes aegypti RepID=Q16P75_AEDAE
gttctatttctacttgaccgccgggtcctgctcctttagctaacgcaaatgtattactattccgaggcaaaaagatagcaacttttggtgttatttttctcgcagtcgctagtaattgtgaaaaagccactggtagcaacatcgtttcaagatcatacatattttctgcgagatacgacggtccaccccaaggtgggcttaagaaaactacatcagcttttaaactatctgctaattgtagaaaatctccgattataaattcgattttatcggaaacaccatatactctagcattattttcggcgagttctattttcttggggtcgatatcgatagcgattacttttttacattttaacgcgaattgaatagcgttacctccggctccgcaaaaggcatcgatgattatatcgcactggcatcgctcagcagtgcgtttcgcaactatttcaggcgttacggaataccaactct

SEQ ID NO: 14087 - DNA, 475 bp, Diabrotica virgifera
  SmartBlast Evalue=2E-49; Info=210kDa protein (Fragment) n=1 Tax= Sarcophaga peregrina RepID=Q9GV23_SARPE
acagacctgcagaacgtccatctccaaaacgaccagaagataatctccatccggaaggcgacttcgaacgtcctgacagacctgaatatattccggctgagagacctaaacaaagacgtcctgaagataatctgaggcccgagggagactttgaacgtccaactccaactaaaattggaccagctgaacgtcgtactcctattaaacatgatgataatttgcatcctgaaggagactttgaacgccctgaaaaagtcaaatacaggcctgcagaacgtccaacacaaaagcgcccggaagataatcttcgtcccgaaggagactttgagagacccgataaaccagaatacgttccaggcgaaaggcccaaacaaaaacgtcctgaagacaacctcagaccagaaggagaatttgaacgcccaactcccactaaagtgggaccagctgaacgaaggactcctattaaacatgacga

SEQ ID NO: 14088 - DNA, 475 bp, Diabrotica virgifera
gagaccaaaaatccgtattataggtttcgaattcaaatcaaatatacttttatggatttctattaaattttgactacgtctctggttgataaacaatataaaacaaacagaaataaaaacattctacatggattttcgacatgaacaaattattatgcgcactataacttctgaatatatcagtagtaggagtatgaggaaacaatatgggctcagataaagaataggttatttataataaagaaaaactacacgcaaaatactataatttataagtaaattatagtttgaaattatctgaattcgataaaattgcaaaatttgtccaagtattcttacggaactctgtaatattctgcagttttatcaaattcagctgagcgatgtaagtgacttaaaagaagaagaaattattattaataccctatgctagctccaaattagtgtcaattcgttaatagtgccaatttcgtaa

SEQ ID NO: 14089 - DNA, 470 bp, Diabrotica virgifera
atttacgttggaggaagtttttattttttttgtttgggattgtgaagagtttttggttccaatatttttttgaagaaaacaatggccactggagggagactataacaaaatttaagtcacatttggatgcttcatttatttatggaataaacaatcattttggtattattttgggtttggattggaagagtttttggatgttttttttttcgtttctggaatagacactgagttctaccgacactagcaagtacctcctcgtcaatactctgtgttgctgttccttacctcccgaggattgggaagatcggaggatacgtacctggctctctcatcatcaacctcaccaggattttggagaagccacaggcctacttttgtagaaacgccaggtttttataataaaatttgaattttcaatccttctaaataatagttttcaattttcaatttttttcaataactcaaat

SEQ ID NO: 14090 - DNA, 473 bp, Diabrotica virgifera
tatattcataattcctacaggcattccagatgtaccgatttcatttatgaaaggaagaggaatgtgtatgttcaaagatacagcaacacgaatagctattctttttattcccatggtacttcttcttcttgctgctgtagcttctttagtgtattctttttacctcataagagtgactggcaaagaaaaccgtgctaatattgcgtggttggagaaaaaaagtcgttttaagtatatgtgtaaccagtctgtagtagtgtgctttacaatgattactttcttagcacttgggttatctctaagtattttttccgatacgtcaatttttgaatctggaatattatttgctctgcagataatagattccctacaaggtttattgattttgctggtgtttgtggtacattacctccataggcgaatgtatagaccatgtgaaaacggtataaacgaggagctaccactacaggagc

SEQ ID NO: 14091 - DNA, 474 bp, Diabrotica virgifera
  SmartBlast Evalue=1E-69; Info=Protein strawberry notch n=2 Tax= Formicidae RepID=E2BZX5_9HYME
ggaaagtgtttctcgaccaacgtttgaaatacacctttggcagtagaaacaaaatcggataattctccgtcatctctttctaactgttccagagttctggcttctcctgtactttgtaaacctattactacacattttcccatttttatagcttcgtgtgcaactgctacagcgtgcggtaccttagctgctatacaaagatatttgaaaaaccgttgatgcgacgaccagaactgtccccacatagtcttgcgcattcgattttcggcgtcgactagctctgcagcttcgtgaaacttctgcatcgcttccacccacaacttcacgctggcatcatatactttttcgaaatctttggaaaggggaacttcttctatcttaaaagctacaccatggaaactaagttgtctcgctatatacattcctcttaacttcatatccatggctacaatttccatagctcctacacctctc

SEQ ID NO: 14092 - DNA, 472 bp, Diabrotica virgifera
ttaatgtgtgcaacccgtcattacattacgaatctcaaaattgttcgcggagcgaaaaatcctaaacatgtccaggataagtttacgttgacacctgcgcattggaaaccaatcccgaacttactttgaatacgttcggattgtacagcgcgaacactgctattgcagcataccgtacttgcatatttatgcaatatttctaccttatcaacttcagttcacttatcatattgaactgtgggcttagtataaataaatagaagtttcttttcattttattaacaacggtacaaagaggtgtaaaatggaataatttttggccatttttttttgtacctgttttcagaatatgtcccattctgagttgtggtaatataaagcttccggttctgataaatcgtcttgctagtacatattgccagtttatggtgcatacgaccaccaaatattgttttgcttctactgcattcta

SEQ ID NO: 14093 - DNA, 470 bp, Diabrotica virgifera
ggcacattgaaaaacagacagtaatgtctacataaaaagaagaagaactagagtccacttgctaatgtcttttgattttgcaatataaatactcgagtcgaatgagactgatcatataaacgcagaccctctttctgatgccatcagatgttatatagaggtcatcgcatgtgtactaaacaacagttggtacctacgtaattttgatcggctgaaatacgcaccaaatttacactacgagttatatcgtagtaggtcttggaaacgactttttgtttgttattagtatttggacaataaaatatgttaatagatactttccatccatccaatggcactacagcctaaaccaggccctgggctccttcagcaagcttctccaataatttcgatttgctgatgttcttttccatgaacgcgtgtttatgaggttattggcatcctcatctagacatcgtcttccaacaggt

SEQ ID NO: 14094 - DNA, 471 bp, Diabrotica virgifera
tgcctccctaagttacctacatattcttgtctcatttgccgattgattttccacttaagaatatcaatcttctttaaatacgtacgttttatttataactcccaggatcaaggttaattacaaaagcatttgtaataaaaacgttttggtagacaaatgaaaaaaaaaacagtttccactttcaaattttttctactccatctagacaccgagatcttaaccctatgacccacgctgtctacagttgtagaccctaattttccagtatccgcgctacaaaaaattcgcatcgttttacaattatgtgacatcgtattcgctccgtgcataactgacgcgacacctagcgtagtcgccttatattcttggcgactacaatttgacgttaaacatatgatacacatatgtcatatttgactttaatatgtaatatttatttaccattttgataaaatttgattatacaaacaa

SEQ ID NO: 14095 - DNA, 474 bp, Diabrotica virgifera
  SmartBlast Evalue=3E-44; Info=CG4221 n=5 Tax=melanogaster group RepID=Q9VF10_DROME
cttgtacaagggcaaaaagtatcagacgaagaacaattctttcgataaactacccgatgagttagttgtgaaaatattttcctacttgactagtgtagacataagcttttgtgctcaggtatgtagaagatttgatattctagcctggacaccatcgttatggagggttatagtaatcgaggatgataatataagtggtgataaggctatcaaaggtgttttgaggcaattgtgtggacaaggaaagacaggggcgtgtcctagtgtagaaagaatccatattactaatggtgctaaaatatcggataagagtttgttgctgctagctagacggtgtccagaattaactcatttacagttacaaggatgcagtaatctaactaatagtgtagtatttgaaattgctactaaatgcaataacttacagcatctagatattacaggttgctctaaatatcgtgtataaatgtaaat

SEQ ID NO: 14096 - DNA, 474 bp, Diabrotica virgifera
aagtggtccgtctgaatggcgtttgccactagtggacgccactagcagtgaggctcggcgactgtggctggccacagtcgctcgtctggggtgctacgtccacttcacataagaacgaacccagggtaaatcatcggaagctgctttgtggatccacagagtagcgctgcagagtggcccgtctggtttgggccataactaagtctagactccattaagatactcacgggtgaatcttgtggcatggcaacgtgtattggcatgcaataatctaaagttttcaccaataaacgatacaaaaggcatgacatggacttggagaacctcttccatgtatctttgagcattcacactacctctatcgaacacaacaagatacgtacgagctttgtaagagatacctccctaaatcattattgatcctattcgataagccactgtttcggttatagtgcatggagcaaaccttttatt

SEQ ID NO: 14097 - DNA, 467 bp, Diabrotica virgifera
tgttgggatcaattaaagcaagatgaagcattttttaattctggctgtggtctgcttaacagcgactgcatttcatatgcctgaacacgacagagtacaggccacgatcgcagaatgccaaaaagaatccggttcaagtgtagacgaactggaaaatgttaaactagggaaaataaaccctggtaccggcaagcaagttctttgtgttcatcgtaaattgggattcatggatgagaatggagacattcttgctggtccgtacaagcaacacgttgaaattattaccttcgacaagggtcgtcagcaagagctccaagcatgtagcaaacctgaaggagaaaatgccgaagctaaagctgttaattttgataaatgtttccaatccgttttacaaaaaatgggacgtgattgatttatttaaaaaaaaatgtataataaataaattgatatgatataaaatatatata

SEQ ID NO: 14098 - DNA, 474 bp, Diabrotica virgifera
aaattctactgaatcttgactgtaaatttagtatagtaatgtaaattgtattacttattatagtaaatacattactattaaactgtttttatttgttttatttttcacttagttttactattttaaagtgataattcaagatcaaaatttttaaaaattctttagttgtcatattatcaagtggtctcaaataaagtaccattacttctagtttaggaatgtatgcaaaatgcatctttgtataaattcagtaatactaaactttctaaaaaaattaaaggttgtcgttacgaattataccgttacgaattgtatagttacaaactctcgccgttacgatatgatggcgttacgaatagtccgttaccatttgtcgggttacaaactgtcgggttacgaaatgtcatggaaccaaaaaaaatatattataataaaattttgttatttctagtcgaacttggccatagactagtg

SEQ ID NO: 14099 - DNA, 466 bp, Diabrotica virgifera
ttttagtctggctatattgtcggcttactgccaaaaccaactaactccactttttgtcgattctgagttaagtactcctttgtacttaataattatcaaagaatgtactgatgaaaccagacacttcaaagcagattttaaatgtgggaaacagaagggtctcaaaacaactaattccaatgatgacacttttattcagccaaaaacagatatgtgcagttgtctgcacatctctgtttaaataaaatagtattttatcatttacaatattctagttctgccaaaacaagacaagtgcctgatatggaagacagtgatgttcaaagttacctagaagttgactaactttgtacagctgaaacccgacaagtgccgaaaaaaaatgttttttgtacttttttttaacttcacttcatttaataattttttaacaaaatgtttcgtttataatgttattactttaata

SEQ ID NO: 14100 - DNA, 472 bp, Diabrotica virgifera
ttgaaacatgcatttgaaacaagtaggtaatattcagtatttatttttacactttttttttcaaattttatatacaacatcgacgccaacttttattgaaacgtgaaaattccatgttattcattttatattacccaataattaatttaaaacatgtaaaaataaataaggaatattacctacctgattcaaatgcatgcacgctcagcgtttgacattgaaaagcccctcgatgctattcagccgaaatacacgagaggtcgtcattgtgacttaatatcgcgaatctgtattgttgattttagcatttacaatatcactgttaccctactatataaccaatacaaagtaatttagatactttcgtcatacagaggggtagcatcacctagggacatagaatgtggagatgtattggttcgaggagtagacctaacagacctcgggctcttgctgaggtgtttcattctag

SEQ ID NO: 14101 - DNA, 472 bp, Diabrotica virgifera
  SmartBlast Evalue=1E-38; Info=Transcription factor E2F2 n=1 Tax= Camponotus floridanus RepID=E2AH09_9HYME
gaccaagaagttttcagatctgttggagaggagtccaaatggtgttgtagatttaaataaagcatctttagaattgaaggtacaaaaaaggcgaatatacgacatcacgaacgtgctggaaggaataggtattttagaaaagaaatcaaaaaacaacattcagtggaagggatcacatggccagaatagtcagtgcgtggaatttaagaagcaactgcagaatttagacaatttcgaaaattatttagatcagatgatagagtcggcgtcgaacgaattaagcaaattgacacatgacaggtacggttacgtgacgtaccaagacctccgctccattgactcgttccgaaacaaaacagtaatggcgatcaaagcgccacctagcacaaaactttccgtgcctgccggacaaggcgagaagtataccattaaaatgagtagcgattcgggagaaatagatgtatacctatgt

SEQ ID NO: 14102 - DNA, 475 bp, Diabrotica virgifera
  SmartBlast Evalue=2E-21; Info="Synoviolin, putative n=1 Tax= Pediculus humanus corporis RepID=E0VTX2_PEDHC"
cggtgttgacgttggtccagtaagagacgaacaccagtccgacggacatgaggtacatgtagaccaccatcaggtgtttcgtgctcagtatgaagaggcataatgctgttacacaacctattgtacttattatcagcctgataaaagacatgaggataaatctgtagaccaatggatcgaaggtctcgctggtccccgtagtcgtaacattattgtatttgtactgttccttagctgctaataattcctcactttgctgcaaatattcttggtctgacagctctactatgccaagaagtcctactctcagtatctcgtcgatcacaaacaaagggggcactcttaaaaccacttccacaaagcctaatactctcccccggaacgacatttcattgcaataaagacaccaaaaattttcttttaaaaattcgtaatatgtatttttattgtgggccctttcaaactgacaaacgtc

SEQ ID NO: 14103 - DNA, 473 bp, Diabrotica virgifera
ggtattgttttaataagtttttttggaaagtattaagtattaaaattagcttaatatttaaataaaatacaaataaactgttaaaagtatatttatttcgttgaaatcatatattatatgtgcgtacttctgcgataacttcttacgtgcgtgcctaacaattacacacacattctttgtttttttttaatttggggtagctcgtggcaaagataataaaaatgcaattagttagtttgtgcatgatggttcaattaaacaagtaatttgtttaaacaatttaaaataaatatttattttggacaatttgacttttctctgattattattaatagaaaaggtttctatgaatattatgtcatgtgaacatcgttagtttcctggtctaatatgtaatttaagtagatgattaagattctcgcttagcgattataacaaaacactcagttatcgttttaatttattctatcaaa

SEQ ID NO: 14104 - DNA, 472 bp, Diabrotica virgifera
aaaaaacttgacgaattcgagatgtggctatacaggcgaatcccaaggatatcatggacggacaagataaccaacgagaccgtactgcgaagaatggggaaagagaggtgatgtatacgattaaaaggagaaagttagaatatatcggacacataataaaacggcactaaatacagattactgaaggtaacccttcaaggcaaagtattcggaaagcgaggaatttggaattccataaggtattccataaccatatcatggttaaagaacctgaggaaatggttctccacaacaaaaactaatatatgtaaagcatcatttaataaaataattatagccagaatgataggccaaaattcgaaacgaataggcatcaaatgaagaagttattcccccagtgcgacagagaaaattgtttgtatttagggtaggcatctctttctaatcgaagaggtttatccaatgacgttgg

SEQ ID NO: 14105 - DNA, 473 bp, Diabrotica virgifera
  SmartBlast Evalue=2E-34; Info=Collagen alpha-1(IV) chain n=1 Tax=Harpegnathos saltator RepID=E2BTW9_9HYME
caggtccactgggtcttcaagggcagaagggagatcgaggttttgatggagctccaggaccacaagggccaaccgggcccccaggacagccaggattagaaggcgcccctggacaacgaggtgataagggagaaagaggtaaccccggtgctttcggagctccgggacaaaagggagatcgtggacaaacaggattgcaaggaatctcaggctatccgggagaaaaaggagacagaggttacgatggaacgcctggaattgaaggaccaatgggaccacctggtcttaaaggagatgctggtattccaggacaatctggaagaccgggtattccaggtcaaaagggtgacaaaggagagcgtgcacttcaaggaggtccaggtccaaaaggagatagaggttttcctggaaatcctgggttaccaggagagaggggacctgcaggtctcgacggaataccaggagttcacgga

SEQ ID NO: 14106 - DNA, 469 bp, Diabrotica virgifera
  SmartBlast Evalue=6E-34; Info=Myotubularin n=1 Tax=Culex quinquefasciatus RepID=B0X6Y0_CULQU
gacaaatccaaacatctaaattttccatataggaatggaaaaacgaagtgatggaaagatctaatagaaatggatttcatcgaaatgataaagacgccgaaattagacggagtaatcttacatagcccctttcaagatcccgtggatgggaggatatgcataacaggacatcatttgatagtttcttctatgaaagaggacgtacaagaactatggttgttacatcaatgtatcgatgctgtagagaagaaagtatctagcaacaacaatgctcaaagcgggggttcaatacttctcaaatgtaaagattttaggattctacagttggatatagctcacccagaacatttccaaaacgtatacttgtctattcaccgtttgtctaacttagagaaaccggaattactgtatcctttcttctacaggcctatgtataccatttagaagatggctatacactctttgattt

SEQ ID NO: 14107 - DNA, 471 bp, Diabrotica virgifera
gtgagagatagccgccatttttaacattttatattttcgatttcggttttcgtaatttgtatgacgtgtatacccgactagtgataaaaatatgagtagctcaccggagccctccaacaggatctctccaaatcccttctcgccaaattatagacataaaagtgactccggatctaaatcacccgtttcaaatcgcaggcaaaatgggtaccttaaaaaatcacaatatgatagtgacagtggtgatagtgactatgctcaggaccatgtgagagaaaatagaaaggcccgttcacgaagtcctgatcaacaagatcgtgatagggacagacgtgaaagacatcgaaccagagatagagatagagatcacagaaggcagcgatctagaagtagtagttcccgatgggagaagaaacagaaaagggacagagacagagatagatgtagagatgatgatagggacagtactag

SEQ ID NO: 14108 - DNA, 468 bp, Diabrotica virgifera
tttcagagacgaaaagagatagagtttttcacttaatgaacgcttatcaaagatgtttatgaaatttctttataatatcttttattcattctaggagtaaactttattactaatcaactatgcataaaattgtaaatacttttattgtttggctagtatcgccgccttatatcataaattccttagttttgtacattgagaggtgcagccattttatttagccttgcatcttctacgtatctcagccaaatatagaaacatagtaaccacacctcttatcttttaagaaattcttattttcgtctcaaacatttaaagcggccatttcttacacatctgacgcttttacttgagtaaagagatgattcttcacccttgagtattagacttttattgttgtagtaaccaaaacaatagtctaaacgttcagagaattattatacattgtcgttcaaacacaaattggcg

SEQ ID NO: 14109 - DNA, 471 bp, Diabrotica virgifera
  SmartBlast Evalue=2E-50; Info="WD repeat domain phosphoinositide-interacting protein, putative n=1 Tax= Pediculus humanus corporis RepID=E0VDQ6_PEDHC"
ttttactcataataatcctttcgttgtttatgttttaatgtgatacttcgataaataatttaaaatgggtacagatagaaaagtaataagcgtaaaatttaatcaagatcaaggatgttttacatgctgcatggagagtggtataaggatctacaatgtggagccactagttgaaaaggctcattacgatatagaaactgtaggaagtgtttctcaatgtgaaatgctatttcgtacaaatctactagctgtagtctcaggtggatcacgtccaaaatttgctgacaacgtccttttgatctatgatgattttttgaagaaatttatattagatattacatttccatcatcgataagagctgtgcgaatgagaagagataaattagtggtagctcttttaaatcaaatacatgttttttcgtatcccactcctactcagaggttgtttacattagagactagggaaaatta

SEQ ID NO: 14110 - DNA, 468 bp, Diabrotica virgifera
ttaaatcttattaaataaataaataaataaataaaaaaagtataataaattataaaaaaataaaaaagaaaaaaaaaattaaaaacacaaagagggtgtaaacctccgcggggttgatccgggttgaagccttatcgctgtgtaaaaaaaaacatatatttattagcatttagtattagtatttagtattagcatgtagtttttttttgtcgatttaattatttgtaaattaatttaagttggttagggccatgaatgaggagtatacctactggtcaattaaatgtttccacttctacatatgtatgtatgtatgtgcgtgcataagtattatatgtgcgcacatgtacctaatgtattatgtaatgcaatgtattatatttggaatattgtagcaaacagtaatttattatctatcgtggctgaatggatcaagtaatccaaagccaataagaaagaaaaaaaaat

SEQ ID NO: 14111 - DNA, 461 bp, Diabrotica virgifera
catgtcgaaatcgaagaaataaaaggcaattttattcattcaaatatgttttatgaaatacgaattgccagggacaacaaaacaactgaaattcaaagaagaatcactgcagctgtagttcatgggctgcatttaaaactcataagacaccttcaagagcaacatgccgaattatttgaaaaatatgttcgaccaatactcctaatagtctagtcggaacatagggggctccgtgtacaccctaggtcgccgcgatttgatggtggtattataggtttcccgggccgccgaatccaatggaagcggcccggaagcccaaatgtgttgcgtccaactgttattaacaaactatggtgaaactaggcgttttcaggaattattagaagccctgtaaataaactgatagtgtcaaggtcctctccggtgtattttggccgctgaatcgaatgcgactagtcgcg

SEQ ID NO: 14112 - DNA, 471 bp, Diabrotica virgifera
agtaaagtagacttcattgtctttacaaggtgacactaattattgtatccgaacaggtgggcaccgattccacaaggatagaaattatttccatttattaattgtttaataataaaaacatttcccacctagctgggattcgaactctcgacctttgggttcaaaggtaggctctcttactgagccacgaaggggttgatttgaatgaacttacacttacaccacgtttacccatgaacgaataactgacgataaatgtcaatagatgaaatccattttgcattttaaaaaacgtagcacagcgaccgagacctccatcttcgaaggctggctaggccgacactgagcaatgcagatgcagcgtggggaaaggggtgggagagagagagagggagagttgtaaggcaatgttgagagattgagcaatgcagatgcagcgaggcgaaagggttgggggagagagagagggag

SEQ ID NO: 14113 - DNA, 468 bp, Diabrotica virgifera
  SmartBlast Evalue=2E-29; Info="Low-density lipoprotein receptor, putative n=1 Tax=Pediculus humanus corporis RepID=E0VVX3_PEDHC"
gccgccattgttaaacgcatttggaggaccgaactctacgttggttccttgtctaaacgatacactttgactacttgctagactgcctaatccagatcccttgctgaaaggtctctttctgatgaagaagtagacaccagtagctgcacccaatattaacaatacgactacaataggaacgacaatagcagtggtattggctgcttgtccagctgtgctatgctctgaatgaatttcacagaactctccctggtaattctccaaacatttacaagacagttcttggctatcgtcaacttcttgacagtatccaccgttttcgcatttgcatattctcggtagaggtcgctctcgttctgaagcagcgtcacaaatgatatctgccttgatcttctggctgggagtagcagagtctggacaggagcatctgtggccattcggaaccaccaaacaaagatgagaacagtg

SEQ ID NO: 14114 - DNA, 471 bp, Diabrotica virgifera
tttacgattttctaacggaaattaacaagttattttaaatacacaccaattattgatgttgaaaggagtttctcaagttataaaaatattttatctgatcaaagaatatgtttcctcgtaaagaatttggaaaaacacattgtagtgaattataatcgaagatatttatatttatagtgatattgttgttttattttaaataggtaactattggtagcagtttttgtaaaaactgtgaataaattgcatatataaaaataatgattttatttgaaagataataaataagattgccgccccactataaaagaaaccccctagaatagaatagaacagaaaatttgtggtttctcgaaatgcgcattttttgaatttttgtgcatatcttgcgcatatttcgtaattttttactgcatatatatgcgcatatttcatcaaaattgatcgcatataaatccgctccctagtcat

SEQ ID NO: 14115 - DNA, 474 bp, Diabrotica virgifera
ctcctcctggttaaaaaataaaccatagtacattacctttaataactatcaagtgacaatgtttaatatatgatttatttttattgaaaaaattcaaccgcttgtcttctaatttagcttttgtcaatatctattagaggctatcttagtttctgtctcacaaacaatcggcaacactggataagagcatggaattacctaacctcatatcaatttattgtggaacgtgtatggccgtatgagttctcaaattattaaaaacatctcttgcaacaagacaatgcgcccgctcatcaaatgggatgggaattaatcgatcacccaccatatttccaagcttaaaacaatagcatagtggacgcagccaaaaattcacaatattttcagaatctcgactcaaaattacttgtcggtagagaggaaacaatttgaagagtatcttgtattcagaaatataataaaaatcgtaccata

SEQ ID NO: 14116 - DNA, 472 bp, Diabrotica virgifera
gtcgctagggggtatggaatagtaatggtgttaagcgtatggaggtcaaagtacatcccaatggagaggggggaggttacaacccccaaaaccttcctagttatacgctactggtttccatcggaggttctgataaaattaaaactgcgggctaaggtatgggaactacaggtatatagggaaatggttcccttgaaaaaatagaatctatcatgtattagatacagctgtattgaatgcatagtcaatacatagatggagtggccttgtaattaattttaaaacctacagccaacgagcatgtacttgctttgactaaaaaccaagaagaccactgatcgaagactaaaaacaattaagagaagacacaagaacaagtaatgatattcaattacctaggagtagagatcactactgacaggaatattagaacagagaccacgaaggcaagtagcaaaagcagcaggagtaa

SEQ ID NO: 14117 - DNA, 471 bp, Diabrotica virgifera
  SmartBlast Evalue=6E-42; Info="3-oxoacyl-synthase, putative n=1 Tax=Pediculus humanus corporis RepID=E0VLQ4_PEDHC"
tcacactttttccacttttgacttataataggaacaaaattaatttcattgtcttctatattttccaaatttactgtaggaggcaaaaccccttcttctatagcttttatagtaaaaagagcttctaaattaccagcagcccctaataaatgcccatgtgctccctttgttgaagaaacagaaatattattagtggatggaccaaatagatccttgatagctctagtttctattgaatctccaattggagttgatgtggcgtgtgcatttatatatgtaacttgcttagaatctatcctagagtcttttaatgctctctccatagctgaacgggctccagcaccatcagatctgggagctgtcaaatgggatgcatctccagataaaccataacctaaaagttccgcataaatgtgagcattcctgtctaaagcatgttgcaattcttctagtattaaaactgcacttccc

SEQ ID NO: 14118 - DNA, 465 bp, Diabrotica virgifera
tctgctgctatcttcctaaggtttctttgtatttctatctctttcagtgttaggtcacattctatatatactctatgttgtttatagctcattagtttaccctttggctttcagtattttcattttatcttcgatttttttacattcgataacacacattgtttcatttatcttttgtaccctatttatttctgattttactcccatttttgcttctatgaagttctctatttgctctgttcctattgtgtctagtggtaagcctctcattattaggttatttttcttcttttctttctgacatgcttccaaggttatttctattttatctattttttgtttcatcgtagccatttctttctttagattttcattttctcttattatttctttcatttgcaatttgtattcattattattgaaggcattaagtggaaatggaaccaaaaaacaagttggttctgt

SEQ ID NO: 14119 - DNA, 469 bp, Diabrotica virgifera
  SmartBlast Evalue=1E-43; Info="SCO1, mitochondrial n=1 Tax= Culex quinquefasciatus RepID=B0W6Z1_CULQU"
ttacccagcagaattcatcaaaatgctagaaaatacagcaacaatacacccttcctaaacccaaaccgccaggaaggggtattggaccgataacgtggaaaaatcttggaattactgccgtattaggtggcggtttgttagcatttatgtggtatttaaaaaaagaaaaagaagaagcacaaatgaaagaaagacagcgtatgctcggaaaagctgctattggtggaagctttgagcttgtagatagtacaggtaaaataagaaatagcgatgagtttctgggaaaatggcttttaatatattttgggttcacacattgcccagatatttgtccagatgagctagaaaaaatggcaggtgttattgacattttagataaagctgaggatatgcccaaaatccaaccactgtttatctcagtagatccaaatagggacactccagaagtggttggaaagtattgtaaaga

SEQ ID NO: 14120 - DNA, 472 bp, Diabrotica virgifera
ccagagaagaaatctttaggcatcgctggagttgacttgctcgataaagtgcaaacaccagaacgaattgaattttctaacttgtcttctggccatgtttcatcagatcaagaagactctcttaatcaaattgacgaagacgaatggactgataaaaactttggtgcttcttgtgcggaaatggaagatagtgatgaagcttcctctagtttcagtgaccctgacagtgatgatgaaggtgcctacgatgatgctttagaagaacctgttacaaaagaaggtactttgaaatgggctgagcgatggaagaatagttattcgagaaaaaaacgaaattcgcattcggatgaatacagcagtagtgatcaatcgagttattatgacagttcagacggtgaagaatcagacaccgccacggagggagaagaagatatcagagcccgtgaacttcggaaacgagaagtttgcgtcg

SEQ ID NO: 14121 - DNA, 468 bp, Diabrotica virgifera
agtatgcgtgatgatactaacaggagtctctagcagcacttgtagcgaagaaattagcaaatcgacagacagacattactaagtttaaatggttgatcggagaacgtaagataagtaaacatatacgaaataaaaccactatccaagttggcaacatgctctccgagtagcgtaagttattagtttcttccagttactgttattgactatctgtgttacgttgctgttttctgttctgtgttggataagagaagtttttgtttagttttttatattgcagctccataaagaagcatattcctggctttattccggtattattacagggtccactgcttcgatcagtcatcttcacctggtttgatccaggacgtcatatgacgtggcattgacattggaatattaaagaacatttataacgatacattttttatttaaaaattttaggaaaaatcggattaacgtaca

SEQ ID NO: 14122 - DNA, 472 bp, Diabrotica virgifera
  SmartBlast Evalue=7E-25; Info=Glucosyl/glucuronosyl transferases (Fragment) n=1 Tax=Aedes aegypti RepID=Q16T56_AEDAE
tttgctttgcattatgtttcacctatgaactttaaacagaggctgtttaacaccctcttttctatatttacctatttaaaccacaatctgcttcaatacccaagtcaggaagcactgattcataaatacatatccaaagacatagatttggagaaggttgcttataatgtatcattggtattgagcaattcccatcctagcttaaacccagctgcaggtgcagtaccgtgtatgaaagagatagcaggattccacgtcaagccacctaagcctcttcctgaagacctcaaaaagtatttagatgaggcaaaacacggagttatttatttcagtatgggttcaaacttgaagagtgcagacttacctatcgtaacaagggaagccttgatgaaggctttttccagaaggaaagagcatgttctgtggaaatttgaagatgaaaacttgccaggaaaaccagataatgttagaa

SEQ ID NO: 14123 - DNA, 468 bp, Diabrotica virgifera
ggcatttttaaaattataataaaccgaaagtgtatgtgctatatcatcacaaaacctaaaaaagtgtcacaaagtagcctcattttacggtaacaaaatataaccgcggtagagctacaggtttaggtgtcctgcatgcacaaaagcgtccatcctgcactccgaaaatttcagaagctggtagtctggcacaaaagaagcagtcaaaaccatttttaagacttttgtaatcattctcaaaaaagaacggtgtactggagactgtaatgttttatgggtacaattacaaaaattatcagtacattttttaaataattttcattttctttaaaatacataatagtagcttaaagaaataatacaaatttaatttaaaccctattgttgaccgtcccaactagcacaagtaagattttagttcgtagtaaagcaatcaagcttgtttgtatatgcatagaactggtgctg

SEQ ID NO: 14124 - DNA, 469 bp, Diabrotica virgifera
atgaccattactttaaatatcatagaaaatacttctaaactaaaattttcattgttcaactttaaatatcacatgacatgtgaaaatggctatgccacgaaattttggcaacaatgtggaattaccaaaaaatattttttactttattgcgtcacattatataaacatttaattaataaaaacgtttatacctcgtttattacaaataggacgatcaagaaatttacccaacctcatcaatttcaattcacatattagaatataaaaccagaagaaagagtcaaagagattacattttactgacatcgccacgttgagaccgaagtggccattgtgctagcctcatactacactcaccggcacaaaattccgccactaaaaaatttttgattgacaatttataactttattattttgtactctgattttcaagattcttgtatcagtctgtaggtaaatgtattgatat

SEQ ID NO: 14125 - DNA, 475 bp, Diabrotica virgifera
aatcgaagaagaagagtcgccgtttacatcatttaagcgcttttgatttacaactacgagtgcgatttggctgatattttggcataggccgtctacaagaatgtattacacaattgtaaatttctcttgcgacagtggcgccatcgaacggagaggctaagtacttatcggaccacccacgtgcaaccgcaattggagtaatgcaaaatcatagcatggataatcataggcgtaactaggggcggttttgggggttataaccctcccccatttggatgtacttttgaagtctatacgtttaacaccattactattccatactccccagaaaccatcaagtagttgtaaccccccccccttaggatcatcctggttacacctctgtggataatacgcaacccggataatccgcgcacggataatcgcggttctactgtactcgtaatttcaaaattttacacttcttaagttaacc

SEQ ID NO: 14126 - DNA, 469 bp, Diabrotica virgifera
gactttgttagttattttaaacactagaaaaacatgttaagaaattgcaaaaaatgcgttcatgattttaaaaatatctctcttctttgtttattgtttgttttatgtagtacatgatacttttgacaaatcaattatgtataaatactgcaataatagattttgtatgacaataaatacattaaaccagcggttctcaatctgtggtatatgtaccactggtggtacatatccttatagaactgtaagtggtacatgactcaaaaaggttgagaaccgctgcattaaaccactcaatgagctcccaaatccagtaccttttcagtcgaacatatggacctcgttaaaaaatcattacaactcttagaacatttaaaaatcaaggatgtatctattccgtccatatacagggtgtaacaaaagatagtcataaattattagtttgaatgaacccaacttaccctagtac

SEQ ID NO: 14127 - DNA, 467 bp, Diabrotica virgifera
atctaacggatgtgcaatattacagtcatcatcgttaatggagtcttacggtggagctaaaaaaatatcatatataaagtgacttcattatgttttttaaacaatgtataaatgttgtcattatttaaaagaagtacagtatgcggaaaaataaacagcactgaaatgtatattgaactgtttatgattatttatatacttagaatacatcctatattcatcaaacattattcacgacgacgtttccgataagatgttaaagataccctctggcatgaaaaaaactttaattctagtccgcaattaataccggaatgtcggtattgaggatcggtctccctcttcaacgtccccatatgtacgtatcaggtggcgttagaattggtgagtggagatcctacccaaaataatcgtggagcattcgaagacgaccccctgaccgtatgacaggctgctccgtcctgctg

SEQ ID NO: 14128 - DNA, 470 bp, Diabrotica virgifera
  SmartBlast Evalue=1E-29; Info=E3 ubiquitin-protein ligase UBR4 n=1 Tax=Harpegnathos saltator RepID=E2C5Z8_9HYME
cgataaatccgtgagcttctcctttttccgggaccatcgatcgagatcgttcgttttggacagttttagtttctccattttcagaagttggtgatttggactcggttgtttctgggggcgcaagggtttcttcaaaccattgtcctaagatgggctcactatcatcgtcttcatccgttgaactatcgtcggagcacatgatcatatcttcataatatgtcgttgaatctgattggctaaaggtgtcgccctctggcggatgtaatcttttaagtgtacatgcttttctataactgactattgctagataaaacaaaaggtgatttaagggagccgcattcaatatcctagaaattctctgcaatgctgtgaactggcccattattgctaagggagcaggttcaacctggactatgctccctgctccaccacacacttctaaatataaatcgtacaaacaattcgataac

SEQ ID NO: 14129 - DNA, 470 bp, Diabrotica virgifera
  SmartBlast Evalue=9E-60; Info=Thyroid hormone receptor interactor 12 n=1 Tax=Culex quinquefasciatus RepID=B0X0Z0_CULQU
gcacactcatgggagtaaaacgtctctgcacaggtctagatgttccagtatcttcattgatttgttgcatcgaatggaaatctatcgtgtaaatccttcccaaagtatttaaactaacctcatcgtcgctgttcatatgggcagcttcgattattctgctgtcgacagctccgtaaggatgccataggccgcggtcgtcgcgccactgccagatcggctgatccttggcaacactggatggtctttcgagaagcgaatctacagcaaaaatgccgtctgttggtaacttcggcatgagttctccaataagtgccgttatttcgaattgttcttgaggttgtcttggtattaattcgatttcttcctgatttacttcggcagatccggtcaataaatacaccagagtttctgctatattttgtttcaaaagtgtcagtgccagatctggacaatttgcgcacattaccgat

SEQ ID NO: 14130 - DNA, 472 bp, Diabrotica virgifera
gatcttaacttggcattaactgggagaacatcaggtaaaactagattattttttaaatcttcaacatcacatttatcaatcttcggttcattcattgatgatcttcttgaaatattagtattttttcgagtcgtatgagatgaacaaaacgtttcttttattttctgaggctcacttatcggttctgaaggaagttcatgtccattgggagacatggttcttttatatctacctgtgtctgattctgataaaatccgatccttttcgtggcgggtagttaaataagatgccttcgactggcttcttctaatacgaaacttattcccacttccaaataacatcttgatttctcgacactatcaactgattaatctaaaactaaaacaacacaaatcaatcaccacaacggcagcatattttgataaacattatatcttttcaacgaagtttgtcagcattcagcaaatagcga

SEQ ID NO: 14131 - DNA, 469 bp, Diabrotica virgifera
ggctggcataaaaacaattattatcattgacgaaaatgcaccactacaaatttcagtaaaatttcgactcttatagtcggttcgctaaactcagacacaattggctagtgattttagtaagtaattttgccaatttggcaaaaaataattactaaatagttagtaattttgccaattttagcaaaattggccaaaaacaaaaagattacctactaaaattactggccagttgagtttagcgaacggactatagcaagcactccactgtacagagcctgtaattttccttgtagaaggtcttaagtaacatttttaacactaaaaggtcaaattagatgcagatagtcgttaattttatcggttatatcattaatccagttcttattcgcatcatgaacctgcccagacagtacaaaccttttcgttacttgaattattgtcaactgtataattcgtatgattaatattt

SEQ ID NO: 14132 - DNA, 463 bp, Diabrotica virgifera
aaactaaattttaaattaagtattaataaaacatcaatgacatttgggccatgttaaacaaaaagcaaccaaccctcaatttgtaaattaagagaaaattaacttttatgttttctaaatatttaattttccgtcgtattaaacgataacttcactaatcaatagtttaattttagagcaattttatcatagtagtatcaaaattatcctaataattttttacaaaaaaaatagccatattgagggttggtttctttttgctgttggaaatatatctaataaaatgcaatctgcaaaatccaaccaacccacaaaatccatgaataaaaccgaatagtttcagtcaactcagtaataccatacagtagaatttctactattaaacataatatcaatacaaataaaaaatatgcgataatcagtcaaaacaacaaaccataatatttaaaaagtaagataaaca

SEQ ID NO: 14133 - DNA, 472 bp, Diabrotica virgifera
  SmartBlast Evalue=3E-58; Info=Methylcrotonoyl-Coenzyme A carboxylase 1 (Alpha) n=3 Tax=Xenopus RepID=Q6DIZ7_XENTR
aataatactacagaatcagcaaatgctttttgagattcagtttggcagactccaacgcttcttcaaaatcttcttctgtgagggctattctcattccttttcctcctccacctctaacagctttaatcatgacaggaaagccaattcttttagcttccttctttagagtctctatactttgatcctcaccatgatatccttcgactataggaacaccagctgcagacataatagctttggacgtacttttaattcccatatcttttatggcagatgatggtggtcctatgaaaataataccttctttttggcaacgttcggcgaattcaacattttctgaaagaaacccatatccaggatgaattgcttgacttccagattttttggcaacttctagcaacttatctcctcttaagtaactttgagaggctgtagctgggccaattctataagcttcgtcagccaaagacac

SEQ ID NO: 14134 - DNA, 453 bp, Diabrotica virgifera
taaggcccaactagcctcaggttttcttaacattctgttttttgattcattcttttatgtttgatagtgcaggggttaggtactttaacaactagtcaactggccatgttcttcatcagtgcaggttgtttctaagtaggtgcgacaaactttaagaggtgattcttcatgaaaaaatagtgtccatttgttttataggcatatatccgcaaatgcttcgtttccgcgatgtgggatgttgcatgttttctgacaaactgacgatttatttattgcccgaaaaccggttgagatatgcaaatgaaatgtgctgggctttaagagacagttattgcgcattttttgacatgcagttaagaattttataatcaagccaatggtgaatataaaattaataattgtatatcaaaaaatgtgcaatagctacgtctcgaaatccaccaagtttcattt

SEQ ID NO: 14135 - DNA, 469 bp, Diabrotica virgifera
  SmartBlast Evalue=5E-34; Info="Homeotic gene regulator, putative n=1 Tax=Pediculus humanus corporis RepID=E0W1C8_PEDHC"
aagaacgaggctgtcctcgtagatcatggagtcttcttcgttgtattgttgggcgttttggcacagcaagtcgaaatctctttccaaatcgtgcatcgtgaaatattttccttcttctacgttggcaacgactttttcaatatcaataggtttcttaatcgtatcgtaatattcaggtaactccttctttgatggaagtttcataaacggttcgctcaatactctaccatccctatccctgtagttcacaacaacttccataagcctcttcatctttttcttcatcttgatctcggctagatgcacctttcttcttttaatttggcttgcctcttcgtcatcatcgcgcttcttcctcttcctccctcttttctttctgagaccttctttatcaccttcttgttcttcctcaaattctccctcttcgtcaatagccttaagccactctttctccgtcaggctgtcaaca

SEQ ID NO: 14136 - DNA, 475 bp, Diabrotica virgifera
cacaatatctcgataaaaagtggcttatccaaaaagtactaataggcaaaaaagttttgaaaacattgtgtttgactagtggtgccacagtagtagtttgattggaacgtgcacaaatatttggggggtttaagagaacgaaactcccttaaagtttttatgaggtgcacaaattttacggtttttttttttcaaagatgttcctaccataaaaatgccgcatgtccatttttaataaaaaaatctctaataattttccatatattggaaaaaatcaatttcaattttgtaacctcaaagggctgtaacttttttatgtgcacgtttgtactaatagtcctgtcgccggggtgggtacaacggcctcctttgttcagatgggcttgcccaagttgttttgtgtgttttgacccgtagaacacgaagtttttggtagcagttggtccgcatgtcggtgagattattatgggcaggg

SEQ ID NO: 14137 - DNA, 471 bp, Diabrotica virgifera
ccgacatgcacattcgacagaagtgcaaaattctctacctaaaggtctagtcgccagtgcgtgcatgagtttagtgccagttgtattgtgtctctctttcggtgaatacggtcgcatggctgctcagttttagcgtacttgtgaaagtgtcatcattaatattaattggtgtttgtgttgcgaataatgtcactctcaaaaaaacaaaaacggttatgtgttttcaatgaagatttggagagagaatttaagtttattaaaactgacatttctaccgctgacagatcaaaagtactatgcaaaacctgtggtgtccatttttctgtcgctcatggaggaagaaatgatattacccaacatacaaaaacgaaaaaacataaagatgctgagaaagctgtcagctcttcttctaatttacagaatttcatcttaaaaaaggacaccgatgataaaatctctgcacaagaaggc

SEQ ID NO: 14138 - DNA, 461 bp, Diabrotica virgifera
atatttacatttttgttgttctatttccctgcattcgttgaaaactatttttttagttcttctcaaatttgtgtttatattattttgtggatctgctggtatttttctgcgtgtttattcttaaatttacgtctttcatccatcatgtccattatctcatcagacgtttttcattgacatatataaaatatatatgtttaaatatacttacttacttacttagtccgtcctcttgtaccttacggtgtcgaggtaagtggagaaatgagacgtttccatgcctttcggtcggtagctagtctttctgcttctttccacccaatatttctttctccgtaagcctttccaatatttgcattccacgttcttgccggcctgcctcttcgtcgtttgttgtcagatgcagcttttcatacactctttacagttctaccttcactcattctcgccatatgtccgaa

SEQ ID NO: 14139 - DNA, 469 bp, Diabrotica virgifera
  SmartBlast Evalue=2E-15; Info=Reverse transcriptase n=1 Tax= Anopheles gambiae RepID=Q868S6_ANOGA
cacgtctctaaacttctagctttctccagtggtcctgaacctatcgccccgttgctccttcggtacatttggactctctccctggccaggatgtgcaccggcagagaaccagccactacctgtaaagcaatggttgatacagtcctgtacgcgctgcacactccgatcaggggtttcctttgagccctcagaagcatgtctttatactttttcatccggaggacctcatgccacactggggccccgtataatattatggataatattgattgtaacatcattagcctcttctgggatccggggcccccctatatttggcattagtttattcagcgttgaggtcctctcctccgcctttcgacatgcttctatcacatgttgtccaaatgtcaatctctcatccaaagttatgcctaaataccttactgtccgttgggtcttattcggaccttgatatctgaaactgtat

SEQ ID NO: 14140 - DNA, 464 bp, Diabrotica virgifera
ataagatgtcaagaaaacgtcaagacaagattttttaaaatttcttgattttttctcaagacaggaacttgatgtcaagacaagaattcttgtcttgtcgacccctacagattcttacaatccttgaagatgttcataatatcataatgttcgaatcagctgtaaaactaagaaaggtaatttggtaaatcgtatacctggcagagggccagcctggaccgtagctcatcgtacaccgcgtttagaatttgcaagaaattatgttaattagttggaggctgatgacaggttatttacagatgagagttgattctgtctttgcaattgtgataggcgtcttcgcgtgtaccgacgttagagaacgaaaaattttctagaggaaattggaatagacattatgggatggccagcgaatagtgccgatctcagtcctatagagaatggaattgggacttaactatgca

SEQ ID NO: 14141 - DNA, 471 bp, Diabrotica virgifera
ggggtgctaacattgacttttgtgctgttcgtaccttacgtaatttctcagaatatcgctcagtttactccactcatagctgcccatcaagcatgtgcatcaaggaccgggatacaacccgacttagtcagtggaatgttacaagggagatttccgaataatccggctttagcagaccatttgttttgtatacataaacgacttgggatccaagactctgatggatcaataaatacaaaccgaattggacaactggcaggaataatcgctccaaatgcatcaccagaaaggatccaagaggtcatcaatgtttgcgcagttcaaaaaggtagcccaggagctacagcccttgatatggatcgttgtttatacaaccaagcaggtggagctttaggataactgtaacctgaaaaactgtggtgtttgcttttatattgtttctgttacatttttttgaaaaataataaattt

SEQ ID NO: 14142 - DNA, 459 bp, Diabrotica virgifera
caggaacagttgcgttctctttgaatcatttatcaagatggctctatactgtgtttcaaacgttagaatcagtatggttgtatattgtatgcgcgtttgccatacttcgcccattctgtgaattatcataaataataaatcctccttttgtattccacagcagttaacagcgataatcctctccaagtacctgcctaatactacgtttcacggccgctgccgtgaatagcggcaacgttgtcaactaaattctcatttaatgtgcatggccctataccgtgtatactgaatcgcatgtttgaaatgcgcattagttatcatagcttacggctaaatgtgtttttcaagtgtcttaacccattaacgcccaaattatttttttttgcatttttaacgtaatttttttgtttcgtagtatattttgaggtacaaaatgatgcgctatcaaagttttgtttt

SEQ ID NO: 14143 - DNA, 471 bp, Diabrotica virgifera
gatcttgtcgaaaataaagaaaatattgatattacacaatatatagaaatagaagacgagcctaatagagacctacagtctggagaggttatcgaaaaaatgaaaacaagacctttaccagcaccacccagaccgcctagaaaaactaaaccttttcaggatattacatccagtgtcacatccagggagaatataatgtcacaatcaacagaagagttgcataaagaacagcccagtgaaatcgaggtatatacacaaactgagccgttaccagatgattttgtctgtgaagaaatggttgaggaagcaaccgatagagtaattatacctactcaagctacagatgcgattactgtagaaagaagattaataacaccaacaagctatacctttgaagaaactgtcacacacggatctttgctagtagagcctctcaatggtgctaggattctaccggattcagatatatct

SEQ ID NO: 14144 - DNA, 469 bp, Diabrotica virgifera
cctgtgtgtacattctaggatcatacattgaatgtttggtgttattagggcaggtatccgctgtgagctcgtaggtagacgggatatctaaaagttcgtgagcaccagtagtgacaagtcagtgctggaaatgtgacataaatgtcaaagtgattaatttaaaacattgaaattaaaaacattaataggaaaaaatattagttggtcaaaactgtggcatacattttccttaaatatactacttacgttttaaatattaaaatttggttttttacgtttaaatataattattaatctaagtgccatctacacgataattgtcaaagtatcagaagtaagaaagatggaaactaatattcgccagtaaatacgtcaaaataatatgcaaaatcttaaaaaaacataatctaattacttctttatactgtatatggtcaatattacacgataaggataaataataaatttg

SEQ ID NO: 14145 - DNA, 468 bp, Diabrotica virgifera
atgtctcctcggcagaattgtcttgtcaaccagcaaaatcagagttcagctaacagttatgttctaaaaattccaatttaacaatattcaatgcagaatgacatctcaagtatattacaaaatgctacatattttttggtaatacatacatacaaaccaaagtttgtagtacaaccaaaactgaagactacacaccgagagaaagaacatcaaatgcattgaacagaacagttacatcgtttagttggaagttagctggtaagacaaatagcaaactaaaagcagatattaatagtgcaatatacataatagtatcaccctataggactaatatcagaaatagagtagcagtgtcatattaactagaatttctgagatatgatagattattggggtttgatagttgaataaaataacaaatataaataatcaaaaaggtttatgttttatttggagatattgggcggc

SEQ ID NO: 14146 - DNA, 471 bp, Diabrotica virgifera
  SmartBlast Evalue=8E-32; Info=Protein drumstick n=2 Tax= Anopheles RepID=DRM_ANOGA
cgacgtcagtggaggtcagttcaggagaaagatgaggtccaagtgcgagttcgtctgcaagtattgccaaaggaggtttacgaagccgtacaacctcatgattcacgagaggacgcacaagagtccagaggtaactttcagttgcgaaatttgcgggaagagttttaaacggcaggacaacctcaaacaacacagatgtaatcagtgctattggaggtaaagggctcctatggttgaaaaagggctaacccagtccttcttaattttaaaagtgagcatacactacccagccaatacaacatgtagttgtttcagtagcagatactagtattaagtcgcctttaaaatttcttcacacacagtatttattgcgtttttaatgttttgtaaatatatctttagaattaataatatttattatacaatgtattattaaacttattagttagtaagtcaagactaccgctgtct

SEQ ID NO: 14147 - DNA, 469 bp, Diabrotica virgifera
  SmartBlast Evalue=7E-17; Info="Serine/threonine-protein kinase MRCK beta, putative n=1 Tax=Pediculus humanus corporis RepID= E0W264_PEDHC"
aaatagaagatcacaaaaattagataaaatggagttgttgaatttacaaagctcgctgcaaagcgaaattcaagccaagcaagcgattagcgaagatttaagcaaaactagggaagcattacttgctgctcaaaaagaattaagagaatttagacaacgaaacgaggccttaaacctagatctaaaacgaaaagaaaaacaacttaaagaatatcaaaatcgcgtggattctgaaggattcaattcttggctgaaacatctgcccttggtgattggaattacttcatgcttctggggaataatgttactctacatgcggctatatggttgaaaaagtgaaagtaactgtccttattttttggtggcatttcagaactgtttttcgtaacataaaaaacttcaaagatcaagtgtaaataatgtgtgacatgtgttgtatatatttttatatataataaatatatatgat

SEQ ID NO: 14148 - DNA, 471 bp, Diabrotica virgifera
  SmartBlast Evalue=3E-48; Info=Phosphorylase b kinase regulatory subunit beta n=3 Tax=Culicidae RepID=B0WBZ1_CULQU
gtcgaataagaacattctttaaatagtaaaacgtaaatagacaatttattttaaatgaatactatttaattaagtaattgtgagtgaactatatttctgaaatatcgtaaggatctaaatatgggtcttcgagagaaaccattaaaacgacaaaatagcactgaagattacaatcattatcaatttcttaaagtctcaaactatgaagatactgttcgtcaattggatatttactatggcatggttaaacgtcagttgctgaggtttcaaagtccaattacaggactctttcctgtgttttcgtctgatgccgaagtaggaagtgttagagacagtatatattgtgcagctgcggtatggggcttgtatcaagcttacagacgcattgatgatgatagaggaaaatcatacgaacttggacaatctacagtgaaatgcatgagggggattttggagtgctgggtgaagcag

SEQ ID NO: 14149 - DNA, 471 bp, Diabrotica virgifera
  SmartBlast Evalue=2E-13; Info=TBC1 domain family member 22B n=1 Tax=Camponotus floridanus RepID=E2AAW3_9HYME
ggttatttttgtttttttccttctaaatttgtttttaattcaaaataagttttgaaatgattgctgaaataatttaaatttactattcgaaatatgatcattgtagaatggaaagtgaacaccaggagaaatcttctttttggaagaagaatgtaaaatcagtagctggaagaccaagtccgaagcgtgatgtaaaggacattaggaaaactccaggttcaacctcatttcaagactttcaagcatcagttagtgatgcttgggatttagatgatgatgagttttgtattatatcaggattagaaaatacaaaaatatacaaaagaaagtagcacactctgcagctttaaatgtactgaatagtcatagaagtacgactgaatctgaagcatccactgaaaagaaacatagtaagcggatgaatatttctgaaaccgaatcaattaaaattagtcgaatacctggtcggcc

SEQ ID NO: 14150 - DNA, 464 bp, Diabrotica virgifera
  SmartBlast Evalue=1E-11; Info=Odorant binding protein (Subfamily minus-C) C04 n=1 Tax=Tribolium castaneum RepID= D6WS38_TRICA
ctttgtaataatcaaaactaacaaaatgaatacctactgtgtatcttcttcttggctggtgcttttctcaacggaatagagagcatatcagaagctgaacaagccatgatgttcgaactacaccaaaaatgcttacctatctccggagctactgacgaaatggctaagcaagcaatgacaggaaattttccagaagatcctgcctttaaggaacacgtattctgcatgtaaaggttttggtttcttcaacgaaaacggagaagtaaatacagctgtagtggaaggtgaattgaacaagagagttccagatccagcactaagggaagaaattagaacaaaatgtttagtaatgaaagaaacccctcaagaaacagctttccagactgctaagtgtatgtttgcttataaagacaaacttatgtaattataaattattcgactgtccgatatgcttatgtataaag

SEQ ID NO: 14151 - DNA, 472 bp, Diabrotica virgifera
gagtaacattgacattgaatatacttacgtaatcctgaaaaagtgttcttacaatggaagcgctatacttgtttcttcttaccatgctcgtgactctctccacacatgcttcaccagttccagatgattcgaggtatttatactacgctgatagagcacctgctaatctcaacagactctttctggtaaggagacaagcggaacctgacattggatattcggatgagtccctggatgattcaccacgaagacattattaccgtccatacgttcgtatcagaagagtgtaccgcacccattatcagccaaggcaccccttatctaattatgcggactcttatgacagatttccaacagtagcttaaaatatattatgaaggtgaaggttatctctgaagaagatattgcatatcgcagaaaaacggattattaggtaaaaacataatatccaagaatttcaaaacaattttaa

SEQ ID NO: 14152 - DNA, 473 bp, Diabrotica virgifera
caatgttcagttgtcatttagaagtgccactactagttctaagaaggaggaagaaaaaccgacaactgcccaaaaaagacatacgcctatagagtttgactctagtaatgcttccaataataagcaaatgcgaacgaataaaggttctgaaagcatgaagttgtactcgccacctagtgggaaattcagtaataatttcaaaagttacaatcatccacgtggcagtggtaggggaagaggcggaagaggaaggagaggtagttcgagagactggaagaactaagattttcgcaaaattttcacgttattccaaactttccattgctttgaaaaagtcgacttgcaaccttattgatggaatatagcgttcacgttctagtgagtagaactattgagtgcgctcttataagtaatgaattttctatcgtatttatagtttttaaaaaggattcaagtagagataaagtagattt

SEQ ID NO: 14153 - DNA, 470 bp, Diabrotica virgifera
  SmartBlast Evalue=1E-14; Info=Iporin n=1 Tax=Camponotus floridanus RepID=E2AQI5_9HYME
agtaggatggaccaattggtccatccacatgatgcagttaggcacccccaaagacctagtagtttaccttacaacaagcccacacaagcaaatggaaaaacgtccaaaataacaccacccagacgtgcagcgtcaagttcattaagcagaaaaccacttactcagtcaacaccgaaggttgtgcgaacgataagtcatcgattaccgtcagagagcggacatctgtcctacaatgaaggtgagagacttcgcgtagtcttagaagtcgacgaaaaatggctgttgtgttgcagaggcactcaaaagggactggtgcccaaatcggcggtgattgcggacaagggacgtttctgactgtaaataaatcataagtagattaaatgctgagttgtaaattttatacagactgcacttgtaacgtaagactaaccacgatcggcgaagttgttaaaggagtattcataatgcca

SEQ ID NO: 14154 - DNA, 467 bp, Diabrotica virgifera
  SmartBlast Evalue=3E-14; Info=Endonuclease-reverse transcriptase n=1 Tax=Bombyx mori RepID=D7F176_BOMMO
tcattaatttcgtttttgtgatgttaattttgagaccatatacctatcccactatattaatattatttactatctcttgtagttcttctatattgtatgctatgatagctgtatcatcgccatatcgcaatttatttacgggaattgcatttatcttgatacctttctatgcaagttcaaagatattttctatacagattaaacagcacaggggagaggatgcagctctgtcttacgcccttacttatttctacttgctctgtatatatagacctttggaggtccttcattctgccttttcattccagtgcagttgctgcatcatcctcatatattttgcatcaacaccattctcacttaatacctgtattaacatatgtctcacaatgtcaaaagcttttgtataatcgataaagcaaataaaggcatatctcctctggtcatagcatttctccactaataacggc

SEQ ID NO: 14155 - DNA, 468 bp, Diabrotica virgifera
  SmartBlast Evalue=1E-17; Info=Endonuclease-reverse transcriptase n=1 Tax=Bombyx mori RepID=D7F170_BOMMO
aatactaataaatgacgataaaacaataatggaaagatggagggaacatttccagctgttactgaatggaaatcaaatgaacacaatggagaaggaaagccacataaagagagtatccataagaaacacggaaaatccagaaactatagaaaaagaagaactagaagaagcaataagaaagataaagattggaaaagcaccaggaagcgatgaagtagcaccagaaatgatgaaatatataggaataaaagcaaaagaaaaattgttatacatatataacctaatatggaagagaaaagtaatacccagagaatggacaaatgcagtaattatacctatatacaaaaaaggaaacacaagagactgtaagaactatagaggtatatcactactatgtgtagcagcaaaagtatacgaaaccataatagaaaggaaaatcagaaaagaaatagaacataaattagagga

SEQ ID NO: 14156 - DNA, 470 bp, Diabrotica virgifera
ctgaaatagatcaatggaagaacttcagtccagacacgctggctgaaaaactgaccaaacaaaaattggcaagcatttttcctacaattcctcaagatactctcttggaagtattacatgcccacgacaataagtatactgacactgtagaaacactcatggcttccacagggttcactgcagataggattaatgcaagtatcaaggaacctcctatcaatgatgatgttttagaagaaatgaaggaagctcaaagaaagcattctgtagaggtgtatcaagattctgacgaacggatagaagcagaaagttaccgacaagaagccgctagatatcttaataaaagaaacgacctttaccaaaaagcaagccaatatcatgcaagaggtatgcgagaggttgcacaattttattccggtcttgcatctctccaaaccatatactatgacagagcaaataatatggcggcc

SEQ ID NO: 14157 - DNA, 471 bp, Diabrotica virgifera
  SmartBlast Evalue=2E-35; Info=Plasma glutamate carboxypeptidase n=1 Tax=Harpegnathos saltator RepID=E2BEX3_9HYME
tttttgtcgtaattgttgcgtccaagtgtgataatgttaataacaaagtggaagacgaatgtcatttaccggagaaattggtcaaggaaattcaatcttataaacctacagtgcacagaatcatagatgccgtaacgaaaggaaggcacaagggaaaggtgtataaccatctatcggattttatcgatacttttggtgctagagtatcgggcaccaagaacttggaaaattctatcgattacgttcaggatttgttggtccaagctggattggagaatatacatggcgaaaatgttacagtgccccattgggttagaggcacagaaattgccgaagtcctggagcctcgaagatccaaaattggtgtacttggcttgggacaaacagctaatactcctcctgagggaataacagcagaagtcctagttgttcgttcctttgaggagttaaacaaaccagatatttcagcag

SEQ ID NO: 14158 - DNA, 471 bp, Diabrotica virgifera
  SmartBlast Evalue=1E-12; Info=Mitochondrial cytochrome c oxidase subunit VIC n=1 Tax=Aedes aegypti RepID=Q1HQE0_AEDAE
atattaaatcacttttatttatacttatttttctaacaatgactaatatacaaacagacaaaattgggtgtaatgtatctttaagatttattcattgtcatcaggatcgcatgagtcaaatagtccctttttcctcattctagtaaattctttttcagcgtcatagtttagatagaagttagcatatgcccttttgtttccatctccatatacgaatctcatataacatccagctataacaactgttattcctgttagaatcaaatttcttttaatagtgctatgaagcagtcctcgcaattgcggtttcggaaggtttccagttaattctgcagacattgtctttaatgagttttaaataaacgtcactacaaaaatggaacgacaagacacacttcaaaagtaaacaaccgtacaacataaaaatgtgaccactattgagtctgcgttaattttcgcaccatacataaa

SEQ ID NO: 14159 - DNA, 469 bp, Diabrotica virgifera
  SmartBlast Evalue=7E-38; Info=Serpin peptidase inhibitor 26 n=2 Tax=Tribolium castaneum RepID=D2A2J9_TRICA
attcgaaattttaatcttaattttgaacgagaaccagtaaaagcacagaagtatgtgaatgcttgggtctccgatagaactgtgggaaagatcaaggacattctgagtgagcctccactaccaagcactaaaataattctagctagtgctatgtacttcaaagctaaatgggaaattcctttcttgggtgaaggggtgacacaaaggagacgtttttacccaaatggtagaaagtccccctctgagtttgacgtagaatcgatgtcaaatgcaggcgaattcccttacttgaaggataccagattaggttgcgaaattttaggacttccctacaaaggaaacaaaaccgtcttctacataattatgccgtttgagtcaagcgttcaaaagcttaaagatttccaaaatcgaattacagaagcagacttggaaagtttggcagacaggacagtttatagaaaagctttag

SEQ ID NO: 14160 - DNA, 467 bp, Diabrotica virgifera
cacaatgcttccttccgatacctcatctttaaacggattgactctaaaattctttttttttctaggatcaataaaacactcaacattgtttgacaaaacaccttgttgccctgtaaaaattgtaattttgtacaaaatatttttttacatcttgtgcattcgtattttggctagttacatttaactgtctagcgggtaacactccaatacattattaaataatttgtcacgttttattttcccataataaacaccaagaagagtgctaacctttaaagccggttttctcgaaacttattattttgacatagctccttctttacctgtacctttcatatgttaattaatacacattttaaaatacataatataataaatctgtacaatcctcttacgaaaatcacttcacgaaattttgactcgtttctgaaaattagttatttcgttttaaaaatactttttctatg

SEQ ID NO: 14161 - DNA, 470 bp, Diabrotica virgifera
  SmartBlast Evalue=1E-20; Info="Senescence marker protein-30, putative n=1 Tax=Pediculus humanus corporis RepID=E0W247_PEDHC"
gttccatgctagaccgttactagtagccacgggttgcgctgctattttagggtcgtttaaattttctctggtaatggtgtaaaagagtcctcgtccttcagatcccattgttccccaccacaaccttccttgtttatcagccttgccatcattcagcctggtctctgggaattgctgactcagagtagtaaggacttgctgacctcccagattattttctccatcccattgtactgctaccacagatctattgacacctaccattaggagattggaatcttttcgggagggcacaactggcgatacggtgccattaagtttaatcttatttaatattttcgaattgtaatggtaggcatatacttctccatctagaatattaacaaagtatagtatgtttcgtcgagtatcccagtgaggaccttctgaaagacctattggtgaagtcagctgttgaacacaagcatcat

SEQ ID NO: 14162 - DNA, 469 bp, Diabrotica virgifera
  SmartBlast Evalue=3E-15; Info=Cathepsin L protease inhibitor 1 n=1 Tax=Diaprepes abbreviatus RepID=A7LFV2_DIAAB
caccgagacaacatatttattaatataaaaattatttaaataaaaatacaaaactgacttatgatactactatttatttttctctaggtttaaaacccctaaattgactcatttcttcagaggtaaggtcagcaaatttattaactcccatctggtacgtaacttcgccagcttcaaactttttgttgtgttcttctattttctgaaggttttctttgaagatttccaacctgcgtggttcctcttcatcggtatattccttgttgtgtgcgaatttaaaatttttccattgttcttcaagtgataaccccgacattattgctttgctggttgattgtgactaacacaacacaaaatgacggataatacaatgtgcaaggttactttggtgttggcgaattgatctaaaaatactttattccaacgtaaaattttaatattcatttagtaaaaagtgggagtgggcgat

SEQ ID NO: 14163 - DNA, 464 bp, Diabrotica virgifera
ttttttgcttttcgaaaaagactgctcttcattttctctatatcttttccgattatcgtcggatgtgtaatcgtcggggttcattttcttaccgaaattgctcgcgataaaatcaccctccccacctatcgcgccggaggaagatgattttctcaagcaatatgtttctctttcgaatgtgttacccctaaattgaattaaattaaattaaattattttacgttattttggagcagttcgattcaacagttcccacctttaactttcaaaattccagtttctggagcttgtaatcaacgttctaatgatctacttttttggcttgatgttgaattaaattgtatttgttgttttaagtttatgtattgtatttaatattattgtacttacagtctgtttcaaagtttatttctataacttcacttaacactaatcgtctttgactacactgtaactaaaatcac

SEQ ID NO: 14164 - DNA, 470 bp, Diabrotica virgifera
gcctatccgtttccgatgttggccaccatcatggcaatctgtactttgcacactgctagatttttcaaccagaaaatccttcgacttcctggtccgcggttttcttctacttttctctgtaaaattagttgaaccaatccatatctttcgctattcatcatggtggaaccgaggtattcgatgtattatgagtcttggtgttgttaatttcatatttttgtatatatatgatattaggtaaacatcatcagcataaccagacccggagctagggaataaggcttccggctgcaaaactaccataggtttttttaattagatgtttgtaaagtttgtttggcagtgaatggttgacttcaattagtgcggtcataaatattatttttatctgacttggcccattgttaggaccggtccggagcgataagcaaacgaggtagacagagttggtcctttgacaattaaaactg

SEQ ID NO: 14165 - DNA, 458 bp, Diabrotica virgifera
tacttatttgataacaaaaatgtatgtcgtcggctggcgcgagttcgggacttttaggcgggaggagatcagatatgaaagcggatggaaaaaccctgcaacttgtatgtcaggtatttgtctccgtggcttacgtccataatggcctaggggttggaatacctggctcctggctttcacccaggcgagtcgggttcgattcccggtgtcggaaatcttttttgttttttaaaattgacattttgattgaaaaataattgttttataataccactttttattatttatacgacacaatataaaaaagtattataaaaacaattattttccaaatcaagatgccaattttggaacaagggggatttccgacgccaggatcgaacccgactggcctgggtgaaagcaaggtattctaaccactaggccattgtggatgtaaggcacggagatggagattt

SEQ ID NO: 14166 - DNA, 468 bp, Diabrotica virgifera
  SmartBlast Evalue=4E-60; Info=Titin n=1 Tax=Camponotus floridanus RepID=E2ARB2_9HYME
tgaaggttgtcttctgtatttgccagcaattgcatcttctacatcttcgatggcctctagaccagctttaccttgaggatgttgcgtatctagatatatattttgtttagcaatgcaacgtaatgatccagaagttgttgcagatcccttgctgttgctggccttgcaagtgtatattccagaatcggactcataagcataggtgatatctaaagcaacatatccaaagtcataggttgacttatatttggaaccagtaggcaaaggtttgccattaacgaaccattcaattttaagagtgggatctttagatggttctacgttacattcgaagtgaacattatctccttccatgcattctacattattaagatgagtaataaatataggtagttcatacactggttcaggagtatctttcttaacgtctgctggttctttcaagagcttcaagtttaggtatagcat

SEQ ID NO: 14167 - DNA, 469 bp, Diabrotica virgifera
  SmartBlast Evalue=3E-38; Info=Myosin-Va n=1 Tax=Camponotus floridanus RepID=E2AL94_9HYME
tgtcattacttacttccagtgaattttcggtgaattcggtgtatgcagtgccgctagtgaaagttatataaggatttgtgcaggatgacggccgtggagctgtatacaaaaggtgcaaaagtatggataccagacgcagagaaagtatggcaagcagcggagttacttgacgattactctccatcgaaaacgtcactcaacgttcttacaaatgcaaacgaaactaaagctttaaccattaagtctgaaaaagatctcccatttttgatgaacccccgcattctactgggagagaatgatttgacgtctctttcctacctgcacgaacctgctgttcttcacaatttgcagtacagattttgtcagaaaaatgatatctatacatactgtgggatcgtactagttgccattaatccatatacagagttacctatttatgataatgacacaatacaaacatacaggggcc

SEQ ID NO: 14168 - DNA, 469 bp, Diabrotica virgifera
tcatcagtgatgacaagatgctgacacgctaaccaccaaaattatttttaggatcagatggtaccctgggcgtaatataataataataatagtctcccgttttataccgctcacgtggctttgggaatatagcagggtactctgctatatttagggcctacggtatacaaggaaggtaacagggccagtgctacgcttcaaccgcctattattacccctggttttacccaaggtactcattttattcaggctgagtcgacctggggcctataaacatttaaaaatgtctatactaaatttataatttatgattcgggagtgcccctagtagcatttaacgtatcttggtttgtttatttctactgcatcttgattttaaatttagtatagttgttcttgccggcggtaggatttgaaactcgggcctaccagcacgcgagccaagcacactaccgcttagctacgccgg

SEQ ID NO: 14169 - DNA, 470 bp, Diabrotica virgifera
taaaattttattacttattttgctagaaaaagtccataaatcaccactaaaaagtaaaacaaaggaacaaaatattcttccgctaacacataaaaatccttgtctcgatgttgatgaagaaccattgaatttccggtccaagaaggactcgattcacaaaatgttaatattcatcaaaatataaaaaggtatattctctcctacactgacggccgattccattgacgaaacaattgacttggtgcgttctttggcatacattttttctttatgtacagatcgtgtgaaaaccacttctaactttcgtttctcagccttgtgattccctctcggacgtagcgcactagatcgatgagggagctgtgcatcgttaagggtttgcactgtctgtccaattcaatgaagaaatcggtataatttgcctctaacgaccaaagaatcagcttgatcccatagatcttggtatgaca

SEQ ID NO: 14170 - DNA, 465 bp, Diabrotica virgifera
cgggttttttgcaattgataaaaccactattattgggttttttggggttttttctaaaaatagcaaattttcagttgaatgaacgtcatatttatttcggaataaaacaaaaactagcataaataccatgaagtaagtagtaggtgaatacaaaacgagagaaattgaaactaaactaataaaacacttattttaaacatggtatatagacaaataaaaaaataaacaagtttcttgttaaacaaagcatcagcaaagcatattagttatcaggaaaatcagaatctgtatttttgtcacattccgtttcaattttgttaacgtctgcccaactgaaatctaattctcttccacatctactgttatttgccataatttcagaatgatgtaatttcacagctccagaacgccacggcaaaaacgcactcatcaatgcatcgaacgaacagttaaaattgacaaaat

SEQ ID NO: 14171 - DNA, 469 bp, Diabrotica virgifera
tggattcatcgcgttacttgccaacacttaaaaggttatgtgaaacctggtggtcatccagacatgatgctgttatggctttgcttcgggctttcagacaagtaatgaaatctttaacgaaaatttcattgttacttaaaaaaaaacgatgaaaaattagaagctccggcattattagagcatatgaataattttgaatttgtcgttaacattactattcaatctaaaatacttaactttataaatctatcatcaaaacttttgcaatctgaaatggcagagttaacggtcacacttcaactttttgaaaaaatcttggaaaatctttgaaatcttcgagaaatgagaaatttgtttttcgaaactttagcagaaggagcgggaatagcagaattgtggggtattataccggaatttaaagtaaatggataaacgatattaaaatgtttacgataatctcagcagcgac

SEQ ID NO: 14172 - DNA, 470 bp, Diabrotica virgifera
gttatttggaaaactggaggtataaattcctctaaggataactgaagttgcatttgtgttgaaaaatctacaacatcgaatgtgttgtttatcttgttaacttttagataactcgcataaaatattctcattatcagtcttatctttagtagtctttaaaaaaaatcagtcaaactgatcaaaattgttgtactagatggtaaccatctttaaactttagctagaaggaactgttactgtaacgcttacaagtcgttttacttgctctgtgattttcagaagcatttcgatagagatccgatctctattcattgaaaaagtgatatttctttaccgttttttgtaccttcatctgcccagctgtttctgtagtctgtaggatacgtagcccgtacaaaaacattttttgtcgtacgggattcactcagcatttaataattttcgcttatttattcacattttctattcat

SEQ ID NO: 14173 - DNA, 470 bp, Diabrotica virgifera
  SmartBlast Evalue=5E-31; Info="ATP-dependent RNA helicase, putative n=1 Tax=Pediculus humanus corporis RepID=E0VJ83_PEDHC"
caattaggaaaattaggctataacgtcgaaaaatgtccaaaaaacgctataattggaaagctaggcaaaatgttgaaactctggttgataatactcataaagaaaagattaaagttgattttgaagctgtaggaaaatacgatcagagcaatgagctggttctaccttctgaaaaaagaaaaacaaaaattaagaagaaacaagctgaagttacaagaatactttctaagaaacaaaggaaacatcttcagaatattgtagacaaaaagaagaagaaagagatgagagcacacctgttagattctcttcaaaaattccaagtatctgctgaagaattgtcgaaattgacttccatagcttcagtgcaaactaagggtcttaaaagatacttccaagaagaaataaattcggaaaaagtaaaatcggaaccgaaatcagaattaaaagagacagatgtagaattagcacct

SEQ ID NO: 14174 - DNA, 470 bp, Diabrotica virgifera
  SmartBlast Evalue=6E-32; Info=Conserved protein n=1 Tax=Aedes aegypti RepID=Q1HRD8_AEDAE
agtgaatctgctaggaatactgtatttctttccttatttagtggcacaacagcaaactccaggattcaggtgctttccaaattggtttcccttgcgataggcattccatctacaaaaattttagtatctgcaagggcatggatgcagcagttaggaaatacttctgcaaatagctgcaaattggcagaggccatagttcaagactatttttacttttataaaagtaatacagataaaattacattattaccaaaaatttgtccacagtttaccgcaaatatcataactgcaattgcagagaactattttaatactagagggaaagaactagtatttccgccagatatactgatagaaactattacaaaatggttatcagaaaacccaagtctatgtagtgcagcgcagcaaaaacaagctttgcttccagtaggagctatttcaatggaggctacaacacccatagctgg

SEQ ID NO: 14175 - DNA, 470 bp, Diabrotica virgifera
acgtgccgttctttgcaataggcggagaagagccactggtaaaaagttacatggaaggttcagtctcaaaattattagacctacaatagatctgggccacaatggatctcaaaaggtggcagtgtataagcccaaaagcaacagcattgaatatattatctggtatctattacattgatatctgtccacaaatacatattaaatgacttgaaatatgatggattcttgtatattttaacaaatagctgtgaaggctattataaaggtagaatgaatcagtctaagtgaggtaaaatggattaggcatattattccagctcaaaaaataaaatgatacaattataattacagcaataattgtaagaagtgtttcaggccaaaacggtgaatagatatttaatgcaaattgcttagaaaatatgtgctctcattcggtctaaacacacaaaaagaaaacgaaactctatatt

SEQ ID NO: 14176 - DNA, 469 bp, Diabrotica virgifera
  SmartBlast Evalue=7E-28; Info=Ribosomal protein P2-like (Fragment) n=1 Tax=Culicoides sonorensis RepID=Q5QBF5_9DIPT
ctccattttccttcttgacattttgatattttgtcggtatacacgtttcgtgtctcaagacttaaaaatgcgttacgtggctgcttacttattggccgttttgggcggcaaagcctctcccaatgctgcagatcttgaaaaaatcttgggatctgtaggtgttgaagctgaaggagaaagagtaaagaaagtcatcagcgagctcagtggcaagtctgttgaagaactcattgctcaaggtcgtgaaaagttgagctccatgccagttggtggtggtgccccagctgctgccggaggtgccgctgctgctgctccagctgctgaagaaaagaaagaggccaagaaggaagaaaagaaggttgaatctgaatcagaagacgacgacatgggctttgctctattcgactagactcattagttgtaagatcaaccttgttttgtaccttaatatatattttttaagttaaaa

SEQ ID NO: 14177 - DNA, 464 bp, Diabrotica virgifera
aaaatatgtactaaattaaattcaaaatacttaaaaaattatatttttttaatactccctgtcacgaaaaatacacttattacgccccttattattatggaaaaaaatattatttttttttacagtaaactcgtaaactaatgtgtgcattaagtggttaatacatcttcgtattgctgaattcgaaaaagtcttcatataagaaaaagtccgccacgcgaattggtttgatatgtctgttatcagctgtaaacacgagttcaagattatcattttttgcgattaatacctaaacataatatattcgattgatatgtttgtattattgaccatacagggtgattaaaaaataacggcttaataacaactttgggttgtatagaggaaattatttattttggcgctaatccgcttagaaacttaactaatattgcatttaaacactaagccatcagatattaagc

SEQ ID NO: 14178 - DNA, 467 bp, Diabrotica virgifera
agtattttatgaaatatttgctaaaagcaacaccaacatgtttttccatattgttaaaacgttttgtttgttaacactattaattgcccttttaccgcaatccaaggcaaagagttatgaaaattgtccatctaaccatccatcaggacacgttttagtttacgacgaaaaaattacgggaacagatatcatacttcgtattccagaagtaaatttctttagtaatgtcatcaactgtattgaaattatagatttaagagacggccaaggtaatcctcaaattataggagggggatatggcgacaattttatgcagcttcatattcaaggtgtatcaggagaagagctgaattaccgtatccaagtatatattgatcaagcatagagaaatagttgtttgaatattttttattttatttaaactttgtgttctaacaacaatttaaaataataatataaaaataaaa

SEQ ID NO: 14179 - DNA, 468 bp, Diabrotica virgifera
  SmartBlast Evalue=2E-19; Info=Serine protease P8 n=1 Tax= Tribolium castaneum RepID=D6W9Z5_TRICA
ggcagttagtcgtccgttaatgtttaagttattaagactgtgataatgctggtcagaagttacttgtgtgttttgttggtgttaatttttgaaaacaatggggtgttctcacaaagaggtacatcctgcaaaactcctaaccaggaatgggctacctgtaactcaatatattcctgcagagctctgttgtcagctgttcaaacaagagatccaactcagctaaagtttttaaaagaatctcaatgtggatatgactcagaaccattagtctgttgtggaagtacatcgacctttgctctaacagggcgtagagtactaaataatgatgtaactgctgtagccaccggtggctctaattcgaattatagggttaattctgccattcccgatagaccaaaatgtggacaagacttttctgacaaaatttttggaggaactgcaactaaaattaacgaatttccatggatg

SEQ ID NO: 14180 - DNA, 463 bp, Diabrotica virgifera
aaatagttgaatatgacaaatatgagccctaacgtatatgttggaacaagcagatattttgtgagtgaatgccaatttatcgaaattcttttgtttaatttttttttaattgtgtaacattttctgtgattaatggaattatttttacggtttaattatttatgttatgttgattactatttaattggtagcttgatgatcgaaaaatactgacaattaaatattgcaacaagagatttttaacaaattaaaatagaaactaataaggcgtaacgtcgcccttagcttgaataacagacaactctattaagaatttaatcatctaggccttcactgaattcaggggtgaaactatcccatatttcttgcaattgagcacatagttgtggcaaagtatgctgggggttatttcttatgcgttgtttcgtgttgtaagtgtctctattggagattatgatccggg

SEQ ID NO: 14181 - DNA, 470 bp, Diabrotica virgifera
tataataaattttttcctagggcgttgtttttcaaaataacaacctaggggtttaaatatctagttagatactgtcaagttgacaaataacaacctaagtaaaactgtggttacgactattgctggtaaatgtacttatttgaaaactaattaattttttacatttaaagaatattttgtcggatattagacgttgaaggcaccgcgggtattatggataatacccttggtaccttaataattataattgatagtttgtcaataaacatataatcgactgccttgcttgtgattctaaccatcagttattacttgccctataaataatccaatataaaaaaaaactaaaagcacaaaacttatagggcatctgattagaaaacaccaaaatgtagtacaactccaaagtattgaaagttaaacaaatgtaaaaacacattcacttaaccagaggaattattggataccac

SEQ ID NO: 14182 - DNA, 469 bp, Diabrotica virgifera
ttttcaacatccattttgtaactataatcagccgaacaccacaaaactattaaatacaatcgacttcttgtacgaaaagtcgcagaaaaaacaaatcatgttggtcgcatcagaaaatcgtaccagttcgtactaattcgtaagaaatatttgtaagtaatgtaaccgtgctgttgtgaaaataacagttaaattaattcgcatttatgtaaaaatatcgctcttacatttttgggacaatctgtatgtggatggaaaatatattttagttatctcaaaagcttgtgttatgtaggcacaaaagataacggacgtatgtttgctatttatcgtcttcggggtaaaaggcatgtcgctttgccaaagaagaatagcatggtggctctttttcaggaagaaaagtgtaaactatgatattaatgcagtgatttgaatagaattttagaagtctctcgccagtcctctctaa

SEQ ID NO: 14183 - DNA, 468 bp, Diabrotica virgifera
gccgttcgagatcagtatacaccaagttcaagaacaactccggctttagagcttgccgcttcttgatatcgatgttattaaaactgggttcatccaatttattaaacacagtttccaacaagttgagatctcgggtatccaggatatcttccaagatggaatctgagatcggagcatactgaggagtagatggcacagtggacatcataaagtcatctacttcaatctgagccacagctactggagggaacaccactttctcaatcatcggtgacaccggagtggtaggcgcagtgtgcttttgcagactttgtacggtgacctgatgatttttgagcagatcgacaaactctttaatggtattcgttgcagttttggaaacttcaatatcacagtcgtcttggagagcttcgtagaataccgacaaacacccgatttgagaaagttcgttcagaacacgcactagcc

SEQ ID NO: 14184 - DNA, 462 bp, Diabrotica virgifera
gaaatgggccacagtttgggtttgaaattgaatttgttttacgtttccatttccacttcggaaattgttatcaaaatacaaaacattaataaattaaactaattaacacattcgcggtcatgactgcatatgaagtcatttactccataagaatacgtgtataaaatgacagcgtgtccgcgaatgtgttaagtaaatgctaaatttataaatgttttgtattttataacgatttccgaagtggaggtcgaaacgtcaaataaatttgtttcaaacttgaattgtggcttgttcccaagtaaaatagtaaattgcataagatgtcacaaggaaatagcttcagaacaatattagggaaaaaagaaataggttcatagataaaataaaaatagcatataatagatacacgtatatttaaggggaaataccgtgcttaataagtgcgaatgctgtttagggggg

SEQ ID NO: 14185 - DNA, 467 bp, Diabrotica virgifera
gctaccttacaaattgctgctactccggtagatgagccgatctcctttgatttggacaccattgctgatagcaagaaacctcctgaactagtagatcctaacaaggtgctgcacagcaaatatagtgtcttttttcctacatatagaagtacagaagataggaaagttgatgaaaatggaaacgctctccatcaaaataccaacacaaaaaccaagaaaaagaaagcccagacagataaaaacgtcgtagttcttacagctgaaagtgttgaaggccatcgcagtgacataataaacgatgtcgacaaattgatccagtacatcggtggtgataaaactgatgcgccttcaggcaaaagttcaaaatcgaatgtccacaaatccaaacaattacagaaacaacatgcgtctgaagattctggtcgaggaagcagtggtagctgtaaaaagcagcgcgctcattcgtc

SEQ ID NO: 14186 - DNA, 469 bp, Diabrotica virgifera
cattcattatttaaaagaataatagttacaccttagataagggtatgagaattgaaaagaatacttccccatctttaataaacacttctagtaaattgaatttctttctcgaattatatggttatcgtttcgaataaccaaaaaaattaactctttgtactcaacctttgatcaacgattttacttaaaactaaatttatgtatatatacttcttggcacttgacttatagccaatagagatgaattgtattagggatggtttgaatatcttgaacgaaataccgttgtataaaattgtagctaatgaaagattacaatcgaactgactgtagcaataaaagagaataaaagtctactactgctttttagaaatcaaatgctttcacgctgttttcttgtgtctgcatagtggctttgaagttttcacgattaccactcttttcggttgactttcgcaatagtacgtgc

SEQ ID NO: 14187 - DNA, 467 bp, Diabrotica virgifera
aacggcttgcgaaaatttttttaatagtacgttctttgaaggtaaaatattgcaaaacctctaaatttcaaagaaccgcccggactgacacgaaacccggcacacacacagccaacaagtcaaagaaaaaagtgatactgcgccgatgtgcgcccttgctctaggggtgagtttcaccccctttcgggggtgaaaaatatatgttcgaaataagtccggaagtggacaaaatgcccaattccaggcaaccttcgttctacaaagttctttcaccaagtcaacacttttcgagccatttgcgagtgaatatgttaactcctccacaaaacaaccacgttttcaaacggttcttcgcaaacaactcaaaaagcaagcacttggtggaaaaaattcctaacataaatgtagcacgtaaaaaagtgaaaaacccggcgtatacattagttcactgtatctagcagaagcag

SEQ ID NO: 14188 - DNA, 469 bp, Diabrotica virgifera
gcaaaatgttgcttctgacacgaacgcagttgttcgaagaagtatttctcgaaatgcgttgagttatcactccatctccgtgccttgtgtgcgctgccgatatcccaacaaataatacaaacagcagcgaccatcttgtgttaccggcttttttcggccggcgaaatagttccatatttttcgttactcattgtcttaggagaagtaagggctttcagttaccagccatttgtaacagtaaaatcacacgtttccagagatattactgattcagataacacgtgcaaatacacaaaaaacaagcgaactgaatggaactactaggacaattgatcaatttgcgatactgataattttattcacatgtattaaatccggacaagaagctgttgtatgtaatatacgtcaaaaatcgaccgatccgcaaactgaaccgtcctacgtataatctcacttcacagctgttaac

SEQ ID NO: 14189 - DNA, 467 bp, Diabrotica virgifera
ccttttcctctgctggtgcatgggcagcaactagggaatagttatgtagttgtccttttaatctgatataacagagcctttcgttaaagggtttgaatattaagactgcccccacaagactttccttgactaaaaagccagtgccgaattggcgctcctgttcacttccgctgaaaatactacggatttattagttttagtgtgccttctccagtctatccaatctcttgtaagtaagttatgtccatgtttgtggattcaagttccaggtttttaggatttccttgtcatcagtgataagctgcccgctgtcgttttgaaggaagtttcctgttcttgcttcctattcctttcctacttctgcataaacttcaacgatttttggtgttaggtttttcgtattagatatcattttggcgttgaaattgtcctgatggtcataacttaaattctctcattttagtcta

SEQ ID NO: 14190 - DNA, 470 bp, Diabrotica virgifera
acttttagtgacataaacatctgaagggagtgctagtggatcgcctttttcgtaaatttggttggcgtcgggatcttcaaaagcagatcgcttcggggatggggtgtcgaaatcgtgaatatcagagggtttccttttcctagaataagttttcagcaccatgttgactttaacttgaggctcgatctccacaggtttcttttctattggaacaggttcgatattcacagatttcttttctattggtaagtcaattgtaggcgacgactttttgatagactgtgttttggattttgattgttgctcctctttatgttggttttctgcctgttttgattgttgcggagatttcgaagttggttttgatggggtagattgtttaggtttgggtttttcctctttagtttccttctttaccaatgcaggtgcagatcttgagaagcgtggcttaactactttttctgtaggct

SEQ ID NO: 14191 - DNA, 465 bp, Diabrotica virgifera
  SmartBlast Evalue=1E-54; Info=HEAT repeat-containing protein 5B n=2 Tax=Formicidae RepID=E2C319_9HYME
tggtatattaatttctagtttgggaacaaccgcacatgatctgataactgatcaatcactgaatctaatagatgtaacaattggtgttttaatccacccttgtcaagctgctcgactagctgctgcttggtgtctcagatgtatttgtattgcagtacctagccaaatttcaccgctgatagatcgttgtgtgaatagcattgaacagtttaggacgtcacccgaagctattgcaggttacagttcagctttagctgctgtattaggaggagttaagctttcacctctcggtgtgcctcatatgaaaggcaaaataatatttaacactgctgaagaattattacgaagcgccagtcagaatagtagactttctctgaatagaacacaagctgggtggttactaataggcgctataatgacattaggaattccagttgtcaaagggttgttgcccaggatgttact

SEQ ID NO: 14192 - DNA, 468 bp, Diabrotica virgifera
  SmartBlast Evalue=4E-77; Info=E3 ubiquitin-protein ligase Smurf1 n=6 Tax=melanogaster group RepID=SMUF1_DROME
aaaagattgatggtaaaattccgcggcgaagaaggcctagactatggtggcgttgcaagagagtggctacatctcttatcgcgcgaaatgttgaatcctcaatacggccttttccaatacagcagggacgatcactacacgttacaaatcaatccagattcatcggttaatcccgagcatctttcatactttcatttcgtgggaaggatattgggaatagcggtgtttcataaccatcagttggaagggggtttcaccctgccgttttataagcagctattgaacaaaccgattacgcttcaagatattgaaggggtagatcctgaattgcaccgaagtctcacctggatgttagaaaataacatcgacggtgtgctagacacgaccttctccgttgagaacaacagctttggcatagtcaaagttcacgaacttaaacctggaggagcatcgatagcggtgacggaa

SEQ ID NO: 14193 - DNA, 469 bp, Diabrotica virgifera
ttcacagaattgtatgagattagtagacactcccactatttctaataattcttctttttttaatgaaagattaagttgatttgagttgattttagcagttactagtgtgaggtaggaatttttgtgttgtatgtttcctattccgaatgtgtcaaaaaaaaatctcgcgagagcgaatgtagtataaataattacgtacctaaaattttagttgaaaattaaagattttgttggacaagcccgcattttccgaggaaaattttcgtcgaagtaaatcgggaaaaacatgtctctatgcagaattgaattacggtgaatttttatttgggtgtttttggtgtaaagttaaaatctttggatttatagagcaatcattgaaaaaaacatttgggggcgccattttgtttataaaaaacgtagcacactatctgcggactttgcatacctatattattaatataatagtcat

SEQ ID NO: 14194 - DNA, 467 bp, Diabrotica virgifera
gaagtgatcttggggaggagtacgattaacaatcataatttaataaagtaaagtcaaatgtgtaatgaatatggacaagctgaatgaatacaagttaatactatttctactgctacattctctcagcagtattttagatttagttctggctttatttgggcgtaattacttgatccttctctcaaaagaacatttacatccacaaatgtaactaagttagaaattaaaattaatacatggttatgaaagtatggtggtttgttctacactgaatgtgttatattttttcagaataaagcacacaaatttatattacgtgtttttaggttttgaatctctgtcaagatatagcgtaacaaaagaaattattaaatataaaatgatatatttagaggttgtatcatttttatatttagtatgtattttaatacaatttcgcgactggaagtcggaatatcgagacatac

SEQ ID NO: 14195 - DNA, 456 bp, Diabrotica virgifera
tttttccaaaatttttagaaattttttttactatataaccaaatttttcaaaaataagcacttcaaaccaatcaaacttacagatcatataaacaatacacatacagttaaaatagatggtaaagccaaacgattaatttcatttagggtgctaaatagagggaggttttcacgcgatttttttaccaaaaaaaggggccaactttttttcagtgtaactcgtttatttttgatgctgtaaacttttgtaaaaacaaataataagcttttcttcgatactttaaaatgttaataaggttttcccgaaaaacgcttctttcttcggtgatttcgcgttgaaccattcgattttgaaattagacgaacaagaacgtacctttcatgagctacaactgcttctactcaatttgtagactttactggtacatttattttttcgtttttcataggctacac

SEQ ID NO: 14196 - DNA, 464 bp, Diabrotica virgifera
  SmartBlast Evalue=7E-36; Info=Ribosomal protein L37Ae-like protein n=1 Tax=Graphocephala atropunctata RepID=Q1W2A6_9HEMI
tttttttttttttttttttttttttttttttttttttttttttttttttttttttttttttttttttttttttttttttttttttttaaacttttatttttttattaacgtatttaacttacaaaattactgttctttaacttccctaagacgccttacagcagatctaactgatgcagccgctgtggttgagtatacccatgcacctccagctacaaccctcttacacctcttgcaggaccagattccaacacaactcctcttcatggcttctttgccgcaaaaactgcaggagtatttggagtgttgggtgatttccatttttttcaccattttacgcaaggaagcaccataacgggtaccgtatttaccagtgattccgaccttctttgtacgcttggccattttcgtgggttacttattggaacctagatttaacaaacacgtgcacagcactcgctgtc

SEQ ID NO: 14197 - DNA, 467 bp, Diabrotica virgifera
  SmartBlast Evalue=4E-20; Info=Protein FAM40A n=1 Tax= Harpegnathos saltator RepID=E2BDC5_9HYME
gagcgataccgatcaaatcaaatacgctaaagagaactgtatcttgctctatcagctaggtacttttaatgctttcgtagatctgttaaacttggaggtggataacaacgacgtctcaatcaacaggtcttctatatgcatgagcgattccgaagacctaagaataattctctctgtattatacaccatagtcgaagtacttagaagtgagaaagacaactatcccgatctatataaagcgttctgtgcagaccttatgaactctgaagatctattgataacgaaactgtttaacatgctaactaaattttgcgctgggtcttcgtcgcatttccctattaagaagatcctgctgttgttgtggaagttgattttggttaccttggcggaataaaggaagtaaatgatttgaagttggaaaccaggaaaagtatggcttggagccactaaacgaagactcagacaaa

SEQ ID NO: 14198 - DNA, 468 bp, Diabrotica virgifera
gaaatccataggagtaatgtctggcgagcttggaggcctcggttcgtttccacgtctaccgttcaatccagaaaaatagtgatttagcataatctagcttcttaattgcaatcctggcagtaaaacagttttaataaaaacacaagttgttatagcgtaaacttaacgcgattgttctttgctgtttcactcgaaacacgacttaacgcacgaaaaaaaacggtattcattcgtatcgaggtcgaatagcaagttgacttatgcccagtcggccgtggtgctaggtaagggagagagtggtggatatatatttatttacagaagcgagagcatgctctcaagctacaattcgctgaagttgactggcttttggcgcacgcatacttcttttgtatcagtgtcaatctcgttatttgacagacacatctcgtagtttaaaaactgtaacattatcgtaaactaaatata

SEQ ID NO: 14199 - DNA, 463 bp, Diabrotica virgifera
  SmartBlast Evalue=5E-15; Info=E3 ubiquitin-protein ligase UBR3 n=1 Tax=Harpegnathos saltator RepID=E2B3J0_9HYME
gataggaaaagttatggaagatatgtcgaacagcacccaattgaaggctaggtttaaatttaaaaacgagaaacctataattcataatcttcagagtttgcttctatttgttacctcgatagcgcgaacgaatctagaagtagaactgattcagagaggaggatcgctcgttcagttttcaagcgggtccacccttctacccaaaagagattgtatagttcctctacttcacgtattagctgtccacgcgagagtcgcacgagtgttggccatgtggccagcatggatgagtttccaacaattgtgtggaatgcaagccaaagttccagtcacttctttagcacgtgttgaaagagaagtgccccttttacttagagatcccatagctttattgttgcagtatattttactgctgcctatgcctttggatcaaatgtactttaccacgactgtacagatggtt

SEQ ID NO: 14200 - DNA, 467 bp, Diabrotica virgifera
  SmartBlast Evalue=2E-24; Info=E3 ubiquitin-protein ligase TRIM33 n=1 Tax=Camponotus floridanus RepID=E2AEJ8_9HYME
ccttatccagtggtagtgatatggctcttttgtacagcaagaagcagatgacggaacacttaaagaggataaaatgtaaaagagcggatatacctaatccggaaataccagttaggatacatttagctttagataaagttccggatttgataaaagttatgtcaacgattggtcaaatcgtcgtggacggacgcgtctatccatctcagtcatcatctccagctgcggcgacgatacccccacagagctccccaagtccaggtcaagttcggccacctcaacagccgtcccctataagccctttacaccagttgccctcaccatcaggatttcaaaataatacgagaatgccgggacctcctccatactctcagtatcagagcacttcaccttatccacagcagatgactacacaaaccatgagccagaaccacaatcagaacttaaaccagaatatagcacaaggc

SEQ ID NO: 14201 - DNA, 454 bp, Diabrotica virgifera
gggcgttttggtacaatttaaaaaaaattaatttttatacatttttggcttcatattaaattacgtatttttcggctcatattacccgtatgcgcgccaatggtgaatattaaattcttaactgtagttaaaaaatgtgcaataactacctcttaaaacccaccaaatttcatttgcatatctcaactggttttaaagcaataaataaatcgtcagtttgtcagaaaaacttcaacaccccctatctcggaaacgatgcatttgtggacatacgtttttctcgtaaagcaaactgactttattttgtcatgcacaattactccttaaaggttggcatttaaaaacacactttgtctatgaaaaacatggctagtttttaaagtccttaacttttttattatccaacataaacgaattaatgaaaaaactgaatgttgagaaggaatgaggctat

SEQ ID NO: 14202 - DNA, 456 bp, Diabrotica virgifera
gcatcgattaaactattttcagtggttactaaattttctttggatagataatcttcagctatcaaatttccttgtaaaacatcgtggactttctttcgattcttcatgatataggatgccaaaattacgtatgcagaacaaagttggtcttcgctaagtctaaaaatcttcttagttttttgatcttgagtgccgagtctgctaatcaactgtccaaatgtatcattaatcggtttaattttcaacaaattcatgcagttttcttccaatactttgtacaatcctctaaacgatcgtttgttccatcggcgctgaattgaccttgaagttttatatttactttctggagaaaccctgtgcaaaatatcccgaataagagtaagaggtacaatttgccttctgtaaaccttgtcactgtttaaaaaagaatatctataaccttggccaaatacaaaa

SEQ ID NO: 14203 - DNA, 462 bp, Diabrotica virgifera
gaataatagatacatttacaaattaaactgaaacatatgaacaataattcttgtgaaataccattacagtaacatttgagatgtataaataggggagtgcaattatatattagaacgaaaacatgcattgtttcggaaaaatttaaacaagcaattttaagaaaaaaattattcttaataaaatactctggatagtcaaaaatctaaaactgaaccatcagatatcaaattttatcaattttatacgagttatgtcaaaaatgtgaatttcgttaaagaataactttatattccagaatatcaaaaactgctacatattatgaaaagttttttctaattagaaactatgtctaaatatacaattacatcattctaaataaaaaaaaaaaattcaatttttttctcaaattacggatactcatcatcattttgttacaattatgataactattttattatcac

SEQ ID NO: 14204 - DNA, 467 bp, Diabrotica virgifera
ttctgtccttcggttccatgccaagttctatcaatcctgcagctagattgtcggcatcatttacggctttttcgtaagtcacatgtagtctttgttctttggaaattatgtaggtgttatatttaaacctgttaagactattatctattagttgaataagagttgagttgctaagaggaatatcggagtgtcttcgtagaaggctaaggccaggttccataatggctgtcgacgtgcttcgtataaaggttatagctgttaatagacacttaacctcaaaggttgaccgaatacagatcaaaattttgtccaactgaaggcagtttggtttgcgatatagaaaaacctaaaccaatttaaataaaaagccgcttttaccttacctctattagtgataagaaatcaacgattatacgtaccgactacaagccaggacaaaaacgtcgaactctaatcattaatgtgac

SEQ ID NO: 14205 - DNA, 464 bp, Diabrotica virgifera
tgatgatgattatgatgaaaggataaaaaatagatgattgcatataagtttggttgtatataatatattctgtcaataaaaaccgaatatacggtggcaataaactattttatagacatttttgtgttattatataaatatgttatgtgatgcggtgaaattggccgttactgataggtttcgttgcattggcataggaacactactgtgtggaacttcttcttagaattaaactgatatacttcgacaagattctttaagcaataatatacaatcagacaatgttagtcgtgtatgttaattagaatactgttttaaaaggctcaaaatagtttataaaacggttgtcttatgctaattgtacatattggacagttgtcttttctacaacttccacgtttttttacttgttacacaaaatgttactagactgttcaataattttgctgttcgataataaaaac

SEQ ID NO: 14206 - DNA, 468 bp, Diabrotica virgifera
  SmartBlast Evalue=3E-44; Info=Nuclear prelamin A recognition factor-like protein n=1 Tax=Camponotus floridanus RepID=E1ZWU7_ 9HYME
gagttttttctgcgtaacacacccaacctggacaactagatgccaacattggcaaaatatttttaacaccatcgctatgagttgctcgatatcttcttataaattccttttgcgcttctaaaatggctaaatcatcagcaatagtcatatctactaccatatctgcccctagttgtttaaaatactgacaaagttttgcagcacattcatctggtttaagattgtagcgtaccgctaaagacaatacaggctgtatggataaacttacaatgactatttggatttcagtgaccacagcatcgccatttataattttcaactttttatttgcttccagaacatcccgtaactctgcctcactttgttttgatattaagacactttcagccgaagttatacagccagaacatgctaaacagtcagccaaagttatctcaactttttctagcttttgggcactcccatcct

SEQ ID NO: 14207 - DNA, 466 bp, Diabrotica virgifera
  SmartBlast Evalue=2E-24; Info=Solute carrier family 2 n=1 Tax= Culex quinquefasciatus RepID=B0X5T8_CULQU
tagccgttctagcaggaactttaactgcgatcagcgatggaatgcaatatggatggacagcacctgtactaccaattcttcaaggacccgattctccagtaaaaattacaaactcacaagcagaatggctagaaaacttactaatgcttggatctttttccggactttggataaccatatatttagttgacagaatcggcagaaagaaatccattcttttagcttcatttgtgaccataattatttggatagtaacggctgtagctccaagagtagaatacatatttgttactagagcatttgcagggtcagcaggaaatatggctttcgtagctacgcctatgtatattgctgaaatcgctgaacagaaaataaggggttttttaagcagtttaatttatcttatgatgcttgtcggtattcttataatttattctgtagcaccttttgttccttttacgctcat

SEQ ID NO: 14208 - DNA, 463 bp, Diabrotica virgifera
  SmartBlast Evalue=3E-55; Info=4-aminobutyrate aminotransferase n=1 Tax=Aedes aegypti RepID=Q16LL9_AEDAE
aaggttcccttgccccttagagaatgcagcatgtctggaaattctttttgtaattgtcccaatccttctaacattcgctttcctgatctattgacttggtccagtaagttttgggttttaatcacttcgagaatggcttctagaagaattgttttacctggatctcccatccaagtgttaaaaatcctagaggggtgcttcacggtaatttcgtctgaatggaagaacccggccatctgcattttcttactgaaagtaacgatatctggagggtttggcaaattaaaatgttcgtgacaccaaaactttccagtaggtccacatcctgtttgaacctcatcgatgatgagtgctacgccattctttttgcagtattttttgcaacttctggaaaattctggtgaagcatgattatcaccgccttctgattgaatcggttcaataattagaccagctacaggac

SEQ ID NO: 14209 - DNA, 466 bp, Diabrotica virgifera
  SmartBlast Evalue=3E-67; Info="Serine/threonine-protein kinase ULK2, putative n=1 Tax=Pediculus humanus corporis RepID=E0VIV8_ PEDHC"
gaagataccatacgtctatttttggtccaactggctggtgcaatgaaggcgctgtacgccaagggaatagttcatagagacctgaaacctcagaatattctcttatcacatagtggtgccaagacgcatcctcaaccttcagaaattaaacttaaaatagctgattttggtttcgcaagatttctacaagacggagtcatggctgcgaccctctgcggtagtcctatgtacatggctccagaagttataatgtctttacagtacgatgccaaggcagatctttggagtctgggaaccatagtatttcagtgtttgactggtaaagccccttttcaggctaccactccacaagcactgaagcaattttacgagaaaaatgctaacttacaaccaaagatcccagttgggactagtcaggagttaagtgaattacttatgggactgttaaaaaggaatgctagggaac

SEQ ID NO: 14210 - DNA, 466 bp, Diabrotica virgifera
  SmartBlast Evalue=2E-54; Info=Mystery 45A n=1 Tax=Culex quinquefasciatus RepID=B0W2V0_CULQU
gagatgccgtctcttatcatgaagaatttatgcagcaacttaaacattttcacaacactttggaagtcttcaagttagcgcctaatcaaaacaacaaaactctagatgaattggtgatgttcctagcacaagtggcccagtgctatacaaaggagttagagaagttccctcaattattaattgatcttttgcaaagccataatactgctttggataacaataccagaatgactttatgcagggctttgattttactgagaaataaaaaattgctagcacccactgatttactagaactgttttttcagctgttgaggtgccaggacaagtctctgagatcgtttttggaaaaccatataatcacagatatcaaaaatattaacagcaaacacaaaaatgcgaaattaaacacaacattgcaaaattttatgttcacaatgttaaaagatactaatactagagcggc

SEQ ID NO: 14211 - DNA, 467 bp, Diabrotica virgifera
aattgacgcgtattgtaaagtcgataatatttatttccggttttgatgtcatttccggtgaaaagattacgataggaagtttggcaaaaatgactcgaaattagtgaaatcgtatatcaatcgacgcaaagttgcatggcgagttcaaatatcgacttccggttctacttcctgtcacgttgtgtgatagcctaggacttacgaagtccaattgcttgtttcattatgatttatcgtaaaattttttcttatgaatgaactatgttcttttaccaaatcggaagttcgagttggtcgtttgtaacatatctaatatattaaagaagcatgttgtaggtttagttgaaatggttgatatagtgattattttcttaaccaggatatttcaataatgaggcattttcatggtattaatagttccaaaggaggtcatcccttccataaattttccataagcagtccaacaa

SEQ ID NO: 14212 - DNA, 454 bp, Diabrotica virgifera
tggttacccattatgactgcaaacctataaaagattccatatcaaatgatgaagattcagataattcatatgccattcaagaagatggcgaatctccatcgtgtactagccagatattagttgtaaataatttaagaacaaatttgatagtggtaacatttttcaaaaaccattatggccacacgaaagatatgggtcacttggaaaagccagtcagttatgtatgcaggaagtcgttgagttgtgtttctaaaaacttacttaaaacacctgcacaattgcctgttagggttacaaatgctgatgaacttgtagaaacagacagaaggaacaacagtttcagtgaatttaatccaggcacaaaaaagagaaaaaaacgaatgttcaaagtaaagatatgaaaaaaattaaagaaatccaaaaacaatacatagaggataattcacaagacagt

SEQ ID NO: 14213 - DNA, 461 bp, Diabrotica virgifera
  SmartBlast Evalue=2E-19; Info=Putative DNA-mediated transposase n=1 Tax=Helicoverpa zea RepID=A4KAD9_HELZE
tttaaaacttcctcaatgtagacagcaccagtgactcttctctccagaaccagcagtggcgtccgtgtaccagtcataataccacgccaaaccataatactgccaccttcaaatgggacacgcggttgggctgtttctagtcgggcttgtcgtcctggggccctccaaaccagtgttcttcgcgaatcagataccaaaccaatttttgactcattaaagaacatcacgttattccagttaggaccatgatgcaccatttctctagcccattgcaaccttactattttgtgttggtaggttagtttaggaacatgtaagggtcttctacgatacaaatttcccgcatttagtcggcgtgttattatttgccttggaatatgcagtccttgaagcctagaaacttgtctgaatataccacttgtagattccaaacgatttcttcgagctagcaatgttatctg

SEQ ID NO: 14214 - DNA, 467 bp, Diabrotica virgifera
  SmartBlast Evalue=5E-21; Info="CG8379, isoform B n=11 Tax= Drosophila RepID=Q7KSU3_DROME"
tgtgtcttagaaactaaattctcaaaccccataaggaactcaatagcatcgatttgagcttcctgtccttttttaaaaatagaatgtaaaagggtacacaaagttagcagcccataagctactcttatattctgttggtccaaaatctctatacattgattaaataaaaggtttatattctgtttagctagttgaagttgttcaggagagagtttctgaagctcgttctctaaggttgctacttttggtttgagtagaaaaaattcttcccagaatagactgttttggtgagacacatcttcgccctttaataggcattcgtatatttgtacaactttttctttaaattgcctttttgagccggaaccacttcgttttctggtagacattgctataattattttgtttaaatcttaaatataaattaaattaaacttattcattttaaatacggcactgataaaact

SEQ ID NO: 14215 - DNA, 466 bp, Diabrotica virgifera
  SmartBlast Evalue=1E-26; Info=NADP-dependent leukotriene B4 12- hydroxydehydrogenase n=1 Tax=Culex quinquefasciatus RepID= B0W9J1_CULQU
gaggaaaatctgcgtcctatcgaagatggggagtttcttgtaaaagccatgtatttaagcgttgacccatgtacagcagggcctcatatagacaaaaacaataacaccacaagacaaacgcaaatcgccaggattattcaaagtaagaatgaagactttccagaaggtaaattggtcgttataagaagcagctggaggacttattctatcgtagacggtactgtggatcccgcaataccagagccatatttgctaccaaatatgggagggttatgcccttctgttgctttagggatgctaggagtacctggaaacatcgcttactttacatttttggaattgtgcgaccctaaaaaaggcgaaacagttgttgtgtcaggagctgctagtttggttggcagtattgtatgccaaatagctaaaatcaaagaatgtactgtaattggaatagtagaaactgacgacg

SEQ ID NO: 14216 - DNA, 456 bp, Diabrotica virgifera
tccagctttcgcaaaaaaaattcattttttcaaaatgttgcaggactgaaaataaagcagatagcaagttgaaattttttttgcttatagaatgtactatacctttcatttgcaattatcaaattaaatcgattaattaccacggcgtcagaaaatttttgaaatacacaataatttttggtgctatgcgcaggacagcggtgttcgattcacacaggttgatttccaccaaaatttgttccaatatttatctaatatattattttcttactctatattttgttgtattttaattttttaattccacaaaaatcaaactaatttcattattgtttgtgaaatattgtttaaacaattgcatatgtttaaaaataataaactttattattaaattaaaatatatgaacaaagaaagtttttgctaataaaagtgttatttcaaaggatagagtatgt

SEQ ID NO: 14217 - DNA, 466 bp, Diabrotica virgifera
  misc_feature (352)..(354): n is a, c, g, or t
gtttatgagtaaaatgtttcatctcagaaactttattttggttggtgttgtgttatggtgtattggtgtaatggggcaagaacaagaacaatatgagaagtgtaccacaatagatggttttgatggcatatgtattagtgcacgtcaatgtcgtcttgcaggaaaagatgaacgtcttgattttacgtaccacttaacaggtgagctacgtgtatgtaaccaaaagaaagattctttccaagacattatttgttgtttagatgaccctatatatcttccacacgtaatttctgaaccactagaaaaggacaatgaaaataacagaactagaccacgtcctggggacatagcnnntaaaatgtgcaaggtatacagtaggtatactcacgaaagggatccctttatgactgcttttggagaatatcgtgagcatttcgactgcgaaatatacaataatgagcttctt

SEQ ID NO: 14218 - DNA, 464 bp, Diabrotica virgifera
ttcatcacattctggaagctgtgactcctcagtaaacgtttctatgttctttttatgtgctaatgtacaacttgaaatactgtttgatgattttataatatcttcaacctcttctctacgtcttctttttgtgattcttagtgttctttcctcggattttcgctttaggtcagtatttgatgagcctccaggtaagtttagagtaggtactgaaccttgtagagattcatcagcctttaaatgacgagcattctttggagagtaattcaaaggcctttgtttcagaggaatttcataatgtttttcttcaaaatgtagtgagcaaatcgttactgaaaaaagttaaagttacttataggtaggtacataaaatatattattatagatataaatattatttaatacagtctcttttttatatcttcttattactttttttgatattatatcaatttcttataaat

SEQ ID NO: 14219 - DNA, 460 bp, Diabrotica virgifera
acggattctataaatttattttggtagatagtacctacttgtttgctaatgaaaataggtcgtgttcgattcccggcgtcggaaatcatttctgtttttaaaattgacattttgatttgaaaagtaattgtttttataatacttttttatactgtgtcgtataaataataaaaacgtgggattataataagttcatttttataaaatgtgtaattatttttattgttaattttcctggtcttttttcattttatgccccggttttgggccagctgacagatcattttttgttaataagctttggaacaactgactatacagtgaggacgtttgagtttgcataaattcaatatctcgagaatgggcaaattgaagagaaatcctcagacaggtcgactttcattctcaaattaggaccccttgcatatgcataatactagtgacgtcatccatctgggcg

SEQ ID NO: 14220 - DNA, 461 bp, Diabrotica virgifera
acctttgctcatggagttttcggaacctagattgcatggaaactttaaacaaggtttatcaagcaatatcaccaaaacgtccagaaaatcttatcattcttctgcatgacaatgctttgctttatgtcgcagaaaaagtgcaaaaatctacaacgaaagaaatagaggatattagaatatccacgctatatagtccaatcaacagccattttctcgtggaattttgagaaccaaggtcgatttccttgaaaatttggatttaggtagtaaatataatattcatagagtgaccaattatgagtaaattttgttctataattttttttgcaaaattgatactttccaagttatttgcgattgaatctatgcatttttcattgaaaaactcacgttttataaccgcctttcatgaataactcaaaaacattcaattctatagaaaaaatcattaaagacaaaac

SEQ ID NO: 14221 - DNA, 466 bp, Diabrotica virgifera
  SmartBlast Evalue=4E-37; Info=Neuroglian n=2 Tax=Tribolium castaneum RepID=D7EJQ9_TRICA
caacaacagtcgttggagcacttatcttgaatgaatcaagtttttctctacgtaagaagacagagttagaagtagcaataccatattcatttttagcaaaacattggtattgaccactatcttcatttactggtttaactatgcctaatgtacctcggccaggttgcattaatattctgtcatcataagtttgatagtaaaatggtttgccatttttgagccatgaatatcttggtgcgggaaatccctccgcttcacaatttaaaacaattggccggtgctcgtcctcatgttcaggtacttcaaaaagtaactcatcgtttggcggtcctttaacaatcagtggaggtgatactcgctcactgagtgcacaacccaaatacaatgacaatatgacaaaataactatttgccatattgttaaagttatgttaagaccttcttataacttattgtcacaaaccaat

SEQ ID NO: 14222 - DNA, 464 bp, Diabrotica virgifera
tgagtaggttaaccagcactgaaaatccggcccttggtcgactaatatccttcagttttttgaactaactggttcttatagggtctttgatgtaaatattccttcaaaattaaccggaattcggtttttttaatattgagttattaatgattaattttggttaaagggaggctttaccagaccatgttttaactctcacagttgaaccagtattctcaaacattagactccacattttcatacttatcggcacttagtgcattgtgagaagatatttcgcccgatgcaaacgctccatagcgcgaactatggagtcaccatttttcaatttgaactacgtagttcagtagtacccggtattctccatatccagtgactccgtaccgtgtaacaacgtaaataaaaaccagaacactattactcttttttgaaaactaaaactatcgtttttacgctaaaacttt

SEQ ID NO: 14223 - DNA, 465 bp, Diabrotica virgifera
  SmartBlast Evalue=1E-17; Info=Papillote protein n=1 Tax=Culex quinquefasciatus RepID=B0X3Z1_CULQU
actcatggtagctctctctggttttggggtgagagtcaagcctgaagctgaagatatgtcagagaagttttcccattctgggggctctgccatatcaaccgggtagtttctgatggtaacgttccatttctggtcatccactggtttggctctggtgtggtactcggtaaccaaccgccgatggcgttctatgtcctctattgtcttcttttcggtaatggtctttaagaaaacatcgtcaaccatgtgagaggttatctctggtttgtgtactatagctattggtggttcgaaggtatctggtacgtcctctgtcagtcgttctcgttttggtattattggaggaggtggtggaggagtcggagcaacgtatcgttcctcttgcatctccatttgccttcgaaggattttgttataagtgggggcgggttgaatgtgttttggtgggggatgaagctctggtac

SEQ ID NO: 14224 - DNA, 464 bp, Diabrotica virgifera
  SmartBlast Evalue=8E-11; Info=Tudor n=1 Tax=Tribolium castaneum RepID=D6WEA3_TRICA
attcgtcttttggttcttcggtgggattattttcggcgccgtcgttccaactctcgctggtctgattgtcattccaattggcatcgttactgttactgttatagtcgttactgttcccggtatcgtttcgtttgtatttgtccagtcgactatttacactgtaatccttgttattttgacgccaagacctatcgttatcgttcgtatttttttcgaaatttcgattatctctattatctcgactatcttgtctccaagacttttcgttcctgtctccaggtttttcccaaggtttttgttcacgtccggtgtttgggcttctgtcccccttgaaattctgttccctttgttgtgtatatgattttctatgttctagtttgttgcctgcttgtaccaatacgggactgacctgtgaactagcttcagataatttgaccagcaacaaggaagaaacgttgtattca

SEQ ID NO: 14225 - DNA, 464 bp, Diabrotica virgifera
ttgtaattatttgtagttatgtttgtcgataaattttttctggatcaaagatacgttttaattgaacaatcctagtatattggcactcataaattaaacagatccttttgtaattgaacaaaaaaataaaaaaagtccattaagtgtcaaggtaaattctaataaaattacttgttcagttagaaatcttacgaagagatagttaacaacatatgctacggactttgaaataaaagaaactattttaacacttaaaaatccctattacagcttatattttcgaaaaccatacgctaattttcataaactaatttataaactacatttaaagttcaaatatacccgcaatcttttaacaaattcttactgttcttcgtttttgctgatttccaatccggcaatttacatatacatatatcgtaccgcggtttttcaaatgcttataaatacatgactagatagaa

SEQ ID NO: 14226 - DNA, 465 bp, Diabrotica virgifera
  SmartBlast Evalue=1E-38; Info=Pka-C1 n=4 Tax=melanogaster group RepID=B4NY66_DROYA
tggcttgtaaaattctcttctcgttcaaggtatgctccacttgcttcaatttgacaactttttgtttatctaatattttcattgcataatattctttagttggtttgtgctgcactatcatgacccggccgaatgaacccgtgccaagggtcttaattcgttcgaaatcatctagacttgcagtatttgtgggatttctcttccatttctcctcaaagtcttccttcgcttggtctaggaactccttaacgctctccgcggaatctacttttttattcgccgtagcggcattgttgcccatggtttgaacttttaagccttccagggctccgactttaatagtacactccgcctaaagcaccaagtttagcggaggacacgaatgtcactaattctacgatgtcaacacaccttattcaagctcattttgctaagttctgttaaacctttaacaaatacagtctt

SEQ ID NO: 14227 - DNA, 461 bp, Diabrotica virgifera
cgcgggactaaaaaatacatctagtttcaaaataaaagaaaattaggtctctaagtgctttggttacggagatacgtgacataaggttaacattgtcgttaaatgggatttcgggtgcccttaagaagatttaaaattacagggctgccacactgtaacacaattactaaagacaaccataaatatgttttaagacgagtaactcacgacaaattagaatagttttatactaattatggataatataaaacaatgaaaccaactaatattaaaaaaaaagctgtgatattttttggctatacattagagaaaatgattcggaaacgatccttataatttcatcacaccttttaaccccatatgtcatttcaaaagtagatacattcttcacaagtgtcattatcggggtgaacatgaacacgagtgattggaagactgcaaaagttctttccaaagcggac

SEQ ID NO: 14228 - DNA, 465 bp, Diabrotica virgifera
tcttggtacatattcatatgacaggtttttcgttttttggaatcaaattttgtaattgacaaaatgtattatttttctacagtactaaaagcttcatcagtgaacccttttgagcatgtatttattccgtaacgaattgtatatgttagagaacctttgaataaggttgatatagtaaacttcttaatgtggcactaaaacaaacacgctctgctctacaggtcatatcctaatatgtgaaaaatcaatttgaccttttctttgctcacttgagaatatcaatccccactcactgacagtttgcatatgatgggtacaggcgaagaaggtgctgtcaattttttcagaaaatgagtttttggtgccctctgttagtcagcgatctagactaccattctataaaccgatcaccgctaggaacgtgttcagtcaggaataacagcatatttaattctctagtcaggc

SEQ ID NO: 14229 - DNA, 462 bp, Diabrotica virgifera
tcatgcagtgcattagtgtcaccaataagtgatgtattttttctcttgtccctgatcttttgttctttctttagtacattgcctaaatcaatttttttcatcagtaactttcgttttaaattcactttttcttttttctttataatcctgttaattggattatgggacttaatggatttatatgaaagaacactttttacatcatctgccacaactgattttccttgttttatactaaaatcaaagttggctgaaatggattcctttattggagcactattatttttggattcaaacgcacctagcgctttcgcttttggtttctttacttttcccatgataaatagtaactgattactctctaccaacacttaacacaacaggcatccccaaatctgtgccaaattttcaaattttccctcaaataaatcctatgaattataaataaataataaatcaaaa

SEQ ID NO: 14230 - DNA, 466 bp, Diabrotica virgifera
  SmartBlast Evalue=1E-23; Info=CG5446 n=18 Tax=Drosophila RepID= Q9VK90_DROME
agcgacatttttcgatcaaacaaaaatatactaataatacatgatttatattttgaaagacgaatattaatcgcaaattaatttatttattttattcagtctgaacatggtagacgataaagttgaaatgaataacgacagtgaaagttactcaagtttaaatacaaatgatcccaaaaatgttcaagagttaacccaatatgtacaaagcttactgcaaactatccaagataaattccaaaacatgtccgatcaaatactcacaagaatcgatgaaatggggaaccgaatagatgatttagaaaagaatataggagacctaatgactcaggctggtgtggaaggaacagacaagtagatttccgttatttgtgaacatttttacacctaatgtagatcagttaagtttatttatattatggatattagttttacctactattaataacaaaaatatcactaaatt

SEQ ID NO: 14231 - DNA, 466 bp, Diabrotica virgifera
  SmartBlast Evalue=0.000000004; Info=CG7630 n=5 Tax=melanogaster subgroup RepID=Q9VVG5_DROME
cgccattgcgccttcaccacacatacttgattcgaagttgggtggtcagtaagttacataacgtaaaaaattgcaaaattgctacaaaaatgcaactaagaaggttgttaaccagcccagtaatcagaggatgtacccgaagaaacgctcaccatggtgatcatgccgttcaatccagctacaatgatctgcctcagcctcaaggtagttggaagaccaacttcgatgctaaccaacgcaaatacaatgcccatttagcccttggagtcggagtcttaacaggtactattgtttttggaaaagctactggtttattggagttctacaacgaattccctgaacgcccagccgacattgcatcctacaagtaaactagtttattaagtggtaatagtaacaagtgtatagttaaaaatgcttagtattgtatgttattttttatttaataaaaattaagttactaagt

SEQ ID NO: 14232 - DNA, 466 bp, Diabrotica virgifera
agtttgtctatagttcgacatattttttaaaattaatacaatgtctaaaacgattgttactgtaattttcatgtgctgcattgtagcagagatacaatgcaaaacctttatagagtgtctagatactgataataaaggagtcctgacctttgacgaacaaatatcatcaagttctcatgggattatcagtgaacaaattccagtaggaatgtttaaatcacaaattacgtgtatagtgatatacttcgataataatatcacaccggtgttaactcaaggaggagttggagctaggtatgtaggacttcgtcttgatttttcttcgttactacaatccacctatagagttcaaatttatacttcagaaccagaaaattacatttcaaaataatctaataaggaattgtcatatttcatgtactgttttaaaatctatcattttgaaattaataaactctgaaatgtt

SEQ ID NO: 14233 - DNA, 464 bp, Diabrotica virgifera
  SmartBlast Evalue=2E-62; Info=Domino n=1 Tax=Tribolium castaneum RepID=D6X265_TRICA
actgatcgagatggcgctgaactaggaggctgttctgcggtcttattcattccttcggcaagcaactgcgaatacttctcagtctgatccacgataaaactaagctgctgatcgagcgcctttttccgcttctcctccaagattgtattctgtttatactcgaccagtttttcgacgttgttccaaaagatcttaatctcctttgcacagaacgcggctatccttctaagattttgttcgtgagccttttccgctttttgggcggcgagcgccttgtcttggaaatacttctgtaccattctggcacattttttcgcggcggctttcttccatttgcgttcctgcgcaaaatcagctgctaaccagaccatttcttcgatcaaaaagtcccaatgcgctttaggccgaggcatctcttgcactttgggaagtctcctttcagaccatattccttccttctgtaa

SEQ ID NO: 14234 - DNA, 463 bp, Diabrotica virgifera
  SmartBlast Evalue=3E-25; Info="Apoptosis stimulating of P53, putative n=1 Tax=Pediculus humanus corporis RepID=E0VIP7_PEDHC"
gacggggatatggttatacggctcgacagcagcaatattgcctctcgataagcctttccgatcattgttttgctggtgtttcctcgcaaaagccgcttggttggtctgatcttgatttccagttaaccttactaactggtggtacgccgccttgtgtgacgtagcgcttatctgattggctaattgctgatttagcatccgtttccggtgcagtcgctcttgaagctctgatattcgtttgtcgattgcactcatctcctcctgtctcgccgttaaagcctcccgttgttggtgtagcctttgattttgttgctcgtttaatttgtttcgatacatgagctcccttcggagtttatccaattctaaggcagaaggtggtggcgagtttttgttcgaccgtcctctccttaattcctccaactgtctagttaactcctccacttggccacagccagagatagct

SEQ ID NO: 14235 - DNA, 466 bp, Diabrotica virgifera
aactataccaacaaccacacttgacttcatatttgtaaacatatagcttaaaatggtttccaaagcttcttttgtctgcgtattgatgttgttggttgttgtagccaatgcgtatgatgcaacaaattgtccttcaaatacaggtcgccaaaaaaatcttgtgtacgacagtcttttaacaggagtgtctatcaatgttcgtattccacaggcaggatattttaatagacccataacctgccttcaactaattgatcgacagggaacctctgtttctccaaatatagtggaaggcggatatctcgatacatacatggtagtcaatattacatcattaaatggccaagtactttactactatgcacaaatatatattgattaatttaatttttttaattgaataatatttatgtcaaacttagttttaacaaaataaaagcatatcctttaggataactaaaagtta

SEQ ID NO: 14236 - DNA, 466 bp, Diabrotica virgifera
ctgcaattgcttcaccacagctcctgcagaggtattgatcacctcaatttctccggtactgatagagcaatccctcctgttcaaaatatcaagaagctcatttaaacagttctctattgagataagtttatctaagctaggcgacgaggatctcttcttgttgctctttaacatatatatgctgtttaaacattcgtttactttgagttttgcagtcgagagtaaaaaatctatatctaaatttttgctttcgcttactgcatcttttggtttggtcagatccgatatacttccctgtggcgtatttaaagactcgtttgaagcgtctacattggtgactttggattccaatgagcttaaacgcataagtagtttcattggttctgaagaggtagcactatctaagctctttcttcttaatcgtcttagagatttgtcgtctatcggtgaacttcgatcgttgctt

SEQ ID NO: 14237 - DNA, 454 bp, Diabrotica virgifera
  SmartBlast Evalue=5E-10; Info=Endonuclease-reverse transcriptase n=1 Tax=Bombyx mori RepID=D7F161_BOMMO
tattagtttagaaacatttggagtcaccaactaaaattagacaacaaaaaaaaattttgctcgaaaattagacatatttcttcgaggatatacataatatgattttatactccagaaagttttaattttattttgtttatgtttattatatacaatcatgttacgaacattggctaaaagtgtattttatcattagtaaataccgatgtaaatgtcatctgccaaacgtgggttgtttatttgtcgtccatctattaagatgccataataatatatcttaaataattatggacacagtatacatccttgtctgacaccttgttctggatgtaattcgtttgagagtatatcaagcacagctatatgcgtaattacgtgttgtggcatttgaccctgtcgaacgctttgcgataatctataaaacaaatgtacagtggtatattgaattcccaga

SEQ ID NO: 14238 - DNA, 462 bp, Diabrotica virgifera
gctttaaatatatgatactctatatacctataaaaatggtccataaaaatgtaacacttgatttgtataagaagctctaaaaggataatttagatttatatatgtttaagttatttcacagctaatactttgcttcaccagtcgaatttatttaagaagcagtctcaatctagataaaaattactcagttgatgcttatcatcattacaatactaatagtctaagatacgaatctaggccaaccttcacctaactgatgaaaacaatttttttttattaaatttcatacatagacacataagtgctgcattgtttgcctatcaaaatatgttcatagctatctttaaggtatatgttgaggagtcttgagaaaaacgcgtttaaaattttcaatttcgttttgatccgtcaaatcccaaagtgatgcacaccggaatgtgtttttgaatctcgcagtaattt

SEQ ID NO: 14239 - DNA, 465 bp, Diabrotica virgifera
tacagacgcctattggaggaagccattctagatctagcagccatgcttctgcttcgagtcaacagtctgctgttaagttggaaagttctgtcaaattggatagctctgtcaaattggacagctctgtcaaattggatagttctgtcaaagtagatagttctgtcaaattagataatcctgtcaaattagatacttctgttaatgtcaaaccggacatcgtaaaatctgatggagttgttaaattggatagtgacttttctaagttaaatttggaaaatagcttgaataaagtcaatagtcaaaataaggaagttgtagaaattaaagagaataatatttaattaggtagtagatttagaactttttgataaaagttgttcgtgaattagtttgttagaaacagttaagcatattttattttatcagtattacgcaagcaaaaagtgatttctgttttgggttgac

SEQ ID NO: 14240 - DNA, 460 bp, Diabrotica virgifera
  SmartBlast Evalue=1E-39; Info=Probable prefoldin subunit 4 n=2 Tax=Formicidae RepID=E2BHI5_9HYME
tttcaattttctcttttctggcatttttaaaatatattatcaatttcacaatgactaacacaagcagcaaaggcaactttcaaccagattcagatgttcatattacctacgaagaccagcagaaaattaacagattcgctagattaaacgctaaattagaagacctcaaagatgaaataaagcgcaaagaaaatgacctaaagagtattgaagacgcatgtgacgaaattgctctttttgacgatgacgagcacatcccttatttggtaggcgaagcatttatataccaaaatgtagaaaaaacccaaaagtgcttagaagacaccaaaaataaaatcgaggaagggattaaagaactgaaagtgaaatctaatgaagtcaaagatacaatgagtgacctgaagtctcatttgtatggaaaattcggaagccacattaatcttgaagcagatgaagaata

SEQ ID NO: 14241 - DNA, 466 bp, Diabrotica virgifera
  SmartBlast Evalue=2E-13; Info=Odorant binding protein (Subfamily minus-C) C01 n=1 Tax=Tribolium castaneum RepID= D6WS42_TRICA
cgtcatcatgaagtgcataattgttgctaccgttttgtgcgtcttagctgccgcctacgcagctcctactaaagagcaaatagaagctatcaaaaaagctcatgaacattgtcaaagccaagaaacaactagaattgacgacgaagtatgggaaaaacttaaacatggcgaaaaagcagaaaacacaaaactgccaaaacataccctatgtatgaacgtacaaactggacttcaaaaggagaatggcgatataaacgtggataaacttagaaaagctgtagaagaagcttctagtgaccaaaacgttataaacgaaatcgtagaacaatgtggtacaaaaaaaggcgacaatgctgaggaagctgcacttaatcttttcaaatgccttaattcccatggtcatggacaccatggacatgaacatggacatcattgaaaattaactatacataaataaagaaagggc

SEQ ID NO: 14242 - DNA, 466 bp, Diabrotica virgifera
  SmartBlast Evalue=2E-30; Info=CG1578 n=3 Tax=melanogaster subgroup RepID=Q8MRI4_DROME
gtcaagtcagagtaaatgtattctttctattatttttttatatagcttgaccttagcaaaatcatgttctgtgtgtatggtatgagataaattatagttgtaatacttacatttaagatattacttttatccgcattttatataaatagttataagtttttagacttttgctaagatgaaagtagtagcattagttagtggtggcaaggacagcacattcaatatgatgcagtgcatcgctgccggccaccaaatagttgccttagctaacttggtacctcatagtaaaaccgagatcgatagttatatgtatcaatctgtaggtcatgaagctattgatctaattgcagctgccatggatctacctctgtataaaagagataccatgggtatttcaaatgaacgtggaaaaacttacgaaccgtcggaaaatgatgaggttgaggatttgtatttgctacttgaa

SEQ ID NO: 14243 - DNA, 463 bp, Diabrotica virgifera
aaatttgtcaagggtatatagtggtattgttaagtatattacaatataacttattccatcgaaatcttccgaaatccataatcttcttccatcgaaataaaatagaaaatctaaaagtttagaaaatacatcattcataactacacccaagaaataagtttttctaacctgatttaagagtataaaaaaacgaaacaaacaatttacagcaaatccttatcgtatatccgagcaaaaccacctaattggcaaaagttataaatagaatttgtctgggttctacaactaaatttgcacttaaacacgaccaaggttaaatattttacttgatattataagtacgttgttgccagtataacggatgccaaagcgagcgctaactgtatgaaattattcttgttaatatacacgctgtatattgatcggaagtcacgaagagtcaaaactatacagaagccacgag

SEQ ID NO: 14244 - DNA, 463 bp, Diabrotica virgifera
  SmartBlast Evalue=2E-63; Info=Protein phosphatase 1D n=1 Tax= Camponotus floridanus RepID=E1ZX45_9HYME
ggggaaacaataaacctattgctctggtaattgtaagaccaaagatctcccaaacttctggctacagccaaaaaatggaatttcatcaatgggagtagaccttctcactggtccctgatggccaatttttggcctattccataccacacgtggtacaccagattttgaaaccacctttcctccacaacttttgatacgactcatctcatctaaattttctggtttgtgatccctagttaaaggcttcgccttccattccgaacatccaggttcctggtaccctaaaattattccagaatctcctacatgtcctatgtatatttttcctcttctaataaaagctatactagcagttgtaccagctgtactgggcaaacctgatgcagtccttggccatttttcttgttctcgccacatagcataatgggtcgctatatacccatcttttatggctctcaataca

SEQ ID NO: 14245 - DNA, 461 bp, Diabrotica virgifera
gggtaaaatagtacaaggtgatctaaaaacccttaaaattaaaaaacacaatcttagatattattttcttaaactctggggaaagagtaaaagcttaagtttgccatattccaaacattttcaaatttctctttgtactattagccaaattcatagtttttatttgattctgtacactgttaggtactcttgaaacttaacagaaataagaattctggatattactgtctctgagtgtcatacctcttataaatcttaggattttcatctctgttgttctcatatttgtttgatctttgttgtctcggtccttgtctcagctgcgtatgtcagtacgggtatctcacatgtcgtataaaatgcggactttactttcggtgctcatatatttattcctgcagattatatcctcaggaaaccagataattctcgcttcctttcgttgcctgcttcagtctgta

SEQ ID NO: 14246 - DNA, 460 bp, Diabrotica virgifera
aacgaacactccactgtgcaacataagaagtacgaaagtaaatggcgctaataattattccaataaacaacaatgtaatttgcaattcactttcgttcttcttaccttgcacagtaaaatattcgttgccgaagcaatccaaaagaggcgtatgttcgtggaatagggtatagcaactaggtatctacctatgaatctagtagcgtggagattactgtataattaactagtttattaattacgtttgcaaaatgaagaacattatttgggcctttatgcaaaaagcaaccaacccacatttttgaggaaaacaagataatgtcacatatcgatttaaaaatgtgtattctatattgtgtaaaaagcaaccaagccattctaaatattaaaccatgaaaaatactactccaaattatttctgtttaataatagttcacttaagatttcgcataagacaacc

SEQ ID NO: 14247 - DNA, 465 bp, Diabrotica virgifera
taactgtacttttctggctgtttttgtctcctttttgaatagtagaattagttcgcttgttccccatcttccagtattttataattttgttaattaatgttgttaactcttctaccattgctgctatccaatatttcagcaattagtttggtatttcgtatttacctgcagcttctctgtttttcagcttttcgtgtgtttttctaacttcctgtgtgtacttatatgtattaacatctttatttatggtaatttctgttgtttccggttctaacgtcatttttttcttcctctgcatagagctttttttagataatcagtccacataatccttttctgtggaaaaggatacatggatataaaaaaatttgttgaaacataaaaatatattggctgacatgaaacataaaccacagacagtcatattcaacccaataaacccgctagttaggaaaattgagggaa

SEQ ID NO: 14248 - DNA, 461 bp, Diabrotica virgifera
acacaacattcatatatccgcgtcatacgttattggtatatatcaatgatacaaaccaaagacatatgacgcagatatattaacattatgtaacacatgacagaagctcgaaacaaatgacaatcgatgaaaagccctttagttcatgcagattgtgaacttattataaccaataacaatactaactacaatgtttacgtacctacagtcagaaaaatgaaagaatactcatgaacgatcacttattttgtatttgatgtctttttctataattaacaaacgtttgttacagaagaagacagcaaatacaaaagaagtgattgatgtgatcgtttataggtattccctcatttttcagactaactgatttaaataattactaatacaataagtcacaacctgttaacagattaaaatatggtatagtgcaaccttaatacaatgaaactgaaaaaaattcg

SEQ ID NO: 14249 - DNA, 465 bp, Diabrotica virgifera
  SmartBlast Evalue=1E-23; Info=Cytochrome P450 n=1 Tax= Leptinotarsa decemlineata RepID=Q3I417_LEPDE
ctttaaacgtttaactgcgaacaagcagaccatagccacatctccaaagtagtttacaatcaattggtttttgtttttgaaggaagtgatatattaaatgacatgaaataataccacctctcaggttagttgacatgatagaaatagttttgattgtgaccgccttggcggttctaatgtattatgtgggatacaaacctatgcagtattggaaggatcgaggaataaaacaagggaaaccagcctggttttttggcgataacctcggtatgacattaaaaacggaaagttttgctgatatggtagtcaaagtatataacgcagtaccaggagtacgatattctggagcataccaatttactgcaccaactctcgttataaaagatctagaattgatcaagcagaccggcgtcaaagactttgatcactttaccgaccacagaacagtcatatctgaagatgctg

SEQ ID NO: 14250 - DNA, 463 bp, Diabrotica virgifera
tggctaaggtcgaaaatgctaagcctgaagctgtcgaatctcttagcccaactgctacttccccagaagtggtagaagagccggtgaaagctccgccagtaaaaacttccgaaccgcccgaggttgacgacactcacgttcagatagtaacggtaccgtctttccgataccagagcccgcctaaaaagaccttcccgccagattttgtaaatatgtccttggcggatcagatcgattttaaaatgaaggaaattatggggaagttcgagtcgacgacgtatgtagatatattgagtgagtcgtcgagtgacgaaaaagttaccagttctcctgtaacgaaaacgctgcttgagaataatgtaaataaaacttctccatcattaacagctctggttaacaatcagactgaagaatcgcaatcgagtaatggacagaatgtaacggaagaatcagtgaatgcaga

SEQ ID NO: 14251 - DNA, 465 bp, Diabrotica virgifera
  SmartBlast Evalue=1E-10; Info="Serine protease inhibitor 4, serpin-4 n=1 Tax=Culex quinquefasciatus RepID=B0X5Z8_CULQU"
tcttggcgtcatattcagtgatcacgcggacttcactggcatgcttaagagtcctgaaccactaaaagttagcaaagtgattcacaaagcgttcatcgaggttaacgaggaaggcgctgaagcagcagcagctactggaatcatgatgggtttgggctgctgtatgccgatgccgcccgagtcttttactgcagatcatccatttttgatactgctgacaatcagtgatccgaatatcatactgtttaaaggacgtgtttccgcatctgctgtctaaatgtatcaatagattgttgaattaccccatttgtcatgtctttaagttccttccgcatctatatatcgtagtgagttttatccgttgtatgccgaggccgcctcagccacctgagtcttttactgccgatcatccattcttgatactggtgacaatcaatgatccaacaaaaatcatactgttcaaag

SEQ ID NO: 14252 - DNA, 461 bp, Diabrotica virgifera
acatggatagacagtagtagtaattttaggatttcgtttaatgtttcgtcaatgtcctattgttgttatgagaagtctatatgtttcgaattgatttaaaatggtttatagacatgtatattttaaattgtttgtatgttttttacaaagaactgtatttactaccattccagtttttaaaatgtttttattatattaaaaaataaattataggacttagtaatcgaggaaatcaacaataatgacattgtttaactgtatgtttaacgaaaacatattttaataattataaccatcatattatcagtctaaagcatgtttatctctttcagcttattcacttccttattaaatatccaaatttatgattttatttgtgctcattcattccatcagcagtgttgtatttcaccacggaagtgtgtaagatattctagtcatcctgctaatattgcccgacg

SEQ ID NO: 14253 - DNA, 463 bp, Diabrotica virgifera
aggttttcgtaaaattttgcgttcccttatcgggctatatgtaaggtcactgtttgaacaaactcatcgcgggtcaaagtccttgtagcgcgttccatttccaccaagcaaaaaaaaattacaaaattagttaaagctttaaataataaatctactaattttcacgacaaattagacactttttgactattaacaatttgacatttatcaaattattaatttctcatagcctactttaggcttgtttattgaactcagcagagaatggggatatattgataaaaatatggctagtttttaaagtacctaactttttattatgcaacataagcgaatgaatgaaaaaacaaaatgttaataaaacctgaggctatagttgggttttcatttcagtattttataaatgttataatattccacatggtattgcgaacttttctttgagtataacaacaatattatt

SEQ ID NO: 14254 - DNA, 465 bp, Diabrotica virgifera
  SmartBlast Evalue=0.000000009; Info=Sand n=1 Tax=Culex quinquefasciatus RepID=B0W9V5_CULQU
agtttcagacaaaaagttaaaggcagtaaaatcatgtaaaaactttaaacgcaaactatttattcgaagatttaatgaccgaaacacttactggcaactattaaagtgcaatatgtcgactgttgaaatcgagccgggggcagcgcccgagagtgtcctagtaacaactgatactaccttagatcattttgaacaaatgagctctagtctagaagaaattaaatgcacaaatcaatcgaaccatgaagaagaacacaatgaaaacactaataatgaaaatttagatgaatcaagcaatgataatgaaactttaaccagtgaagaagattttgagctgaacaaagattggattaataaggataaacatgtatttgttctgagtatggcagggaagccgatatattcaagatatggaaatgaagataaattagcctggttattcggagttatgcagactctagttag

SEQ ID NO: 14255 - DNA, 457 bp, Diabrotica virgifera
aaatattttttcaaaaaatttgagaaaaaacacaacattaaaaagtgttcttttttattttcttatccagcctttttattctgtgttaagactcgtgtgtactttgtgttttttaagtttgctgttgtggcattgaaagagaactacccgttatccacaactactcctgattcgtaaataaaagtctcattattaaaatatctatgtatctaaattgtcagcttcaaaattaaagtataaaggttgcacaaagattaataacgaaaacaagctatttctaatggatctgtaacgtacaggaaaaaggttgatattacgcggcacagatatatgaccgtgacaatgtctgatcttctactcgttaatttacatattacctaccggctcccggtatagtataactgaacaaatttaactgcaaccttcaaagccacttgcaccgcatcaacgaatgtct

SEQ ID NO: 14256 - DNA, 464 bp, Diabrotica virgifera
  SmartBlast Evalue=5E-42; Info=Exocyst complex component 6 n=3 Tax=Aculeata RepID=E2BQM2_9HYME
ccctgtatattggagagaaatctatgagctcttgagcactacgatcttcatcagaaaactgacctggtggttgtggcgcaattcttttctttttccttcccaccactgtaggatcactggccaattgttcactggtatgcttcattgcaacttctcccacttttggtgagaattttcttatgttttccaaaaaatctttcaagtctgacatggaagcggcttcgattttttctctgtactttggaatattttcttgcaactgcttagaaaacctgtagtttgccacatggggtaaatgtagatgttctaattcctcaagagtttttaaagcaggatagtatcttttttctgcaatctgtttctgtagtttggaatacgttgtaaaaactggtagacataaattaagctgtgcgataacaacagctatattactttgcactttcctagcttgaagcaaatcagat

SEQ ID NO: 14257 - DNA, 464 bp, Diabrotica virgifera
  SmartBlast Evalue=2E-24; Info="Putative gag-pol polyprotein, identical n=1 Tax=Solanum demissum RepID=Q6L3N8_SOLDE"
aagtatactcaccaccaaccatctgtcctaagacattttatagttttcccggtttgattttccaccatacttttaaataagcgaaatgttgaaaaaacttcactcttatattttagcatgtacccaaaaaccttcctagaataatcatcaacaaatataagacaatatgcagcacctccccatgataacacttcaaaaggtccttgcaggtcactgtgaacgatacctaaaagatcctttgcccgtttaccccttttcggaaaaggtttcacagtttgcttgccttcaagacaagtaacacatacctggtttggttcgtcaacaaaaatttaatcccacctgctgtattttttagtcaatcttaaccctttacgattcaagtgaccaagtcttttatgccataattcttggtctgataaaaatccctcttttactaccatcattgattcttgtttcaaattatg

SEQ ID NO: 14258 - DNA, 465 bp, Diabrotica virgifera
  SmartBlast Evalue=9E-25; Info=DNA polymerase epsilon subunit 3 n=15 Tax=Amniota RepID=DPOE3_HUMAN
ccctcttccatctcagtctgttcttcaccactaggttttttagttttaacttgttttttagatttggaatttttataatcttttaaaatgtcttctaaaggttctataaaattttcaaactccaaatcttgtaatgcctttaaaacgtcgccggccattaacgtctttctgctatttttttgggcttcattagatgcttgagaagtaacatataaaacaaacactgatgcagctctggacaaagcagatcttgcatcttttcctatattcacagaatcaggaagtgcctccttaataattttctgtactgtattattaggtaaatttaaatcttccagtctctctgccataattaagacttttccgaagaagtattttgtgctaatttaacgagtttcagattataaacaagtcaacaaataacaaaacagtaaaacagtttgtttgttagacgtttcatctcat

SEQ ID NO: 14259 - DNA, 462 bp, Diabrotica virgifera
tttgggaggtgcgattgaaggctgatcaacaatttcgataacatttgagacagtttctggtttaatcttaatctctttcgattgtttggctacatatttacttgcaactgggtttatagacaattctgtaatatttttattctcatctgtttttactttctttttatgtggatgtttggacttctttgaataattcgggataatttctacgtctttcgaaaaattttcagatctgtaactagtgacttctggttttttaactggtgatatatctacagccggacctaaagataagtctaaacttttacgatttttgtctttgactgaaggagattctttggatttttctgagaggtttattgctacctggcgaattgatattcctgaatctactggaaaagatggagtcccaattgagctcaacggggatcctcgtgatactgtcaaagccgttggcagagg

SEQ ID NO: 14260 - DNA, 462 bp, Diabrotica virgifera
gctgattttttggtatgggtttcatttaggggtaattgcaaattttttaattgcagggtgttacatttgaagaatacccctttttataccatctgtaccgcctatgctggagtgggagagctttcagcgattgtccatctactggtgttatttacgagtttgtgtggtgcacccccatattttccccggaaccaccccaaagggggagaattaataaagaaaataatcaaaacttgattttgggccaccactgtggctttagggtgcaaagaaaataaaatatgcataggtcataatgtgtagcagacggtgtgttcttttattttccataagtacgttatccataaaatgaataggtgacgaaaaaaaaacaaacactggagcccgccaaagcatttctgaggtttacggcgccactgtgccgtaacggttgcttatacgaaaaaaatgcatatggcatta

SEQ ID NO: 14261 - DNA, 463 bp, Diabrotica virgifera
ctaattatcaattggaaaatagcgcagaccgtaaacaatccatggtctttgaccatgattatgaagtaaaaaacaatttattgtgcagaggcaagtatataacttcacatgtaacagaaagaaatgataggttgtcaccaatttagggagcgaagggttcacaggacgaaacacaactgttacccctccgtcgggaacggctccctcactttttcgtcttctgaatgcgaccactatatggcataatatgtaagataacgaaggctaaagtgtggtaaaatttagatacgtagtgatgatgtaaaatgtacgtcacaactataaagaatgtcaaatttaatattcatgtccaattatttgagtaagtacataaaaagacatgacctcatgaaattccatttcaatgattgtggctctattctactctgaggacctttactattgtaaaactattagtaaaagc

SEQ ID NO: 14262 - DNA, 463 bp, Diabrotica virgifera
  SmartBlast Evalue=2E-51; Info=Similar to TM2 domain-containing protein n=2 Tax=Heliconius melpomene RepID=C3PPH9_9NEOP
tacatttttattttttatgatgttaattaatgtttttattattcctttttattattacaaattttaccaataaatagtgaagaacaggagcctttcgatcctcgaggcccattagtcaattgtagctttctttcatttgaattcatagaatgtcaggacccagtagaccacaaaggcaataagacagccaaagaggaacttaaatatggttgtgttaaatttggtgggatgaaatatcacgacgtggaaaggactaaagtagtgtgtactgctttaccatctatagaatgtcatggaaaccgaactttcttcagagaaggtgttccttgtataaagtactccaaccagtactttactaccactttattgtacagtattctattaggctttttaggaatggatagattttgtttaggacagactggaacagctgtaggaaagttacttacgattggaggtttag

SEQ ID NO: 14263 - DNA, 464 bp, Diabrotica virgifera
tttattaaaaacatgtctttttgtattaaatataaagtctcgcctgcccactgattaatttgaatggccgcggtattttgaccgtgctaaggtagcataatcattagtttttttattgaaagctggaatgaagggttggatgaaaaaaaaaactgtctttatttaatttataaagaattttatttttaagttaaaaagcttaaattttttttaaaaagacgagaagaccctatagagttttataaaattattaataagtttttttagtattaaatttatttatataataaatttatttaattggggtgattaaaaaataaatttaacttttttatattattatattaattaataattttttgatccaatttttttgattataagaataaattaccttagggataacagcgtaattttattggagagttcaaatcgataataaagattgcgaccttcgatgttgg

SEQ ID NO: 14264 - DNA, 461 bp, Diabrotica virgifera
ttggacattatatatcgccggcgacggtcggtgggtgtacattacatgtcatgaaaagataaaaacactgcttgactagtgttgactcatgccagtgctgtacagctattaatatttgtttaatattttctattttaatgtcctattattattcattgacacataatgtatgaaattaaattattttttaaataaagacaataagttttcaatttaaaaatcttttagtaatatttttaatattttcaatattaataatttactattaggattgaaaactacttcgtctttcaatgccagatggcgctagccacctactatcatcacttcagttgcagtgggtgggaaaacttctcgatacgaatcagttaaaatatggagaacagtgcctacgttccttccgatgaaggctccaataagagccgaaaatcgcgattcaagggactggactgcactccgta

SEQ ID NO: 14265 - DNA, 464 bp, Diabrotica virgifera
gtaaatatttgtgtaactggaataatggataaattaactttaatttcaggaactctttttatggcggccgatatttttgccatagttagtttggctatgccagactggatcattacagatgtaggaggagacaccaggctgggcctaatgtggagttgtatgactctctacaatagacctcaaacgtgtttcactccagaacttcaaccagaatggcttttagcactagtctgtatttttgttggatgtatttgtatcacaactaccattattcttcttgcatcttcacattgggatagaaatgtggtaccttatgcaagatgggtgggatttacagctatggttttattctgcttggctgctgtgatatttccaatgggctttcatgtggatgaaataggaggacaaccttaccagttgccaggcagccatcaagtaggcatctcatacattcttttcatttt

SEQ ID NO: 14266 - DNA, 464 bp, Diabrotica virgifera
  SmartBlast Evalue=5E-39; Info="Cytochrome b561, putative n=1 Tax=Pediculus humanus corporis RepID=E0VVT2_PEDHC"
tcttatggtagcagggttcattacgttcagtggcttttctatactcttgtacaggatatgcagatgctgtcggaggatctacgtcaagctccttcacacaatattccacgcactggcgataccatgtgtagctgttggattcttagcagtattagattcccacaatttaagcagcccacccaaacccaacttttattcgttgcatagttggattggacttgttactatgggactatttgcattacagtttgtggttggcttcttcagcttcctggtgttattgtgctgcgaaggagcaaccgcagggtttagggctgctctggtaccaatccatgcttcctttggactgacgactttcatgctagccatagcagcctctcttacaggacttacgcagaaagtttggttggtgctaaagccagaagagtatacagcgtggaaggaggaaggtatcatcattaact

SEQ ID NO: 14267 - DNA, 456 bp, Diabrotica virgifera
caaatgagtccaagaaggtcccacttcaaagcctcaccaataggcctccaaacaaagtctgttaaatcactctatcctcacctgtttcaaaattgcacccgtttgaagttataattttcttaaatgtacatcaatttgtttataagggtttcaagtaaattcgaaccgtaaacacccacactccaatcaacaacaatgatagaagaactcaaaaggaataattcgagcttaagaaaatgttcgtatgtctatttttggtcaagatatcgatattttaacggtaagctatcaggtgcaacatcggctcacagtcaagtatttttcgacgctttatcgatcataactcggcttctacgcatgcaaatgagccaatatgtgatatccatataaaaatggatcgagttattttgcagcatcatcattgcatataaaacgagcatttatgatgttgcggca

SEQ ID NO: 14268 - DNA, 454 bp, Diabrotica virgifera
gaaggagaatctagtccaatgctggactagatgacattatccacacttatccagttattcaaaagatataaaacgattccaagtcattcaaaagatgtaattgaagaagaactaaaaagaaaaaagttaatttgggcgagaaactggattaggcgaaagaactgaaaaaggaggcttacaatgcttgtgcaacagctgaattcagaatgtgcctttgaatacagattggcagtgtcaattccacaaaaacaatattgcgtattcactgttcaacgtgtaatcaatgcatggattgacagttcacactattctagtggcggctgtcaactggactggattgatcacgggaatgctacattccagtgaaggttcacatactcctgtgtaattccaatgctcgactggaatgctggactggaataatgtgaaccgagcttagggatgctgctgcttt

SEQ ID NO: 14269 - DNA, 465 bp, Diabrotica virgifera
  SmartBlast Evalue=0.000000003; Info=Peritrophic membrane protein 1 (Fragment) n=1 Tax=Holotrichia oblita RepID=C4N881_ 9SCAR
taaatctataaaagagacattcatcctaaccacataccgcagaaaaaaatttacattatataaatcgcctttgtttttcaatatgtttttgaaaactcttattattgtatgtgctgtcacaagtgtctatagtcaagccgtaggaacatgcccacctgtagacggagattttcctgtataccttccagatgccacggactgcattatattctatgagtgttcaaatggtaaaccaattcaattacaatgtgcccctggtacattatttgatgaaaaaagaggaatatgcgctattgaagttaattgcggaaataggtccacgccaaaatctttacctgccgatttataattttagtttacttgaattgtaatgttatatgcagtattttttaataaaattgtaaattgtgttatgataaattgttaccagatattgtatttttaaaaaaagtaaaggcagttttt

SEQ ID NO: 14270 - DNA, 460 bp, Diabrotica virgifera
gatggccctctatctatgcacgcaaaaaatgggtgatatactaaacagaagatgaaaaaataaatgtatgggaaagaaaaatattgaaaataatttttgaaggtgttaaagagggagaggtatagagaagaagaacagtgtcgaggtcaggagtctttttaaagagcctgcgatattagaagttgtacaatcataaagattgagataattgggacatttataaaaaattaaaaagaagaataccaaaactattggtgaatatagagctgggtaaagatggtaaacggacagtttaatcatataacaatggataataaaatcatactcgtcgcagcagcctctcttcttcttctttttcttaaccttctgtagttcattttttatataggcctttcccaactcctacctactatcagtcaatttgttccggctattaggataggaaatatgcaaaggataa

SEQ ID NO: 14271 - DNA, 460 bp, Diabrotica virgifera
  misc_feature (419)..(419): n is a, c, g, or t
  SmartBlast Evalue=3E-46; Info=Pre-mRNA-splicing factor SPF27 n= 1 Tax=Camponotus floridanus RepID=E2A9S4_9HYME
catttaaataaataataaacattacctttattttgttttaaacttgtaataatggctggggaagtaatagttgatgctttgccatatatagatcaaggttatgatgagccaggagttagagaagcggcttttgctatggtggaagaagagtgtagaagatttaggccaaccaaaaactacctggaacatcttcctccacttaacatatcatcttttgaaactcctattatgcacaatgagttcgaaaggttgcagaatcgattacctatggaaaccttgtctatgaaacgttatgaacttccaccacctccaagtggaaaactaaaatgaagtgggtgcctggaatgaatgtgtagacaactcacaagctcagctagaacatcaagctgttagaattttaaacctgcatcttatgttanactactgttgtcctgcgtggcaaagatatttacaaactttt

SEQ ID NO: 14272 - DNA, 447 bp, Diabrotica virgifera
gagttatgatgagtgtttcccgaaaagtgctttatccctttggttatttcacgttgaaacattcgacttggtacctgacgaataagaacccatttttcattagctgcaaccctgcttctactgggtctacagacccttatactgacacctctttttcataagctatattattgctaggaatattttcttcgataaaatatgtacatactcactttttgagctatttgcgaaaatccgtccaaaacgtgtttttctatgaaaaataaacacattcactcgcacatacctcgaaaagtattgacctaaaacttttatagaacaaaatttgcttagaattaaaattagtcagtttatccacttccggacctattttgcacgtatgttttttcacctccaagaaggggtgaaagtcacatccaggacaagagaacacatcggcacaacctc

SEQ ID NO: 14273 - DNA, 463 bp, Diabrotica virgifera
  SmartBlast Evalue=1E-20; Info=Dehydrogenase E1 and transketolase domain-containing protein n=1 Tax=Glyptapanteles flavicoxis RepID=B7S8K1_9HYME
gtcctccaaatatacatattcggctgctattgatttgcaatatgcctcatttaataactccaaagcgtttttaacgctcccttccgccaaatttgaatttaaaatccccttaaaatgtactatgtcatcttcgttcagaccatatcgctttagttcaatttctggggatttttccggtatttctaatgcaactggattgattcttgaatacttgtgaccatgttgtctatatgctgatactaatcggaaaaaattgctctgcttcaatctgatatcattcacctcctctggaacttcataacatgttttagtttccttttgaatccaaaaacattttcactgtgatagggtcgtcgaagattggtccgaaaaaaatttaaatagttcgcaccaccaccaaaacaaaacttagaacagtttttatacattttattgaaggttgttacgcactgactgttagttt

SEQ ID NO: 14274 - DNA, 462 bp, Diabrotica virgifera
  SmartBlast Evalue=4E-45; Info="Nucleosomal histone kinase, putative n=1 Tax=Pediculus humanus corporis RepID=E0W077_PEDHC"
aatcattttcccatggcaaagtgcatccaagccattgaatcaaattataagctagggtttccaaatcaccacgtttggtttgaactccactatgagcatctctacttaaatattcaattgtaccatcatgagctttcttggggttaggtttaagctcttcttcttcattagatttgcatgatatgccaaaatctgccaagtacacttgcttgttttgggtagccttcgtaactcccatcagaatgttagatcctttaatatcagaatgtacgtagcccttgctgtgaatgtattctaaaacgtccagcagttgaactgctagtttgaacactgttgcagatgggaaatgcctgtcgtgttccaaaaaagtcttccacagatctgtaccaaatttctccattacaagaaatcgatacttctcaccattcaattcgtgagatccagatccatgatacactggca

SEQ ID NO: 14275 - DNA, 464 bp, Diabrotica virgifera
tttaaccacaccggtgcacagtcttctgccaacggatcaacggatcaaggccagcagaggatcttaaggttgatgctgatgacccccatgtagtgtcgcagagttcctgtattatattgttacgtgtttagttttgctgctgttttcgtcaggtgttctctgaatgtgagcgttctgtaaaataccccaaggtatttcgggtatttattgttgttcaacagtttattaaaatacactcgtaattatctgtttgccagcctgttgtttagatgaaaagctgatacttcagtttttgtagtacttagttgcaatctacatttcttaaattattcgctgaggatggatatgtcattcgtgagagtaatttctgtagtttctaaagattgatggcttattcagtggcgtgctggccatataaatgaatcggtgcaatcaccgagaggccgcggcctcttgaggccggt

SEQ ID NO: 14276 - DNA, 462 bp, Diabrotica virgifera
  SmartBlast Evalue=3E-62; Info="CG2118, isoform A n=4 Tax= melanogaster subgroup RepID=Q9V9T5_DROME"
acttcgtctccctgcctaactccagtctctattcgagtatcatctgctgcttcgggcgtagaaacgtaagacagatgaccagcaccaggtagaaaaccacccctaggatcttctgcataaattctggcttcaaaggcatgtccctttaaagtaatctcgtcttgcgataatggtagtttttcgcctgacgccactttaatttgccattccacaagatcagtatctgtaatcatttcggtaataggatgttcaacttgcagtctagtgttcatttccataaaatggaaagcgtgagatttcttgtccaagataaattcaactgtaccagctcccacgtaaccaacagctttggctgccctaacagcagccattccaagttcgttccgtaattttggagaaagaccaggcgctggggcttcttctataatttttgatgccttctctgtacagaacaatcccttt

SEQ ID NO: 14277 - DNA, 462 bp, Diabrotica virgifera
  SmartBlast Evalue=3E-11; Info=60S ribosomal protein L7 n=1 Tax= Camponotus floridanus RepID=E2AL33_9HYME
caggagactttgatttgtctatcagtcttgtgtacccaatcaaaaatcgatacttagatctcttcttcaaagaatcttgattgaacatcatttggtgtgggaagaaagcaactacttctcctactgaatttccttgtacaaaaccgttcagccagtcggaagctgatagtgacagcaccgttactagagaactgttgaggttgttggtgtcttctataaacgatctgtgtgcgtatagcgtgctcgctacattacagtttttaggcgaggattcctcggtggtggccatatgagataaccaatttgtcaaccaggttccgtctgtcacaattccgccttttttcgtagcaaatttatcctggctgtgcaaatcccaaacgtaggcggatttatcaaaagatccgctgaatagaaatcgatcggtgcccacaggaatccaagaaagtgctgatacatagtgag

SEQ ID NO: 14278 - DNA, 464 bp, Diabrotica virgifera
ctctaaataacttctgactgggtgcgaagaaattaggtataccgactggtatgaaatatcgcatttgcctaaaagcggcgaaaaacgcggtggtccacgacttgattataccatgatggtctagtattcagaccgttgaagaatacttaactcgactactaacacaaatacttctgcattcaaattgaacaagaacttcactatacttaaactcaatgggaaccgcttttagcggccttccgaggctctaggaacttcaactcttgacggctctaacataactgaatgtaccgatctcctcaaactccaatcttctaaaattcaacgccctttctaaagatcatgcaatcctcccattctagcaattatcagatagtttatccaatagaaaagcaaaatcattatccgccaaaccaattcgacgccatgcatgtttttcagccaataagaaaatactcatcatc

SEQ ID NO: 14279 - DNA, 463 bp, Diabrotica virgifera
  SmartBlast Evalue=4E-15; Info=Endonuclease-reverse transcriptase n=1 Tax=Bombyx mori RepID=D5LB38_BOMMO
gcggcgacaaggtttgaaactacgaatactaaaagtttggacaatgttagtttaattgatgcgcaggcattggagtgttttgttgtagaatatcgacaaagttaccgacgagaattggtttaaagttaggatcgaaggttccgcaaaagaagaaattaggaggggagttagacaaggatgtgttctgtcgcccctgctgttcaatatttacttcgagtttctatttaaagaggcactggaggattccaatgatggagtcaaggtgaatggcgtaaatatcaacagcataagatacgccgatgatacggtgttgattggggattccgacttggatctacaacgactcatcgacaagactttaagaagaagaagcacacagagagacgttcagaagtgttcaaaacatgaaatttagatagggaaatgtaatgaagaattaactgcagcatgcaagatgaagtca

SEQ ID NO: 14280 - DNA, 463 bp, Diabrotica virgifera
  SmartBlast Evalue=6E-26; Info=Mitochondrial NADH dehydrogenase Fe-S protein n=1 Tax=Culex quinquefasciatus RepID=B0W1B8_CULQU
atttaatacttcagaaagttgcatttcagtatttctttaatttaattttaataaaattaattcacattgtattcatttaaatccttagaagcaaaaatccaataatggccctatcaccatggttgaagtccccttttacagacttaacgggatctctagtaaatcaccagtggtacggagaatgtgctgatatggaattaaaagttttagactgtctagatgcctatggattggacaggggcttaaaaaaatgtgatgatctgattgaagacttcagagagtgtgctttaaaaacaaaacagttcaaaagaatgtacgccatgcgaaacgaaaggcaccgtcaacattttgctggtgagagaacatcagagaataaatatgccaaaggccctgcctatgacagttactaaataattaattattgtagatgttttagttgtaaataaatgtgttaaaagttcta

SEQ ID NO: 14281 - DNA, 461 bp, Diabrotica virgifera
  SmartBlast Evalue=7E-55; Info=Phosphoinositide 3-kinase regulatory subunit 4 n=1 Tax=Harpegnathos saltator RepID=E2BB70_ 9HYME
atattgtatgccttgcatcaatgtcacaaagtaggagtttgtcatggagatattaaactcgaaaacattacagtcacatcctggaactgggtactgttggtagattttgcttcgttcaagcctacatttgttccagtcgataacccagcagattactcttatttcttcgacacctcacgaagaagggtttgctatttagctcctgaaagattttccagtacaagcaccacaattacggagagcagctcattgattgctgaagcaaactgtgactcaggagatttaactcctgccatggatattttctctgcaggatgtgctttgttggaactgtggaatgaacttcatgttccgtttgaatattcccaattattagcttactgctctggaaagtattctccagaaaaacacctgaataaactagatgatccaaacttgagatcactcatatcaagtatgat

SEQ ID NO: 14282 - DNA, 461 bp, Diabrotica virgifera
cagacaaaacatataatacttaaagtatacactggttttgatggcaaaatgtattttttgtgttttgttatttgcatcctgtttcaaaatgcagcatccagggatctgaacgattgtccagataccagtagagcagttgaagttgttttcgacaaagaagtatcaacgtcagtaataggaagtgtagtttgcgtccgtattccagacgacggcttgctaaagaatcctataacatgtatatcagttacagacaaccgacacagtgataacacacctgaagtacaagctggaggtgttggctatccttatgctgtagtatcggtttatccaagaatgtcggaactgctaagctacagagtggttgctttcgtagatcctggatataaagttgtaaagaggatcaatggaatggactttcgaaaacatgtttagacagtacaaatttgaattcgtctactaat

SEQ ID NO: 14283 - DNA, 462 bp, Diabrotica virgifera
  SmartBlast Evalue=2E-15; Info=Apolipoprotein D n=1 Tax= Camponotus floridanus RepID=E2ABN0_9HYME
agtagggcagcatttatcacatgattcgagggatttaaactttttgtatatatataaaggttctctataacttccccatccactacaagacatgagtaaggtacaaagaattggttgtaatctataccaagaatccaaaaaggtgcagtcaaagcaggttctttgaatgttaatgtaaacttggcttctcccgttgtcgagtctgggactgcaactgcttcgacgattgtccattcatttgtctctccattaaggtatgtggtgttaagcccaattgatgtgtcttcatttaatgataattgtatgaaagcacatttaccgtttatttctaggatggttggataccttttttgttcgtaccagagaccaacaatttttgtagcatcgaagtttgccactcctttcatatctggacaagaagcaccatgaagtttaccgtgtgcagctgttaccagcaacaaa

SEQ ID NO: 14284 - DNA, 460 bp, Diabrotica virgifera
  SmartBlast Evalue=1E-38; Info=Transmembrane protein nessy n=4 Tax=melanogaster subgroup RepID=NESSY_DROME
cttggacgatgccgcaatgtattataactttgaggctaataggggttgcatttgatttatacgatggtcaccagccagtggaaacattatcatctgatagcaagaaacttgctctagtccagaaacccagtatattagaaatatttggtcattcgttctttccgtcaggatttttaatcggacctcagttttctatgaagagatatttagaatttatagatgggcattataacaccagggacggccctccagacagcgtagtagctgcgataaaacgaggtgctactggagttgcatatttaactatattccaaacgattggatcttttgtgtcggatgattatatgttatctgacgaatttgcacaaacttgcttcttcaagagaatgcttttactgggtctctggggtagatataccctctacaagtacatatcttgctggcttttgacagaaggagc

SEQ ID NO: 14285 - DNA, 462 bp, Diabrotica virgifera
  SmartBlast Evalue=8E-52; Info=Transcription initiation factor TFIID subunit 1 n=1 Tax=Camponotus floridanus RepID=E2AC06_9HYME
agtcttttccagatgatgcttttctaatggttactcaactacattgggaagatgatgttgtatgggatggaaacgatatcaaacataaggttcagcagaagctcagttcaaagaccaatgcagctggatgggtacctagtagcggtaacagaactgcccaagcttttagtcagcctggtaaagttggagctacaatcaggatgccacctgtgccgaatcctccactacctggcatgaaagcgaaacaacaaatgttgaaagctaggcaggacccagaacaagatgacacatggtattcaatttttccagtagaaaatgaggatttggtgtatggtcgatgggaagacgatgttatttgggatacagaaaatatgaaatctatcccaaaaccatccattttaactctggatcctaatgatgaaaacataatccttggctattcctgacgatattgatccatct

SEQ ID NO: 14286 - DNA, 457 bp, Diabrotica virgifera
  SmartBlast Evalue=3E-24; Info=Endonuclease-reverse transcriptase n=1 Tax=Bombyx mori RepID=D7F170_BOMMO
tttgttcgctagaattatccttcgcttgatttcttccgtcatgacgttctccttggtgatcagggagcctaagtatgtgaatttgtccaccacttcaaaggtagagttatcaaccgtgaatcggtgaccgatgtttctggctctattgttgggtgttgatgtcatcatcttagttttctcctcgtttacttgcaggcccatattttttgaggcatttgagaaggcgcgcacaacacagcttgcgtgttgtgcgggcaactaggtccacatcatctgcatgtgccaaaatttggtatgatttattaaaaatatttcctctgttgtctattcgggcatctctgaccgccttttccagagctatgttgaagaggagacacgccagcgcatctccctgtcgcagcccaacattcgtttcaaacgcctgtgattgttcgccctgtatttcgacttttacaag

SEQ ID NO: 14287 - DNA, 459 bp, Diabrotica virgifera
gcctcccccctgggtcctagactataatatagtctaggagcatattatgtttatatattttgttaataaaaattccctcataatatcatccgattctataaatgtatatgagatagtccataaatgtagatcggatgttattttaataaataattcgttagtattgggaatacacaatggtttttttaatatacactaagcatcaaaattaactcaccatctcaaaaatgggacattcctggtgtcgcgcgcctcccaaacctgttgtccgatttcagtgatttcttttagtgtattatatagctttattcttcaagaacatagatgtaacaatattactgctaaaaaggcaagtgtcattgtataccgtgtgtaccattggaacaccctgtggaacattccagcgcatacaaaatattaaaattaaaactcaacagcagccctaggcctttttaacat

SEQ ID NO: 14288 - DNA, 463 bp, Diabrotica virgifera
attttataattaaaagaattagtatatatacatattatctacttttatcgcatacttttcatttcgtttttatcactcgcagccttgataatactgctagcagttttgtacagaatcacaaacaataaaacattgttctatgtatttaaacaaacgcttctatacagaacaacgtctggaagcaataaatattaaactgttcatttatttacaattctacaagaatgaatagaaataaaatattctattctatttagttagtacattgtatttatacttattaaaagaaatggcattgaaatcaaaacaagataagtatcaagatctatataatgctgttaagaaagcataggaactcagataaaagtgttgtcttttgtcccaataaagctaattagttgtacagtgaattgagagaaaaaggtacaaggatattaatgagctacatagtacctaatactga

SEQ ID NO: 14289 - DNA, 452 bp, Diabrotica virgifera
ttttttgtttaaacataataaaatatgattttattgttgcgtaataaataaagatcgatattcaacaatatggtattgtaatttctttcccgaagttacaacccaaaataaactaagtgcgtactcttaccctcctttgccctaagggagacaacagtacatgcgattttctttttttctttatttgcctcatcctttaaggacattggcgatcatcaacccattttgaagagttctgttgttgtttttccacttcactgtcttacatttttcaactcaactgtcatgtcatcagccaacaaagtgaccatagccattatgatatccaacctccgatgggagagggaactttaagaagaaagaagtcatctcatcggtcctcatttccttccacttttaccttttataatataaatacaaccttatatattatatagccgatcgcatctaac

SEQ ID NO: 14290 - DNA, 462 bp, Diabrotica virgifera
atgtataaagaaataacaattttttgttcgaatttaacatggtacaccaaacagttttttatgtactttaaaacaaatgtatgcatcacaatatttagaataacaaataattaaattagcgtttatatcaaccaaacatcgtcatcacatgaaatcctataattttggttaagtaattataaaagtaaagtgatataaggaagtattttcagaacaatattaacatattgtatttgttctaaatatttggacttcgcatctcttcaaaattagtttgaacataatctactctagacagatctactaaatattttttgtatggtctcttgaactcaatgttatttagtaatatgtttgctctcctcggactgtttatatcaaattttattgcatcgcttaggtgcattccacaatacaccatgtaaaccggctatcggtcttaaggctgtatgacactgtgca

SEQ ID NO: 14291 - DNA, 460 bp, Diabrotica virgifera
cccttatttttctctattaaattttaaaacgtgatttattctcaactattattatccactatgattatttgaaatcctattttatttaaaaaaacaaaactagcaccccctccctattaattacaaaactagtcaaaaatgtacctgattatgtgcacacaaaaggtttacagtctaatatattataattctgaaggagaagcaacctgactttactttaacaacaaaaaaataaatgcttatcttatcttccaaactgttttcccacgacgacaggtctatttaggatgaaatcctcttagcactacaacatttcaagtgtctggaaggctgtttgaaaggaagccaagctactggtgtcctgttgatcagttatgcaaatataggtaaggctttcaacaatttgccttgggatgctatacaatattccaaggatttggactatcggatgcggcgaagt

SEQ ID NO: 14292 - DNA, 463 bp, Diabrotica virgifera
  SmartBlast Evalue=5E-56; Info="Ankyrin repeat-containing protein, putative n=1 Tax=Pediculus humanus corporis RepID= E0W1Y0_PEDHC"
taaagctcttgcagctctgccatgtactcttagaatttcttgttcaacagacaatactagtttctctttttctatcacatgctgagttctcagtctatacctctccttttcttggtcggtaaacaaatctttcatctgtggtggtaatgtttgcggatacgtaatatttggagtggtaggagcagtacccgccaatacatacgtacatctgttcattaaataatctttaaaaccttgaggaggtttgggttgtaccggaaacaatcctcggcgcctcttggcaatctgttgccgaatattcaaatacaaccgatagcaattcgtaatgggctgctcatgtggatgcacttgcgtttcagctgaggactcctgtgagtcacttggtggaggaggaacgtctttgttctgcttcattttgcgtttgcgtggatgaagttctacttggggtggtgctggtggaggt

SEQ ID NO: 14293 - DNA, 460 bp, Diabrotica virgifera
  SmartBlast Evalue=1E-23; Info=Sulfhydryl oxidase 2 n=1 Tax= Camponotus floridanus RepID=E2AAN0_9HYME
atgttttaataaagtgataaaagatatagtttcattttggagacagtccctgaaaaacatgtcgcataaatattcatcttcattaatttgcaacttcttaattttgtgtgcactttttggattttccaacaatgcaggtatcatgaaacctctgaaggataaagctaatgtaggtatattttccatgagttcaaatgattataagaagtattcagaaaaaattggtctttattatttaaatgacgacgttgaaattctaacagtagataattttaaaagtgaactttatggcaacaaaagggcatggataattgaattctacaatgcttggtgtgggttttgccaacgatttgcacctagttggaagcagtttgcaacagacataaaggattggaaaggtttagtaggagtaggtgccatagactgttcagatgaaacgaacaccgcaatatgcagagaa

SEQ ID NO: 14294 - DNA, 442 bp, Diabrotica virgifera
ggccggtttcaccaacaacaaataaatcggtgaatagttattcgtcaaataaaatttattggattacgtgtttcgatacaattttgataatttaaaattaaactgacgaatcttctttgttatagatatttaaagcgagattaacttgtcaatctaatcgaagagtaattatttatttgataaataaataaaataagtggtaaagttttgttgcgcagattttaaaaaggcattagttaagtaaatcaaggaaataaaatatcggcggacacaagtcttgtagaaactgcggaaagctcgacatatacgccactgaacgaactccgagcttctcattcgaagaagtccagaaatcttatgcacgaatatgccattctagacggagaggcagcgctgaaaaatctcctcgaacttaccaaagctagacctttcacagctgacc

SEQ ID NO: 14295 - DNA, 462 bp, Diabrotica virgifera
attgcctagttataaacgaacatcggataccttaagaaaacatggtttcggtggaaaagcctttgtattgcctgagctgccacattagctataatattatttcttaataaaattatcactactttatcatatttgatcaaagaatgttctttatcgaaaccgcgtaatagaaagaatgaatcaagaaatgaactacccattaataaaaaaatcttatgcaacaagttgtctgttatattttagcaattaaaacgttgaacatacattttcactaaaaactaaaaatgttgattttgattcgattgaataacactaaaatcaactgttttctaaattttatgtgtatcatattttgtttcgaaaactgatgtattataatgacttgttcacgcgtgagtgaagtctccttttgtcttccttgtgatctactatgcagcttttaatattcctatctatccatgt

SEQ ID NO: 14296 - DNA, 460 bp, Diabrotica virgifera
atcattttacaaacacaccaaactgtaatatatcgtaccagctattacttattttttaattttccaaaattcgacagaggtttatagtgctttatatcgactagtctatgtatagtacataatagagtaccttatattctgaagaagcatattttattattattattattattaaataccatttaatttattactatattgtagtgtgtacttaaatatgaccatattttatacaccaatcatttcacaagatatgagatacttggaatattatttttaatgagaaaaatattttttgtgtcaaatcgaacataaataatagttatccaatagaaattagtcaacgtgtgagactttgactatacagggtgtctcagactaatttatccacgcttaaacgaatagagattttcgaatgggacaaaaactgatctatttcatttctaacacactttaaccc

SEQ ID NO: 14297 - DNA, 458 bp, Diabrotica virgifera
  SmartBlast Evalue=6E-13; Info=BEL12_AG transposon polyprotein n= 1 Tax=Anopheles gambiae RepID=Q4JS97_ANOGA
catccactttaaattcaacgactggatcatccgtttctgtgtgtttttcttccgctgataaaagtactttgctttccactgcatgtattgaggtgcttgattgtcacggtaactaccaacctgttaggtgtctgttagattcgggaagcatgacgtccttcatctgtcaaaagacccttaggcgtttaggtttacgtcccatgaaaacttcagctaacatccaaggattaggttctatgcagtcgaccactaatttaggtggggttaccatttcttttaaaccagtacgtaaatcttctcctattttgacaaccgatgcgttagtcttgacaaaaatatgtgaggatcagcctttatgtaatttagaagttaatacttggccccatattgctaatttaaagttagcagatgataacttctttcgtagaggatccatagacattcttttaggagctgat

SEQ ID NO: 14298 - DNA, 463 bp, Diabrotica virgifera
gaagtatgagagacatggtgcagtgttttacaaggcttgcggacgcggctagtgaattaggacttgtggtaaactacttaaaaatctctgccaatcgagccattgcaacgactgattttctcattctcctggctcgtcttaaatattctctcgatgccctctccttcgatttggcccaggcagcggtgctatgcgccaacacggatgctcccacggtcgtctctggtagatcagctcatcgcttgccgtggtatcatatcgttacaaaacttcttggtatttttgatagaaaaattcttagaaagatttttggggcagtaaatgaaaatggtctatagcctcgaagatacaactttgaactatatcagttatacaccatccggatattgtgaaattcgttaaagtgcggaggcttagatgggctggacacattgctaggatgtcagaccacaaatacactaag

SEQ ID NO: 14299 - DNA, 461 bp, Diabrotica virgifera
ttgagctattggatttgtgttattctttttgcattacacagaatgaggtaaatctttggaggcgacaatatcccaatgtcaccattcaattttttccatttgatcaccccaatcaatagttccagtaaaactgttaagaacagtaagcgtaaaagttatattagaccagattacaactgtgatatcaaaattgaattaaagtggatatatacatagtgaattcacggattacacccttctagaatcagtaacggattttcacagcatatttatttcataggatgtgacacataatgaattcctaaatagtcagtgctatatatcttatatcataaagaggcctaacatcacttcctaaaagtatttctttaatacattattttttattaatttgtcattgtaaaactgtaaatgtcacccagtatatcgtcggtatactgcgaaaactgggtaaatgccga

SEQ ID NO: 14300 - DNA, 462 bp, Diabrotica virgifera
catacaaaaaggaatattctccaaggaacattggtccatgtcctgctggattagtggacacaccaaaagggccatttaaacatacgagggatacgaaatctcataaattctacttgccagtggtaacgaaataaaattccatgactacattcctaattttaagtgtgattattatccttgttaatttctgatatatttatacttttttagcttacggtagaggtacacatgttgcttttcaaaaaaattgttattaatatttttgtattaactgtttcccagctataacttactttattttatataataaatgatgtatttcgaatgtattttttagtttcataccttgcattcagttttctttgtctgctccagttcttctttatactgataaagatgaaactttggagatcaatttttcagtctgacaccatcaaataaggagacttatatgatgcgtga

SEQ ID NO: 14301 - DNA, 462 bp, Diabrotica virgifera
tgagtcatcaaagtacttcaagaaattgacgtaaacagtgacctttagtaaggtgtgtaatgttaaacttattacagaatccaaccaaaggcaatatcacatttcaccggtgcactcagaccagagcgactttggttccgataattccgaccgagatccgcatttcgttcctgttgtgcaaaggataacctatagtttgtttcgaagtcgaacagtaaaaccatcaagtagctcttctactagtagctcttggaaaacgcagaaaacatggcaaattacgcgggaaacatggcaaacaacatactgtggaaccggggatctatgacggtgtcaaacattttataaacgctataccacgcttcgaataacattactttagagctcagacgtcacgggaatatatccagtgtgacaagtcattagctgatttatatcgagactacaaagatgaatgtacagaag

SEQ ID NO: 14302 - DNA, 462 bp, Diabrotica virgifera
tctgtcgagttttttcagttataacgatttttgactttttggtattactcagaagtcaaaacaaccaaatttttgctcacgaatgggtgaaaatcaacatatttattataataaaaataagcataaacaaaaaaattgtatgtgcaatttgtatgcacgttaaaaattcggttaaaattcacattcttattccagtcaaaacacaataattaacaagtcgctgatgtggcatttcgatcatcgaccgagaaacacattaaatttttattactggtgttgataacgtgaacggtatcaaatatcacatcgtgggcagctgtattgattttaaataataaaaaatgtggcagagtctcgaagagttataacgccattgatgatatgatgaccaaatacttttgaaattacaaaaatgaataggttttttgtattacaatcaagattatcgttttcaggacaagc

SEQ ID NO: 14303 - DNA, 445 bp, Diabrotica virgifera
agacttcaacattctaaaggagcatatatgtttcagttggtgtttaatagttttaataacaattttaacaacattttgtcaacaaaatatatgtataattatgaggttatatcttttttgcgtggcgatataaagtcaataactgtgattttctttattttatagtatattatcttaatacacacaccggcaaaattaaaggaacaccttaaaaatgggacatgtttgaggtcttgaatctcctaaaccagttgtccgatttgaatgattttttagtatgttgtagccttatttaagaataccggtgtaattattgttgctaggcaggtaaatgtcattttataccgggtgtaacaatcatactgtgttttttccttaaagtttggaacaccctgtggaaaattctagcctatataaaataatttaaattacaactcgattgtag

SEQ ID NO: 14304 - DNA, 462 bp, Diabrotica virgifera
  SmartBlast Evalue=1E-50; Info="Phosphatidylinositol 4-kinase alpha, putative n=1 Tax=Pediculus humanus corporis RepID=E0W3P8_ PEDHC"
gaagtcgcccgagcaattcattcatttgtgcttcgcctgatatattatcagcaatatttgctaaagcatttataaccgatcttgacacatgcctatattgcgttttgtcattggtagcggcaccatatgcagcacttccgctttcaacagtaatcatggtgaacattttcatgactacttcataaacatgaggctcgcactgtgctattatcatacaccctaactgatcaactatcagcgaatccaaagctgacggtactctacaaaacctctgctggaagaaatgcagaatggtgtctgtcgtttttggagtgcctttcattgacaccgctacatgtcccaacattatcacgatgttcgtagaaattaaagttgattcgctgtcgctcttttctgcagtaaataaacgattcgatacggaagcaactagagctctaacacaatctggatctaatgtatgag

SEQ ID NO: 14305 - DNA, 461 bp, Diabrotica virgifera
ctttctttaccttctggtttatggtgttgttcaacgaattgtataaactgcttgaattcttctagtttttttaactgccagtctagagttggcagttgaagactgccggtctcgtcagtggggggattcggaatagtaacaacttttagatgttcacactcatctctaagtctactaattgtttcttcgtccagaccaaccactcgtttcatattctttctctgaaacattacattctgaagaaattcagtcccgtttccagggtgtaatataggtacaaaatcgtcggggaggctcacgtctagggccttccttaaaagtccttcactctcaccgtcggagtcttcggaataatcagtataatcactgtcgttgtcatataatagattttccattgtaaactattatcaatgtaaaaaatgttgcaaaatttcgttttcaagcgtttgtaaaaatatttt

SEQ ID NO: 14306 - DNA, 462 bp, Diabrotica virgifera
atgtcttgtttcttaagtgaaaaaagtggactgataagtttgacgccgattctgccagagataactttccatttaataggaatgccaatagggacgactattttaaatccacacttgacaatttggcaaaacgtcatccggaattagccgagcattttcaagatataaatcagcgtcccaggtccagaagtagaccggcagaggagcttaaaagtcgatttagaagacctttcggtgacaagtttccgtttgatgacgaagacgatttcgatatagacccttcaaaatacactcaacattttatccgcaagagtttgatcagccagacggtagatatccacaaaccagtttttatcaagaaactcccagagaaggcaaaagtagttctgcttatccgcaagcaaatcaagctgaagctacccctgacccttcacaatacacccagaatttttatcctcaaga

SEQ ID NO: 14307 - DNA, 462 bp, Diabrotica virgifera
  SmartBlast Evalue=2E-48; Info=Mediator of RNA polymerase II transcription subunit 1 n=1 Tax=Camponotus floridanus RepID= E2A6Z0_9HYME
tttcaataaaaaacaagctggtataactgcacaattctgactgttaagggcagtataagagggagtactttttccattaatattattaacggttattaaagatgtagtttgtaacttatgagctgcagatccctccatgcaaacagtaacactataccccaaacctttgttggttatggtgtcaatcttaattggttcaatctcattttttctatgttgagaagatcataaggagacacaaaatatgtaagtttcataggatgtccaccttttctcttctcaagaattcctacaggagatttatggattaagttataaggttccttagtaaacatttgcaactgagctaatgttaataggtccgcttccaaacattccaaagctgtaaaagctttacatttaatcttcttttcagcatttaactgatagatagaggtaaatccttctagctgggcagtaaaa

SEQ ID NO: 14308 - DNA, 460 bp, Diabrotica virgifera
  SmartBlast Evalue=6E-26; Info=WD repeat domain phosphoinositide- interacting protein 3 n=4 Tax=Apocrita RepID=E2AYD7_9HYME
gtgatttcttgagtctgacaatgtaaacttttaccaaaaaactaaataatacaaaataatttaacacaataaaaaaacctaaaaattacgcatgtatatagaatatgtgcatcattataacaggaagttctccatttgttcatatttcttaacatatacaacagtactattaaattcactgtatattaaaaaaataaatctgtacttaatataatattagagacactacaagctatcatcagtcatgtctaagaattgggcacatgtttctcgaacgtactctcctttcaggttgaacacaaacttataatagcagccatcaccacatataacaacgactgaattatcatcaggtccaaaagcacatatgctaggcggcccatttggaactgaaaatttgcagaaggaccatgtagaagagaagtatttaggtaaaaacatggcatttgctagagaagat

SEQ ID NO: 14309 - DNA, 460 bp, Diabrotica virgifera
caaataccagcagcttatttatttcccgctgatgtagagtccacttacttttcacttctatatggaacaactgggagaataattgacatgcacagtattaatttagattttcattttagcagcttagatcttaataatgatgatatggaaatcatgctgtattccccgcagctatccttgctgagacctctttttctatgtggttgtcttttactacttcgaagttgtggtcattaatagttatgtatgttctgcctaactcttagtcttggatttttggttacgagcatgtatttcgtcttctctttatttattcgaaggcccagactacctatttcttctggaattctgaaatacctctttatattgttctacacgattttaattttttaatagctctctagttctgatatattgttcacgaataatattaaactataagaatttatggtacatacct

SEQ ID NO: 14310 - DNA, 458 bp, Diabrotica virgifera
tccaaaacgggaattccaagctacacgttggatgaaaatgaattcggtgtgtccgttgaaagaggtaccctctcatatcgtaacacctccgccaccaaacggcgttctgggtgaaatatacgttcgagtccgtctatagatcgtaagcaaaacgggactcgtcagaaaacattacaacactccattacttaacagtcctgtctctgtgataattcgtaaatctcatccagttagctcaataagatgctgttaatttaggacatgctactggcttatgagaacgtaaaccactttcatgctggacatttctttcacttcgtgcaggaatatgaattcctcgagtttttaacaaatgattagtgagaacatttgcgctaaaaagtggttccgtaatgcggaaatcttaaaaaaaaaatttcattgtcttgatctctgcacctttttctgcctgatcctgg

SEQ ID NO: 14311 - DNA, 444 bp, Diabrotica virgifera
cattactctgtttcaactgtttgattattttttggcatttgtgcttttgctcaatttattctgattgcaatatatcaaatttattttgacgttcaatctgaactgcttgtaaaggtccaacatttttcttgcattcatgtaattttttatttggattttgcaaatcttgcttaagttaggtacaacatttccaatttttattttttcgaattcgtcagtcatattccattttctgtgtcagcgtacacttttttttcctccagttgtaagttacaagatgtaagttacaactgaaaagaaaagtgtaaaaaagctagaaaatggagtattattctgatgaaattaaaaaaaaagtaagaccgaaagtgctgtacttacctagatttgtaaaaaaactaaatcaagacttgcatgaatgtaagaggggtgttggacttttacaag

SEQ ID NO: 14312 - DNA, 462 bp, Diabrotica virgifera
aagtactggtgtatgttactctatcttcgatagggaagtacaatatatgattacgtgctatatcgatattcgcagagttaaaaatctttcccacttcttgcaaagtattaaattttgtttttcctatatacgtagtagagttaaatcccaaggcttgctcccaaccgcctctgactggaaagtataggtcggaatcgaaaagactagtgaaatcttcacttgtacttgaaatccaatcgacttttgtatcatcacccacagtggttaatacctgaatcttattagtaactgtaaaacactgattaaaaagtataacatctattgagtttgaagtattagtaattgttccaggtacatatccttcagcatctgctgttgtatgatagactcggccaatgtaagttgtttgtccttctgaattaagtcctccttgaacggccgtagctggaaaatcgtccgtga

SEQ ID NO: 14313 - DNA, 460 bp, Diabrotica virgifera
attgggaagtctccttacaatttatcaggtttaaaagtaaaatctatagggcgcgtaattgcccaaaaagagaatacggacgatcaagagtgtgtaattgatggttcctatgatgaagaaaatcaaatagtttacttacatatgtccagtcctctagatgcagacctattcgttaacgactattcagctattcaaaagaaatgtgaaactgacagaaaatgcgatgatttcttagctgtatatgacgaaataaaaagtagctttgcccgctatcttctactaatatttcatattagccacattgtaattttatcacatcctacttgtacagtagataccaactatatccagtattttaaagccatagattctttaagtcaaaaactaagcgacaaaatttcagaacttctaaaggtattgacacacttggtcacgaatgggttgcagctggaaggttttg

SEQ ID NO: 14314 - DNA, 444 bp, Diabrotica virgifera
ccaggtggaagaggggatgtttttcttatgttaagtttgagataccttgtagggaggacgagctacaaatgtgagtatacatcggaatcgtattgtggtcttatgttttgtgaacattttgtttttttttagtgtccctgatactcaattaagaaataagaaaataggtggttttactctttaacatgtgttttaactgaaacaaaactaaattaacaataaaaaataacgacagttaacaaaactaatatcgtgtgttatccctctaattcaaatagcagcttcacatcgcctaagcatgctggaagcagaccgtatgattttggactatggagttgcagatagcaataaccatcgtttctataccttatagagaagcaagaaagactgatagaattcttattgtctacctacactatcccataagtgatcaataggattcat

SEQ ID NO: 14315 - DNA, 461 bp, Diabrotica virgifera
  SmartBlast Evalue=3E-54; Info=Cleavage and polyadenylation specificity factor subunit 3 n=1 Tax=Camponotus floridanus RepID=E2AIH9_9HYME
tagcaatattactgactttgatataatcagataataaccatctgtatatcgctttagtggcatgtgtcatgaaacaacgtcccttgaaactagtctttagtaaaaaccatggtaaggcaccactgtgatctaaatgaaagtgagaaataagaagaagatctatctcatctgcctcaattagatctacgaaaggtaaagcatccattcctgataaacctgggtgaattccacaatcaagcataattttctttcctttgaactctatcataatacatgatcttcctacttcttgaccagctcccagtggtcgtatagtaagcaagtcgctctcctctgccggaacttgtgaatctggttttcttttgtaggacatggtaatattatttagttattaccaaaaagtttatttacacagatatttgactatttttctaataaatacacaaccgttcactcataac

SEQ ID NO: 14316 - DNA, 461 bp, Diabrotica virgifera
gttacggtaaaaagttttaccagtaattgttacggtagataataatcaaaactcaactcaaattcaacattcaggctactaagaattaactttatcgagaaccttaatctccaaggggagtccactaaccaataaatattcacatcgaaacacaaaaacaaaatatttatggttcatagatcactctttaacaaaatacatcctggggtatatgatttacaacgtattctacaccaatttaatacaaccgctagaaaatttaacatgttaatttctctcacactatctagctacggaaagctcgaaacagaagtggaagattaagtaaataaaacaaacagagccgcaggttacccgaatgaaacaatatggagaaataaaaaaatcggaaaacagtgaaacggagaatttacaaaacagtcatcagaccaataatgagatacgtcgtgtttctgccgcgt

SEQ ID NO: 14317 - DNA, 461 bp, Diabrotica virgifera
tttttgtgattgctttgtatagaagttctttccttggcacggtgtcgtatgccttcctaaggtctacaaacgccatgtgtacatatcttttctcagctcttttcctggttgctcttcaccgattttaccttctatacttttctccattttgttcctgaggctgaggatcctggcgtacagtcttcccatgatagcgatgacacttattctcctgtggttttcgcattcttttcatttccttttttatgtatggatgttatgtaggcttcctgccattgtttaggaatgtcctctccatttattgctcttcccatgattcggcatatgattttgcatttctctcttccgtatttgattagctccgccacaattcctcctggtcctccacctttactattctttatggagtttattgcttgtttcatctctttgtctgttatgactattttttctttctactt

SEQ ID NO: 14318 - DNA, 458 bp, Diabrotica virgifera
  SmartBlast Evalue=3E-44; Info=Ubiquitin carboxyl-terminal hydrolase n=2 Tax=Tribolium castaneum RepID=D6WV88_TRICA
ggaaagttgtaggcgggggtacatgtcggccataactcgaaggtttggtggtcatcggttggttaggtggtgatagagattttgtcactaaatgtctcttctgtcagtctcagttgtagattttgatggccttctccaggtaattgaacctcgacctttttggagttttattcacatggtctaatcccaaccagggtcgaggactaccctgattgattaggaacaggtttaaaatcagctaaattaattacatattcatcttcttgaataacctgtggcctacccatcgccacgattgcaaacttaaatttctcccattctttttcgggcacagccaatcgtttctgtattcgttcttttactttagcgaacggttctccctgtttgactttttatgaggaaaggagtgccgaacgtcgaaaagacctccttgtgaaaatgagcacacgaaattaacg

SEQ ID NO: 14319 - DNA, 456 bp, Diabrotica virgifera
ttatatgttctattagaattcggagaataagtgtcatcagtaggttaatttagttcttgataaatatttatacaataaataataaaaatttcattccgttttgaagcaaacaacattccttttctggtcacgctggtaaatcagtttttatagcaaccataaaagtaatgattagtgagtataatcaaatactattgactgtaatacatccaactcccacagaaatctggaagcatgttgccactagcgccactgtcgacttgagttgaactacgttttgacaacgtaaaatttgacgtaaacattcaaatttaattttataaatttttgaataacgagctaattttgctaaattaaattaaaataaaaatagttctaacacttatactaaaaacaataataaagcaatttttataaatgtaaggttagattgctctggttattagtggttattct

SEQ ID NO: 14320 - DNA, 457 bp, Diabrotica virgifera
ctatgctgtctaatgtataaatgtcctcttccgcctcactatctataaaattaacactatctttatgtgccaaacagaccctagccaagtgcccaatttttttacatatattacaaatgtaatctttatatttacaactatttttgtgtttatttccacatatcttacatttcgacatctgattgacacttgaatttacattgacgtttgagctgccatgcattgtccgccttgtcccatgttgccaacctccatcctgtccctgccgacgaactcgagaactcgacgatgacgaagcttgctgatgatctatcacgtgaacatttacagttgacctcgagcttgtttttgaagccataatagcattttctgtcttcattgccaaactcaccatctgctccatcgtcgccttttcatcctcttcgcataatctgtcgagaattttactaggacacat

SEQ ID NO: 14321 - DNA, 461 bp, Diabrotica virgifera
gaatcggcgttaccgctctagaaaaggctatgtttgggaataatgccgaatttcgtctaaaacttgttttaataattaaggccttctgaacagacttatttttgggtgaagatttgatgcgattatctttaactaattttaggcttctttctgtacagtttgtatattatttaagggtttatgtaatgtgtaatgtctgtaactttcatctatattaaaccgtaaaacaatgattactctttgtttcatatccttttaattgctctacacgtaaaaaaattcctcctgctctacacgaaattcctccgatagtatatacggattttacagaacggcagactgctctaatagttatgtaaaaattcagaagttatttctgttactcaagaaaaccatgtcctttctcttactcaatagaccttaacccgggagcagtcgcgccgtgagaaaaaatctcacat

SEQ ID NO: 14322 - DNA, 458 bp, Diabrotica virgifera
  SmartBlast Evalue=4E-18; Info=Endonuclease-reverse transcriptase n=1 Tax=Bombyx mori RepID=D7F170_BOMMO
tgacagaagttgaaggcatagccctctttacgagtggcgggaaagatagaatgctaggaacaggtttcgcagttggaaaaaattttatagagaaagttatggccttcaaacctatctcagacagaatgtgcgtaataagaataaagggagaaaaaggaatataggtataactaacatacacgctccatccgaggaaaagatgatgaaacaaaaggcctattcaaagagaaacaaatggatcatatgagcatattccaaaacatgatattaaaatagtaatcgccgattgcaatgcaaaagtggaaaaagaagctacgtataacacagtagcaggaatacatagcaagcatgaagtgacaaatgataatggccaaagactaatcagttttgtgacggaacaaaatatggtggtgaggagcaccctgttagaagaaaagatataatagaaaccacatgaa

SEQ ID NO: 14323 - DNA, 461 bp, Diabrotica virgifera
cgggatgtttttggtgtggctcaaaacgaatattccatcagaacatctggaggatttggtgtctagggtcacgtcatcttctgaaatttcgagtgatttcggcactaaattggtacaaatagattacaagggagtttgggcgttgctgaatacgaatacgctatcagaacaaacaccgggagcacctgctacttatggtcactgctaaggaacgtcattttctggagtttcgaaggttttcggcattgaatgcatgcaaatatattattacgcggtttttggggtcgctgaatacgaatgtgacatcagaactgactcccagaccacctggtgcccaagttcactgcaaaggcatgtcatcttctggagtttggagggtttttgggttccggatgcgccggggtcggttctgaaggcgtttcttgttcagcaaatccaaaaacctcccaagtaatctgttg

SEQ ID NO: 14324 - DNA, 456 bp, Diabrotica virgifera
tatattaattggaacaaatgtacatgagccaaaaaattaacatttgctgtaccaacaaaataggagtatcaagtggttgtctacctagtggcctataaaggtaaattaatatctgaatctcactttttttaatttccttataatgacgttgattcttcttcttattgtgccgtcttttcgcgaaaattggtgatcactctttaaacgcttcccaatctttcgcaacgtaaaatatctgttcaacactgagatctctgacattcttcagctaagatgtcttcttttcttcccaagccttttcttccctctactgtactctcccttgcatgatgacgtgtagcagagagtatttatcgtttgcgaagtatgtggcccagatatgttttcttattttaattgtgttcataagctttctgccatgtccaattcgtcttaacacttcttcgtttgagactt

SEQ ID NO: 14325 - DNA, 457 bp, Diabrotica virgifera
  SmartBlast Evalue=2E-41; Info=AN1-type zinc finger protein 2A n= 6 Tax=Simiiformes RepID=ZFN2A_HUMAN
gtgagattgtttagatacatatagtgagtccatattagtacctaatattattaaagtgtttttattgtgaaaaattactgtttgtatatttgtttaaaatggaatttccacatttaggcaagcattgttctaaatctgactgtggtaaattagactttttgcctatcaaatgcgacgcttgcaaacaactcttctgtgaggaacatttcagctacaatacacatagctgcccatatgcataccagaaagataaccaagtgcctgcgtgccccctttgtagtaggcccattcctgtgggaaaaggggagcaccccgattttgtagttggtgctcacatagacaacgattgtcaatcagatccagcgaaaaatcgccgcagtaaagtgtttactaataggtgttcctacaacaaatgtaaaacgaaagaactgttaccatttgtttgtcaagactgtag

SEQ ID NO: 14326 - DNA, 459 bp, Diabrotica virgifera
agtctttctgattctctgatattctcctaatcctctcacttacttcttgagttttgtatgtacctccactaggagcaaagcaaatttctgctggtggttcaggttgaagattaaattcttgtgtcgtctgacttgaagaaaatgattgatattgttgttgaggctgggaaaatgtttgagacgatttaaatgattggaattcttgtcgcagaggctctggtttaggtggtagtggtggaggtaatttagtgtctattggctcaaacttcttatatatgtcttgtttgattggttctggtgcagtgatttccttttgcacttgaactggagcatctccttctttaatctttttaacgaaatattgcaaggatgactgggttgagatggaactagtttcaattccttcctgaacgtcaacctttttctcttgtagtatttcttcttgtttaggtagaccgg

SEQ ID NO: 14327 - DNA, 461 bp, Diabrotica virgifera
gatccgatccacggagcacctggtgcctaacgcaggtcttcttctagagtttcaacaggtttcggaattaaatagatgacatcaaagcaaaaaacagagaagaatggagaactcatggggaggccattgtccaaatatgacatttattaaaacacttgttaaaaacacttgggtcgaatctgatggcgtattggcgtaaaagcgaccccaaaaagcaatgagtaatccgttttcatcaatttaatgctgaaaaccctcgaaactccagaagatgacgtgccatagtgcctgttcggtaatatgcatgtatgcgtgttcggcaaccccaaaaacctaagagtaatccatttgattcctccgaaaccccagaagataacctgtcttaggcaccaggtgctcctgtgtctgtgctgatcacgtattcgtgttcagcaaccccaaaaacctataactaatccgtt

SEQ ID NO: 14328 - DNA, 461 bp, Diabrotica virgifera
  SmartBlast Evalue=6E-11; Info="39S ribosomal protein L34, mitochondrial (Fragment) n=1 Tax=Harpegnathos saltator RepID= E2B929_9HYME"
aaatgcacataattttaaagtagagattttaaaaattaaaaatatttagtgagtctttgtatgaagtaacagcatttattataaaaatttagtccacaccatgagtattgcaggtttaactagaataattcccaacttcctgaatcgatgtagcagcccatttttgaagtcggtttcgcctgttcaagctactgtgaccgaaaacgcggcggatcttagaccaggaggcctatttagtattataacccgttccattattcgcgtacactttccaagaccctctgagagaaagagaataaaaagacatggatggaatgctagaatgaaaacagcgtccggtagaagagttctaatgaataggatattaaaaggaagatttgtatattcacattaaatgtaatatgtatgtatacctataatgtagagtttttagtgatataataaattagatatttatagtt

SEQ ID NO: 14329 - DNA, 459 bp, Diabrotica virgifera
acatgttgatactataagtcttccactttcagttggcacccgtagacgtagaattgccttatcttcattatttcctatctttaggccgcgtcattagtgctcgctggtttacgaagtcagcgccgaatccgtgtgcaaataaatccttcgtatttaaacgggactgcccaaagtgcacctgcgcgctgttgttaggattattcgcacacggactctcctttctaactcggaaaccagcgtgcactagggatgttcgatactcaccaaagtatcgatacatcgtatcgatacgtattgttaggttctgtatcgataccctatgatatcgtaatcaaaagtatcgatattgcaagtatcgatacacaatatcaatacctttattatgacatatacgcatgcgcagtatagtgtccgtcctttattttgtcctgtaataaaatacagaccacgtaccaccat

SEQ ID NO: 14330 - DNA, 458 bp, Diabrotica virgifera
gcgtcgtgtctcgtcgcgaacaaaacaagttcgcacttcgtcgcgtcttgtcgtagactgattaacccgaaaacgtaggccacacacaaatacaaccattacttgatattttcgcgtcgtgtcgcgtttgtcgttcagctaggacaacgggttagacaagttatcgttaagccgcttatttgtcaaactcgttgttaataaatgtttttgtcgcttatcacttttatttcacgtgtgcacaacccttcatttcgtgttaattaataactataaaacccgaccaaataaattctcagaaccattcgcccaaaaagttcactagtttgttaatatcaaaggactctattgctttggaacatatgcgcgtggtcctaaaatattcacctatgtccaattaggcaaaatgtaataattaaaccctttcaccactgttggggttagaatacaaactcacacca

SEQ ID NO: 14331 - DNA, 464 bp, Diabrotica virgifera
  SmartBlast Evalue=2E-10; Info=Putative uncharacterized transposon-derived protein ZK1236.4 (Fragment) n=1 Tax= Camponotus floridanus RepID=E2AU36_9HYME
ttaacttttataaatcatattaattcaatagctgtaaagagtagtagaatgcttggttttgtgctaagaaattgccaatacttttcagttcatactgtcagggttgtttattgttctttggtcagatcaattttggaatactgttcaataatttggtctccttattttcaaaatcacatgatttatttggaaagagttcaacatagattcttaagagtgtgtgcttttaaatatggacttactatagctaatcataattacatggagattgagcaacacatttcattgactccattaagcatccgtagaaataaattttcactattattcttatttaagtaagttggttaatggtctgttagattgtcctaatatcttagaatatgttactttccacataccacgatcgtgatctaaggcaacaaccaactttttttgaattccctttcatagaacaacttatg

SEQ ID NO: 14332 - DNA, 459 bp, Diabrotica virgifera
tccacattctctaaaatacttcacttgagaaagacaccttaatgaatgccgttaattattaaaaaatatatatgaatacttagaaacagcagttgtcagtgttttattaataaattaaaatacattttttaattattcacaaaaatgatatacaaaataattttaacatacttttactactaaagcatcaaatataaattgaaaaaagtcaaaacgtccacttgaaaataattgtaggaatactcgtctgaaataaatatacactaaatattaaaaccatatcaaaatggatattcacttgcatttcggttaaaacactttttacaataatttgtctaaaaaatttagctaagtgatcgacaacagaactaggagtgccaacatactatcaattacgatactaatttagggattttcttttttgaaggttttcaggaccaatcttataaaaatattcaa

SEQ ID NO: 14333 - DNA, 459 bp, Diabrotica virgifera
gtgactaacagcaatggaacttttttatttcacaaccaagtatcagaatcgtataatgtaatgtcgttataataaaagtgtataaataatttatttatgtattaaacgtctttagaatatttttgagttaatttaatgtcgatctttaagagtaacctcagggaggatttgatacttgtagtagaactaaaaaatttataagtcgacaagtttttatcgaaagttcctgtctagatactttttcagttgtaattattataaaaataaaatatttttatctgtaattgttctaattgtattgcctacttgtgcgttaataattatttttcatgtactgtataatgatataaattaaggttgtaccaagttattatacagtatgaaaaggacttgttcagaagttaagaacatccgaggacattaatttattgatagagatataatgttacggatcctggc

SEQ ID NO: 14334 - DNA, 461 bp, Diabrotica virgifera
  SmartBlast Evalue=8E-29; Info=Tigger transposable element- derived protein 1 (Fragment) n=1 Tax=Camponotus floridanus RepID=E1ZV89_9HYME
tgttggatccagccacttggatgtactgcatagatactccctggtggtgctccgcgtataagctgatcatttctattttttcttggaaagatcaacaatggaggaacaaattgccctcctgcgctcattgctgcaaccatagtcactagcgaacctctctcagcagatgtaatggcggcaatctgacgctttccttttcgtccaatgactttaggaattctcgatggtacaacggaaagaccagtttcgtcgacgttgtatatttgatgtggaccatagttaagtttttcatattgtgcctcaagattatcgaaaaatattttgatattttccttgttgaaccccaaagcccttgcaaaagaggttccagttggtcttcgcaatgacagttgacttttgtgtcttcttaaaaaaccatctaaccaggtacgacccgcaataccatttttaaaaggattgtt

SEQ ID NO: 14335 - DNA, 461 bp, Diabrotica virgifera
  SmartBlast Evalue=9E-47; Info="Titin, putative n=1 Tax= Pediculus humanus corporis RepID=E0VID6_PEDHC"
aatcaagtgacagaattgatatggccgtatacaacaacaaagtttccttcgatacttcttcatctgtaagatcagatgctggaagatacacattaaccctcactaatgatttgggtagcttactacttcagcacaagttactgtaatagacaggcctagtccaccacaacctccactagatgtcagcagtgttactaaagatagtgcaagactcagttggaagatacctttggatgacggtggatctcctattttgcattacattgtggaaaaaatggacgtatcacgtggtacctggtcagatgcaggaatggctactattacgtctcatgatattacaagattaattcaccgaaaagaatattacttcagagttaaagctgttaatgctgtcggtgaatcagaaccacttgaaacaccaaaaagtattatcgccaaaaatgaatttgatgaaccaagtg

SEQ ID NO: 14336 - DNA, 461 bp, Diabrotica virgifera
  SmartBlast Evalue=3E-18; Info=Histone-lysine N- methyltransferase SETMAR (Fragment) n=2 Tax=Harpegnathos saltator RepID=E2C2B2_9HYME
aattgcgaatattataagaacttatcgggtcaacttattgaagaattgaaaaaaacgaccgaatttggccaataaaaaagttccttcccactagtataatacaagggtgcacacatgtgcggtttccatggcaaaaaatctatagattaggctacgaattacttcctcatcggccctattctccagatttagcccctaggcactatttcttgttcccaaacctgaagaaatgggccggcagaaagagatttgactttaacaatgaaatcatgaaaaacaaatgcctattatgacctcgacaaatcaagttttgcagaagggacaaaaaaattggagaaacgttgaactaagtgtatcgaactaaaaggagacgttgaaagagttttattcaaaaagtcgcggacttattgactcgccctcttatttatggctgattttctattaaattgaatatattttag

SEQ ID NO: 14337 - DNA, 453 bp, Diabrotica virgifera
aaatggtctaattattattttgtaaattaaaactttattattctaaatgggaaaaaaactaaaaacaatccgatcacaactcacattttttatatcgatttttttgcttttttgatgatgtatttcttcaaggttatgatgtgtttatgtcagtatggatagacacttgttaaattgaaaatcttaatatatgtttatttcagtggatgtgagattttgtttgtattacagtctatactatagtttgtttttaaaccaagaggagtgattcaaatttaccgcgctgtaatgcttgtttgtaattgctccaaccgcaggcaagtttactccactgttataaaaattttgacactaatgacagttatcaaattttgacacaattgacatttcataggttaattaagttatatcagcgattttttgtattttctgcgttattcctttaatatttag

SEQ ID NO: 14338 - DNA, 460 bp, Diabrotica virgifera
aacttttgtgaacattgtattttgtataataaaaatggtaatgtgctttaccccagattgtaaacactatagtaaaagagggatatgtagattctttgtctttccaaaggatctggttgaaaagaagaggtggctttactaaggtaagaaaatatagtaaagaaagatagctgaatttatcgcctatcccccacggcttacaaataatgccaccatgagaagtactgtcgaaatggcatgtcccctcatgtcatgtcaatcctcccagcggataatccacaatcgagggttgaatgaattgaggtgagaaatgcaaagctttaaagcgccttttgtgtgcttaacgcagaggtgtaattgaatgatgacatatttacaaagaacggacagatatcaaaatttttatcgcattggagtaaaatttttggtcacgtttcttaatcagaatctaacgatttaa

SEQ ID NO: 14339 - DNA, 459 bp, Diabrotica virgifera
  SmartBlast Evalue=2E-38; Info=Cytochrome b561 n=1 Tax= Harpegnathos saltator RepID=E2BWT9_9HYME
gaaattcaaatatggaagctagagctgaacatcaaaaagtgaaacaataccaaactttatatacatttacaacatgtataggagtcggagtttgcgtgttaatgctcgtctgggttcttaattttagaaaaggacttgcttggcagtcacagccaggtcttgaattcaactggcatcctcttctaatgagtataggaatgatcttttgttattctcaggcaattcttttatacagaactgggagaaactatcaaaagaaaaccctcaagattcttcatgcaatgttaaactgcctggcgttcattttagcagttattgcccttaaagccgttttcgactcgcataatttacaaaacactccaaatctgtatacgctgcattcttggattggactggccactgtcatcatttttgccgcacaatttttagccggattcatcaccttcttatacccaggat

SEQ ID NO: 14340 - DNA, 462 bp, Diabrotica virgifera
  SmartBlast Evalue=1E-58; Info=Serine/threonine-protein kinase rio2 (Rio kinase 2) n=1 Tax=Aedes aegypti RepID=Q16QZ9_AEDAE
gttgtgatttgtgatttcatttcagattacaataactcaaaaatgggtaaactaaacgtttctattatgagatacctcactcctgaagattttagagttttgatagctatcgagatgggtatgaaaaaccatgaattagttccagctgccatggcagcttcaattgcaaatctgcaacatggaggagtgaataaaatccttagagaactctgtaaacatcgccttttaagttatgaaagaggaaaacgatacgatggttatagactcacaaacacaggttatgattatttagcactccattcgctcacaaagcgaaatgttgttgcctccttcggaaatcagattggtgttggtaaagagagtaatatatacacagtggcggataccgaaggagaacaattatgtcttaagttacacaggttaggaagaatctgtttccgaaaagtaactgaaaaacgagat

SEQ ID NO: 14341 - DNA, 461 bp, Diabrotica virgifera
  SmartBlast Evalue=2E-27; Info=Female neotenic-specific protein 1 n=1 Tax=Cryptotermes secundus RepID=A6Y7R8_9NEOP
aattggtgtacatattaatgcaaaaattattgttaacactcctaatggacaagttatgggagcccaagaacctggtactgagggaaattcattttacatgttccaacaaattccgtatgctaagaccccaacgggatcattgagatttcgggaaccacaacctgtcgataaatgggaggaagtctttgacgcaactattgaaaataaaatttgttatcaacaaactgccgataaacaatggggagctactgaagattgtttatatgtcaatgtttataccccaacgtatccatcaccagacctagaaatcccagttatggtctatttctatggaggaggatttataaatggctctgctaatttccacagttacggaccacaatactggatggaacaagacgtcatcattgtgacagtttcatatcgagtaggaatattaggatttctttctactggagata

SEQ ID NO: 14342 - DNA, 449 bp, Diabrotica virgifera
ttgagggtttcatcaaggatgcctatgatgcacaagtactgaatggtgtactgaacaagtagtaccgccatgtggtgttagttcaacataggcaccgaatgtgttaactttgttttaagatgtcaaactatacaaacaaatcataaccaattcatagtacatcccaaaattttagtttaaattaataaagtatgaaaccactcagtaactcaaatacagtagagcgtcgattatccgaactaatttggggacatgggtgttcggaaaaccgatttgttcggataatcgaactatactgagattgtcatacatatttatccacaagtgaataaaaaccatatttatataactgtatatttgtttataccttgataatgacaaatagcaattaaacaaaaaagtgcagtctttgcacaacatatttttggatacacaattgaagaaaattg

SEQ ID NO: 14343 - DNA, 451 bp, Diabrotica virgifera
gacgattcgggttcaaatcgtggccctgaaaatgttttttgtttttaaaattgacatttttgatttgaaaaataattgttttttgatagtaccacgtttttattatttatacgacacaatataaaagggtctgtatgtcttttatagaatcgtaaactttgcatttgatcatatatattcagctgacgcttttttcttacaatctaaaattcataaattaatgatttatactttttatctttgccaaactacatagttcaagaatatttttttattattaactagctgacccggcaaacttcgtacctccttagaactaaaaaataatgtttaaaagttaaatacctaaaaattaccagaaagccatcaaatactcaaaaatattgcgtatacgtttttctaataaacaatattgtttttgtggtgtctgcgtaaataatgattacttaga

SEQ ID NO: 14344 - DNA, 451 bp, Diabrotica virgifera
aatctatcgtgacagtactttcacaatgttaacgggtaaaatgacaataattattgtaattctaggttagtatgtttcaacgacgtaaattttatgtcattttatgttattttatgtcatttgtatattcggacatttttattctatatttatttatttgtttcttagaatattttaaatattaatcttctggcaaatatttatataaacataaatataaatattctgacaactgtcagatttaactaaaatgtcatgcagtgatgcacgacattcttaaaatcttatatgacgtcaaaattaatgacgcactgaaaaaaggatttgggataaactgtaggtaagtacagtccataaaatatagataccgttgacgtcattatctacgtcagagatctaagttgacgttgttgccaattacaaaaaattcttaattcattttaaatcaaat

SEQ ID NO: 14345 - DNA, 458 bp, Diabrotica virgifera
  SmartBlast Evalue=2E-32; Info=SERAC1 n=1 Tax=Culex quinquefasciatus RepID=B0W7Z3_CULQU
tacagcgtaccgcataaagggtctaccttagccgattttactttgcccttgttacgaagaagtgttgagttgcttgaagtacaaagaaattgcgatttcgtattggacctacacagacgtttttgttgaacttataaaacaacaaaaaccgacaatcgatatatttagctttatagaaacatcttttactttgatgagtgttgtttttctgaagatcgtcgcatacgaatctgcagatgccaatattggtattaaatgcgatgtacctctggatcacagggaaatctgcaaaccagctggacgggattgctttttatatttggaattagtcaagatgattcaaaaatacagtaaaaatgatccttatctccaaataacataaaaatgtcctttccatatgaaattagttttaatataatggagaagcaactatatctaattttaaatcttgtgatatt

SEQ ID NO: 14346 - DNA, 460 bp, Diabrotica virgifera
gcctcaggttcagaatctatttctatcattacctcatcctggtcatctacattctgcatttcaatacactgatgagaagttgtgggattttatttttcacgagtcgccagctcagtcatggattggtctacgtctaaaggactagtttttgaagcaatatgttgcagaaaatatgtatttggtaggtttctggcaacattacagccatctaatgaaaatatcgccgtttggctgagccatgtggccgaaatcttactggtatttgaacaatattgctctgtatttcctctttatttcatgtactctgttgaaatttaatttggttttttcaaaacatacaaagaaaagatgaatatgcggtgaaatgaaatcacaatgaggtttattaatgcagtacacttacatccagagttgtggaacttggcatacttctggaactatgagacaaatggaagagtag

SEQ ID NO: 14347 - DNA, 459 bp, Diabrotica virgifera
ctttataaagggacataatacttgcagctaaaattgtttgcatagtttgcaagtatttatcttccctaattttatttttatcttttatggcagataaaaactcagaatttaactgaggtgggcaaagtctttcgcagtttgtagcaggtaagaatttttctgtaagtttacccacaatacttttgtctaagcctttggaaagagaatagtttagcctttttgctacatctggcaacatttcagaagcattaaggttagtttttaatgggtcttccccaattaagttaatcatatttagagaaatagattatttctgtgtaagtacctctccaatgaaaaattcttctctttgttgttgggactcctcaataagtactgctggttgtaaaaccaaaatcctcaattatgctcaaattgcattggatctcattgtctgtattatttagtgaaactgacggg

SEQ ID NO: 14348 - DNA, 457 bp, Diabrotica virgifera
gatagataaagaaattctttggtattactatcgtttatatatacgtttaaattttaagactgcgtagttcaaattataattatccatcgaaatggatattgccaaagaacatagagcattagtagacagcattgctagggaaaatggcttcacagattatgaagtaataaccagttctggatcaagcaagggagacaactttctgggagttctgactgcgattaccatcaaagacaaggaaaaaagtttggatttgattttgaaatcttcccatacgaataagggttttagagaagctacacccattaaagaaatttttagtagagagatatacatatatgaacaagtttttaaagaatttaagaagttccaagaagaacacagcattgaagatcctttcgagagtgtccccaaattttattcgagttttgctgaagatgaacttgaaggtttagtt

SEQ ID NO: 14349 - DNA, 460 bp, Diabrotica virgifera
  SmartBlast Evalue=3E-16; Info=IFI30 protein n=2 Tax=Bos taurus RepID=A6QPN6_BOVIN
gatgttcgtatcaaagttggtattgttcttcgcagccactgtgtgcgtgtcatccagcgtgcagggagctgatctgactcttactgtgttttatgaaggtctatgtcctctttgttatcaatttattgtaaatcagctatatccttcataccctaaattagcagatagcttgaaattggaccttgtaccctatggatggagttcttccatccgtggcaatgatggaaaagtaacatttgaatgccagcatggtgacgatgaatgtcatgttaacagaatacatgcttgtgttcttgatcaaaatccatcctcattagactacgttactttcatatatcaatatttgtccaagactgacctacgtgatctcaacgaaagacaagaattagaactagcccaaagtttgttgccaagcagcctttcctgggacagcgttagtgattgttatcatggtgaacga

SEQ ID NO: 14350 - DNA, 460 bp, Diabrotica virgifera
  misc_feature (383)..(383): n is a, c, g, or t
  misc_feature (443)..(443): n is a, c, g, or t
tggtatacatttttattctaagggtttaactttattgtcaattttctactttatctgtatctaaacaaactcaagaagttcgtaagcaatggagttttagccggtttcgacatattcttgaattttctgaagttttgttttgtctagaagttttcacttttcctattccatccaggtatgtactgattacgatagccactaggaatgtatattttttgctgtacccctaaaccatttatcataattttttatgttggagtacgagtatccggcgagtacgttggtaaggggaggtcagttaaactttagaaaagttaataatgatttagacgtaacacagacctgctggaatagttgtaaccagaggaatttcgattttttanctagagatctcaaagagatcaaatatttgtttccgaatatatactatcacactattttancaacatctaatcatgta

SEQ ID NO: 14351 - DNA, 456 bp, Diabrotica virgifera
taaatattttctttgctttacataagtttataattttatatattataaaatattatattttattcttttttgtgacgctaatgatcgagaaagtataccaaaatttgggaataagtagatcatgtcacttatcacgagcaaaatccgtttctatctctcttcaaatatttccgtgcatattttctcctctaataagagtcttacatcttcactacagtcattgtatgcaatgttatatctttatataagatttaaggtgtacacaaatttatatacactatatcttcatcttacccagttataggcaactatagaacctactgtcttgctctctgaagtaaaagatgcgattaaactgatacatagaaataaataccccaggaaattgactgaccagaagaaatagctgtagtcaatattgataccaatggctattagttgtcgaggcattaagct

SEQ ID NO: 14352 - DNA, 460 bp, Diabrotica virgifera
aataattgctgtccacaatgatcctgtgcatgctgttcctgtctacaacacagttctctatcatcaatgcagtaagttacgtgtcaaatcaaaccatacgtgaagatctcaaaattcaattcaagatatcattcagtcaagagctataaagcacaatatctggataaaagaccataccaaccaacttgtagggagactatccaatcaacaaataatagaaagaagactgaagtaaaactggccagatgatcgaattaaatgaataccagagaactgccactaggcagctccctcacaataatcacaatctacaaagttgtttattattccattgtttgtagagtagattctaaagggtagattaaaataagagaaaattgaaattcagatccaaatcgaagtcggataattaccataatgattattagaaataagataatgttccatagtacaacataca

SEQ ID NO: 14353 - DNA, 460 bp, Diabrotica virgifera
  SmartBlast Evalue=8E-43; Info=DNA-directed RNA polymerase I subunit RPA2 n=1 Tax=Harpegnathos saltator RepID=E2B687_9HYME
gcccgttcaaccaagaatacattttttccttaaggatttgtaaatataagtgaccacctaatagcagctcctgcatcattacagcatcagcaccttctaccttgcatttgtcctgtgcgaaagaaaacagtttctgtgccatgaaaactagcatgttaaacttatcctcgttgttgtctagatgaattaatatacactttttcaaaatgaactcagctacttctttatctgtcaaccattctggacattcatagaatttcactcggaacattttgcctagatacagacgacagtcttccgttgtgtgaaggttttctctgtgaactatacgcagcatgttctgtacacagtctacatagtatgtatcatcctcgcaaccttgaattaatctttgataaatatactggtcgctgtaactacacagtgctttcagaatcaagcataaaggagtataatatag

SEQ ID NO: 14354 - DNA, 455 bp, Diabrotica virgifera
atagctccaaaaaatgtctcaattttgctttatttgcaataaacttttaagtgtagataaaatagttgtggttcatcgtgaaatgctaaatttaatcgaggctagtgtcgcgagaggtgatgagtttaccgagtatttaagaactcgaaaatccgttacaatacacgtggattgcagaaaatcatacacccggaaaacttcaatcgctgcagtaaaaagacaacgtgaggacgaacaggctagtacttaaaaaataagtgcacctcatactagaacgcgagtaagagaatcaaatttttgttttaaaattaataaacttacctgcatagaagtcggcccactcaaaaacttggtcatttttgatgtctcacatttcccaaacctgttggccgatttaagtaacctttagaacatgtacagcccgattactcaacaacaccactgcaataatatta

SEQ ID NO: 14355 - DNA, 460 bp, Diabrotica virgifera
agttgtgtaggattcggaaatccaaaatgtgatggagtaaagtgcgaacctgtaaaatgtggatttggagcaaaccttaaattgaaggaaggtgattgttgccccagttgcgaaggattcggaaatccaaaatgtgatggagtaaagtgcgaacctgtacaatgtggacttggagctaatcttaaactgaaggacggtgattgttgccccagttgtgaaggattcggcaacccattgttacccaaagataacccatgcaaaggtaaacaatgcactgttgcagtggctacagactgccctcctggatctatattgaagatgaaagatggtaattgttgtcccacgtgcgaaccattcggtaatccactgtcaaagccttaaaactgaagaatggatattgttgtgccacctgccaagttattttagataactaataataaatcaaggacatatttcaact

SEQ ID NO: 14356 - DNA, 451 bp, Diabrotica virgifera
aagcttatgcacatgttcctgatatttggctagctgcagcagcctattacgtctcccgcgatactaagcaatctttggctctgatacataaaggtatcacaattcatcccagctctcaatcactacaattagaagctattcaattagagcttttacaaagacaaaaaaatcagtggcccagcgatattcaaggggataccctagatgaggtctattacaaaaaaatagaacaatatattgatgctatagaaaaaaacattcacgaccatgcttgtttaatcagcatattgaatatattagatccacatgtctttactaaaaatattcagctcagaattatagaattgttaatgtctaaatattccaatgaaccagatgtatggcattttttggctgaaagagaacaaaatggaaagcactatcctttgccagatgagcttagaacttcaac

SEQ ID NO: 14357 - DNA, 452 bp, Diabrotica virgifera
ctagtcttttgcgaaaacatttgagtaggtatttgagaaaattgagtattccattcttcattttgttaagccaggggcaagggcttgtttagtggttcacggggtttcagagtgtattcttttgtattttggccccctgaattcgaacttgcttttggtataattcgtgaactaacaaataaaaatcatttttacaaaatgcaattagttccgttacaaaaatctacaaaagtgattccaattgccaaaagggaaaagacgaaatttttctagacgaaaagaaagtggataggtgaccgtgtcctttccgctttcttctataatcgtcgtctgttgtgcttatgggtgattccatttcaaatcactcaattttggatccaaaaaacttttggatctccgatttgtctgaaaattggtatacagcctctgcgggacgtaaaaataagatattt

SEQ ID NO: 14358 - DNA, 461 bp, Diabrotica virgifera
gtatcatcttctacagctgaactttcatccaatattttactgtcatctttatcagatatttcattatcgttcttatcttcatcttgatctgtaacttctttttcactttctagttctattgtgtcatctttacgagaaatttcattttctgttgtttgatctgtatctgagattgcaaggtttattgtattttcctcatcggagtcctggttgttttttctgccacattgatcgacattatcgtcctcagtaatatcttcttggtctaaggtttcggtatccatttgttcattttctttagctacgctttcattctcattattttctacatcattatcgtcgactttctcttctgctgtatctaaactttcgttttgtacattttcatcttctttatttaaactttcgctttcacttttatcttctttatccgaactcgcatcatctaccttatttcacat

SEQ ID NO: 14359 - DNA, 453 bp, Diabrotica virgifera
atattaacaaaatagaataataaaaacgtaaaaagcctagttgggctctaggtgggtcacgtgaccacctagggggctaaaaatttcagaaagtggttctttacatgtgctagaaagtggcctatatatttgaatcgagttgggggcatttttcatcatcttacctggttaagccctttgcaattactaccatttatttttatagtgaatataagaaagtattttaaaatatgttttgaactgtaactaacattaagtaaaaattgcaaaaaatatgataacaactcaattatctaagaccaaaagtgtgattttgtatatcctttatatttctattttatttaaatcaataagttgtgtttagttatttcgctattatactcaaatgcaatgtaattgagtaaagttcttctactataaaatacaatttaaattaggcaaaatgtgctcgat

SEQ ID NO: 14360 - DNA, 458 bp, Diabrotica virgifera
gtgtttggtgatatggattgtacaagcgggggtaaaccccccgaccctaatcctacaggagattcaggtgaccctgggtcgacaatggatcatagcgatatttccaataatttgataacaaataatcaaaatattatttcttcgcaaaccaaataccggtagttaaagatttggaagttggcagcaactatttggatcacattcaagcttatggcctaacattttccagcaatctatcagaacctataagtacaattagagaagctattgcagagtatctacaaaacggtacgggttatctatcttctgctgttccatcttcagtcctaggcttttatcaaactaagctggaacctgttaaatattatccagacgtagaactaggtatgtcagatacgaatctgacacttgatgcaaagttcagttttatgagatggcgatcagaggtatctgctgct

SEQ ID NO: 14361 - DNA, 455 bp, Diabrotica virgifera
ttaatatattaatctaagtgccatgtacgcgataattgtgaaagtatcggaagtaagaaagaaggaaactaatatttcatcaatagaacgtcaaaatgatcagcaaaatcttaaaaaaataatcatggtaaatcataaattttgtacttactaatattaaccatcgattacaatttaattacttctttgcgttgtaaatattacacgatagaaattaaataataaatttaaaaacttccaaccgaagttgcattagtaatcctctagttggcgataccagcgaagctcacagcgtgtagtgacttcaaagtggcgtttgttgttaataatccgtccaaatataatcagcgtgaggtcatatcaatgttaaccttctgtgggtaaggtcatgttaacatgtttttcaatcatgaaggacccttgctcatggagtttacggaacctagagagcgtac

SEQ ID NO: 14362 - DNA, 456 bp, Diabrotica virgifera
taagacatttgtcttatttgtcttctttggaagacgaaatcgttcggttcagggttgttttcagtgctgatggttgcttgtggttgagaagagggttgctgttgagaagattgttgtttcggttgtttgggtgcttgcttagacggttgagttgggactttgggtatggcaccgtgaatattccgagcgctctgtcgctgaggaccagcctgtgctggtgttcttagaggcggaaaatcattagcatatcgctgcagaagggggttggaggcgtcgtcctgctcgatgcgaaggtaggcctcgcgatacctgttgcggacgatttccatctccgcgctaagcgtctcgaggtctagctccgccgtgagccggttgtaacctctggctggggtacagtgccttcctgatgtaaggaagagaactggttggcagtagtggtggctgtagtggtggtgg

SEQ ID NO: 14363 - DNA, 459 bp, Diabrotica virgifera
gaatattagctacaattttatcatctaaatcgcatactctgcaaacaaactttaatttagctaacaccaatacaagatacaacccagcatctctttacctcctgtttatttctttgtttgttaccctactgatcatcctttaataagtttcagctctgtattctatcgtttacgtatgctttttctcatgaggatctttcagtgcgtcacagtttttcgatttctttctaacgcattaaattgtatgtgacagaaaaaacgcacgtcggtgacatttataagatttattctagttgtcaacagatggcgctataatcgaaaaaaaaatatttacgaattatataatatatctacgaatataatctgtacaatttataagacgatacaaatcaaagaaaataccattttataaatgcaataaacacaattgatttgtttttattgccaaattagtcaaat

SEQ ID NO: 14364 - DNA, 458 bp, Diabrotica virgifera
ctcccccattctgcttatgttatttatgccattcttttttatatttggcgtacattcgtttaatacattatacgttacattttcttttaatgtcttcactcctctttcgatttctcagcgtaggtattcctgtaattattcttctccgtactctcatctttgttgtttccagtagtctttatgttgtggttgtatgcggtcttgtttttaatgcataatatatattactggtgttatactggctttataaatttttgacttcatctcagtgttaatatgtcggtttcgccatatagtgttattaagacatcctgccagtatatttgcttttttacctacttgatttcttacttctttgtccatgtctccgtagctggacagtgtaattccaaggtattttatttccattacttattcaatatgatgctatcaatttctattttttgcatctgattagt

SEQ ID NO: 14365 - DNA, 459 bp, Diabrotica virgifera
cctaaatatataacccgaatttttatcaaaattatactctacatcgtgtataacatttacaggatgttccaatgaaaataggcacacataatatttacaacagtagacactcggtgaaatcatttgagttttttacaaaaatttaattctacaatatttatataagtatataataaatttttttattagatatgtatgatttctttaaaatttacaccaaattatcgaccctttgcacagcagacggccgaataaataatttaccgaaatccatttgaaatcatatgatttaatttaattgacttattaatttacagttgtagtacaattaattgttagagtaagtgtagcccttgttttcattaacagacgtagttcctttttttaacaggttcagtgttagttaccttgtaataaaggtgtgtacacaggttaatcaatactgtgaatcctgtgaag

SEQ ID NO: 14366 - DNA, 454 bp, Diabrotica virgifera
  SmartBlast Evalue=2E-57; Info="Eukaryotic translation initiation factor 3 subunit, putative n=1 Tax=Pediculus humanus corporis RepID=E0VTU9_PEDHC"
aaggttgctgtcagttatcacttggtagccaggacacaaagttgtatgggtaacttcagatctgcgttaaacagtgaaaaggaagcctacgcaatatacaaacagcagcttggcgataatcacgacaaaaccaaagaatcttcggagtgtttaaaacatttgacgcagcaagctgtagtccttcaaaagaagatgaatgaaatatacactgggaaaaatggagctacactgccaccaatacaaattcaaccgccttccatgggatctgtgttagatatgttgaatatcattaatggaatcatttttgttcaaattagtcaagaagatattgaaaattttaaggctgaattagaaaaaagacagaatgaagaatctgaagaactagaaaatcaagccactcctgcagcagtagccgaatcgtagttactttgaaaaatcgtagtcatattatagt

SEQ ID NO: 14367 - DNA, 459 bp, Diabrotica virgifera
caccattcaagtatttccgtttctcaataagtatactacttcatcttggcaatagctactatgtggcccaggaaagaaaaaggttgaatatcgctggtttagatgttagtatttgtttgtctttgactgaaacaagttgtatttctattgagtacgtagataaaaatgtaattataacgtcagtttagattcatattatggatgaagcaattccagcatctcgaccaaaatagtacaatgtaaataaaactaacgatgaatgtcaataggtaaaatccattttgcatttaaaaacgtatcacagcatgaatttcatattggcggtaacaatgaccgggacctccatcttcgaaagctgccaggccgacactgcgcaatgcagcgatgctaaactagtaggataagcgagagggagagttggtgtgtaaggcagtgttgccagatttctcccagcacgtc

SEQ ID NO: 14368 - DNA, 459 bp, Diabrotica virgifera
  SmartBlast Evalue=8E-42; Info=Thiol-disulfide isomerase n=1 Tax= Glossina morsitans morsitans RepID=D3TNT0_GLOMM
gtaggtcttaatgcaaggttgataaatcagtgtattttttatttattcttatagaaactttcatactatgatgacttttaggataccaaaaatgtacaacattagaactactctatttttattaactgcgattatttacttaatagaaccaacagatagtggagctgtacagcttactgaacaaaatttagataatgtattggcttccaatgaattagtatttataaatttttatgccgactggtgtaggtttagtaatctgttgatgcctatatttgatgaaacggcagaagcaatagccaaagaatttccagaagctggaaaagttgtgataggtaaagtggattgtgataaagaaagcagtatatcttcaaagtaccacatcacaaaatatccaaccctaaaagtgattcgtaatggccagccagcaaagagagagtatagaggacaaagatcagt

SEQ ID NO: 14369 - DNA, 459 bp, Diabrotica virgifera
gacattgaagatgaaaggtctatatttgtggctttttgtaaatttattaattacctacatctcagctaaggaacaagaacttcaaaaacaagatgtacatactaaaatattgaagtcggtgaagaatacggaacacttaaaaattgtgccaaagaccaagagtttaggaaaaattgctcacatcccagctgtaaaacaacatgtgcaaaaacaacaagcacctacagtatcgaaatcgatgaataacttggaaaagtttttccccaattttatgggtttaggaaaaattaactatatctcagctgcggaacagaaacttcaagaacaacaagctgtattgaactcgatgaataacatggaaacatttttcccccttatgggtttaagaaaatttaactacatctcggctgcggaagagaaacttcagaaacaacaagctgcattgaaatcgatgaataa

SEQ ID NO: 14370 - DNA, 457 bp, Diabrotica virgifera
gttaaatacacaaaagcttggttcaagaagttgtttaaaatatttaatgcaccaatactaatactcagttgatttcttgcgcggtatgcgcaattgaatattaattaataattctttccagttcgatcaacttcaattgaatgtttttttaactttgaagttcactcctttgtgaatgcaataatttttgtgggataaacaccaagaccactaagtgtcaggatatatgaccatgaaatatacataaaaaacagattttaagaaatcacagatatgcaaacattattgttgcccaaatgcaagaccaaaaaccagacttggacagtcttggtcttgcgccagtacatctggtcttggtattgcgctcacggtcttggtcttgcaagtctcgcagttgcctattgcatacctttgaacaacgtaacagagaggtacattttaagcttgaatatcatag

SEQ ID NO: 14371 - DNA, 452 bp, Diabrotica virgifera
  SmartBlast Evalue=1E-44; Info=Protein GPR89A (Fragment) n=2 Tax= Aculeata RepID=E2A0H9_9HYME
tttctgttttcgtggacttctaggaacaatgttctacttaaagcttccaatccttctgtttccaatcgaagttgagaaacattttcttcactcctgtttactcctactgatgataaaatagaccatagacctcttttcttcgttgcatcattaactttttccattgactgttttttagctatcgccagtttcttttttctcaaaacgatcatgtccatagtttgcattaatctcttttctatagttagtacatctgcttctgaaacttccctcataaaataagccatggatgtgtaaggataattaacagcaccaaatcctgacagtaaagccataacagttactcctattactccaattcttgacactagttgttccattgaaagaactccttgttttggattcaatataggaaacggatcaccaattttccaaaatactactagaaatat

SEQ ID NO: 14372 - DNA, 460 bp, Diabrotica virgifera
  SmartBlast Evalue=9E-17; Info=NADH:ubiquinone dehydrogenase n=2 Tax=Culex quinquefasciatus RepID=B0WI09_CULQU
ggttaggttttctttgtcaaaatgtcgaaagcatacgatttagatcctgctgccgttaaagttatagaagcaaaagcccaaagaagggcagatttgcgacaacaattcttaaaattaaaatctaatccttttatccatgcaacgggagagggtggagcagtgtttgatcctgccatgctaaggtatcaagctctgcaggtcagtggtgtggatcacttcaaagcaaacaggaaaactggtttctatggtttagtattcttttgcttacccttagcaggatatttctatgccatgtatagcactaagtggaatcaagaagcaaaattaagaagaggtgaagtagcatataaagaccgtaacttcaaatttatttaaactgtatatttttgagacattcatttttaacctattaggggaattaaaaacattgtagtaatttttaagtgtaaatataaactgt

SEQ ID NO: 14373 - DNA, 457 bp, Diabrotica virgifera
gtaaacctagctagaatgacagatgggcgatggacaaagaggatattggaatgaagaccaacgaaagattttgtcagtttaataattattctatcaatatgtattcgccgtgtgcaagttcttggaggggatacgagaaactatagtgcgcgaattgcggagaaatcttgcaactttcttaaataattcatagtgtcaattgaaattgtcaaattgacgtatatttcatatctactgtcaatgaagaagaaaaattatgttgctccacaatatttatatgatatgcaattatataatgaaagtaaatttaatcaattgtatcccaggcaaccaaacgacatttttataacgtagataacacgccataaaaatgaccaattgacgtgttttatgacgtagtactgacattgaaaatcacgtgcatttgtctcattgatttgacgtcataattgtgacg

SEQ ID NO: 14374 - DNA, 455 bp, Diabrotica virgifera
gactctttgataattcactctttgtgctaacaaactatcgtcttatctgttgttgagacacatggtgtgttttccgatatcaatagcttctctgaatatttggttgtaatcttcaggagtttctgctattgtaaccttctcgtttcattgaaacactcgggatgtttctcgatctcagtggcttcttgtagtataaggcttcctgtttaagacttagggtcaagaacgagttctgaagaatactgcgaagagcgagtcaaagcccaacgtagccaaaatcaaagctgctaaacccgggaactgagtaaatttgatattggttattataataatatgggacttacatgtaagttccattttactgaccgcggaaaccttttcgaatatttattttatattggatatctctagatattaatttgggttttttacctctgcacattctaattatttaa

SEQ ID NO: 14375 - DNA, 458 bp, Diabrotica virgifera
gatgtcatatctcccaaacctgttgtctgatttaagtgattcctccaataatgttatagccttattccccgacaatatcgctacaataatactgttgccaaacaggtaaattctcattgtatactgggtgcaaactgtgttattttcttaaagtttgcatcaccctgtggaacattccagcatttgtagtatactgaaattaaaacctaactatagcctcacgctttctaaacattttgtttttttaccgattcgcctatgttggataataaaaagttaggtgccccaacaacgagacatgttttttatcaatacagggtgtttttaaaaaattttggcaaagtttaaggggcaattcggcttgaaaaaacaatgacagcccgctttacaaacttatgtccgcaatgcttcgttctcgagatagagggtgctgaaattcctctgacaaactgacgatc

SEQ ID NO: 14376 - DNA, 459 bp, Diabrotica virgifera
cccttctcgaagcccgtgttccttgctatccatgtgttcctcttatcgatatcgcagttaaggaatgagaggtgggtcgagcgggtaccacacttgaaatgcaagattctacccctatggcataggaaaaacagatgagatgcatcgagaccagaaacgtgtgtgcacccatcgacatcgttgttcgttagttccctagtttttcgcattcgacaaggtgtatcggtaagtggttttaattacctatattattttcctttattatatttcctttgttttcgttttgaaattttaccaatcagattgatttgaatatgtgtatttattgggcctattgagaaagttcattttctttccatattagagctatcagaagggataaaaagattcatagcaggtgttgtaattagattttattacttgtttcgttcaatatctgctagtaaacatacaccgatt

SEQ ID NO: 14377 - DNA, 457 bp, Diabrotica virgifera
tccgtgtatattaatattatacacagattgtacaacatatgacaggagctcgaaacaaatgacaatcgatgaaaggccctattctatcactctctacaactaggttctctctatcagtctattcctcctaccgtaacctatctcactatccatcactaccttcgtgataacgtctatcagcttttgctgaagaataacggtataatttgcttttaacctataatgtcttttttatgtcttcttctttttgtatagacatgactctctgttttttcgatattcctccagtatgttgggtatatggaataataggttatgggaatatatgggttgtagagccaatgatggagtaatccgacttacatcgagcatactgacagatcacctaaaccatcaaagaacgcaatctagaatatcttatatagttattcgcgagctcaagcgagggtgctgccgc

SEQ ID NO: 14378 - DNA, 456 bp, Diabrotica virgifera
catacatgtcagcctcatcagtcaaactataggaagatccagccgagtccgtggagcaaccaacgcttgggggacttataggactgcccgagggaggactatgggagatatcccttccatgagagcggtaaggagctaaatatggtctccacgacgtgagttgatggttaccctcgctcgtggtgcgcggtctcgatggcatactgtcgcatctttcccgactttgagttgaaaaaacagaaggagcagtagtggtcttaggaacaccggaaacaacttgttttctgtagctattattcgttggttttgaggattctgtagctgaggacgacctaacacgcatttcctcaggttttggttcattttgttttcattttgtttgttcatgttgtctttggtgggtcatggcatggtaaacggtagtgtgtatattttgagcaattgtattatcctctg

SEQ ID NO: 14379 - DNA, 458 bp, Diabrotica virgifera
  SmartBlast Evalue=2E-37; Info="DEAD box ATP-dependent RNA helicase, putative n=1 Tax=Pediculus humanus corporis RepID= E0VWC9_PEDHC"
gaaagctttattctcaatgatcaactgtgattgttctacagcaaaagagttagttccacttattaaacacacatctatatttgtatcctgggaataggttttaaatgtcttaaacacctgcgtagccaagtcctgtgttggtaaaatgaccaaagctcttattctcttcacagtgtacttttttaatgcttgaacaataggtaaaacatatgctaatgttttaccacttccagttggggctgatacacaaatatctctagggaatatcacatcagaatgtctagaagtttctagtagccatggaattacttctgcttgaacagggaagaaatattgtatattatttgctttgagtaatttacgaattcctttgtctaattgttttagatcagaaactttggtttgtaggtcttgtaagtttactgatataactgttggatttgataaccatgatggaa

SEQ ID NO: 14380 - DNA, 458 bp, Diabrotica virgifera
  SmartBlast Evalue=3E-51; Info=Protein TRS85-like protein n=1 Tax=Harpegnathos saltator RepID=E2BS50_9HYME
cccatcctgtattttcgtatacttgatatgcctgtttgtaacattttaaagaaaatttccgttgtgcggctttagcaaagcgatgtcctgctaataccatatgaaaagcgtattttctgaccattttagtctgcagaaaacaatacgaagcttgttcaagcagcaaagcagaacgtaaatcagattcttcactaatcattctaatcaactggtgagctgcttctccatacatttttcgaaatttcaaacattcagatcctaaaatcgttgctctggtagcaaactggggcattttgcatgtatttaaataagtggtaatgctctcctccatataatcacaggtctttttggttgattgattggccataaatgcagccaaagcagccatttctagcgccccagcataatacaaccaagcttggtcagtattgtactctctctttgccagatggtacgtt

SEQ ID NO: 14381 - DNA, 451 bp, Diabrotica virgifera
atctgctttcttatagtctggataattgacttgcaggaaggcgtatactaagtgtaaaagaactgtacaatctttgccaccattgaaactgagaaaggtgttgtctggtccatatgttgccatgcatctctcaatgacctctaaactcttaacaatatgttgatccccactatctaacactttctttaaagattcttgatccccatgtgaatatagaaattgtctattaagtctgcttgccagaatttgctctacttctacaacatttgtaagctgttcactgctcacttcaagagttacaaagtcttgttctttatgtacattaacagaaactaaatcttgtatcgagtctagaacactttttgttattaccattagtatatgcttgaatgaacttcttatataatggtgtgcaatatattgctccaagtgagatttcaaaacttcctta

SEQ ID NO: 14382 - DNA, 458 bp, Diabrotica virgifera
  SmartBlast Evalue=1E-48; Info="Solute carrier family 35 member C2, putative n=2 Tax=Aedes aegypti RepID=Q16HA4_AEDAE"
gcgcctaataagatcttcagaaattgtctaataaaatttgcagagtcgtcgcaaccccagagatgacagttttttattgcatttggaccttctatgtatatcgcaaatggtaatacagacagtaacatccaaggttgcatatgatatatcatgtctacaggattgttcatacccattttagacttttgtaataaaagttgtacgcacgtccatcgaatcccgctagctactgacgccaataacagcaacgtaaatcctagtatattgaattgtgtagatttgtaggtaaataatattaatcccaccgttatcatcaaaactatacaacatagactccatgactttttctctaattttaaaataatggcaaatatcaaaataaatactatggtcgtcgatttggtcattgtgtacaaagacacagtgattaattccaaagcccaattggagaaactaat

SEQ ID NO: 14383 - DNA, 457 bp, Diabrotica virgifera
cgcccctcagcaaactatggtcaaccctacagcaaaccaacattaaacatgattatcaaagcagtccaaagtctgtataatggaacgagtgcaaaaattaaaactggatcaaggatgtctcagggatttaacgtcacggaaggattgaagcagtgttgctgtatttcgcctacccttttcaaaatttatctggaacaagcacttaagcttgtaacgatatgataccacggcaagcgatgagctggtctaccagagaagaccgtaggagtgtccgtattggcgcattccttcttcataacaccgctggggaaaaaagactgaaggagaagtggcatcgagcgcatatttaagacgagccaggagaatgagaaaatcagttgttgctaacgtgttgaattagcaatagctcgattggcagagatgcaccgtatttgagatggaactgtaaccgttacca

SEQ ID NO: 14384 - DNA, 456 bp, Diabrotica virgifera
  SmartBlast Evalue=9E-17; Info=Putative uncharacterized transposon-derived protein F52C9.6 (Fragment) n=1 Tax= Camponotus floridanus RepID=E2AL50_9HYME
gcggtatgtttctctgcacaatcacagtggtcagcttgaaaaatttagctttagcaggttcaaagagatttttcagcgctgcctctccgtctattccatgattcgtcttgtcctccgtccatcttgtgttatagctaaatgacctgccaaattccatttaagcgtcgtgattctttcgatgacgtcttgaactcctgatatttgcctgatttgttagtttgttatgttgtctcgaaggctcatgtccagcattgcacgtttcacggctcgttatataactcgatttttaaatcgagttgatttgctcgatttttgcgtcagtggtaaagtctctgctccataagtttgtacgggcaaaacacattttttataaatctttcgcttgagacacatggaaattgaaactttttatctgtctttgatttggacggttttctcacatccatgttttccatt

SEQ ID NO: 14385 - DNA, 456 bp, Diabrotica virgifera
gcggcgcgcagacttcatcaaaaaaagaagaaatttttatttgttttggttaagtttgacaaacaaattcaacataagaataaaaaatggcaagtggaacacgaacaccaaaaaaacatctgctgagtatttaaattagatagtagactttatctctgaacataaaatattattgcacgtttcacgtttttctctaaggaaaattttggtttttcgtttgaaccacactagatacgtgcaaatctacacattctaccagcaaattaattaaagtagcaattcttaaaatgtttgatgatttctattgaaacggtgcgaaagaacgcaattatttgccttgtccagaaaccaaaaatcgtaaatgtattgtaacacatttttgtctcaccctgtagacataagaataaattcaaggaatttatttagtcccgaaaaaacgttagaataattgaatgt

SEQ ID NO: 14386 - DNA, 455 bp, Diabrotica virgifera
taaaaatattcttgaacatttgtccactacaaatattgaaaataaaatatgtacaacaatacgatttgaggagtttgatgtgtacatactttaaaattttccagcctggtgagcgtacatttagaaagaactgaagaaaattcacacatccctcaaccaaaaaaatcataattaatattttgggaaggtagtagttctgacacttactcagttaacctcttcttcttctacttgtgacgccatagtcacttaggacgtaatcactgctcttcaattgacccaaattcatcaaaaactggaaaaagtttcgcaggaatacctcgtagactacataattgcagatatagtcggttcgctaaactcagacgcaactggctagatactttagtcgataatttttttgtcaattttgcaaaaattggcaaaattactaactatttagtgaatattaacta

SEQ ID NO: 14387 - DNA, 457 bp, Diabrotica virgifera
tgtacagtaaagaagaacaacgaaaaatgaatgatgcctaacttctcactgtacgaggaacatggccatgacgaaaagtcctactataacgttttagcaccgctctgacgtcagaaatcttgaatgacgtaatcgtatgtttgtagtaaagaactatacatgattaaattatataaagcacacaacagaatcggtctgaagtaacctttaaaactagtagttcgacaattaataattcaataagtatattatgagaccaccacacctgacttttcctgtttaaactacgtacctatggcataacgaaaaacaatattataattattttcaaacttcatcatacgtataccaaattttaagttatgtacaagatgtagataaatattgtttgtgtgtttctagatggattttcgagaaacatatgcatatttaaggaaactaaagttatttatattta

SEQ ID NO: 14388 - DNA, 458 bp, Diabrotica virgifera
  misc_feature (414)..(414): n is a, c, g, or t
  SmartBlast Evalue=6E-39; Info=Mct1 n=1 Tax=Drosophila ananassae RepID=B3MYS4_DROAN
cctctgtcaactttagtttctttcccttttctccattgatctcctctaatggtctaaacagtgctccgaacaatatacactccaggatgattcctcctatgatcaaaattgacccctccaaccgtacgcttcaagcaacttggatatgattggagcaaataggaaggtaccgaatccggaaccgcacactgctatgccggtggctagggaacgtttcttctcaaaataagtggtaacactaacgatagcagggaggtagatcagcccgaagcctgttcccgtaccaataccaactgtgaggcacaatgttagcacattttttgcgtaaaacgagctcactagacatgctgaagctagtaaagaaccagctattgtaactgttctgcatccgtaccggttgacgaagtagctggntaaatggccctgaacacagcgtaactccgactaaaattgagagg

SEQ ID NO: 14389 - DNA, 446 bp, Diabrotica virgifera
ggaagttattatatatcgatatatcattaattcaaaaaatttctgtctgcaatcttgtactttataagggtaccacttattattttttagtcaaaattctttatgggatagtgcgaatagtactcatccggttatatggtggcaaggtttgtgcatatcgcagccacttagcaaattgcctcccgaattttaaatgggcctccatcttttgtctcttcagaaagaaactggtctttacacggcctcatacatacaagcaaaagaaataggataaatctcttcattaaatttggttataaacgaaaaacagacatttatttacgatgctaaactagatccacttttaaaagagactgacaaaaatcatgttgtgttatccgttcaggatggtgaagcggagatcgagcctgaatcagatgcttggtctgaagattcagattcagacc

SEQ ID NO: 14390 - DNA, 458 bp, Diabrotica virgifera
taccttttttattgaaatgtaggcatctaaaagagctacaactgcacagaacctcagtgacgactgaaggtttagctcagttgatcgtaggacttccaaagttacaagatatcggtcgatgtgacgattttggaaaagtgataaaatatctatatcataaatttcccagtgaaggccctttcgagttgaggaagatacagacgagggatattagcactgaaaacctgagattgttggtagatatgtttcctaaaattgagtacgtgagcttattccacgacgtacaaatttctgacttaacagttttgatatcgttggacaatttgaaagacttgaagttgctatcttgtgctttttacggagattacctgaagcaacttctagaattagaggtactaatataactagtcttcatttggagcatgtggaagagatggattataaagtattgattgata

SEQ ID NO: 14391 - DNA, 457 bp, Diabrotica virgifera
cgcattatgtttaatgttaacaaattaatcaatttataatttattataaaagaatccgctaaagttgactatccgcacttggtcgctcctccgggtaaatgtcaaaaaacctatcccactcttttttattttcacaatcccatctaatttcttcaacatacccaggtttcacttttacgcaccagtatctatagatgtcttgaataacaaaaccttttattaaggtgcacttacactgcggtcgctcaaggtttacacaggctgtttttccatcatgtaggatacctttacagtaaaatttattatcttttggatgtttttgaatagtgtaaccgtggtggcatatacacgctgactcgtctggtaccggatcatctcttgtgataattcttgaggcataaatcattgagatgaaacatgttatgataagtatccttaaaatcatgattcgtatact

SEQ ID NO: 14392 - DNA, 457 bp, Diabrotica virgifera
gaaggctaggagtagtttttctacccacacccacccatcggggaggaagtaagctttttcatgaagagcgatgattccccagttcattgaacaggttcaaattttgatggaaattcaacaactgaagcatgcagcagcagataattggaacgaaaagtctaaatataattggctatgcacgaaaaaatgttcattagtaattctgtctcttagccatgaatataaactacgtcaagcccttaataaggtgtctcttgatcaacaagtcgagatcttaagaaaattaataaagtgtattgatgacaatccggatacagatgtgctgaagatcccagaactgacattagatctgatcaacaacatgattaccttcaatttagtgaacgaatcgaacttttcaagaatgaacagcttccgaaacagcttgagaagattttcaatcgcatctattagaata

SEQ ID NO: 14393 - DNA, 458 bp, Diabrotica virgifera
aatatataagtgatagagtgtgttttacagatttgaattttattaaaagaacacatgataattttagtaagcaggatgattcagatcatcatacagggactaccattctaagtgaaattaaaaacataaatctaataactgatataccattagactacatgcacctaattgcattaggagttgtaaaaaaaattgtttgtggaatttggtgtaacgggcgacctccacataaactatccagtagacaaattgaaatatatctgcaaagttggtggaaatgtctggttatattccatcagaattttctcgtcaacctcgaactttaaaagaatcaaaacgctggaaagctactgaatatagacagtttttaatttacacaggtccagttgttttgaaagatataatagaaaagcaaaaatatcaaaattttttaatgctttccgtttcaatacatttat

SEQ ID NO: 14394 - DNA, 458 bp, Diabrotica virgifera
  SmartBlast Evalue=2E-11; Info=Conserved oligomeric Golgi complex component 4 n=2 Tax=Culicini RepID=B0WBZ5_CULQU
catcactccggccgtctgtcacgtctacaactacaaaacaaaaccaaaacagtatgtttgctgtttgtagattgtaaacgggcaaataattttatggaaataaagagacaatagaaaataattatggcagaatcaaaatatgcacaactacaaaaaacttaccaattagagcttaaaatgctggaggaagaggaggaaaacttaattcaagacctaaacaatatgttaaatcaaaaaacttttatagaagataaaattaaaggaatagccaagctaatacctaccttaaatattattacacatgaagcacaagatttagtaaatactgttaatgaaatatcagtatcttcagagaaaattagtggtaaaattagagctttagacacagcaaggagtcgtgtcaatgagtgtcaagcaagagtaagtgatttaattgatttggaaatttgttcacaagg

SEQ ID NO: 14395 - DNA, 458 bp, Diabrotica virgifera
  SmartBlast Evalue=9E-33; Info=Endonuclease-reverse transcriptase n=1 Tax=Bombyx mori RepID=D5LB38_BOMMO
aaagagactggatgacaaaatacaaccctgtcgcacaccacgtttgatgggtagtctttcagcacgactatctccaacttggatagatgctacttgattgtaatataagtattttagcagtcttatatcgtagtggtcaagtcctgctgcatgtgggcaattgaaaagtatatcgtgttgtactcagtcgaatgccttctcgaagtcgatgaaacaaacataaacgttctttcggaattcacagcttttttgtaaaagaacgcgcatacaaaatagtgcctcgctagttcctagaccatctctaaatccaaattgcttattacccattctactttcacacagaaggaatactcggttttgtataattcatcaactgattactctaaaatcgctacatttggtgggcctgcttttctttggtaatgttataaacaatgactccaaccaagcatctggta

SEQ ID NO: 14396 - DNA, 444 bp, Diabrotica virgifera
  SmartBlast Evalue=5E-21; Info=Probable RNA-directed DNA polymerase from transposon X-element n=1 Tax=Drosophila melanogaster RepID=RTXE_DROME
gatggtacttgggaaagatcagacgaggaaaaagcttcagcatttgcagaatacttagctggtatttttaaagaacaccaagtagagaataatgatgatggaaacttaataagagacttcctggatagtgcttgccctatgacgctcccaataacaccattcaatacatcagaagttaaactagaaatagaaaaatgcaataaccacaaagcacctggatttgacctaataacaggattaatactgaaacatcttccgagaagagcattggtcatgctaactacaatatacaatagtgcactcggactgacatatttcccaatcacatggaaatttgcgcaaataataatgattcacaaaccgggctaaacctccaataaaacatcatcctatcgccaatcagcttgttgccgataatgtctaagatcttcgaaagactactac

SEQ ID NO: 14397 - DNA, 458 bp, Diabrotica virgifera
  SmartBlast Evalue=5E-73; Info=10-formyltetrahydrofolate dehydrogenase n=1 Tax=Camponotus floridanus RepID=E2A3S4_9HYME
agcttttactgataactctgcgaattttaatgctgttaaaggacaaacctgtgcaggcttaataactacggtatttccagctgccaggcaagctgccatcttccatgaaagcatcattaatgggtaattccatggggtaaccaatccacatacaccaatgggttctttctttgtaaacgagagatttctgttaggtctcgcgtgggatactggtaacgtagacccctcaattttgtctgcccacccagcgaaatacctccacgtttcaatgctcataccaacgtgagtttttagagctaaagtatatacagctcctgaatcaattgattctattgtagctagttcttctttgtattcttgcattaaatcagcaagtttgaaaagcatgagacccctttctcttgcactgatcttactccattcaccgttttcaaatgcgttctttgcagcagctactg

SEQ ID NO: 14398 - DNA, 458 bp, Diabrotica virgifera
  SmartBlast Evalue=6E-35; Info=FAD-linked sulfhydryl oxidase ALR n=1 Tax=Camponotus floridanus RepID=E2AW88_9HYME
agcagtcaaattcttctttgcctatttttatattgactttattatgtaatttacataaccattgacttagtgcttcctgggatttcgtctgtgggggatctgcttttaggtcattccttaaatctttagcacagtgatcacaaggataaaaccttgaaaagtgagtgaaaaattccttcattgatgtttcatcttggacagttggtttgtcaggatacttcgcggccattgtatgaagaaggccccatgttttattgcctaactcatctttatccaaaggacagtcctccctccttggtttctcaacattatcactgacagctccattttcggtttctttttggcagatttcacataatctgaaaaactcgtacactgcctacactgttcgttatctaatggtgaaggacgtcctggcatatcataaaaacaatttacataatatttgttaaaatctt

SEQ ID NO: 14399 - DNA, 451 bp, Diabrotica virgifera
caatgcgcaataggtatctcttgaaacctaccgaatttggttttcatagctcaaccggtgtgagagtaatgaataaattgacagtttaaaaaaatttcaacacctcgtatctcgaaaacgaagcattttcggccatttgtttatagagcaggcggtcattgatttttatgtagaattgcccctttaagtttgtcatacttatttagaaacaccctgtatgtgtttttaaccataatgattctatttattagttaatttatagattttttgtttatgtcattccttacgtagattgctaacacgattagcagatcttcctgttgataagacttttagggcgttagggagtgaaaatttatatgactgccatttgtacatatagatttatcggtgcgaacagaccaagaagtcatagtagattagatagtgactatgaaattgatattaaaaa

SEQ ID NO: 14400 - DNA, 456 bp, Diabrotica virgifera
cttcaccttcattgtagattaaatggtttttgataacattaagaccaagattgaagtcaaatcgttttagaaaacattataatggcacaatttaatttagagcaaggctaaaggaagcattttttcacatatctactttaaaaagtctttaaataatagtgtgacatgaaactacctttaatattacacgaatttttgctctctagtttgaatgttatgcttatgaaaagaaaaacttcttctttttctagtgccgactatactaatgaaagttgactataaccattgcaaattcgtctttaacttctgcttttctttaaagcgtctgtgtttaacccggtccagtcacgaatgtttttcagtcgggatatttttcgtctaccagaatccctttttcgtctaccgccacatctcaatagcttccagctttctcacttattcaacattaacagtcca

SEQ ID NO: 14401 - DNA, 455 bp, Diabrotica virgifera
gtaaaccagcaatagacaaaagaaatgaactatacgtacagtacagtcgaagaacacgagaaaggcgcgagaaatttaaagaagaacgaagaaaggcagacaaagtacgtttataagccacaaatgaacttcttttatgaagaatttaccaacatttgaacaaatgtacggcaaaaaaaacgtaagggtagtgttacgatctctaggcaaatgcgagaatttatcagaccttcttaatgatatttaatatattttatatgcttttacccggatgatattgaagagataagactagcagacgtgaatgtttatgtagtgattgtatgattattaaaaccatttagtaaccttgttgttacagtgtgtttagctgatttgtgttgtttgttacaaaaattatagttatttttttgttacattttattcgaattttattcagtgttttttattacatt

SEQ ID NO: 14402 - DNA, 453 bp, Diabrotica virgifera
gggcagatatctatatgtacatagttatggttcttttttcatatttacaaatatatacaatgtattaaatttgctaaaatctattcctacatcattctttttgaactacctttacattgtgtatgagaaataatattactaaacatcaaaatcattctaatgaattttaaaaatttgtcaaaaacttttctttgaaattagaattatctatcagcctataataactagtaatttattctttatatattctgtaagtctaaaaactttaccacaaatacagcaccagtattacatattaaaaattttgacatattttagagaaattattatacaaaataaaaacaatacataaaaaatagttttttgtgctaaaactgcccaatgactttgtatgtatgcaaatacacatacttgttagttgagtaacaggattttaactaagtaactaacaag

SEQ ID NO: 14403 - DNA, 456 bp, Diabrotica virgifera
gttctcaaagaagtggcggtctttggaagcagtgtcaacatcttgcgcccaactatctgacgttcccagcaaaaagtccatctccaagaacgtgaagagctggcttatgggtctgtttaacagtaatagcatcaaatccagcaatgcatccctgagaaagggtgttatgaacgaatacaacaatctacaaccagaaaaggaaagcatagtttaggaaaaatcgaaatattggagatactgtggaagttgaaactctttttaagtcaatttaaagttgtttaggagtttatgtaaaattttattaggccggattcttcggcggttgttttaagtgggaaatgcaccattcaattgggttgaacaatgtggatgattcaatgaatcatgtattctgcaattcagtaaaagcgttcaacaaaattgaacgttgaaaaaagttagacaatttctactttc

SEQ ID NO: 14404 - DNA, 457 bp, Diabrotica virgifera
ttatttatagacatagaaggagcatacgataatgtcaatcttagtattctatataacaaaatgtcactaattggtcttccggacagtttttaataaaaaaaaaaataattaagatgtattccaacagaaaatattcctaaacattaacaataacctgttaggacctcaaattgctagagatggattaccacaaggaggcatattaagtccagtattgtaccttatatatacacatgatttagaaaaacagcaaaattttcaaaaattatacaatttgcagacgatgtggtaatttatcaagatcaaactgaaattaatcgaggaatcaaaaatatcaatgataactacataacaattagtaactgggcattcaaaaatggacttacattagctaaagataaaactcaagcctgtatatttactagacaaagggaaatgtcccagtagaaataaaatt

SEQ ID NO: 14405 - DNA, 457 bp, Diabrotica virgifera
  SmartBlast Evalue=1E-19; Info=Calcium homeostasis endoplasmic reticulum protein n=2 Tax=Aculeata RepID=E2B5C4_9HYME
gctcgttttcccgtttccacaacacaaattaatttaaaaataaatgtatttacttaacataaatatgcagccggtgtatatagtttgaattataaatggtttataaaaatggacgtaccgcagccaccacaagatacagaacttcggaatattatagataaattagcccaatttgtagctagaaatggccacgagtttgagttaatgaccaaaaataaacaaaaggaaatcccaagttccagtttttatatggtggtgaatatttcaactactatcagtataaagtttctgcagaacaggaattatttaaacaacagcagcaacagggaactgttttgactgatcaggaaaacagttggaacccctctaatcaaatgcagcacactgccgaaattgaacagattaataaacaacaagacactttaagggaacaaatcaaacaaagtgaacataattt

SEQ ID NO: 14406 - DNA, 455 bp, Diabrotica virgifera
gcatcgattgtaagttattaacaacatatacattttataataattgaaacaacgaaaagattaagataaacgtttatattaaaaatggttgactctttaagactttagaagccgacagagatcaagcaatagtgattcgaacaagtagttttagtttatcagaaatatttttgaccgtagctcaaaatgtctttatctagtcacaccatctttggtgcagcaactgcgtccttaaataaatgatattatattttataaacataaacgtaaaattaatatgaaaaagtcaaatacacagtgtagccagagtcctaacttcactcttagagtacccgatatccagtatatatagaatgataaaacatcatctactaaaaggacatatcaatatatgggacttcataaaccgtacactatggcgttacagctcaagactgaatgaattttaacaagct

SEQ ID NO: 14407 - DNA, 451 bp, Diabrotica virgifera
ttttcatttcttaatacattaagtgttatgaggctggtaaatagaccccactttaatgaaattgttccaatctcaggttctataggtgctggttcgctgagaaaggtaattagctgataccactaaaagtaccagcgagactgcttccaaaagggataaatttagagcaatgaattatgataagataagaatttaacacatttattctaaatcaaacaatgaaattaaagagaagtgaaaaatatatacatatataataattcttcctctgtatgaaaaagaagaagaagatatatacgtataaataaaataatatgtacctaaaaataaataattatgaacagtaaacaaaaatgacagattttataaactaaatctaatgaaaatgtccgaacgaaaactacgagaaaaactacggtattgtatctaaacttacataaatgttccgcgc

SEQ ID NO: 14408 - DNA, 456 bp, Diabrotica virgifera
  SmartBlast Evalue=4E-15; Info=RNA-directed DNA polymerase from mobile element jockey n=1 Tax=Camponotus floridanus RepID= E2AVN7_9HYME
attttagttcccatacttaagccaggaaaaccaaaaaatcaagcatcgtcatatagggccatttctttatcatcatgtgttttaaaaacatatgaaagaatgataaaatcacgactagaattttttttagaatctaataaccttattcatagttctcaatttgggtttcgaaaaaaaaaaatcggcatatgaaaacctggccaatattgttacagatattcaactatcactttccaatgaccagtcaacatcagctttatttttagacataaaaggggcatatgacaacgtaaaattagatatattatatttaaaaatgtgtcaaatgggaattcctcaaagtctagctaaacacgtatatattctatacaacaacagaaatctatttttcagagaaaataactcattctctgaatgcagacaaacatctatggggctgccacaaggtggtatatt

SEQ ID NO: 14409 - DNA, 458 bp, Diabrotica virgifera
ggaaggcctgcgttcagcagtggacaggtataggctgaatgatgatgatgtcatatacaactgtaaaaattttgtactttcactgcttcttatctggaagccgaaaagttaataaggccattattttttctaaacacatggtattatactgtaaaactgcaagataaaaaaaaactttcgaaaaaaatcaacactaaaactgattacattcttgtctataaaaaataatgtttcaagatgtaattgatacattataaaattgaggatcatgtatttaacaaaaaagatagttcaattttattcaactgcattaaaatggcaagttggtacaagatttttttgcacgaactatcttccaaataacaacggttttgtaagatacttaacaaattattagatctttcaagtggacaccatttgcgcaaatttataggaacttcatagctacaaagagcgaa

SEQ ID NO: 14410 - DNA, 456 bp, Diabrotica virgifera
caggaacatcaacaggaacttctggctcaaattcgccggtttccagattttcagaatttcgttttggttttatcatttccacatattcactagtatcctcatcgttcataggtttattcatcatgtcattgatgtaaggatatccttccgagactcgaggtttccttgagtttctggtcaaaacaaaagcatcatcatctgctttaaattgatccttatcctttggaaccagcaacacatgtccgtctttggtctgggttctgtagaattggtcattgttattcccttgtgggcatctgtcgtttgtgcaagtgtactctttaccatttgacgaacatatgcaaaagttacagtccattttaaactttgaatttggcgaacacattgttgcaccactgaaattaacacacacaatacaacacaaagcaataacgcgccagtccatcttgccggtct

SEQ ID NO: 14411 - DNA, 454 bp, Diabrotica virgifera
catacaatacacatttcttcctatttatataattaaattatataacaataaacatttcgtatctatcaacaataaatattaaaacaataataaaatatccgggaaatacataataatgcggactagatagcttaagctagatagactacatatttttaaaattgtataaacattttcaatttctttgcaatccgaaaatgcagcagcaatatactctagttaaataggagagtgcaggaagagtctataccggtttcggggattttttcccctcatcagtagtcccatatcctcttctctccaattcaaccaggtacttcgctttgggcccttccggattgcaaagaaagaaatgctacggatatcgtagagacatctaccaagaaacacaataagttactcaatcaagtagtacagaaaacgacaataaataatacgttctcacaccactata

SEQ ID NO: 14412 - DNA, 454 bp, Diabrotica virgifera
  SmartBlast Evalue=8E-13; Info=Pol-like protein n=1 Tax=Aedes aegypti RepID=Q9U4W1_AEDAE
ggtattagcaatcaaaaaaatatatatagtacttccactcccagtacaacttttcccatgtacgaaattattcacgaattactttttatactaggtctctttttaactcacagaaactagtatcgcaaaattaagccgcttgtccatagaaacctcaataagttaaacaatgataaacaacatcgcatttcgttttaggccataaaatcatcctaaataaactacatcactggggattgaaaggcaatataatacatttcatagacaattttttatctcgaagagaattccaagtccgaatttctggaacaatatcatcaaccaagaaacaattaaacggcacaccacaaggatcaattctcagcccaactttatttttaattgctatgaatgatgtcttaaaagacttaaagaaaccagttgtagccagactttacgcagatgacatgatcgt

SEQ ID NO: 14413 - DNA, 456 bp, Diabrotica virgifera
gtcattctcttctcagagaatatcgaaaaatcgaggctaactatcaactacccatccaccatgataagcttgatatcgaaatgaacagactgcgctccagatatcccccattgttaagggccacctccctacatcaggaacatttcgacctcaccaacgcttggagaagacaatgggagagcgactcaccacaggaatcacaccaaatggcctgtatcgatcagaaaccgccaggctttgaactgccccgcaatacatggacggcgctgaacagaataaggacagggaccggtagatgtgctgacagcttgcatagatggggaaagcccttactcctgagtgtgattgtggtgcgcaacggcagaccatccgccacattattgaggaatgcccccgaaggcggtaccctggagttttcgatgagttcctgaatgcgaccgaaaatgttttacatta

SEQ ID NO: 14414 - DNA, 455 bp, Diabrotica virgifera
  SmartBlast Evalue=2E-50; Info=RNA-directed DNA polymerase (Reverse transcriptase) n=1 Tax=Medicago truncatula RepID= Q2HVM1_MEDTR
tatctcacaatctttacatattctccaggaactcctttcttattgagtgcccaccacagaatctctcgaggaactctatcatatgctttctcaagatcaatgaataccatatgagcgttggtctctttattcctgtatttttccatcagttgccttacaatgaaaattgcatctgttgttgatctgccctgcataaagccaaattgattatcggatatttcggtttcttcacgtatccgtctatcaattactctctcccatattttcatggtgtggctaagtagttttatagccctgtagtttgtgcattgttgtatgtctcccttgtttttgtagacaggtactaatatactgcttctccattcgtctggcatttgtccaacttccataattctattaaatagacctgctagccaacttattcctgtctctcccaatgctctccatacttcccc

SEQ ID NO: 14415 - DNA, 457 bp, Diabrotica virgifera
  SmartBlast Evalue=3E-14; Info=Cathepsin L protease inhibitor 2 n=1 Tax=Diaprepes abbreviatus RepID=A7LFV3_DIAAB
caaagatataattttattttaaaatttttttattaataactaatttaatgtactccactaccacctacgggacgtctgagtccatgaagatgttttagttcttctggggtcctgtcagcgaattggttcaatcccatggaccatgttacttcaccagcttcgaactttttgttgtgtgcttcaatctggtcgtagttagtcttgaaaatggcgaatcttgtagcatcttcctgagcgtcgtagttcctattgtaatcagtcttgtattttggccatgcttcttcagcagtttgtgatgcaacagcaacagctacaatgagagcaagtacaaatactttactaaacatttttgattgtggaagaggaactggaagtttattaaccaagtaattcagttgattaactgataattctaataaaaaatgttctggccttttatagaatggtatttgacatg

SEQ ID NO: 14416 - DNA, 455 bp, Diabrotica virgifera
tgcttctttcatattctagaaaagatgtaaaatgttggtttttacttatagcttcgaattgcaattttttttgaataggcgtgaaaattttattaagatattttggagtcttcatctacaatcctgtttattcaaatgatattaacatctggaacaaatggggaaaacttgttaaagccgtaataaagcagacgtcatacaaaatatctcagatttggacgttttgggcgtattagggggactctatatctatgtttgtgcctttcggataggctttgtctttcttgatccaggagatgccttactttcacagctatttaaagcacttaattttatttaacacaatttttgtgtttgtacggtgctaaaaaatttttatgtagccgagtattctagttacaacatatttaggaaactaatctatgcttgcatctctaaaatattgggcaatatcg

SEQ ID NO: 14417 - DNA, 457 bp, Diabrotica virgifera
gacctgtgtgtacacttcgaagtgcagtaactgaatattttataaatggatacttcaccagtaaaggcgcccgttcaattgcataattacgagagcgctatagtcggaggactgtcgcccgtcgcctccttataacgcagtctgcagtctcaagggcttaccgttcataccaagagaccggtagctatagtcgacgaccaggttcgggtcggcgacgtgtaatgacagagagggatgatcggttcattgtcctgagtgccttgcggagtcagcacgagataggagttgagcctcaacaatccttgaggaatatttgaggtgtcaccgttacttattggttagttagttactcgacttcagtttgcccgagaacacgtcatttgggacctcaatggagcagagttttattctctgacgaaagtcgaatatgcttgtaaagcgatgacagaagacgacg

SEQ ID NO: 14418 - DNA, 451 bp, Diabrotica virgifera
  SmartBlast Evalue=4E-16; Info=Cathepsin L protease inhibitor 2 n=1 Tax=Diaprepes abbreviatus RepID=A7LFV3_DIAAB
cgcactcgcaagttcaagatgtttttcaaatactttttatttttgtttgcggtcgttgtcatcgctcaagcgttgacggatgaagaagaattcgacaattataagaaaaaatttaacaaatcgtatgacactccagaagaagaacagaaacgattcaagatcttccaagacaatttgagattcattgaagatcataaccaaaagtaccaacgtggagaagtttcttcaacagttggagttaaccagtttgctgatcagtcaaaagacgaatgggccaataggaaccacggacttaaaattgattagagtcgtattgtttctgttgtaggattaaagataataacaatgggaaaatattttaaaagttgttagtttaaatgccgttttagcattactgtatttaaaaacctgttttcaaaataattttgaaaataaagcattcttaataggt

SEQ ID NO: 14419 - DNA, 457 bp, Diabrotica virgifera
  SmartBlast Evalue=4E-23; Info=Wolframin n=1 Tax=Camponotus floridanus RepID=E2A2Z7_9HYME
aaaatagcatccgaactgtctgcctcgttgttaaacaacttgcccttgaacctgatatggtcggtgggtttcaattttagtacgaactcttggaagtactcgttaacgactaaagtgagctccgtggctttggcccaaatgcccgagtgcatcttcaatgtaatttcaaaagtgtatttgttgtatttctgcaacgtgcatttatttacagagctgacgatgtcgtagaatgccaggcagttgtctctagctatttctggtactctatcacagtccgatttgttttcttcgccatacatacaataaaagtactcggagagactttttggcaatttgtcgaatatactcttgtacctatttgatactgaccttagtttaatttcgctaatgtagccattccactgtattgtaacgccttctagatcaacacatttttatttgagacaaggcgatgttt

SEQ ID NO: 14420 - DNA, 454 bp, Diabrotica virgifera
agctagtgacagtgttctcttttctctttgtgcgtagtgagtaaccgttgttaaaaacaaaaatgaaaaagttcatcgtactgtgtttgctggtggcactagtctcggtggtagttgctgatacttggactaccatagataagagagattgcgaatcgaattgcatgagaaactgtaataaagccaattatcaaagctcagaatgcattaaccaaggaggactcttccccagatttgctgattgccactgctggcacaaaacctacgactacgataaatatgacaagaagagcaagtataacaagtactaggttactaggagtaaagttttttgtgtgtagacaatgaactgtgcttaatttcattaactgtgtgtaaacaggctgatctattataagttgtgtgattaaaatgtaagagatttatacttttattaaaatatcgtataagaaaa

SEQ ID NO: 14421 - DNA, 449 bp, Diabrotica virgifera
aattataaggagtgtgctagaaagtgaaataaaagtagaaaaattcactaataaatggtgatggattcggcaaaagcacaaaaacccagccaaggctaactttatgagatagctttacatacactttttgctttatctgcaatcaaaagctacacaaattgggaaatgtcaaatgaagctaaatccgctgggaaaatttgatgagctcgtgtttgaatcagatgaaaagtgtatgttgttacaagcaaaagttcaaagtggtatgacctatactaaagattttatggcagtgagtcctattaagaaaatatgtgaattcagtatcgcaatgtacttattatcatacataacttttaagaaatcctttaaaataacacgtaattctttaatactatgtactgctgctacactgaaagttgctgatattatggatgaattacctgctaacg

SEQ ID NO: 14422 - DNA, 457 bp, Diabrotica virgifera
  SmartBlast Evalue=5E-13; Info=Minus-C odorant binding protein 4 n=1 Tax=Batocera horsfieldi RepID=D4P8G5_9CUCU
gaagtgcataattgttgctaccgttttatgcgtcttagctgccgccaacgcagcacctactaaagagcaaatcgaacatatcagaaaagctcatgaatattgtcagagccaagaagcaactagaattgacgaaaatgtttttgaaaaacgtaggaatggagaaaaagtagatgacccaaaactggcaaaacatgctctatgcatgaacgttcaagctggacttcaaaaggagaatggcgacataaatgtggacaaacttagagaaattgtaagtgacggtactagtgacctaaatcttataaacccagtcgtagaaaaatgcagtaaaaaagaaggcgacactgctgaggatgctgctgttaatcttatcaaatgtatttcttcccatggtcgtggaccgcgtgaacctgggcatcattgaagattaattatacataaataaagagaggaagttggg

SEQ ID NO: 14423 - DNA, 456 bp, Diabrotica virgifera
  SmartBlast Evalue=8E-24; Info=CG6770 n=6 Tax=melanogaster group RepID=Q9VKC5_DROME
gatttcattacaatttattgaaaaaagtaaaagaaaatctttttaaataccttaacaatctatcaatcacatataaaaagagtttttattgtctcatagagagagtttttttattctacaatgttattttcgaatccgcaatcgattttacccagaaataagtccaattgattattttttcggcactgtcacactgctgatttcttcttgttggcttctgagttcatgaatttggtggcgatttttctagaatgtccagaggggtcgaaatggttggtgtgttcactagcttctttcttgctcctttgtttgccgctatggctgcttggcatatgcttctcatgttcaaaattatagtgttcgtactcatcgaagtgttgttcggacattttgttagaaacttcacaaactgacttgttttcacgacaatttacttgaaaatactaaatcaagaac

SEQ ID NO: 14424 - DNA, 433 bp, Diabrotica virgifera
ccggcttattttggttttttgtccaatcttgttttttgtcgagtgacatttttctcggcgaatacgtagcagaagtacaatcaacaatataaataacatttaaaattttatgtagaatcgtaatccgctgtagtaatagagtcgattaaatttttcgaaactgtcacaaataaaaactggtctttcgagccggaaattttaaccttttgtgaaatagatttgaaattatcacggatttttgttcgacttatgtttttggtaaagttagacagacggtatttttctgtacggacagtaaaatagaagaactctcaacagtatcggtaaaagttttaatttagtaccgaaatttgtcgtcgataacagttcgttggtccttcttaccggatgtttagacttatttgtaaaaataattgtatgtactacggctttt

SEQ ID NO: 14425 - DNA, 456 bp, Diabrotica virgifera
taattattggtgtagtgatttgtgtcctaattgctggtaatttgtcagcaccagtagaagacgaaattgaaacaagattcgatgaactgagtagagaaggagctgtggaagaagtaaagatcgacaaagaagaaggaacgaaattagaagaattggaagaagataatgttgtggaagacgctgacaatgatagtcataccagagaaagacgatacgtaacatgtatcataggaaagataccaattgagggagttcaacttaacgacgctgcatgtgctgcaaaatgttatacaaagaagagacctggcggatattgttcgcacggaaggtgtcaatgtagataggaaccaaagattttttatggcaactaagtttcttttttaattgtctataataatattttctatatttctttaatgtgttatacgtgttcaaataaataaaagtaagttatta

SEQ ID NO: 14426 - DNA, 455 bp, Diabrotica virgifera
  SmartBlast Evalue=3E-33; Info=Protein misato n=1 Tax=Camponotus floridanus RepID=E2AQP9_9HYME
ctcagactagcagtattggattataatcataaattggcctaccactctagtgcaatattagcagctgcattggacactgtaacattaaagcataggctgaaaaactcaccttttactttgaaagatttaagtgcagatttaactcagaacggaagaaaatttgtggcggccagtgtacaaatgccgtttcgtatacacgaaaaaagtgacctactcgattgtttggataaatggcaaggaccactctatcaaagtattactcctaattgtgaaataggtaccagccgaaatatgcaacacataacattaagaggtgtaagagaagacaaattgaaaaaggctcaaaatatagctggtaaacaaagagagttgcctgcctaccgatgttcttcggtagacgaaatgttatcaatgtatttgtcatattcaactgacgccacagctagtaatgtaac

SEQ ID NO: 14427 - DNA, 455 bp, Diabrotica virgifera
gccctgtatatacacctaagtatgaagttacttattgataattgcataagtacatgatttcttttagtgccagggttgtctttttaaattttagatagagtggtattgtcaaacttcataaataaaatgtatttgccaaaattaacattggtagggacatggctcccgtgacagcacaagcccagaacattgaaaacattgagatttgacaacagtgaattgagatataaaaatatctcttaaagcagctttacatcaaggctatgcaagtctcatgctatgtaagtccgtcttgcatggcatatctcttccctagcctgatctttttacatcagagctatttctgtgcaatttttgatatcacgttcattgttgccaacaagagaaatataccaaaacattacctttagatatgtcagttggaaatttcggtccaacattaaatatattcaagt

SEQ ID NO: 14428 - DNA, 456 bp, Diabrotica virgifera
  SmartBlast Evalue=6E-24; Info=Mitochondrial uncoupling protein n=1 Tax=Aedes aegypti RepID=Q172X4_AEDAE
ggaaaatacttttggtctgggtgctttttaataaaattatccttcaattgtttgtaagtaataatcctcgttcctgaatatatcacatgcctgacacaggctgcgtggacaccttgccataactttctgagaccctcttctctgctgatccctattgccgtccttatcattcctctgtgcggtgcctggccgagtttcccatttttagactgttctccttggatctgaagcctcgtcttgattaaatccaaaggatatgtaacaaattctgcattgaaggcagctaaaactgaaacggtgtagacacaccataaggaatcaacaaatttaggaagctcgaccttttgaggcggcacagacggcattttcactgaatctccatttacaccagaggaaaaaataatttgaatgacctatctccaataaacacacataacatctctgtggacttcgacc

SEQ ID NO: 14429 - DNA, 455 bp, Diabrotica virgifera
cagagatgctctgaggagattgattgaaatcgaaatgcgcataggcacatagtagaagccctatcctaagatcaaatctgatttatttttactcaaagatgtttacttttgttgccactaatactcgtatattccatcaaatattggaagttgaataggttagatttaaaaatgaatcaactaacacgagcctaatctaattacacaggccattgtgctagaggtttaataatagttgcggtaaagaagatgaaagtcaatttgaacaagtctttcaacctagattcatatcttcaaaaatcgattaatattgggactatagttaaaatgaaaattaagcttaatactctctatatgatctacaacactggtacatttgagcaaaatacaagttttagttttatatctgcaataatagctttataaattaaagtcatacacttaggcagatctat

SEQ ID NO: 14430 - DNA, 456 bp, Diabrotica virgifera
ggctatgacagtgatattcgtgagctcagtaataaaattataattagtgaataaagctgataaattcaataacaaaaataaaacgactgtacaaaagcttgtcgattaacatgcattttttataatctaatttttcattaggtattaaatatggagggtaccatatacatctagcaactaatataaatatcgcggacgatacacctgttcaatgtctacctagtatcgcgttagtctgttagggcatcgtcccgatatatttcgctatataaatgaatacgtttaaacattggactgtcatatgcaaaaattattacttcctattaagttttcataattttttttttgttcaaaatatgtatatctcatttttgcatatgtagaattattatcgagttgcttatttaagtacaagtaacacacaattaatggaatgattagattcccagtagcatc

SEQ ID NO: 14431 - DNA, 453 bp, Diabrotica virgifera
tcaaagcaattaataattctcagcaaaattttataccttatagtgtttaaacacaatacagtccaggcggaatcagtcgaaaaacagaccataataggcatcttccctaggagtcaattttattttttgctggaatcacttctactctgggctaattagcaaaatgcaaggaaaagttatttaccagcaattttattgctcgaatcgaatcttatgattgtatatatcaataatacaggtatgcaaagtccgcagatagtgtgctacctttttataaacaaaatcctgcgaccgaaaatcgtgtttttttaaatatttgctctataactccagagattttaacttacaccaaaaatacccaaacagaaattcaccgcaattaaactctgcatatagacgtgttttccctatttacttcgacgaaaattttcaccggaaaatgcgggtttttcc

SEQ ID NO: 14432 - DNA, 455 bp, Diabrotica virgifera
  misc_feature (259)..(259): n is a, c, g, or t
tgctatacatcgcttaagttcgcaaacagtacttcacgcacagtttcatacaatattttatctacgataagcatataaaacaactgtaactcttcgccactggaattcacttctattctacaatttttagaactttcatactttcaaaccacaaaactgtcagaaattttgttgtaactcattgctcatattgtcatcaccatgaaaacgcgaaagttaaggatatttgattatatgaaagtgtgaccaaaaaaacccnttgaaggtgtgacgaaaaagtaaatcccaatttaaaatacatggttacttcgcgcacacgttaaactcttcacgcactgctatctataatgacagttttcacaaactaaaacttatacatatgacagagtagataaagtacgttttataatatcactgttttgctattgtacatgtacatatgtaggacacaacat

SEQ ID NO: 14433 - DNA, 456 bp, Diabrotica virgifera
gacttagttttgattagtcaattttaaatttaacttgatcgtagatctagtagaacaatgatatgagcagaaacaactgaagataacttgttttaataaacattggtatatatgatttattaaaaattagtgtccaatggcagatttgtgtatagttatatgacattttgacaactaaaatttatatattaaagttaaacaatttggatgatttgatgatgtttatatagtttgttatattttatttatatttttaatgtagtaactgtggttagagagcgatagcagcttttttatcaaacgaaaaacgtggtggaggtttagtatgactgtgagcatgagggtctgaagttttgctatttaacaaaaaaagagagagagagagaactatatggccttaaacgtttgttagtgttttatattcgtatgtttcacacggaacatcactgcagtgaa

SEQ ID NO: 14434 - DNA, 456 bp, Diabrotica virgifera
cttccttagatgaagacaggtcaaatcaagcagtcacttctagtataataacattggatgatagttcagataaatacaaatcgtctgaaattacctctagcgaaataatcgatgaatcattgaagtcaattaacgaaagtattgacattctaaaagatttagaaaatagctctgaagtatataaaacagcagttgagtcagacaaatttaatttggatactactactgacgattccttcaaattaaatagtttaactgtggagagtattgacgatatctctactagtgaaacatcaaatatagatcgtttcgtatctattgaaaaccatagtaatttagcagaaactaaagatgattctataaatgaaaatagtgatggaattgtcgaagctgtaaacgacaacattaaagaaaagaaatacacaggagatagtacaagcaattaacacagaaatt

SEQ ID NO: 14435 - DNA, 456 bp, Diabrotica virgifera
tgatagaccttactcggaaagaggatatcctgtgtacaatccacctgatgaacgaaatccaccaacaaacaccacctacttctacgaggaaaccaccaacacaactactagcaaccgacctggctccccataccacaacggatatccacctgctgaacctccaaaaacgatcgtctacaaacaagaaactcataccaccaacaacacttatggtcccaacagacctagaccagacgtcgagacatttgatcccaacaatcctccatatggatttaagaagaatccaaacgaacccataaatattcattactcttacaaatcaacaagcaagaccgaaaacaattataaaggaggatatccgcccaatggggagacagaaagtctgttgcccaagaaattcccaactcacgacggacctgatggacctcccaagaaattggacgagcttatggccac

SEQ ID NO: 14436 - DNA, 451 bp, Diabrotica virgifera
  SmartBlast Evalue=3E-16; Info=Endonuclease-reverse transcriptase n=1 Tax=Bombyx mori RepID=D7F164_BOMMO
gttggtgcgtattcctgtataattttcaaagacgttctttttaatttaagcataatgtaggctactctgtctgatatacccttggtggattgtatgtattaacgattctcttgtttattataaaaccaactccgttgttggtgttatcttcattacctttgtagtacagcatgtttcccgagtttaatagtattttttgttctccttttcttcttatctctgacagaccgatgacatcccattgtatatgagttagttcttcttctaattcgtggagtttagtgtcttcattcatggatctgatgttatatgtacctacgtttagtttagtcgaatgtttgcctctcccagaatccttgaggcggaccggtttgtcggtgtgggactgtgagttgttatctctacccacctggggtaatattccgtttgttttgtgattcgacatgtattt

SEQ ID NO: 14437 - DNA, 454 bp, Diabrotica virgifera
attcaacctaaaaaatgtgatataaaattaattccactgactttaaaataatttattgaaactctttgtttaaatttcacgaaacaaatgtaaaaatgccaacttcatttaactgtagacagaaaaataattttgtggcttatgaatgacatcaattattatccattacttccactgtttctgtaaaaatgtatttcaaactaaaatatgtgtgttagatacccgaatcttcagcagatgaatttagagacataaatcttattgccataaaaacaccttattaacaatttatgtatttatatatacctcactatatgtctagtgagattttatataattttaatattatcaatatatttattttataataaaaccagatgtatgtcttttgttccattctattgtaacattccatagagctctattcaataaatagaacaatgtgatcaatata

SEQ ID NO: 14438 - DNA, 452 bp, Diabrotica virgifera
ttatcatatctatgactatttcacattgtaaaccaaatttttagtatttctctagtaaatgtattgtttttattcgcaatttttgtacaagatcttccagtttgattatagaaatactccaccggacagcatttggtgagcacagacaaatcttctattttagaaattgtcaaatctcctttactaaacttcgaaacagttttttcaaaaatatcgatgcactgcgtattgttatcatctttttcgtatacaagattagttcttatcacttgagtacttgttgcattgtctcctctgtccttgcatgaatacaaacctctgttaaaaaccacttccttttcacagcatttgtgcaacttttgaccaccgttcagaaaattctccactatcaatacaaacgagtaaaacaattgttcacgcatccttctaaaaatataataacgcgtttatct

SEQ ID NO: 14439 - DNA, 447 bp, Diabrotica virgifera
  misc_feature (391)..(391): n is a, c, g, or t
aatggaccgtgatagtcgtgacgtcaaatcaatgttggctactctgaaatggtttccaaacaaagcaaaaattcacacgatggtgtttgttttcgtttttataattggaatatattgcttgtaggatgtttaatttttacaaaatggtaatgtgttgggtacccgtgattgtaatcaatgctcatagtatatttcccaccatatttccaaatagcactggttaagaacctaaagaaacgcagtaagtactatatagtgtgtaaatccttgattttgtgtagggacatttataaaattaaaagcaatatgattgatatgactaacaaggattgtgtctttagaaaaaatgtgcagatgattgttaaaacaaaataaaattaaaaatgattanacaaatcacgtgtataatccattaacagacgtcaaacaatttgatttgtttggaaa

SEQ ID NO: 14440 - DNA, 451 bp, Diabrotica virgifera
gcttcatgcttcagaatgaatgaaagaagaatattacataaataattatgtcagaatccaccactccattctgacatcacaagacacgcctacaaagatggcggcgacatctctgaattctttttccttcaaccttcttttttatctgtcatttgtttcgtattgtcttctttggctatgtgtaaaatcttattcttcacaataattgtcaggtcctttttttcattgctgaaatctttcatttgtcaactcaaagtgggaggtaacccactcatacagtttatttatatttaattcatttatctcttgcaggccaaaaagacgttagcatagtgcatattaatactttgaatatgcgcagaagagaaagagcgtgcatatacaggaataaatagaatagatcaatagaacaaataatttcgaatggtctctgaaaaatctcgatgcttga

SEQ ID NO: 14441 - DNA, 452 bp, Diabrotica virgifera
  SmartBlast Evalue=1E-11; Info=Endonuclease-reverse transcriptase n=1 Tax=Schistosoma mansoni RepID=Q4QQE8_SCHMA
cgcttccagtaatagatttttaaatgattgccatttttgttctaggttgttactatcatttgcattttccagagctgctatttctaaatcaaccatttctttgtatcttagggcaatctctttgtttctgagcttgtaagttctgattgattcgtattcaatttttcttttgtatgttcctggggtttttgtttttattctttattctagcttccaacaaataatggtcactacttatttctggtcctcttctgactctaacgtcttgaattacctttcgattgtcgcgttctactagtatgtaatcaattattgacttttctgattctcttggtccttgcctagtaaatttatgtatgtctttgtgttggtagtgtgtgtttgttactattaaattatttagtacgcagaattctattaaccgttttccattatcatttctcacttcttca

SEQ ID NO: 14442 - DNA, 454 bp, Diabrotica virgifera
ttttgaagagttttctcacagcagttcatatttcgaccggttgtttccaatttctttcttattatttctattgtaggtatttcattgcttttgtagcagtcgtatattgtggttttcaatagttttacaagtgaaggatttaaaggtcttgaaaatttgtagtcacatcgtttcttgcgatgatagggttcatttttaactattttatatacagtagaaagtggaatttctgttaaatcagaggtggcttgtgccaatagtgtttcatcgaagccgaatttcgtacgtagatttttgtatacattcaaacatacttgctgtgtttctgcatttaaatgcattcgaatcttctttacgagctctttttttttagtaattacattcacactagcactggcaatttctacaatatcagcgttatcgtacgcgatatttacattatcccacgggcgcc

SEQ ID NO: 14443 - DNA, 453 bp, Diabrotica virgifera
acgtctgtagtcttcatcgcgcctatagtcatcgcgtctttcattccgtctgtaattgtcgtcacgtctgtaatcaccatcacgtctatatttgtcctcatgcatggatccttttcgaaaatcatcatcctcctttcgaaacctaaagtcttcgtcgcggtctctaagccttaaatcttcatccccaagtgaccgtctcgcatcgaaatcgttggaatcagaaaatcgagaacctttgaaacttctatcgtttctgaaatctacgtcttttttatcgcgcatgtcgctatcacctaattcttggtttttggtatcttctccgtcttcatcgtcattaatgggcattacatcatataactcctctacttcccctgacgctataagtttgttgagagcatctagaccgctggctagtgcctgttgtaattttgaaccaggttctactggtattac

SEQ ID NO: 14444 - DNA, 455 bp, Diabrotica virgifera
gtatcgcactccgacttcattagtgccttaaccctgaaatgttatgtgaaatcttcgtttttccctctgcaatttccttatctaaagttaatcaaattctgcatccatgttaattatgtatgacggctatctaatgctaatatttatttttagttactgacattgctttaccctgaaattcgcccttaaaatatgataaggcgttatttctaaggcacccatattcaaaattcgaggagtagggattatcaactagagaagttttacttgagtaatttttctatgcctaacaaatgcattatcacatgttagagcaatatttaaaaacgaacggtacttattacacatccactctcgaccacagcgtaacgcaaactctcttgttgcacgcttgctaatgcagagagtgccaaaaccggaaatggtaataacgacacaggcgcactatgcagatt

SEQ ID NO: 14445 - DNA, 453 bp, Diabrotica virgifera
  SmartBlast Evalue=4E-57; Info=Coiled-coil domain containing 25 protein n=1 Tax=Bombyx mori RepID=Q2F6C5_BOMMO
aaaatttgatttttaagttttagttgcatttaaaatactatgataggaatttaaaatggtattttactttgaaagcactgtcgtttcacctcctacagtcttatttatgggtatagacaaaatgaaaatgaagatctaatcaaatggggctggccagaagatgtttggtttcatgtggataaagtatcttctgcccatgtttatcttcggttaccacctggacagacaatagacgatataccctcaacagttttagaagatgccgcccaactcgttaaagctaacagtataaatggaaacaaaatgaatgatgtcgatgtagtgtataccatgtgggcgaacctgaaaaaaacacctggtatggaagttggccaagtgggatttcataaagaaaaggaagtgcgaaaaatcagagtagcaaaacgaattaatgaaattgtcaataggctaaac

SEQ ID NO: 14446 - DNA, 452 bp, Diabrotica virgifera
aattcaatgtggcctgtaaatatgtttaacggattgattataaatcacactgaaggctgactggttaaaaccaaagaaatagttgtttctacagcttctagagcagcccaacttagagacgaatgtaaaacttcaataactttttctttacaaagaaacgtttttctagcaccccaaaattaggtggataaaatatataacttgttttgaatgtcaattaatctttccccagtcttatttagctatgcaaatacaaacgagatatttacacaaaaaattaattagaatgacaatttctaagaccaactacgatgtttggtttgactaaatcaaagttaaatcgatgtataggtataaaacccgcattctggttactttgtgaacaatcagctaacacagaatgcccctatcgatggtgatggtagttttagtcactggtgtatgcgtgatgt

SEQ ID NO: 14447 - DNA, 448 bp, Diabrotica virgifera
tgcttcttaagggagctagagctctttgaagatggcgtcttttaactagtttttcttaaatatctccagaacgcttctagttagaaagacaaaaatcggtacacatatttatcttacagagataaatcgattccatctatggtgaatttctagtaccagtcataggcgtccgttttgggtggggcaacggttattttatcgcataacctttttgtctttaacttttgagcatttttgatactggactatgaattgtgaggtgttctagtactaaaagttactcttgctttaagtcggtaggacacaccgttttctagaaaaatcgatgtgaaactttttctttcctgaatttgaaaaaaaattgaaaataacttcaaaaaaaacggtgtattttaccgaacttaaagcaaggataacttttagtactagaatacctcataatttaata

SEQ ID NO: 14448 - DNA, 453 bp, Diabrotica virgifera
  SmartBlast Evalue=3E-22; Info=Gamma-glutamyltranspeptidase 1 n= 1 Tax=Culex quinquefasciatus RepID=B0W7T9_CULQU
gttttaatggcataaatgttaccacatatattgagagtgctttaaataaaacacgagtacttattaaaaataatactttgctgtcagaaatatttattaatccattaacaaacgaaacttacaaagcaggagagttgtacagaagaccaagactgggaaaatttttagaaaaggttgcagaagaaggcggtgaagcgctccataatggatctttcacagaaagttttgttaaagatatccaagacaatggtggaattattactgtagaggatatgcataattatagtccaagatggagtgcagcaatcaatacgcagtttaaagacggaaggaagatgcatacacattcattaccaagttcaggaccaatattaactttaatgttaaatgtgtgggatggctttttggacaacagcaatccagaatctattgacaattatcaaaaaatgatag

SEQ ID NO: 14449 - DNA, 452 bp, Diabrotica virgifera
gttttcgttgaaagcaaggaattacctggtaaagtttaatggaggacaatggtcttacgactcagtaccaaagacttttgagtcttgcctaagaacagaacgaaaaaaaagaagttatacgaaaaactttgcgaattctacaaataaggacatagcttatatttttcaagaaattctaccggaagttccaatgtgtattttctgaagccatattttgatgaggatgtaaagaggtataccggtaggtactgtgaaaccatttgagacagtcctacacggtaaaatgcgtatgagaaatctaaaatgtagaatccagtacacgtcgactgcaaaataaaaacagctataaatatcaagtatctgaattttattatttgttcaggaaaacagcaaaaatacacatgcaggagcggtagtactacttatttccttggtcttgtaatgatctacct

SEQ ID NO: 14450 - DNA, 440 bp, Diabrotica virgifera
ctggagctgatttacattgttgtgtatgtatgttttcgcagatgtaagatcgcagacgatggagggccatagtggatgcggcgaagactcaccccgagttgtaaagccagtcaagaagaagaagaagtatgtatgttttcgaacatcagttacaaagttatctgcaaagataatataaataatataacatgtacggttaccttcggtataaaatttattaaaatcccttaaaagggctacatcaatcacacaacgttttcgatatataaaatatcatcatcagcgctagaactggtcgatcacatgctgatccaccacaaaaaaacacccgggtacaaactaataaaccctttaaatggtataaaaatttgttacattaacactgctatttaaaatttcaaacgatggacaaacttcacgaggacaaggcccttaggcac

SEQ ID NO: 14451 - DNA, 449 bp, Diabrotica virgifera
ccctgtaaagaatttttttacgcaaattatgttatgggctccctgcgtgatcatggtggggatacacgaaactatgccagtgcccgtaacggcgaaatatgacaaatttggcgaataatgattgaataataatttttttcaatagatatttcacttaccttattattgccgttttgattttttattatttatttttatattttcatactgactttccttcctttcccgatatggtggtatattcctatcatcatttatttccattttgtgttacacatacaccacaaacagtggtgtcatggcaaaattagcagtgcgggaacgcagtgccggaacgcactgctaatttttgtttacaaacctaaattctctattattgttttttcttttcttaaccagtgcgggaacggcgttcccacgcgttcccacaccatgacaccactgattag

SEQ ID NO: 14452 - DNA, 454 bp, Diabrotica virgifera
  misc_feature (394)..(395): n is a, c, g, or t
aataaatacacatgcgttttcaattgcatactatacccggtgttttacatttttcatactttcccaaaataaagtaagtgcttccaacacctggtatatcacagtaaatatgcaatagctcactaaactaatctaacacttaaagtagagttacatctgtgatgcgctttaaaaattccgtacgaaaacttttcgttgaatatatatttgtgtctgtgtacgaaattcttaaagattttttatgattctatcacaagggggagttgctcgagttggatttattcttatatcacaagaacgattaataccaaccgtaatgggtgtcaaaaccatggacataactaatacccagactgtgcacggaaacctaaacctgttccccaagtgcgacagnnaaaaaagatgcgagcaggtcttgcatctctttctaataggcggggtttatctaccacgt

SEQ ID NO: 14453 - DNA, 449 bp, Diabrotica virgifera
taaatgcatttttggtgtattttctcttttcacgacgtgtaatattatttttctacgaccgtttactaacatgctctgtattcactatttttgaatagttattaacacccattactttatccgtgagtaatagttcattactcacgggctgaagttaggttcaagtggtgcatgccgcttttaatatattagaatattagtcgcacctatataaactgcaaataaaattacttaaacttgtttatttaatacaataattattgtactttatatcaataattaacttcgacaaatttctgaagaatttttaactgtaatgggtcagtatattttttataccttgtttatttactataaattttgacgtttatcattttaagagtgttatattatagtatgtgacatattatatataattatgttaatatattatatatacttacttaaat

SEQ ID NO: 14454 - DNA, 452 bp, Diabrotica virgifera
cttttttcgcaaaattaacaatacaagttttccatatggaaacaacttacagggacatactgtatattactcgccaagactggtaatgactttcgaaattttgctcatcggagccgagagcagacatagaaagtattcggaaagaaagggatggatgaccgccgggcctcgactacgtgatttttagatgtagtttacttctcctactaacataatttccggtaattttgctgctcatcaagtggggtgcccattgtaggatttttaaagtcattcagagttttgacaaagtgtacgaacatgtcgacaaagaaaatgaagataagcacacccatagaatagaaaaatgcagatactcatcaaactgaaatttgattacagatgcatgtgcttggttgtatgtttctaaaaactggataatatttgatgacaattaaaaaatttgctacaat

SEQ ID NO: 14455 - DNA, 446 bp, Diabrotica virgifera
gtatatatgaaaaaatgtttgtcggctgatctcaagggatctgaaagtgtcaaaaaattaaagctagattcaaaaatattgttcgtggattacattcatcagtctaatataagttttcttctctttatcgatgctacaaaggcgacatgaatcaatactctggcgatgtcaggatgatgggaaacagttgatgacaaatttatttaagaacgataacttctaacaataattcaagacagatgtctgttgaacgacttaggttgtctgctgaacgacggtttttttgctgcttttttgagggcttcgtaaatttctgactgatctcaagttgaatttcaacctccgatacaagatgctgaagcgttacgtttggcctgtgctcttgtacggaatggaagcatggacgttgaaggccagttccattaacactcttgaagtgtttgaaa

SEQ ID NO: 14456 - DNA, 452 bp, Diabrotica virgifera
gtgtggattagttacttgattggaaggcaatatgtttaaaatatcccaggttgtcgaggcatttaaggatacagaaaatatttttaccgagaatattccattacttccaattagttagtctaaggaaaaggaatgcttatctaatttagaaaaaagaaaaaaatggcagtgaagcctgtgcactatgttgcaaacttatttgattcttctttaacaggacaaagcctcactggtgaagagcatatattagctatgcagtgtatagacaagatattaatcaatcgtcccaagtttattgacaaaaaagaacttatttacagaactaacaaagtcttttccggaaattttctccacggcacatggagaatcaagagaaacgacgaggttactgaattgattgaagagtatgatattgtgaaaagtgaaagactgtcatggctgggcatgttcag

SEQ ID NO: 14457 - DNA, 452 bp, Diabrotica virgifera
ggaagaagtatttccagaccacggtctataaactctgaaaacaacataaattataaaacattggtcgggggggtaccctatgtactctttgagaaagaccagaacccgatattttattttgagcaaaaacttattgtggataatgtttcacagaattaaaaaaatttgaagagaaaccctctgcgtaaaagattttacgcagaagatttttcttcaaattttgtaattaatggtatacagccagctccaggaaatttttccttgtggatttcacagaattatgttctgacatggaagtatacccatacaaggtatctaagaggctcattaatattcagctcagcgggttgctattgtcggaggtgtgaaattacataaacaagggatcatttcataaaacaggtagatttttaaacaaggttgctaaatgaaacattaacgtggtaccagcc

SEQ ID NO: 14458 - DNA, 451 bp, Diabrotica virgifera
  SmartBlast Evalue=2E-44; Info=Cytochrome oxidase biogenesis protein (Oxa1 mitochondrial) n=1 Tax=Aedes aegypti RepID=Q16WL4_ AEDAE
agtcttcagtagaatctctagccaaaactcaaacaggaatctttaaatggctatcagaaagtactcctgtagaatatattcaaaagtttttgctaactcttcatgacacttctggtttaccttggtgggcaacgatagtatgtgctacagtattacttcgaagttgtgttactttaccgctagctgtttatcaaaattatgtactagcgaaactgcaaaatttgaaatccgaaatgcctgctattgccaaagaattgcaaaaagagactgctgtggccataaaactgtacaactgggatgaaaagaagaccaaaatgatgtataatagatcgattaggaaacaatggaacaatttgatcctaagggataactgccatcctgctaaagctagcttactagtattgttccaaattcctatgtggatttcattgtcagtttcattgaggaattt

SEQ ID NO: 14459 - DNA, 452 bp, Diabrotica virgifera
atttttcggctgagtcgaatgctaattttttatccaaaaatatgatatacccaccttcttcatgtttttttatgttttagattgttcttatagattgttttagatttaagttcttcctgttcttgtctttatttagagctttggatactattttacttagttccacaatcacatttattgttcatttccttctctgctttcttccaaattcacatacagaacgtttataatttataattgcgcagtctacgtattatacgtttatgtataaaaacaatgttcacttattagcatttcatttatgtttcaaatattattgaataatatctaaataatattgaagaagataaaaataatgaacacaactgataagttcaattgcaagtgacatttgagtctacttactatttgttaaatttcagcatatttccgtggtgtagagctggttaaac

SEQ ID NO: 14460 - DNA, 450 bp, Diabrotica virgifera
  SmartBlast Evalue=6E-24; Info="BTB-protein-VII, isoform C n=5 Tax=melanogaster subgroup RepID=B7Z045_DROME"
cggaggtacttctggcggttctgtcgtgatcgtcgggttgcatattacgttcttttttaatcgtctccttttggtagagggtgatgatggactaataggtctagtctcttctaaactccagtggtcagtgctttgtgagctcatttctgatttttctgatgacaactgactttcacatttcactgttggattttccataggaatttctgttaaaccttttatttttaacatttctgccgtcttcaatatacagggtaattgttcttgtgatacactaacttcaccatgatacataaaatctactagtacccttagatctgtaaatttaacatctttgaggatgacaatgggatgtttgcaaggatttgtggcaaacaaagactgaaaaataggagctacaagcagacaaaaacaactttgtgggcttgaagctgtttgccttctgctgct

SEQ ID NO: 14461 - DNA, 447 bp, Diabrotica virgifera
gcattgtgtcagttatgaaaggatacatttttggtatgggcagaatactggggctattatttagtataaaaattgaaaagtggtttcagtgaacaaggctatcatcctactacagcaacttatatataaatatattattaaaacatggctgtatagctcaaaacgttggattactaaactattgctgcctgcagcaattttaaactttaaaattttgacaaaatatcagttatatagccacgagggaacatataattattatgctctatagtcacagtttgaacaaaattgcgcaaagaatacgtcgtagtctctcacaggtgaaagtaaaatatatcccgcatgtttttaggcaaagaagtaggttgagtattttttactacaaaagcgacactacgtaggtcaaatttcgacgcaagagaactgctaaaacattagaacgcgact

SEQ ID NO: 14462 - DNA, 452 bp, Diabrotica virgifera
cgtcgtcatattggccgaaaatgagaaacaactacaaagaaatatagaaatatggaatgaaacactaaaaaatatggaatgacactaaataaaaataaaacaaaagttatggtcatgggggaaaaagaagaagaaaagataaacataaaagtagaagaagtaaatatagaacaagcacgaacattccaatacttaggagtagaattacaagataacggaagacaggaaacagaaattaataacagaattcaaaaaacaatgaacctataccatgcaatgagcaataaattcataaataaaaaaggaataacacgaaaaacaaaaattaatgtgttcaagtcaatatatagacctgtattaaccttggttgcgagtcatgggtactaacagaacgacaaaagagtaaaatacaggcagtagaaatgaaataccttagacgagttcgaggagtt

SEQ ID NO: 14463 - DNA, 450 bp, Diabrotica virgifera
catcaatatttataatggatgtaacatggatctatttatgtcccgagaagtaggaacagatgacaaatgtagtggtgactctttttgtattggaaaatctatcattcacattacagcaataactggtatgtactgaatgaagctggtctggaccttttcaatgttgatatgaagaaaaaaggttcctggtttgtctagcaaaaaaatctctttatcacgacaatactgcttataagatcattgttgcacaaacatttcctatactaaaaaagatggctacgaacaggccacattcacaggcgactagtcacctatcgacttgtgcaaagcatttgtccatctaagatgtgtataaagcgtagtttgtcgagttaagacagtataagtgattactttattcaaaacaatctgtgttgtgctcaagaaaagtgacacatttatcacttattt

SEQ ID NO: 14464 - DNA, 453 bp, Diabrotica virgifera
tgccaaatttcaaaattttcggatcaaatttagagtgatttaacaacaaaaaacccattttttgtactattttttacattatttaatttattatgtgcagtatttattgagatatagttaaattttaggtaatatattgataaagtattagcaaggaatctacctgccaaatttcaaaattttcggatcaaatttagagtgatttaacaacaaaaaacccattttttgtactattttttacattatttaatttattctgtgcagtgtttattgagatatagttacattttaggaaatatattgataaagtattagcaaggaatctacctgccacatttcaaacttttcggatcaaatttagagtgatttaacaacaaaaaacccattttttgtactattttttacattatttaatttattctgtgcagtgtttattgagatatagttacattt

SEQ ID NO: 14465 - DNA, 453 bp, Diabrotica virgifera
  SmartBlast Evalue=9E-36; Info=Cob(I)alamin adenosyltransferase n=2 Tax=Actinomycetales RepID=D8I4Z2_AMYMU
attcggtgcgaatccggagcggtcccgccactgtgagcgtcccagcgcaagccaggtctatcccgtaagtcaagtcgcggaaacgccgcggtaccaagggcgcggacccgaaggaggtcatccatgccgcacgcgcgcactagtgccgaacccgacgacggactgtccacgaggcagcggcgattacgcccggtgctggtggttaacaccggtgagggtaaggggaaaacgacggcggccatgggaaccgccctgcgtgcctggcatcagggatggcgagttggggtctttcagttcgtgaagtccgggcgctggcacgtcggtgaggaagatgctcttcgggcgctcggacagttgcatgaggagatcggcgtcggagggccggtcacctgggaggtgatgggtaccgggtggtcttggacacgatcctttgatgctgcggagaaccctgag

SEQ ID NO: 14466 - DNA, 447 bp, Diabrotica virgifera
tgttaatatttgccttattctagggaagtaggtagggtatttaaataattttagaatgtaaattagtttgtaatcattattaaataaagtgatatgtacctaaataagcatggtacaaatataattaatttaagatttattaataaattatgtacatctaatttaataaattaacaaaatcattttctacatttgcttcaaaatcatccacaagttgcaaaaaagaagcctgttgcttaaaaccagtgatatgggtccacttcactgcacaaaaccttaatttaaggcaataaaaaccatgttcttagaagatacagcctggttcttgaaatgtcaataacaaatttgccacttgttttcgttcttacctatctgttcgattttttatttctatgagcatgagcattagtttctatgcaaatagtgaactgaacagcactttctttg

SEQ ID NO: 14467 - DNA, 445 bp, Diabrotica virgifera
tcttagcttataggcaaacgtttgtttacgttacatatttcatttgagttggtcaatcacgttgtggcaattctcaattattatatttctaatttaatactatcctctctaattcctccaaaaccagcaaatttccataaaacgcagccatattaatactttttggttcagttttccttgcaagaaacaatcaaaacacgacacctccaaactaaacctagcctcgcttctcccagtccagccagtcatgtccatgtcagattaatttcgacccgaaatgaaatttcaaccacttttttgcagttgaaattaagtttgatatatcgaaaactgatgacgttagctccaccgaaatccacaatgctcggaaagtcgcatttcgacgtcgccatattaatttcgacgtgttttgagtcgaaatgtcaattagaatcagggctcaggt

SEQ ID NO: 14468 - DNA, 450 bp, Diabrotica virgifera
acaccgagagtgcagtacggctaagatagggcaatacatttctaatggggaataaacgcacaaggttgtcggtcttaaccagttgttgattgctctctcaagagcgtcgcacaggaactgtggcaacaatgaatgcgcattcctatcttaaccatgctgcactcccagtgtgaatttcacaatagacatgaataactgaatgtctcacgagggaggtaaccatgtttttataagggtggggtccaagccctacaggttcattgttttagtttattgttcattttttaggttataaataacagttcatttttgaaaatttaaattattttagattaggtactataaataccttgttcaggtaataagtctagttagaatacattgcttagatcactgatttgtagattttgtactataacatgtaaacattttctataaataaacaatgta

SEQ ID NO: 14469 - DNA, 452 bp, Diabrotica virgifera
gtgctgctgattcggaattcaataacagcattttgctgcagcaaccgcggccgttgtctgattgtgatccgagtcctcctccgtgtagtgttcgtcctacttgtcctctcatcttcgacaatactacccagaagtatatggtacatataggtgtattactacctcaatctgacaaatatattgtgaatatagatcgggcagtagtggaattaaaggccgctgcaaaacaaagtagaataaatggatacttaaacaattctacagaaatcatttatcatacgtacgatgatgactgtaaccaagggaaagcatcagaaaagatggtagaagcgtttaaagaccaatcatgtcttcacatgattttcggacccacatgtgactattgcgtggcaaccgtcggcaggatgacacaatacgtcaacgctcctgttgtaacaccaacaggcttaagc

SEQ ID NO: 14470 - DNA, 446 bp, Diabrotica virgifera
  SmartBlast Evalue=0.000000001; Info=E3 SUMO-protein ligase RanBP2 n=1 Tax=Camponotus floridanus RepID=E2ARH2_9HYME
acacataaacatctgtaaatacattaaacgaaactttaatcttctggaattttgtctacaaaacttacgtcgaccgcaaatgagtatccttcttcataggtcaattgaaattctgcagcggatgcctcgctgtcgaaagttgccttcaaagtcctccaactgtctccaacacctcctgcccactcaacagccgtccaagtacattcattattttctacctccaatttggaatttgttcctatcatagtgctactcaaattggcttcattctcatcattaaagataattctagcagcgaatatattagggtcgtagaatatctgtatgtatccggtcccaacaggtttccattggttgtcggggcctagttcgcttaaagtacactccttactgaacatagtcctctcatattcttcatcctcaacgtattcatcatcatcatcgta

SEQ ID NO: 14471 - DNA, 451 bp, Diabrotica virgifera
  SmartBlast Evalue=2E-12; Info=Polycomb protein Asx n=1 Tax= Harpegnathos saltator RepID=E2B8P0_9HYME
gttggctcttcaactgcttgtggaggtagaggtttaactattattcggggcacagtatttgtgttgccagaagctatcgtagtattcttctttctgcgtttagcttgttgtcgtagtgcatgtttaatggttttcctgctattaatactagttatggtagaatctgcagaactgacgttattattgcttagattttgttgattggcacttgaattttcggcattttcttcctcgctttgacttgagttacccgtattattttctgaaataccatctggagtaacgtctatttccattacgtaaataactacaacacatcaacgcgttttctagttttgttttcttaaaagttcacaacacacaacaaagcttttactatttccatgggtaattcacaccatgttaaaatagtcttttgaatattttacacttcaaaaaaatcgatataata

SEQ ID NO: 14472 - DNA, 452 bp, Diabrotica virgifera
aaacgattcaagccgtttccgggataattgaggcgttccatatataagactcattctgtataataaaaagaggcagagttattcaataattaaggaaatttaagacttactttttgtaaggtgcctagaccttttataaatagtagacatgtataatggccagacattaaacctcattgtttaagctacagtccaaataaacatacaagatttgaattcattaaatattttcttctattaaattattttaatatagtacacttaaaattttcttaaatttctcatatagggttggtcatgcagctttaatattatttattctccaattgattttatgtaaaatcaattattccttgtttaatatctaataatatttttaatgcatactcgtaatgtatagatcattaaaagaataaaattttataaatgttaataacaatatgtacaataat

SEQ ID NO: 14473 - DNA, 438 bp, Diabrotica virgifera
gcgcccgaaaatcgtgttattttgcactataactccaaagatttcaactttacaccaaaaacacccgaataaaaattcaccgtaattaaattctgcatagaggcgtttcttttttcgatctacttcgacgaaaattttccccgaaaatgcgggtctctccaacaaaatccccaattctcaaccaaaactttagataagtttatcaataaataattaacctgataatacaaaagctcctttgtacatattacaattccagaagtcgatggaaattgaataacagctcaacaacaattgaattgccaatcaaaaatttaccgtcgctataataaccacaacaatgacgatacggaagaataactatgactcttgtataaaaaggcactgtacccatccgatacactccacagaattgaaattggaccatccaagcggcct

SEQ ID NO: 14474 - DNA, 450 bp, Diabrotica virgifera
tattcttttatctctttctttgtctttaacttcatcataattcattgaattactgacaacgaaagagataaaagaatagctcaaaaagctgaaaaatttcacgacaatcttccagcaaaaaacgatgcagcggaaaaaggttcttctactggcattgcaaatacagaatctaaacagcaaatgcaaatcccatctgctgatattaatacagagcaaacaaatatggataataccgtacaatcaaattttaaggacaacattcaacaacccaatattcaaaacaattcaatagaaaaagattcctcaactaaaaatgaaggatctatagaaagtcatacaatcaaaccagattcaataaaacctgctgaagcaatagaatctaacatacacgttccagaaacttcagctgctgctatgaaacaaaataatgcattatgttgaacctgaaac

SEQ ID NO: 14475 - DNA, 453 bp, Diabrotica virgifera
atctcgatagcctctatttcagcttcatattctttttttcgcgtcctattttcattcgcgtccacaatagtacgattcaatttaactactacaaatctgtgttaaagaaactaactttcaacgtgaataaaaatgggaaatcctgaattttcattattttctaacaataaattattaaagtcaccttaacataaaatgcatgaatgataacaactaaaacttatgctactttgacagtttgctgatcactctgataagagcaccattttcatccttcaacctctggttctcggatttaagattttccaaattctattacattgcagagttggtaagtttattgatgacacgtgtgagtgatctgttgtcggcctttaggcgttcgttctcagctttcaacttttgtaattgctttagttcctcttccatttcactaagttttctctccatggc

SEQ ID NO: 14476 - DNA, 453 bp, Diabrotica virgifera
tcaatcatctactgcacctacagattctccacctgcgccagtaacagattcatcatctactgcacctacagattctccacctgacccagcaactgattccgcatctactgcacctacagattctccacctgagccagtaactgattcatcatctactgcacctacagattctccacctgacccagcaactgatccatcatccactgcacctactgattctccacctgagccagtaacagattcatcatctactgcacctacagattctccacctgacccagctactgattcatcatctactgcacctacagattcttcacctgagccagtaactgattcatcatctactgcacctacagattctccacctgacccagcaactgatccatcatctactgcacctacagattctacatctgagccagtaacagattcatcatctactgcacctac

SEQ ID NO: 14477 - DNA, 453 bp, Diabrotica virgifera
ttggtcgctagatgtgtgttttttaaagacttattgtaaagaagtaaattaattatttttaacacaatacttatacgattcatttaaggtactttactggctctcctttttctggcatactgtgtgtaatgccgacaccacactttggtatgtgctaattgttatgcggctacgctgtatgcgcccaaatatttgttctttgaagtgcgtagaaaccgacaagtggattgatgcgtatttgctactatgcgtgcgcattaagcgaatattgacgaatgaaccctccacacttcgtcctatgcggccgaataagacgcataagaaataccacatagcgaagtgcggtgccgccattaaggcccggcgcaaattgaacctaagcgagacacaacctgcgccggcgtgtcgagtgacccgtgcatttatttttctagcgcatcgcatattgaacac

SEQ ID NO: 14478 - DNA, 443 bp, Diabrotica virgifera
aatgtcctggtgcaaaatttaaacgtgccagatgtgccctcgttaacagtggagcagtggctggcattctggctctgattccggagttcccttgatctgtttctaaccgaattggcacttattcgaacattacggtctgtggaaggatcgtttctcagttgtctggctgtaacatgatgtgtgcgcagggtctgcatatgtaagatgacgttcatctgcggagttcctgcacctgggacgtcctggaactggtcttcttatggaccgagaggcagccctgaaaggtctgtttgagtttactagggctggatttttcatagttgattgctgtgagtgtgtggaggggcatactgcggtcggtcggcgaaacgtagaacaggtgttactgagagggtatcaaagttgctttcctacgaaggtaattattccatttactaatgctg

SEQ ID NO: 14479 - DNA, 448 bp, Diabrotica virgifera
gtgtatacaatacatatatattatttaaagtttgttatttcctgttaatattatttaatattaaacttaattgtatggatgctctgcttcttagcatttttatacttttcgatagggatcaatgaataaggtattacttttgattctatactcttggatttgaaaaattcctttggtgggcgtgtggcttgaactacgccagccagcctaagaaaatggttgtaaatattttgtcatatgtctttatgcacaagatacatcaggtactggcttacataagatacaggtttagtacttcttgtaaattttctaagtaagacactcgtgttggagacagtataaagaaaaacatccgcatggataaaataacacagcagaatgtgcattaataccaatgtagtagacttagcagtattctttttgaagcgaagcttctatactggtcttg

SEQ ID NO: 14480 - DNA, 450 bp, Diabrotica virgifera
gacactttgtgttacgtaccagatacaagggagtgtcatattttatttgatatagaatacatcactcttattttaaatttttaaccattttaaccgcaagagggttgtttatatcctcgtttaacgcgagtacgttgaagaggatttttgttaccgctattttaaacaaggtaaattaattaattaattagtgtaatgtgattaaaagcagggtaggacaaactatattgaaagtgtaattttgtctaatatttaacattattaaattatttattttattgtagcttttactgaaaagtacataggggaagtatgaaattggttttatagctgtatgtagctaaaactatattctcttaaaaattaaattcaaatcatagatttatttagttttgccctacgatctatacgtactaataatagataaatatcgataaatgatactcatcg

SEQ ID NO: 14481 - DNA, 453 bp, Diabrotica virgifera
  SmartBlast Evalue=2E-12; Info=Chitinase n=1 Tax=Monochamus alternatus RepID=A4PID3_MONAT
cacccagtccactatcccatccattttcttaggatcgtatcccgcatcttccaatccaggtcgtacggtcacacataatagccatctttgcttcttaaagttattctttattttctctaacagacggatatatctctccttatcatccacttctgggtagaaccaaaatatatccaatccatcaaactggtaggtttgtattattttttgccgcacttgataagaaagcttttgtttgattgttattgttagcaagttctctaaaaagtgatgagttcgtgcctccgctaccaccaacgcttagtaatacttttaaacttttgttcctcttttttaaatcagttgtcatcttaaacaaacccatccctttatatttaatgtccaacgattcatctattcgtatctctccatttcatggagaccaacaaattggtagattaaatgagtgcacaa

SEQ ID NO: 14482 - DNA, 453 bp, Diabrotica virgifera
gcttctgcttccattccgttgcaaattgcaatattttgtagataaaaagccgatcaggttttcttgtggaattatctacatatttataaacaaaaataaaaacctcaggaactttacagatttatttacgtttaagaaaaaaatgagcaaatactctgaaaatgaggatgatccttacgaaagctcgggtgatgagtggaaagaggaagaagaggtgaagaaaaacagcagaagatcctctcaacgtttaagtaaaaagccccgaatgacagtggttgaatatggtagtagtgacgattctgatagtgaacctgcaagaaaaaagtcaaaaaatggtgttactaaaaaggcaaaagttcaagaagaagatgaagatgatgacgattattcagctgaagaagacgaggatgaagagataaaagaagaaacagaaaaagtaaaaaattctgggac

SEQ ID NO: 14483 - DNA, 452 bp, Diabrotica virgifera
  SmartBlast Evalue=7E-12; Info=Endonuclease-reverse transcriptase n=1 Tax=Bombyx mori RepID=D5LB38_BOMMO
ctgtaccttatcattagatatccgatatcgacttgtaaaggtatcatttattccatactgttatacggagtggaaacatgtactcttggaattataagtatgaggcggaaagaagccatcgagatgtgaatttttcgaagcatgctgaagatctcttggacagagcaggtgaccaagaatgagttgctaagaagcatggggattgagagagaactcctaaacattataaaaaacagaaaaacgagttttctaggacatttatttacagagcagaaaaatatacaacttcttacaactcatggaagggaaagtggagagaaaataagtccaggaagaagaaaatacttgtgacaaaataatgtaagagactggaggcgtcgacacccattcattattaagaacagctcaagataaagagcaatttgttagttcatatttgacagttaaggtcc

SEQ ID NO: 14484 - DNA, 446 bp, Diabrotica virgifera
  SmartBlast Evalue=5E-23; Info=Histone-lysine N- methyltransferase SETMAR (Fragment) n=2 Tax=Camponotus floridanus RepID=E2A795_9HYME
tattcggacgctgtaccaggaaaatcaaccggtgagaaggagtttgttaagtttaaacgaggcgaaatgagcaccgaggatgatgcacgcagtgccccaaagaggctgttaccgacgaaaacataaaaaaaagtccacaaaataattttgcatgaccataaagtaagttgctcgagattgctgagactataaagatatcaaaagaacgtgttggatatattgtgcatgaatatttgagtatgcgaaagctctgtgcaaagtgggtgccgcgagagctcacaattgatcaaaaacaacaacgaactgatgattctgagaagtatttgaagttgttcaatcgtaataaaacctaatttttgcgtcgatatgttacaatggatgaaacatggctgcatcattttacaccggaatccaatcgacagtccgtcgagttgactgcacatgat

SEQ ID NO: 14485 - DNA, 452 bp, Diabrotica virgifera
cactaatttagaaacaacaacaagccatttcgatatggaagacataaaagccacaaattcctctaacttttattattctatggttcctcctgagaaaaaatctaataattctcaaatagatactgaagttgaggatctactaaacgtaccagattatgatttagtacaaacagccaacgatccagacaacaggccggctatatttttaaatgatgattcaattaatgttgagagtatacatacagatggacaagacgatgagcctgtgcctgaacacaaaggtttagtacctggaaaggtggcagcgatcttagctggggtatttgtagcatttgcaattgtgggatacattgcattaatgagttggaggagatatttagaaaacagatatggtaacagagaaatgctagtagaagacgattattgtgaaaaacaaatgaatgatctagaac

SEQ ID NO: 14486 - DNA, 452 bp, Diabrotica virgifera
gcatgggaaaactgttggcacgacgggcgcctcatttgctctcccggtactacaagcgcaccgtgaggccacttcggagcaatggttgacgcaatcagaagattggaccatttggtacacaaccagaggtcaaggaacagtcgaaacagtggacttcgccagaagaaacatgatccaaagaaagcgaagactgtcctgtggaccgtaaaggtgatggccacattttctgtgattcacaggatgtgattgatctacatcgacattacacaattgctcagaagtgctcttctgccatgacaacgcaccggctcacacctatccaccttactctccagatttggccccgtgtcacttctttgtgtttacaaacaaaaaagtcacttgctttggcagaaatttgagcttaattagaaggtcatcgccaccatggagacctactctgagtgtcagat

SEQ ID NO: 14487 - DNA, 442 bp, Diabrotica virgifera
agttatacagccctccaaacacacgcataccattgtattaaaaatgactgcaccaaaaaaatatataaaagacaatatggccgctagtacttaggttttttgtttgtaacgatgtgtacacattttgtacaaataattcacaatttctttttaaccaagaaaactgaaagtaattgttaccagcagcttctttcccgtaaggtaagaggtaagcgtacatgaacaattttgtattaatctaagtgagattaaaagatattctaaagatacgttcacatctgattgcatattatttcggtcaggtaggattgttaactgtataacccaaacaaggtatacaccttgactacactgacattttttggcaattacgtaagataacgcttgtttgcgaacagccatctcaacaactaatcaagagattcaatagagcgtttcgacc

SEQ ID NO: 14488 - DNA, 453 bp, Diabrotica virgifera
  SmartBlast Evalue=9E-44; Info=DNA-directed RNA polymerase III subunit RPC1 n=1 Tax=Harpegnathos saltator RepID=E2C1V2_9HYME
ttttcaaaggaagccaaattaaggaccgattgtttcattttcgacaaaccttgccgcgttataccgaggacttccccggtatgggtcatttgtgccgccaacaacatgatgtgtctgtaatcgacgctcattccgtggttctccatgaccattttaatttctgacataatcgtttcccttgcggcttctattcctaatgtgtgataaacttccatgatgttgttcgaaatagttttctttccgtctactccataagtggccattacttccctcaaattgttaccttccacacaaagactgtaccgtggagtaccacctttgtcctctcgtgcaataactgccctgttaacggttggtaaacccttaaccactacgttaggaatcagttccttcaattcacccagggcgaaattaagccttctggaatttttgcttctattgggatggacggtt

SEQ ID NO: 14489 - DNA, 452 bp, Diabrotica virgifera
  SmartBlast Evalue=1E-21; Info=RNA-directed DNA polymerase from mobile element jockey n=1 Tax=Drosophila funebris RepID=RTJK_ DROFU
ccaggaaattaaaacaacccagtaaacacataccagcattaagaaatccagatggctcatggtcgagaacaggtcaagaaaaagcagagacatttggaaaacatcttgaagaagtttttcaacctctaccctctgtcagtgctgaagaagatgaagctatctatgaaagtctagcaacaatccaacagccaagtgagcaaattaaaccagtaacaaaaagagaggtaaaaaatactattcaatatagattaaaaaccaaaaaagctccaggctacgaccttgtaacaagaactatcttaaaagagttaccagataaaggtgtaagtatgataacacaacttttcaactcagcactaaggctcaaaattgtaccagcgcaatggaaaattgctgatataataatgatccataaacctggtaaactaccccacgaaaatacctcctatcgtcct

SEQ ID NO: 14490 - DNA, 451 bp, Diabrotica virgifera
  SmartBlast Evalue=4E-38; Info="Tryptophan 2,3-dioxygenase n=2 Tax=Tribolium castaneum RepID=T23O_TRICA"
gtgaaataagaagcactgattcaaatgagctgccctcttgcatcacatgattactctcaagatggagatcaacttggtgacgaagctggtatgctatatggagaatacctgatgcttgacaaaatactgggagcccaaagacccttatcagaaactaacagtgatttggtgcacgatgagcacttgttcatcataacccaccaagcttatgaactctggttcaaacaagttatatgggaattggattcgattaggcatatttttagttcaatattagaagaatccaaaaacgttagaaattcttcgaaggctgaatagagttgtacttatattaaaggttttagtagatcaagttatgatactagaaacgatgacacctgtagattttatgaattccgacattatctaagaccagcatccggttttcagagcttgcaatttcgcttgcttg

SEQ ID NO: 14491 - DNA, 453 bp, Diabrotica virgifera
gccgccttaagtaaccaataaaagatgcccgagttttttcaagtattctacaacattcttgtttaatataatctattttgtgatcatgctcttgtaagctgtataatggattcatattaaattcatccacgtcttcaattaaatctaaaaatttgtcttcgttatattctttggtatcattggcttcaagccaaagtttaaatgcatccaaatacattcttttatactgaaagaggtagttacggtatatgcccctacatggtggattctgtaacacattttgtattctatcattgaatcgatctatatcttgagtattgaaagtcacacgtgccatttgttacctgcatattttgtataaaaataaggctcctgaatattcttcaggtttattaatagcctattctaaacaaatgtattgatcattatcagttttccatttcaacacaatca

SEQ ID NO: 14492 - DNA, 446 bp, Diabrotica virgifera
cgattggcgccagtcccaaaccttgagcttaattctctatgtaacaaatctgaaaaaattgaaaacttttgctttgtgcgcccatatattcgtctaaaactctagagatatgctcctaaaaaaattgagaaggaaaaagttgcatttttcaattttacatattatttggctagctagaacttgaaaatttaatgtttattatttaaaatatagcagtcatggggaaaaagtgcaaaaaatgggagttttttctttaaatgttttcaaccccttaaacacaacttatagccttcatattccgtgtagaaaaactttttaacacaactgaaacatgtaggttataatcgttttataatttgtataaatagtttttacataactattttgcaaatatgataaaatttacataaatatattcgtctcaaaattaaaatcatttcatatca

SEQ ID NO: 14493 - DNA, 451 bp, Diabrotica virgifera
  SmartBlast Evalue=9E-76; Info=Chromodomain helicase DNA binding protein (Fragment) n=1 Tax=Aedes aegypti RepID=Q17IV5_AEDAE
tagaatcagaggtaacttaagacaagctgctattgatcgattttcaagaccagattctgatcgattcgtgtttcttttgtgtactaaggctggtggtcttggtatcaatttaactgcggccgatactgttataatttacgacagcgactggaatcctcagaacgatttgcaagctcaagcaagatgccatcgtatcggtcaacaaaagatggtaaaaatctacaggctcttgtgtagaaatacatacgaaagagaaatgtttgacaaggcttcgttgaagttgggactggataaagctattctgcaaagtatgaatacgtcacaaggcggcaaagatgctggtaataggcaattaagtaaaaaagaaatcgaagatttgttaaagaaaggtgcgtacggtgcattgcttgacgaagatgatggtgacaaattctgcgaggaagacatagat

SEQ ID NO: 14494 - DNA, 451 bp, Diabrotica virgifera
cggtcaagaagtggtctgtcattacctccaataacaacagttgcgtctctgtctctgaaagttgggagatcaagaataggtctgtcattacctccaagaacaacagttgcatctctgtctctggatgttggaaggtcaaatgttggacggtcaacaagaacaggtcggtcattacctccaaggactacagttgcgtctctatctctggatgttgggcgtgttaaaacatcgttgataacttcgacggttttatcagcaccattctttacttgatctaagacatttttaccaaaatcgagcactacagaactgtctcttggacggccgcctagaacaatgttaccattctcatcaactggaataactgagtctgtatctgtggatgttggaagtctcaaaacaccattaacaacttcaactgtcttatcagcgccattcttaagctgatcta

SEQ ID NO: 14495 - DNA, 450 bp, Diabrotica virgifera
aaatatgtttcaaagtggcaggtttttgaataagatccgacgacgttgctcacaaatttagaataattattataggtaacattacatggatagtaggtaaagtccttttcatgagcatttttcagtgcgtcacaaatgatagaaaaaaggtgtccgtgataataaacatttataacatttattgtaacatgacattttagttaaatctgacagttgccacattttatttgcaatttggcataaaaacaaatcaagtgtgtttattgaatttataatatagtatgttctttgatttgtatagtcttataaatagtacagattatattcgtagatatattatataattcgtaaataatcttttttcgatatagcgccatctatcgacaactagaataaatgttataaaatgtctctaatcacagacgtaccttttttttccgtcacatacaa

SEQ ID NO: 14496 - DNA, 452 bp, Diabrotica virgifera
atcgttaatagataaataaacaaggtatatttacctagcataatttaataattatttattaatattaattaaaagtaaatataccgtgtatatttatctattaacggtattatttatattaagtgaggatagaaattgtcagcgacaatggatagcctaagtctgacgtcacaaatgtcacaaaattgggaggagattatattgactccaaacaattttgtttgtaaaaaaaaattgtcataaggaatttttcatttatgtgctttgtgtggcaaaataatacttcatttaggtgtttcgttgagaaacgtgttagttaagagatttttattcgtttttgctcaggtggtttttattccttggtggttgaaaataaacataacctcaaaactgtttacgttcttatcattgcattaaattaactcacctgggcaaaaacgaataaaaatttc

SEQ ID NO: 14497 - DNA, 449 bp, Diabrotica virgifera
gtgagctgtggtgtcgaatagatataccatatagaatggcggatgatttcctccaacttattttatcacataagaaatttaacgtaaagtaaaaagttaccaccagggattgtctggagtgaggagacatgtgggtgacaactcctgttggagtataaataggaatcattcggtgagatttatttttttgtaataattttttaattagccattgtcatgtgttttttgttgtggaatatttaaaatattagtcccattgttaaactttcttagtcaatctattaagggaagggtgtagatgatttcgatctttatattatctttatatcgatctttatattaatggggtttttggttttacataaccaaacatttttggaagtcctcaaattaatattggaaataattaccatttctctgtaggttttaaatttattgaacatccaata

SEQ ID NO: 14498 - DNA, 448 bp, Diabrotica virgifera
atcaatttatacaaattaaatgaaacatattattgtgtatttctttaggttaacattaatagaaatattcaaatattatttctacgcgtatataataaaatatgtctagtggctgtaataccagtgtactaggcaaaatgattctaaaaaagaacatacctaccgcctaaatatttcgtgttggtatcatgtgacgtcacagactatgacgcggatgacgtgcaacggtaagtaaattagacgaagtatatttacatatttaactaattttaatacttacttctttccaaaatttttattaaaaaaataccaataattaaaaaaaagtaaggcaacacaacaacataaggtgttcctaagtggtcacccatcaaaaaaataaccgcacttatcttgactacttttaatcttcttttcatcatattttaacatttattattctactccc

SEQ ID NO: 14499 - DNA, 452 bp, Diabrotica virgifera
  SmartBlast Evalue=3E-43; Info=Pyrexia n=2 Tax=Tribolium castaneum RepID=D6WP79_TRICA
gacgtgattgaaaaatacaaatctaaattcgactactctataaaactaatagaccacgagttgggtgacattgattgcgaattaaaattagatttcacagttcttgtacctacggttggtaacaaagaaacggaacttcttttgaactttatagaagtgggccataaggaaattctcaaacatccgctgtgtgaaacgtttttatttttaaaatggaggcgcattagaaagtttttccttttcagtttattttaccattccctttttgtattcttgtttaccttttatacggtaggtgtatttcttcgaaattgcccatctgccaaaagccatgtcgatccttgctgggtaccagaatatgtcaagactgtcggttatgtgctattaattctgaatttattattgttagctaaagaattatttcagatagcccattcgtgggtcacgtatgt

SEQ ID NO: 14500 - DNA, 452 bp, Diabrotica virgifera
  SmartBlast Evalue=2E-39; Info=Bifunctional coenzyme A synthase n=1 Tax=Harpegnathos saltator RepID=E2BI82_9HYME
cagtagtccacacctcatgacacatactttgccagccagctgttagtagtacagcaccttctacaacaacgacttttgctttgctgttgctaattattgtttgaacctcttctgcaatggctggccaaactagtccattcaatgtgtttaactcctccttatcagtaaaaactatcccaccaagaacttttctatcaatctctccatttgctgcaacaactttttctccaaaatggcctacaatttttttgtagcaaggtttgcctcttttatacagctcatgtgctatgagatcacaatttataatttgagcacccaggttttccatatgagttgccactcctgactttccgctagcaactccacctgttagtccaataacataaggcgattttggaatatctttgtgttctataggtttcagaagtgtacccaatagccttattctagtt

SEQ ID NO: 14501 - DNA, 451 bp, Diabrotica virgifera
gtcttggctacgctatgacttttatgattttttattttctttattcttaataaacattatgagtcgctagagagcctataataaatgaggcctatagaatcaaaacctgctagatctatgtgttgaaattttgtcaggaggctaaatggtaggggagcccaagaggggatttttacagttactcgagcgcgtcagattatcatatggggagaaacctggtaccctgaaatgtacttctaccatatattggcttttaacacagggaagttcgttaagggggggcccgaaaaaataaatatatccttaaaatactcgaaattgtcacattaagataaggtaagttaagtacatgcaaaagagtgtacatttcaaaaatctcacaatttagcggggcgtaaggaaatgggtgagtcaaaaagtttcacaaaaaaaagggaatacgttcacaaaa

SEQ ID NO: 14502 - DNA, 450 bp, Diabrotica virgifera
taattttagccaatttccacagactggaggacaacaagctgcattccaaggattcggaacctcatcaaattttccaacttccggctttcctatgcaaaatggaagtatgaatcaagcatcggcgcatggtcaatggccccaacaggcccaacaaccacaacagcaacagaattggtttaaacaacagcagtatccacaaggtccacccccaaatcaagttcagcattttactcccaattcaaaccaacctcaaggaagccaattcttaaacaactcatttggaggattcccacaacagaacttctcgccttcattcaacccttcacaacagttccaaacgtccaacccgatgggccaacaaaataccccaaatccattttttaataatcaaaacttacctcaacagttcagcaatttgaatgtgaggtcatctccacactcgcaagcgcc

SEQ ID NO: 14503 - DNA, 451 bp, Diabrotica virgifera
aatctttttagaactataaacaatattgttattcaaatttttaatttaattttgtaaaaatctacaatatggatattttcatttggtctacatttctcggatttaactatggtctgtctttaaaccaagaggggtaattcaaatttaccgcgccgtaatacttgtttgtaattagtcaaacctcagacaagtttactccaccgttatgaaatttttacgctaatgacatttatgaaatgttgacactactgccatttcataggttaattaagttatatcggcgattttttgtgttttctgcgttcttcctttaatgtttaggtttttagtctacttttatataaaaaacaattgtttatataaaaaacagacgtattagtataatataatatctatggatcaccgtcgaaggccgatatgatcaaccaaaaaaaagatgtatttggtgata

SEQ ID NO: 14504 - DNA, 445 bp, Diabrotica virgifera
  SmartBlast Evalue=1E-35; Info=Serine protease P94 n=2 Tax= Tribolium castaneum RepID=D6WP82_TRICA
acatccttcagcatgtcatttacaatcaaagatccattcttatcacaaagagtgaataaaatttataaaactaaggtctaagattatctaatatccagtccatgtaataagccaccctggtgtaaactcctggaaaaccttctaagccacattcacggggtccaaaagatacgacaccttgttggatgtaacgagcgttgtcatcaatcaatccggcaacatgaagtggtcctccactatcaccgggacaagaatcttgcttgttcttacctccagcgcaaacttgcttgtaggtgatgcgagctcgactttgattcttgtatacgtttctacaataatccaagtcgactactggtaaatcaactttttgaagtatatcacttgtggctcctgtttgtgtatctgttactccccatccagtaactgttactcttttcaacttctc

SEQ ID NO: 14505 - DNA, 451 bp, Diabrotica virgifera
  SmartBlast Evalue=6E-40; Info=E3 ubiquitin-protein ligase RNF25 n=2 Tax=Formicidae RepID=E2AFI1_9HYME
gaaagaatgtctgtgaacgaaagggtccaggaggaattggaagcgttagaagcaattttattggacgatatctccatagtatatgatgaacagggtcgcccggaattggtcaagtcgacgatttttccctcaactgccaatgaagtcaacaaacaatatgttcgtgtaaccctggaagtgagacttccagaagactatccagattgcatgccaaacgttcaattaagaaatcctcgaggtttagatgattctacgataagcgagatatacaaatcaattggggataaatgcgcagaatatgtcggccaacccgtaatttttgaattgattgagctcatcagagaaagccttacagaaagtaatttgcctacatgccaatgtgctgtatgtttatatggttttacagaaggggatagttttaccaaaactgagtgttaccactatttccact

SEQ ID NO: 14506 - DNA, 450 bp, Diabrotica virgifera
gcctcctctgaccagccgccactgattttcatatgtctacaactaggtttaaagttcaggtaaatgatttctgcagtgtcaatatgggcattatgggttttaagagttaatatattttttaactaaaacacaatgattaatcaattcaagactggcatataacaaaaaaatacagctgcttaagttgctgtgtcaaattaatggcaaattattttaataaaatacatgtttcttctgatatagttttccattgtatcttagcacatgcatgaaactattcacgaattacactaagtctcttttttactcacagaaactagtatcgcaaaattaaaccgcttgtccatagaaaccacaataagttaaacaaggataaacaatacttgtctttgatatcttgtttactatgaattttggcgtttattattttcaaaacagtgatattagcgc

SEQ ID NO: 14507 - DNA, 444 bp, Diabrotica virgifera
ctcgtctgttatagcttctgctacagagttgtccgttgtgattttctctaatccaatcagttttgtcgtcgagtaattcagttttgcttcatgttttgatttagagtaagagttggtgtactatttacagagttaaaggcttgctgaaggtttataaatagtaggtgtaaatttatgtaatgttcgtagcacttttcaatcagttgtgttagtagttgaatggcgtctatcgtcgattttcttttcttaagccttggtgttaacgccctagtatattttaggtatattttctattcagtttcccgagatgcttgtcaatattttgtatggggtgttcggtggcatttatttttttagttagtactatcccttagatcagtaaagtaataactaatataaaatgattttgaatcttttaaaatgaattgtgtcaaaagtatagtt

SEQ ID NO: 14508 - DNA, 452 bp, Diabrotica virgifera
attaaagcaatttctgagaaaagaccacgtccacatttaagatgaaggcttactttgttttcctgattgtggcagttacatttcttcatgtagaaggttgggtagcaataacgccgtctgataaaggaacagaacatctaggtgattgctactcatctgataaaggtataggttccatgaaatttggtgaaaagaagcaacaagaaggacactgtgttcaattaacctgttcaagcggtactagatatattcacgaagcaggctgcggatctgtaggagcagaacctccatgcgtagtaacatctgaagatctgtccaagccttatccagactgttgccctggcatatcttgtcctgatgcctaacaagccttcgtacaagaaacatgaacggatgtaaataaattataaatttaaatgtttactagattataataaattttttctattctt

SEQ ID NO: 14509 - DNA, 450 bp, Diabrotica virgifera
  SmartBlast Evalue=3E-49; Info="CG3964, isoform B n=6 Tax= melanogaster subgroup RepID=Q9VQV6_DROME"
taaatcgaaaattgattgaactaagggaccttttacgtgagcatccaggggagaggcgctgtgaagacttggcgaaatattaacctctaataaccatggccttaatttatcatccaaaagtatatcaattccaaataattcgtaacagttgtatctactgtttatattttcttcacataactgtaccacaggtgattcacaggctataattgtttttataactaattgttgtaaatttctccacaaggctttagtatcgacattgtaaccttgaagatattccattaatttagagattgtccatttatgtccttggcaggcatttgcatcttcattggcagtatattgactggaaaatttatttatactataatttgtcaaatgcatatacctatcctttagatctttggtatcactactatattttgcactggcaaacctggctaatcc

SEQ ID NO: 14510 - DNA, 448 bp, Diabrotica virgifera
caaccaatcgtccatatctacttcttggggtgtttctaatgagtcagaggcatttttgaccgctttgagagtttcttcttcttcctctaccgcatcactccaagccttatttttcgggatagcgagggattctactgacgtaacagattctttaccaactggcacttcatcattttctaagccggataaattaccatttgatatctttgaagaaactgctgacctttcacttttgacgctaccactttcactttttacggaaggcgaagaaattttatatgcaactcccattttaaccaacaaattactaagagaaataaatttcattatggagggttccaaggcgccagcaattttgaccttctgtaccacatgttcataggtatggattttccttgatatatcacctggcactttggcaccacaaatctccttgtacttggtaaac

SEQ ID NO: 14511 - DNA, 451 bp, Diabrotica virgifera
  SmartBlast Evalue=3E-45; Info=F-spondin n=1 Tax=Aedes aegypti RepID=Q170L4_AEDAE
ttcccatttcttttatttcgtcttcgacagattgtgtccttcctgattcagctaattctttcaacccttcactcgcataatcttgctcattccaaaaggaatgatactttcgatgcgatgctccaataatatcactaaattttgtggtccagatatcagagggataatttctaggatgggtatttctagtccaacgcccttcaaacgctacctcatatttggcctcagaacaagcacaacacttatcaactgatgggggtttaatattttcatcaatctcattgtcttcgcataaaatttttgaaagttgaccatcttcactgaaccagttttctctagattctactactgtagccttaatagccacacagccactattttccggaggtgcagtccaataaacctgtacttcccatttaggtaacttgctattttctactactgtgtttgg

SEQ ID NO: 14512 - DNA, 450 bp, Diabrotica virgifera
tgaattttgtttactttaaatcgctattttataaattatttctttaaatatgaagaacatcttcagtattatacttttgatttgcttggctctttgctatggatcccccacagaaaaagaaagcgaatctcatggacttgggaatatgtggtgtctgccttgcttagcaattcttaatgcaatatcagattcaataaaggaaaacgataccgaagatgttacaaaattagccgaaagtctgtgtgcagtggtgtctttcgataattgcaaagatatcatggatggaatagtaaatgttacagaagctatagtcaaaaatggatacgaacttattgacatttgttatgccgctatgtggtgcaatgcttaataatttagacttacagattatgtatttttatagtaataggtacaaatacattgttaaattaagtgaacagtataatctat

SEQ ID NO: 14513 - DNA, 448 bp, Diabrotica virgifera
gccggccgttgtatgaaagagaggtccccaagtttcagtgcaacagagagaaaagattctttcccgagagatgctgcctctatcggagaaataacgcaatagatatctaagcgaagccgcggactccagactttatagtcagctgatagtttagtttcagtacagagaggtatgcaggtgctgtctcgctaagatgactcgaaatcgttttatatgtgaggtgcgaacttttcattttctaggaggtttaaggacggggtctcgctgaaaattttactcggataaatactgtgctcgtatctcgtggtaaaatctaaaccaaaagtattggaaaaatctatttcgcatattggttcatcatagtttgttacctacttctcatgtcccaatattataaaattataccagggaagaacaattatatcactcaaatttgtctaattgtcta

SEQ ID NO: 14514 - DNA, 438 bp, Diabrotica virgifera
tgtttccagatcaatacacatttgcgatgatttaactagatccgctcaactctccttagacttatctctcaatagactgtctgatttcaatagaaattgaagaaggaacgaagaaaatcgtgtaataaatccatcagcagaattcagtaggttttggttgccaatactgtaagaagtcaataacaagaacataccaacaatagctgagtaaaggaagtcaaagaacagatcatcgacaattccatacacattacaacacacattacatctttgatcttcttctttagcccatttctatcccaactttagacatatgcattccgaaaatctttccatatcttaaaaatgtataccatctttactcacttgcaatgcgaggcaaaaatttcttaattttccacttagattagagagcacagccagcactcccatcgacga

SEQ ID NO: 14515 - DNA, 444 bp, Diabrotica virgifera
  SmartBlast Evalue=5E-20; Info=Maelstrom n=1 Tax=Tribolium castaneum RepID=D2A077_TRICA
ggcggctcatcaaaatcagcgcaccaagtgtctaacacatgttgcaacattttaacaatatctttcttagcatacaagggagggaatttcttagtatctccggttttagataatataaattctttcatctctgtataaacttcttccacattgtcgtcgtcgtcaccagttaaggggataggcagttgatgtgaatcttcagattgcttttttgcgtcactagcataccccagtggtagtctacctggcttaataattttatgaaacacattttgaggcaaaacgccatcctccaagctgaagcatgaaatggcaatttcagcgggataataccgatcaccactggcatggtaacagaaagtattgatatggattatgaagaacatttcatctcggagccgacaattttctttggcaaatttcaaggtgcagtcgatatcatct

SEQ ID NO: 14516 - DNA, 450 bp, Diabrotica virgifera
  SmartBlast Evalue=1E-14; Info=Zinc finger protein 554 n=1 Tax= Homo sapiens RepID=ZN554_HUMAN
aaatcgttgctaaatagtctaaaaatattggtgatctattgaaaggtttagcaagagttaagtaaagcctgtatctggtagagatataatggattaggatgtagttgattcaatattaacatgaacataatcagttggttcaattttatctacaattcctcgttcatttaattgttccgacttacagttaataccattagtattcaccctgcaatatagtttaatatgcctattaaaagaacttctatctgtaaaagctttagtacaagtcacacactgaaaaggtctttcgccactgtgatttctacgatgtatcacaagatggtgtttaaacgaataagttttttacatatgtcacacgagtaaggtctctctttagtgtgagtttttaagtgcatgtttaacgtatccttcctagtgaagtttttggaacaaacctcacaactatac

SEQ ID NO: 14517 - DNA, 448 bp, Diabrotica virgifera
  SmartBlast Evalue=1E-54; Info=DNA replication licensing factor Mcm2 n=2 Tax=Culicini RepID=B0W690_CULQU
tcaagaccgtacctcaattcacgaagccatggaacagcagtctatctctatatcaaaagcaggtatagtcaccagtcttcaagcaagatgctcagtaatcgccgctgctaaccctattggtggacgttatgatgccagtatgacttttgccgagaacgttaatctatccgatcctattttatctcgttttgacatattatgtgtagtaagggatgaagtggatcccattcaagatcaacatttagctaaatttgtagtcggttcacatatccgtcaccatccatcaaagaaagaccaggaacttcccgaagagccacaaaatgacatgcagataccacaagaaatgttgaaaaagtatatagtatatgctagacagaatatacatccaaaattacaaaaacatggatcaagataaaagttgctaatatctacagtcaactgagacaag

SEQ ID NO: 14518 - DNA, 440 bp, Diabrotica virgifera
tttaagttatcttggttataaaaaaataaattataaaaattcttaatacctacagtcaaaaacttcgtattttgggcttctaaatatctgtttctaaacatccaggaaacgaaatgggttagcaagaaaatttttacaaaataaaagtacctatatagtttatgatctttcaatttgtctggatgtttaaaagacttggtgtccataacataataataaagtaggtacctatttattaccgacagaccttataaactagacaacatataaattagtagggcaaaatctatgcaaatgctatttaaatgcattaagtttttcgaatcctgagaaaactaataaatatttttgaacaatttgaacgcagaattaaagattgcattattactgagggctgaaagtccattataataaacaaaaaagtttccttttgaatgaaa

SEQ ID NO: 14519 - DNA, 449 bp, Diabrotica virgifera
  SmartBlast Evalue=2E-33; Info=BEL12_AG transposon polyprotein n= 1 Tax=Anopheles gambiae RepID=Q4JS97_ANOGA
ggcccttttcctataagagcttccaaacttcgaaagtctcaaactcttaaagcgtatttgtcgctttttatttgtttctcaacaaaagctcttcatttagagctcgtatctgatttatccactgacgcgtttttagctgcgtttaagcgatttgtcagtcgtagaggccgatgtcaacatgtttatagtgacaatggcactaactttgttggagccagagcagaacttaacagattggcatcacaagctgcttctcatgaatctattcaatggcatctcattcccccttcttctccacactttggaggtttatgggaatctaatattaagacggtaaagggtcatttaattcgcacaattggagaacaagtactaacttttgaagagttatatactattttttctcaaattgaggccatcatgaattcgaggccaatatgcccgttaag

SEQ ID NO: 14520 - DNA, 451 bp, Diabrotica virgifera
gtccagagacaagacgatatcaaaacaacaaagaaaatgttacaatggaaaccaatagaaaggtaaaagaaaggcccagaacgaaatggttggttggttggcgtggaagacgacctgaaaactatgaatgtaagaaaatgggagggaaagggcacaagagaggtctgaatgaaagaatacagcccgacaggcaaagaatgatccagggtttgataccaaaagaagaaggaaaaggtctgaagacagagacaacctcaccagaagagaagaattaaaagtttaatagttgcaaaataatactggacattacaaaaaatcaaaaactaaatattaacggagtactcatccatatgtagaataggtaggtattcaacagaatttatagaatcatatttgtatgtgaatacaattttaacaggtatagagagttcagtagataggaagaatggaa

SEQ ID NO: 14521 - DNA, 448 bp, Diabrotica virgifera
  SmartBlast Evalue=7E-17; Info=Bromodomain adjacent to zinc finger domain protein 2B n=1 Tax=Camponotus floridanus RepID= E2AXF5_9HYME
gctgtgcagccatcaggttggatttcaaaacactcatttgttgatttatcgaggcattcgcgtctagtagtggaacaggtttaatacctaatgctctactctgtgctaataacgacgctacagtattctttttcggtttactaattcctcttcccaagttcctaggccttccttccttttgactataactcaggcccggagatattggcgtaccgcttgcagatatcgtggcagaggtggtacatgtcgaagacgtcgagctacccccgtcggagccttcgtttctacttggtggtcttggagaatcaactggggagaataggtgggaatagaaattgcttgaagatgaagacatttggtttccggaggtaatgatccgtcttggcttgggaccaggttttcttcgagatattctgtctgttccaacacttgatgaaatattgctcaa

SEQ ID NO: 14522 - DNA, 446 bp, Diabrotica virgifera
tataatacaatattccagttacccgtcgtttgtcaccattaatccctttatcctaaagataaataacagtttgtcgacgaaaattccattcgatcaaatgttcgtcgatgaattgtccattcgatgaattgtgcattcgaccaactgtttgtcgaccaactgttgtcgaccaattttccgtcgacgaagtgttctcgaccagctttccgacaccggatttgggtgtcattgtattctgttggttaattcctaccattttagccaccgtacgtcatgattggaaaaatagcagcgaatatacgtaactaaggccctttcaatattttactgtaattgatttttctgtgtcattgtattctgttgactgattcctatcacttgagccgccgtacgacacgcttggaccaatgggagtgaagatacgaactaatacctaacaagaggtt

SEQ ID NO: 14523 - DNA, 450 bp, Diabrotica virgifera
atttaaactgtcattgaaggctcataatttcgtaacgatttttgtagagaagatttacaagattgaagtcggtcttatttaaatgtctgttctagtcatgggcttttctgaaacttcagtaacataagatggtaaatccaagaaattaacgcaccaccttaaaaatgggtcatttttgatgtctcgaatttcctgtcgtccgatttaagtgattgttttaatatgttatatccttattctttaacaatatcgctgtactaatattgtcgctagacatttaaattgtcattgtataccgagtgtaccaatcaaactgtgcttttttttctgaaagttcaccatacccagtggaatattctagcatttctgaaatactgaaattaaaacctaactatagcctcagattttcttaacattctgttttttattcaatcgcgtatgttggataat

SEQ ID NO: 14524 - DNA, 448 bp, Diabrotica virgifera
tttcccttgatccttaatttgtggttacttgtaatcttgcggatcaccgtataataatagattattaccacttggttatgataatttgaattttaggaaaaaaaaaattttttgcgtaaaatttttttttctcctagtaggaggggattataacatttcgttaacttctaatgatctttattgttattttatttaaattttaataatgttctgttattaaattatacttaaaacaataactagtaaatatttcgtctttctctgacgtcataaacctatagattagcagacctgtatatttgtatacctggtgtactcctagcggcaaccaaattaactgtattgtgacatcgtcctcgttgcacggaaaatatgccactctggtcagggcgttcaactcgagtggcagatagcctattcaagtagagcggcgaatatttcaatctta

SEQ ID NO: 14525 - DNA, 450 bp, Diabrotica virgifera
  SmartBlast Evalue=2E-14; Info=Endonuclease-reverse transcriptase n=1 Tax=Bombyx mori RepID=D7F157_BOMMO
gtcaggaaaccaaatatcaacaagggtggtctacttaaacatcgcaataaacaccagatatatcctgaagattattcaagtgtacgcccctactacaagtcatccaaaccaagaagtccaaattgtacgaaaaaatatcctgtgcaatcaaagacaatccaacgccaaaatagacactaaggaacacccctctgaaataataatgggaattttggaagcgaagacagaaatgatagaggcaaacaactgttaactttcttttggaaaacaatatctatcaaatgaacagcttctttaaaaagaaaaacacagaagatggacctgggaaagtccagatggaaaaacaaggaacgaaatcgactatttcttaacaaataaaaagaattatttaaagacgtaaatgtgttaaaccagttcagcacaagcagtgatcacaggttagtaagagct

SEQ ID NO: 14526 - DNA, 450 bp, Diabrotica virgifera
atactggtctataggattctgagctggttaggggtttccgtggtttgggaaccataaaccactataggatgatagttttcccttaagtaggcctaaaaccctggaatgaacaaaaataaaagactcgttggtgctatattgtttctcaccgcagaatgtagcaaattgcttttaaattggtttttttgtagtttcggttatacattgtttagagaactttgtatattgtcataaaaaaacgttccaaagtatgaatagtttgtggaagagtaaagttgtgtggagtctgaaactatgtcagtttttaaatataaatatctgatactagagttttgcaagagatcttgtaacgaaaatatgacaagatttaatgcatttaaatatttatgtattaataaatcgtgccaacagcatatattatgccattttgaactataatataccatagaa

SEQ ID NO: 14527 - DNA, 451 bp, Diabrotica virgifera
  SmartBlast Evalue=7E-47; Info=Dolichyl-diphosphooligosaccharide- -protein glycosyltransferase subunit DAD1 n=12 Tax=Drosophila RepID=DAD1_DROME
cacgtttcttcgtacattcacatattcaaaacctcttgaatttctgaaatatggctcaggttactaaaataatttctaaattttataatgaataccaaagtaaaacttcaaagaagttgaaagtaattgatgcctatctgttttatattttattgaccggcattatccaatttgtttattgtctgctggttggtacattcccgtttaattcctttcttagcggatttatctccaatgtcagctgctttgtcttggccgtttgccttagacttcaagtaaatccagaaaataaaagtcagtttagtggaattagcccagaacgaggatttgctgatttcatttttgcccatattgtacttcatttagtagttatgaatttcattggttaattttaaatattccttgtaagtaaaaacatgtattactttcaataaaatttacttttttttgt

SEQ ID NO: 14528 - DNA, 430 bp, Diabrotica virgifera
gtatttatagtcggcgcgtggcaatcggttggaaaatttacaccgaatataacaaaattcagtttggcaacattgtgtgaaatgttgatattaacatatccttctaagataaacagaactgtaatttagtccagacaaattaatatattcttttgccaacaaaaatgatatgttttaaccaataatgtttcaaatatgatgtgcaaaataattttgaattcggttccgctaatgaacttgcttttttgttattaaagtagaaaaaacgttaaatttctgttgcataatcattattgtccagttatcgtctaattattttaactgtactaatatctgtcgactaattcagaatgattaatgggttgttaaaacaatttatctttagcggcttctggaatgtcttatacatatcgaatgtcattgataaaat

SEQ ID NO: 14529 - DNA, 445 bp, Diabrotica virgifera
tttttactaggcttatatgatcggttattagaatatcccagttataggaatactttttcttggcacgacggctattccaataagcgggttcgactgtattaataacctttgtcaaaatctaccctacctaaatctacacctttgccctagagacgaaaacaaccccatctaggggatgacaattttttcaatcaaaataactatggaagtcgagagattgaccaattctgagtaaattccgctctataaatcccctttgcacagttaatattttccaagttattagcgatagagactatgcattttccattaaaaaaactcacgtgttataacggtttttcatgaataactaaaaaatttaattttaaagaaaatatcaataagaacaaaattgtagctaataaaaaaacaaagagattctcgtcgaaaagacccatgctaaacc

SEQ ID NO: 14530 - DNA, 449 bp, Diabrotica virgifera
  SmartBlast Evalue=3E-67; Info=Serine/threonine-protein kinase Doa n=1 Tax=Camponotus floridanus RepID=E2AMD7_9HYME
ggatccaaactgtgaacacctttgtgtgaaaatgttggactggtttgattaccacggacatatgtgcattgcttttgaaattttaggcttgagtgtctttgactttttgaaggacaataactatcaaccttatccattagagcaagttcgagatataggttatcagttgtgttatgcagtgaaatttttacatgatattaaattgacacatactgatcttaagcccgaaaatattttatttgtggattcaagctatgatttagtatacaacaataaaaagagaaaggatgtaaagaaagttaaaagaactgaagtacgtttgatagattttggcagtgctacttttgatcatgaacatcacagtacaattgtttcgactcgtcattatagagctccggaagttatattagaattaggttgggcacaaccttgtgatgtttggtcgatag

SEQ ID NO: 14531 - DNA, 449 bp, Diabrotica virgifera
gaaggagaatttatgtctgctttatttaaatttttatctgttttaacagatctagttacaatttttttgtttttctttggtcttaaaattttctttgagcgagttattttagaaatagaatttgtttctaaatttgatgtgttgggtaaacatagagtattatccaggtttttgactgtctcatctttttcatgtcgctttattgcattagtttcgctattttttgctacaactttaggatatgctgaagtactcctatcaactatattttctgttgcttgctgatttgttacttgatgttgctttttaagttctgtaattgttgcaacactaacttttggactatctgcaaccttcaaaaagcatatatcggttacatcatcttgactaatattgctttgatgtgattgatcagttttgtctatcactgtaatttaccattattacta

SEQ ID NO: 14532 - DNA, 449 bp, Diabrotica virgifera
gttaaaaacgtaacgataaataagacagttcgcttacaaacacttgacaattttttgaaatccacacaaaaccaaatcttataatacaaaaagttatgtatagatagcgccgaaaccgaattaagataatataaataaaattattcaatacagtaaccaattacattaatttttataactaaataggaaaaccgaattgtttaaatttctagtaaactagcagcatatttttataggcctggatttcgcgtaccaaaaaaaaagctgatcaacagcaagctgaagatttgtcaatatagtcggttcgttaaactcaagacacaacttgctcgtgattttagtaattattttaaaaaaataattactaaatagttagtaattttgccaattttagcaaagttggccaaaaacaaaaaattacctactaaaatcactagccagctgtgttt

SEQ ID NO: 14533 - DNA, 446 bp, Diabrotica virgifera
  SmartBlast Evalue=9E-31; Info=SNARE Vti1a protein n=1 Tax=Culex quinquefasciatus RepID=B0WIR4_CULQU
tattccttagctccttctgactcccaaataaactcccaagcatatggctacaacaaaacaggcacagattgtgtacatcacaactttctgttgaagtgttctcatgatcattgaattcatcagtctccctgaccttcctaattcttcatcggcttctcttagcctctgcctactcctctgaatactttccttttgttcacctaaatttttcaacacatcaatcccgatttcctccgtttctactataaccctatatccttcttctagtttcttactcgtcctttctaatttttctgaattatctaaaagtctttgtttttgatctgtggatattctaatatcatttaaatcttctgaactgtcatacaatattccttgtttgactgatctagcctttatataatccaaggtcagtctttttagttcggctcggtaacaatcacact

SEQ ID NO: 14534 - DNA, 450 bp, Diabrotica virgifera
ggatattaaaggaaatagttcgctaaaattattatcacggtgaatgacaggacgtgaaatgcaatttagatttcccttgtcgagtatttcgccactctgctatgcattatttttccaacttaaaaagctcagatgatacataatttcgaattttatttcctgacttataagacttttagttaatctgtcttcgtcgcatctttttgcccgttgcttcatcggaattgctatgaaaacatagttaagccattcctcacgtatttcattaatagtatacacgtcattaaaaagcttaacccattcgctgccgattaaagaggatggaactctgttaggaaccgttttgtagaacggcacctaactgaagcaaccgtatcactcgctggcgcgtgaacggtacctgactgaagtaaccacatcacgcgaatgggttaacaagagcattaatgt

SEQ ID NO: 14535 - DNA, 449 bp, Diabrotica virgifera
cctcaaaatacagataacagacactaagaattcagctttttcacccatttagtgaagatgttttgtttacaaatcaacattatcagtttatctacatttctgtatgctataccgctatacctactagaggtgtatgctagcttgggaaaagatcactacaggagcaatgcaaccaatttgtgacaataatgtcagaagatcctaacgattccagagcaacaactaacacatccaaggaggaagctacagctacctgaggaaaggaatgtttcaaacaatcaatgtttagagtttttcaaacaaggaaaggttaacatagacctattctaacttggctatactgtactgatgatagctaatgagtcagagacatgtgtctgtcttcacatagtatatcttaagcatactgtattttttccatccttgttgtgagacgtgctgatatatac

SEQ ID NO: 14536 - DNA, 450 bp, Diabrotica virgifera
ctcctatctttatctcgacttgacgaactactacttttgctcttacttgaactacttttagatgaagaactactacttttacttctttctttgtcacgatatttatctttatctctacttttttccttgtccttactactacttgtacttcttgaacttctagaactggatttaactttgtcttccttgtcaagttttcatctttatttttggatttttcttttgatacatctttcatttctacatcttccttactactgtcgtctgccccttcttttgtagggctagtttgtccatcttttttataaaacgtatttggacttattctatctgtactatcgtctttaacactcttatttgtgttgtcggcttcagaaaggtccattttctcggcctgcggttgcccttgtgcattattacttgaacctttgacaattacaagccagtgtt

SEQ ID NO: 14537 - DNA, 448 bp, Diabrotica virgifera
tgcttaaaaccaagacctttaccgtgtcctttgggaactgtaagacagcctgatggaagttgtgagaaaccgattgaaccatcgccgtcttgtccacatagtgttgtgacaaaaccaggcgaaccgtgtaagtgcccacaaggatatgtacttcaaaatgatggtagttgcataaaagtagtattaccaccctgccttttggaacaatcagacaaaatgatggaagttgtataaaacccaatctcgccttgtccatctggtacagtaagacagcctaatggttcttgtcaaaaaacaacaatagaaccatattgtccctcaggaacaactaaacagccagatggaagctgtatccgcccaacaccgacaccatgtccttttggaccattaggcaacccaacggcaactgtgttaaacctactccatctccttgccctataggatttag

SEQ ID NO: 14538 - DNA, 449 bp, Diabrotica virgifera
  SmartBlast Evalue=4E-20; Info=Chromodomain-helicase-DNA-binding protein 7 n=1 Tax=Harpegnathos saltator RepID=E2C0C5_9HYME
actaaatcattttcggcatacgccactggtatcggtaacgaattcgatattccaatccacgaattgcctagcgaacctcccaaacgagaaacttctacaccaatgtccatcggagacacagaaattatctccgttagtgctacagacagattcgctgccaacaagaaacgtaaaagacatatagctatcgacgtcgagacagaaagggcgaaattgcacgctttgttgaacagtagtcacatgacgaatccgttacctgccaaacatggaatgacgtgggataacgaggactcggaagaatctagaaggtcgactccggtacagcagcaaactaacctacaaccacctccagctcatcagcaagcgcctagggtcagtatgaccacgttgaagatgccgtacgatctgcagtaccatcctcctgtggctaaaccatcggacagaccact

SEQ ID NO: 14539 - DNA, 450 bp, Diabrotica virgifera
  SmartBlast Evalue=4E-24; Info=Integrator complex subunit 6-A n= 1 Tax=Harpegnathos saltator RepID=E2BAQ9_9HYME
gtgatggagacctcgaacgctcactgattggactggctgatggactaggctccagaccgttgatcaaactagggggctcgtcgaaacggggcatttctttttctatcgagttcaaccaaggtatcggcgaaggcacgggagagccttgaggacttggaggttgcgaagaatctaaactaggtctagaaaatttaaaattcttgggcagtggtccgggttttcttttacacggtattattcgcataatgttatcattagaaggatttggacgtttattgtttctgccggcacctgcaggtgatccaaccagatcaatatcagcttcatctaccatcatcctcttgtcaatcttaaacggatttccaaacatatgctgcctgactggggcatactctatttctcgcaactgaggcgtctgcttcttcaaatactcctggtagttacccatct

SEQ ID NO: 14540 - DNA, 450 bp, Diabrotica virgifera
aaaagcatgtttggtctgccactatgttatcagacgccctgtaacattctaattaattttgtaatatgaagatcaaagtttgctacaatttttgttactaacttttattgctatctattactatagcggatctactgatctgtatcacactaatcaatcgccgtgtatattttatcttaattattttactaccctacgaatttttgtctcttatctttttcgtactgtttaaaaatgttgttaaactcgttaaaagaactaaataattttccacactccataattaatttaaaaacaaacactaaataaataaaaaataagaaatctgtttactaatcaatattaaaatgtaagcacaacgcgattagacaaatctaaactcactctgacactcgcgatattctgaaagttagcgtgtatgcaaaaaaccaataacagtgcacgctacat

SEQ ID NO: 14541 - DNA, 440 bp, Diabrotica virgifera
gcgctgatacataatttgaaagattagcaacgaactacataggtactgtctgtctgcgcatgcgccaggcaattataaaatttcaccctcaatcgtaaagaagtataacttcaaaaatgacttttgtgatatccatgtcaaatgattcgaaataaacccttctgttgagtgtaacactaagataaataaaaagtgaaagatcttttttataatattacatatccttgtgtagcttaattcccttaacccaaattctataatgccacactaaaacaacatacatatcacgctgttatattttgtcgtttacccattttggtcacaaatattaatgcaacactaagttatcttacgcacatatcctactgttgccatgtagttattgctgaattgcgaatatgtctttgtttatattgacctgcttgcggttacattatctt

SEQ ID NO: 14542 - DNA, 449 bp, Diabrotica virgifera
  SmartBlast Evalue=1E-10; Info=E3 ubiquitin-protein ligase RNF19A n=2 Tax=Formicidae RepID=E2BRB4_9HYME
ctaatcttgtcagcagcggtcgatttggacaatgcggattttgtagcacatcgagctcggaaactgcagctgcttccaatgctggtcttttcggcttgagaagacgtaatgaagctgacgttgtcatcgaaacggactcgttcggatgtgcagtcttcggtcgtgatgcagctgcaggaatcgctaccaggagccttataattaagcattgatcctgccagagctctaacgctagcaccggcgtcatcggctatactagcattgacagattcgctaaggctactcaggctgaatctttgcgctgataccaggtctgcctgaacttccagtcttgtacctgcttgatttaaactaccggcgagagctactgtgctagcagattccctatctatatctctaagtacttgactaccgctggcaagcgaaagctagcttctccaatggaagga

SEQ ID NO: 14543 - DNA, 445 bp, Diabrotica virgifera
  SmartBlast Evalue=2E-35; Info=Polypeptide N- acetylgalactosaminyltransferase 1 n=6 Tax=melanogaster group RepID=GALT1_DROME
attagaagaaattattttagtggacgattccagtacagatgagtctcttaagggtttgctcgactattatctagaaacaaagactggcgaattataagatcaaaatggtacgtctcaaacatcgtctaggactgattcgcgcccgtcttcagggcgccagagtggcccagggtgacgttctgatcttcctggatgcacattgcgaggcgaccacaggttgggcggaaccattgctctctagaatagaagaagacagaacggctgtcttggttcctatcattgatgttatagaggctaataacatggcatattctacaaatggcgacatcaagctttcaagtgggtggattctcttggtctggccatttcacgtggatagacatacaagacgaaaaagataaacacaactctaggaccagtgaagtcgcccaccatggcaggagga

SEQ ID NO: 14544 - DNA, 449 bp, Diabrotica virgifera
  SmartBlast Evalue=2E-37; Info=DEAD box ATP-dependent RNA helicase n=2 Tax=Culicini RepID=Q16HQ7_AEDAE
gaaatgacgaaatgttgcacgtggtgttacagttttaatgagttaattgatatatcttattaaaaaataatgtcagacagcgattcatcaagtccagaaaatgacaatgaaagcggtagcgctactaaagaagctgtagaacaaccagagcaggcccaagtggcttggaaagatttgggtcttgtagatgcgctttgtaaagcatgtgaacagttaaaatggaaagaaccatcgaatatacaaaaggaggcgatacctgtagcgttgcaaggaaagatatcattggattagctgagacaggttcgggcaaaacggctgcctttgctttacccatacttcaggcgcttttggagaacccccagagatattttgcactgattttaacacctaccagggaattagcatttcaaatatctgaacagtttgaagccttaggctcaagcataggt

SEQ ID NO: 14545 - DNA, 442 bp, Diabrotica virgifera
ttaatattcccaatgctcggcagtacattattttgcacatatagaactttgttcctggaaaaccaaaatacaactattgtggttacgcaaacattgttccagcataggattcaattattatcatagaagacacaatttttttcaagacatgactactatctgatgtatctcttttaatttgaaaaatgccaaatgtaatatttagtcaaattcttagtgttctgcacacacatacacacactttgtctagatctagagtgatgcgtagctatttttccactctatttatgagttaaagattaaggacaggttgttcttccaacatgtttattcttttcttgaaccaaacgaattgaggtttgtcaggtttgacagctatcttccactacataaactttattaaattaaaagcttcatgtagatttgttgcagtacatccttc

SEQ ID NO: 14546 - DNA, 449 bp, Diabrotica virgifera
  SmartBlast Evalue=2E-39; Info=Bm44 n=1 Tax=Bombyx mori RepID= Q75RW2_BOMMO
attgtgttgggggagttttacgatgcaatgaccagaatagagatggtgacggcattcacgcgaggacatgttaaattagagccgacgaaaggtggaaagttcgaattgttcggcggaaacattatcggaaaattcgaagaattggtaccttgtaaaaaaattgtccagtcgtggaggtacaaacagtggccggcggggcattattctacagttaccataacagtggaccaaaagagcgaccacacagaaattaccttagaacaaataggagtaccttctggagaattggacgtgacaaaagacaactggcagaggtactattgggacgctatgaagcaagcattcggcttcggagctttcttcgcataaaacagcgttattcaatggaagatacaaaataaaaactcattttagcatcgtctatgtatatcgcgccattttatttgatc

SEQ ID NO: 14547 - DNA, 449 bp, Diabrotica virgifera
  SmartBlast Evalue=2E-49; Info=tRNA-dihydrouridine synthase 2- like n=1 Tax=Harpegnathos saltator RepID=E2BHB7_9HYME
agcacccattccaccttttagagagaattctttcggacagcccatgttgatatctatacctgctacatcgttttctatcatcttggctacttttaaagctctctctgcatcactcgtccccagctggaccaccactctatccttctcttcagggcaagttcggaatacaatagtcccatcacttggatccaggtaatcaattgtccctaatacatcattttgtcttcgaattgacttcaaaaacttccaatcaatcagttcttctgtgtaaacaatatcagcaccatactttagagctaataaccgcataggcaaagttcccactcttaccataggagctaaaataatcttatttccataatttaacacattgggacgttccgaaatctttgtcatttttaaaaaacaatataatataaatattaaattactataaaataaaataacct

SEQ ID NO: 14548 - DNA, 449 bp, Diabrotica virgifera
ggcagtacgagcgcgtttaaaaaaagtagttttacattgtttttatataaatcataaatagtttgtagattagagtgcgtaaagacagttccaatttcaacaatatttatctctgtgaaaaatggtggaaccaacttttgagtgagtaaaagtaccttgtattataaatatttattatatttttaagtatatttaaaacgttcaattgaagtaaatacttccaatgtataatggtaaagaccataaacaaatggtataattcttccaattttttttgtttgggtttggttttttagtcggggatctatatgtcccctttaacaatatgttatctttcaacatcgactattgtcataatgttaattaatgttgttctgaagctattttcttgtggcatttttgcaattaactaagttaattaagtttaatactttaataattatgtaaag

SEQ ID NO: 14549 - DNA, 449 bp, Diabrotica virgifera
taagtattttgtatcggaaatgaactatgtattaataacatttgttttttaatttagataatatatctaacactgacgatgtaggcaccagcgacaataaatcacaatttacgagaatggtaatgaagaattatttaataatatgtatcataaaatggacatgcagctctgggtttcaaaacaaatatcatgaaaacaaaaacaattattataggtagaaataattacccaaacgcaaagataatgtcgctggagaagaaatcgaacaagttaggcagtttaaacacttgggctgtctgctgaacgagggttgggaccctgacactgaaataaagagcagagtagaacaagccagaaatgctttttgaggcttcgtaaatctttgactgatcgcaagttggatttcaacccgagatacaagatgcttaagtgttacgtttaaataatac

SEQ ID NO: 14550 - DNA, 449 bp, Diabrotica virgifera
  SmartBlast Evalue=7E-44; Info=Peptidyl-prolyl cis-trans isomerase n=1 Tax=Bombyx mori RepID=Q2F670_BOMMO
ataatagatagaagtttttgagattcataaaagtaaacatgccccctaagaaagggggagcaaaacctgctaaagcgggaaaaagtgatgaatccggcgataaaggaaaagaaaaaaaagggggcaactccgttaaagtgagacacatattatgtgagaaacaaggtaaatgtctggaagctttagaaaaactgaaagctggtcaaaagtttccagaagttgcagctgcctatagcgaagacaaagctagatcaggaggagacttaggttggatgatcagaggctcaatggttggacccttccaagatgctgcatttgccttacctatttcatctgttaacagtcctgtatatacagatcctccgattaagactaaatttggttatcatattataatggtagaaggaaaaaaataattttatgttaatatatatttttgtatatagata

SEQ ID NO: 14551 - DNA, 450 bp, Diabrotica virgifera
gaaggcgctaaagaaccccaaccaccatacattggttgtatatacaacaccatacagtgatgtaacattggctggaaaaaaaaaaatttcgataaaacctcaaaaaaatacaattggagttatggaaaatcataagacggataatccgcgtcccggacaatccgcgttccgaataatccgctcacggataatcgggcttctactgtaattattagtttatacaaaaacattcaagtatttgtagaaatttaaattttttcattaaatatcaaaatatgttgccagttaattagtgttaatattgccagagcaggtttaagagttatattggagtaggattatattcttggatcttagatcgtataaagaatggtaacagtgtcagtgctacacttcaacccatattttgaccagggtgttcatctgttttaggctgaattgacatagaga

SEQ ID NO: 14552 - DNA, 446 bp, Diabrotica virgifera
  SmartBlast Evalue=8E-20; Info=Mini spindles n=2 Tax=Tribolium castaneum RepID=D6WD03_TRICA
ataatattggcatttctgtcgttagtgcatttttatatattttttaaatttatcggacctgaatattaattaatacagttatcgtttatataagacgacataaaaattgagctcaaagaaaatagaaaaaacaaagtacatagctttcataccatgaattaaaattgccgttgattgaagtttggtgggggaacttattcaaatcagacattttggttgggccaatctgtttttattccaacattttgtagagcctaaacaaccatggaagacgaagaatataagaaattgcccgttgatgagaaatgtgtacacaagttatggaagccagagttaatggatatgaagaagttaccaagttatttagacagattgatgatgagaaatctccagaatttagcaaatatctaggtttagtcaagaaatttgttgttgatagcaatgct

SEQ ID NO: 14553 - DNA, 447 bp, Diabrotica virgifera
tgtgcaaatctcattttggtattcgttttctttagctttcagtatttctaccgctttagagatcaatttatcaacttcttccagtttagaatcaagagctttgtcttcttctttaagatcagcatattctttcttgacaattgttttttctttttctttgtgtagaagaatctctttcaatatggaatgtgatgtatccaaatgctgcaactctttatcaacatgttctaagagttccatttgttgctgcgctttttctaccaaattttccccacctactagaattttcttttgaattatatttattttattttgtaaagtactcttctcagactctatatcctccaattcattattatgcacagcactcttggttcgcttcttctctttcttttccagcttttcctccctggcttctagaagcatcaactgttctctgagctctgc

SEQ ID NO: 14554 - DNA, 449 bp, Diabrotica virgifera
gcataaaccgcattgttattgtggaaaagcaaaatggtaagttacgtttatgcttagacccattagatctaaacaaacaaatagtccgcaaaccaagagtagtacataaattggaagatgtttgtgcacaaatgataggtaaaaagatattttctgtatttgatctctctgaagggtatcatcatttagaacttgacgagacatcatcatggaaatgctgttttgcaacttcttatggaattttcagatataaagtattgccatatggattatcaaattcccaagatctgtttcaagaagtagtagaagataaatttaaaggtatagagaatttattgatttgtcatgatgatatgattgttatgggaacaacaaaagaagaacatgatacaactgttaaaaaagtgttagaaagggctaaagaagtaggagcaaagtttaatggggac

SEQ ID NO: 14555 - DNA, 448 bp, Diabrotica virgifera
gtgtaagtaattaatcaaattagtttgatttttgtggaattaaaatattaaagtaaaacaaaatatagagtaagaaaacaatatattcgatgaacattaatagaaattttgttgaaaatcaaattgtgtaaatcgaagcacaactacattttacattttccaaataggtatataattttttattacattactaaaacatttacagttaaatacctgttgcttttaaaaactatttaaaaagtcattaaaactataaacttatttttatctctgctctcacaacaataaaaactaaaacacagcatttgtaaactcacagccgccatattaaataattttttgacaggttattggaatgcccaatcagagcaaacgtataacgtgtccgatgccattcatctgcgcgtagggctaaaaatttttgatgaattcgcgcacatttacattt

SEQ ID NO: 14556 - DNA, 450 bp, Diabrotica virgifera
agctttcaaaaagtgaaaatttttttttatttatttttgacgagaaatttgagtttttaaacggattttaaaattgcaaatgagtaaaaaaaaactaagacactcgttctcacgaaatatttcatcctgatttttttaaaattggtgaaacataactcttaaaaatagaaatccgcatatttcccctttttccgcattttaggtaaaattttatagatgtcatctcaaaaaagctaacaccgcctctaggataggtaaataactgaaaaataattggggtttgcttagtaaaaaatttttgttgaagagaacaaaattttataccctttttacgattttgctgaaactactggcaacattgtaatacaatttggcgggttttaagaggtagttattgtgcattttttgtacaaattagaatgttatattcatcattggcgcgcatagggg

SEQ ID NO: 14557 - DNA, 447 bp, Diabrotica virgifera
gtcccggattacagtgaaatggacgaaaaacagcaatggaaaaagatctcagtgaagaaggtatctatgacaagaagaaatagagattgggatgtggtaagcagcaaacaaaatactgtttaaaaccacggacaagtaagtaagtagtaatcggcgcttcattcaaaattttaagttttcatcatcatataagataagcagtatgtgggtatttcagtgttaaccacgtggtatttaaaatatcagtgtgatgaaacaagtcataatctatacttccagtgttattcaaagatattgagatgtgtttggtcaaagaggaaaatgaaagaaacgaatgccgaaaactctgaatctacattaaacctgggcaccaaaactgcaggttctgcagttactggaatataaaaaggctgaaaaggaaaaaatacccattacattcaactgaag

SEQ ID NO: 14558 - DNA, 447 bp, Diabrotica virgifera
  SmartBlast Evalue=1E-12; Info=Putative uncharacterized transposon-derived protein F52C9.6 (Fragment) n=2 Tax= Camponotus floridanus RepID=E2ALS0_9HYME
ggtgtcttctttacttgttattctctgcgaacttacgccacttttttcggtccctagctaattctttggcttcctgccacgattttcctctatcctgcaatatttccatcacactggtattccacgttttccttggtcggcctctcctgtttttccctatcggcctcgcttcccatgtcattttaacctgtctgccgtcgttcattctgaataagtgcccagtccattttaatttcttttcatgaattttttactttaatgattttacttttaattatcttctaatatcatcgctacgtcttttatcggttctcccagctcccgccacttttcttaaatacctcatttccgcggcttgcagcctcttttcttatttgtcgttcaataccaattctctgctccatatgtagtgataggtatgtaaattgttttaaatactatcatttt

SEQ ID NO: 14559 - DNA, 445 bp, Diabrotica virgifera
cgttgaacgactatcatgacgatgattgtatcctaggcatctggtggtcataatgggcctcgtcggaagttttacggaaattcgatccaaaatcagtgaaaactcactattcggaggtttttggggacgctgatcacaaaaaaataatatcataagtggcgatggtatcagtgaaaattaggaggttttgggatcgctgatcacgaatatcatgatcaggcatcacctactggagtttttttagaaattctatacaaaattactgcaaactcgttactgggatagttttggaatcgctgaacacgaatattacgttgtcaatggtctccgagacacatggtgcccaggaagggactcatctcagtggttttatggaaattcgatacaaaagccttggtactgctcatcaggggcctgattctaattcatttcgatgtcgcaatct

SEQ ID NO: 14560 - DNA, 449 bp, Diabrotica virgifera
  SmartBlast Evalue=2E-20; Info=Abnormal X segregation n=2 Tax= Tribolium castaneum RepID=D6WMZ4_TRICA
atacttccaggtaagaaatcctctaaaaattgcacactaaattcttttactttgcccgttttgtccgccttcatgaactccatttcttctgctgcttctaataatttcagtttggttgctgatacatgaagaatcagtaaaccttctggattcacaggctgttttatcacaatcagttcccctccgccgtctcgctttttacccctcaatttttctatcaaccatgttaatgtttttaaaggtatatcggcggagagctgtataaccaaataagtagggggtaaatatttgtcatctatctccgctaaatcttcaccgaggatttcggcatctaccttcatggtactcatggttccttaaaccttgaagaatcgactttgactctttgacagtagtttatcagtcatataggtactatgcttgtaggagtttttggcagtgtacaaatt

SEQ ID NO: 14561 - DNA, 447 bp, Diabrotica virgifera
  SmartBlast Evalue=1E-28; Info=Regulator of g protein signaling (Fragment) n=1 Tax=Aedes aegypti RepID=Q172K0_AEDAE
ctccggggatttgaagaatatcgacccatctgaggtacattccagcggatcatccctgacgtcattggatattgctgtgtcatctcaggatctgataaaagcacaagctagtcaagaagaattgtcttcaaatgtagctagaacggcattgtgtagagttcttctgagtaacggaagtaccaccgtcgtccaaatcaaacaatctgaaaccattcaaggtttagtcacgagattattggagaaaagaggtctgaagtattcttccttcgaggtgtttgcagacaagcacttaaagtgtgttaacgtagaagagtcgtcgatgacgttggctggatgcgaagtgaccgtggaacaaagagtggtctttaaactcgacctgccaaataggaaaatgatcagcatcaggtccaaatatacaaaaatcatcaccgatgttctaaggccgag

SEQ ID NO: 14562 - DNA, 449 bp, Diabrotica virgifera
aatgatagaattgttgtacctaaagttttgcgaaaagagatgcttcaaattgtacatgaaggtcattttggtataaatcgttcaagagatcgagcaaaagatgtcttattttggccagggatgagtgtggatattgcgaatgagatacagagttgcaaaatttgtgaaaagtatagatatgcaaatagtaaagagccattaatatctcatgacgtcccggaatggccatttcaaaaattgggtgctgatattatggaacatggtggcaaagcttatttggttgttgctgattatttaacgaagtggctagaaataatccctataagaggtaaacaatcgtctgatgttataaatgcactcaagcagatatttgcaacacatggtataccagatgtaattatagctgataatgtgccttttggatcatacgaatgcaaaaagtttgcaga

SEQ ID NO: 14563 - DNA, 449 bp, Diabrotica virgifera
  SmartBlast Evalue=6E-67; Info=Zinc finger protein 250 n=1 Tax= Culex quinquefasciatus RepID=B0WWK8_CULQU
ggctgacgtttcattgcagtattcatatcgcaatgatgaattaaatgtaaaattaaatcctgagatgtggcgaacatatcggaacatactgaacaacagaaaggagtcatactattggaatactttggatctggtcccgaatgatgcgatcgtatgtgttctcgtaacacaactcgttgattgaatgctcttggacaaactgcgcaagcataaggcttctcacctgtgtgtatccgttcatgtttccggagagtccctccatctgcgaatgctttccaacaatacttacatccatatggtcgttcacctgtatgtatcctaatatgtatttgttgtgaactcctggatccaaaagtcttcccgcactccctacatggaaattgtctaccggaaacactactatgactatgcctgtgattcattaacgtcctgccatcggaaaactcatc

SEQ ID NO: 14564 - DNA, 447 bp, Diabrotica virgifera
  SmartBlast Evalue=1E-49; Info=RNA polymerase-associated protein Rtf1 n=3 Tax=Aculeata RepID=E2A1P9_9HYME
gcctctgcttagagctccatccctttctttcattagttgagtcttcttcatagcgtagttgaaagggtttggcttgaaacgggacttttcttgaattattcgttctacgtcttgttcgttaaattcgtaactaatcgcttctttaatatcagcctgtttctgttcgatcttcccctttgatggtaactcgttacttgcagctgtacttgcttctatccacttctgatattccccttctgtgaactcttgatttgagatgaattctaaccggaaaactctttcctgggtaccgtgtctcactttcaatcccttatttgtttttgtatttcctagattatatatcttggctgtttcatatactccaattacttctgccactctataaacaggtgcattattgtgttggccgattccaaccctaacgaaacagcctttcgcaattctgtc

SEQ ID NO: 14565 - DNA, 449 bp, Diabrotica virgifera
  SmartBlast Evalue=6E-30; Info=Craniofacial development protein 2 (Fragment) n=1 Tax=Camponotus floridanus RepID=E2AR66_9HYME
ggttatttgttgttcgtacttcttctgtgtcatattatcttttagtattgctgtgttgaattgttttttgatttctttgtccctttgattgtctttctttatattagcatttattctataggctgctcttaccaaaaagtgatctgagtcacattccgctcctctcatactttttatatttattatattatgggcgtgcttcttctctattaatatgtggtctatttgatttattgtccttttgtcaggggaaatccacgttcctttatgtatatcttttctgcgttggtatgtgctttttattaccatttgtctttctgtggcaaaacctataattcgttgaccattatcatttgatacatcgtgtttactgtattttcctgttatattttcatatatatcctcttttcccactttagcattgcagtctcccattactattttgatat

SEQ ID NO: 14566 - DNA, 438 bp, Diabrotica virgifera
cccacccaaagatgtaaagtaaatcgacatatcaatcactgtaaagttctgccgtaactaaaagtaccacagcggacatatcataatatatttcattctcatttttaacgattttaccttcactacagacataccaatctctgcaaacttgaagaaatgttactaagtaacatatcaaacaaataatctaatcttgacaaaaatcggacatatcaagttttgccataccactactagtccagggcgcatctgttttgagatggacgttgagaggtgactcatatttttttgcagaaattgcttgggaattaactcatataataataattgagttatcctcccactcaaaaaaggttcggaacattgtttaaacgatcaaaatgtcaaaaaatgaaggaaaaattcgactcttttcttcgtttcctgattataactttt

SEQ ID NO: 14567 - DNA, 446 bp, Diabrotica virgifera
atagaagccggctcttcgggatcaagttaggtgagaatggtaccatcggcgggatgcagcgccggtgttttgggatacgaaaggagttttgctaactgactagcgtagaaatagacactctactattgcttcatatcggagatgttccctcaagtttcaagaagttatatttaggaaattgttacggagtgcttacaatatttattttcaaaatctggaatgtactcataacgacatttaattcaattaaatcaatctaatagaactgtttggaaatatcctatttcaatttaagtagaatatatttaaaaaaaaataagacttgatatatctacaatttattgggaaataacatttataaaataaatagctcattatgagcggaaagcaattattaaaacgccaccttcggggcctgttggtatgtaataagatgcaaatacatc

SEQ ID NO: 14568 - DNA, 448 bp, Diabrotica virgifera
  SmartBlast Evalue=2E-45; Info="CG8486, isoform D n=1 Tax= Drosophila melanogaster RepID=Q9VLS3_DROME"
atggtggaaagtgaatgaaatgtgcggtgacccgaattacgaaaactttttggataaaattccgttaaatgattgcaaacagtctgttattttatatacctttaacgacaaagtcttcccgccaacattaaacattcttacacagggaggcatcatcggcctttacaccacactcgttctcgttgcatcgcgcatacttcgtggtttcttcgccgacggcatggctaaaatcatgttcgatgatctacccaacgtcgaccgcgtcctcaggctttgtctggacgtttacctcgtgcgagaggctcacgaattcgctttagaggaagacctcttcgccaaattggtgttcctctttaggtcgccggagacgctcattaagtggacgaggcctaaagaggaagtggcggacgatgacgatcctgaaggggatggggattagagttgtact

SEQ ID NO: 14569 - DNA, 447 bp, Diabrotica virgifera
  SmartBlast Evalue=4E-53; Info=CG7791 n=6 Tax=melanogaster subgroup RepID=A1Z6H6_DROME
attcttctctatacttctgtccatttgtcctgttaaatggatcatcttcaaaataagttttccaaatagaataagccaaagctctagatactaaatatgaataatactttgcaccataaccaaccaagtggctaaatctgagctgccaggcagtgtttgatatgtacggcaaacaataaaagtctttctgggtttcagctaatacttctgtagtagaccctttcaatggatgttccccatgatatttttggtcaatagcagcataaaatacttgcagctgagtttcgctagctgtaaacagccgctttgacgcacataatctttgtaacatgtcttctgaaattggttcttgggtttgaaatgtcttgcaaattttctaaggatcctatgatcagaagcaaaatattccattaatatagaaggtacttctgcaaaatcagtactgca

SEQ ID NO: 14570 - DNA, 450 bp, Diabrotica virgifera
  SmartBlast Evalue=3E-25; Info=Vacuolar protein sorting- associated protein 13A n=1 Tax=Camponotus floridanus RepID= E1ZV01_9HYME
ttacgattagtctttcatgtataacattgtttctggaactggagataaatattaaataagaaagtacgccgaagcattttaaagcataagaaattaagctgtcctaagggactccattttctcgcagatctcttctcttatttgagggctaacgatgagcaccagcttggtattactactagaaccgaacagcttcttcttcttttctgaggtagtaatttgaacacctttgggggttacttttcctggagcagtgatttcttcccaggtatatgaccattcgatctgccatcctccgaagatgtcgttatgcataagataagccactctgcggtcagtcaacaacaaaacttcctttttttctacgacaatataatgcgccacataaacgtcagttttggcatattttcctttggaaatatggttgagatatctgttgccagtagcttc

SEQ ID NO: 14571 - DNA, 445 bp, Diabrotica virgifera
gtgtctaacccgttgtcctaggtgagcgacggaaaacgacgcgacgcgatgcgatgcgttgcgatgtgatgcgaccagtaattcacgcgacgtgtggcttatgtagcgtcgcatcgcgtcgctttccatcactcaaaccaggacaaacgtgacgatgtcaattattcattcctattcttaagtgtggagaagtatacggcagtgttactagaaaattcatattttaaatacttagctaaaaaattccataaacgaaaaagaaagacaacaaatgtcatatatgtagaacgagtaaatttggagagtttaatcatttatatccgaaattaatgaaataatccacgttggtttaaagagtattgtggcttattcactttcgattatatcattgcagctgttaaactcagtattaataactgagctatcaataactatcaataagtaa

SEQ ID NO: 14572 - DNA, 445 bp, Diabrotica virgifera
cgttggcgccctctttgattattctcatatattatcttctatttaatatatccctttttatttaaatcatcaactgaacatactgaacgtaccccatacattcttactctgtaagtatctgtttttcaatacggaacatgcccgccactgcctacgtcgcactgtcatgaaagtgacacttcatccctactcgctgacacaaaatcaaaatggaagggaaaaataaatctatttaaagagatgggcccataaggcactatctatttccagactttcattctcttggttttttttttcgggataaagatcaacctctctcccttcgggagcttcaagccatccttatcaccggtgatggaactacaaagccaggacttcattgataaatcgtctacactacagcacccaacatcttcagctgcagggacctagggccgaagatcca

SEQ ID NO: 14573 - DNA, 442 bp, Diabrotica virgifera
  SmartBlast Evalue=3E-14; Info=Organic anion transporter n=1 Tax= Aedes aegypti RepID=Q171D6_AEDAE
ccgaactagaacaaaaatgagatcacagtgacatgttagcttccataataatgattcatccatcgaatttactacgatcaaactcagaaagagctcagttttctgccccagtgggcaactatttgaacgaaatagactgtggaataaaagtcttgccatgtctgagcgacagactgaatttacaaaagttagcaaagttgtctgtttttgttgtagtgctttgtttgatgggttgtgcccatgggattatcaacagttatttcactggtacttctcaactgtggacctctcattacaattttccggggtctaccaaaggttggcttgtagtttctaacgaaatatttgtcggtatgttagcactttgtgtatcatactggggtaatcgcatacatagagccacttggatgggagctttaactatgctaattgcggtatctgg

SEQ ID NO: 14574 - DNA, 436 bp, Diabrotica virgifera
gatatgattcatatgattaaaatttaaaaattatttgtacccagtactttaaaactgtttggcgtatccttgtcatacttggcagaagtgtaggtgctgtacaccctactaaattgagataaattaacgtttctggctactaccagaggcgtagcgacaggggtatagtggctggttgacccttgcgaaattctacgccactgacgagattgctattttagtgtaattttttgatttttcaatactttttatgtaaatattttacacttcattcgtaacgataaaatgattggttttcgagatatttgaaattaagaatgaagcgacacatcgtttcatttttaacttcaaggtctcgaagactaatgactttatcgttaggaatgaagagtgtattatttttatagaaagtgttggagaatccaaaaattgaact

SEQ ID NO: 14575 - DNA, 447 bp, Diabrotica virgifera
cggggaataagatgtcaaaagaaaatttccattcaataaaattaagtcctaattattcgtattttaaagaaagtttatttagtcgtaaaatgctcttttaatattagatatactgttgaacaaattttgtgaagtaattgcatttaaagaaaggaaactacctcgagaaagggctgttaatctagacacataggtttaaagaaaataagttaaaatagagaaataggataaacaactgcaaattaatactgttttccggaaaaagtttatgatggtaggaacaaccacatactgagtaactaagcaagaacgaggtatccaattgattaatgtgaatctctaaaaaatgaacatcgactacaacaaacatgatggtcctggaagtccttcaaggagccgctagccagaacccagaagtgctcaaaccggcagaggctaaactgaaag

SEQ ID NO: 14576 - DNA, 437 bp, Diabrotica virgifera
gattcttctattcagttaatgggtctgattatccttgccaatcacaatttcatatcctaggtagttatatttatctatgagttctatttcttgcacaccaatactgatgttctgggtgggtaactttgtcattatttttgtttctgagatgtttatatttaaacccacattttctgtagccacaacgagttcctgtaccatctctctagccattcttaaatacttctagtatgactatatcatcgccgaatcattagttgtttagaagttctctagagctggagtatagacttaaaactattcgtggggaaactcgagaggccaaaaaatgataaaaactacaaactcatgtttatgccattaccggattgtcatcatcaatggcgttacaactcttcgtgagtttttgccgcgttggtgccttccatgtttgtcgg

SEQ ID NO: 14577 - DNA, 448 bp, Diabrotica virgifera
cggaggagaagtatagcccggattacttggctgcgaattgggagggaatggaggttgttgataaggctgtgaagtggctggtggagcagatgtcacagcggggctctggttgttcgttgggggcgacgaaaaaggtggcgcctgagtattactagcagaataattttgaggctgaggaggattaggctggtttgtagaaggaggagcgtaaccctgtggattcggataaccttgtggtggataattttgtggaggattaccagcaggataatgcccaccatttggaggagctccatattgagctggttggttttgagctggggttgctggaggttgatatggagccggagctggactgggctgagaagcacctcctgtagcgggaggaggggtaccataacctggttgttgtggataattggtatgtggagcagcagttgttggtggt

SEQ ID NO: 14578 - DNA, 444 bp, Diabrotica virgifera
taacacaggttagcgcagttgccacaattatctcaatgtatattccctatgtccagctgaacgatttacgtactgtataataaagcgttaagatttttttttagagatttcggtaagacaaacgccaaccatggtcaaattgcgtcgcacaggaccaagtttatctgactaataaataacactaacacttagcattaatttaacacatcgtagatgccacactgactgaaggctgactttcgatcgatttacggttgagttgaggctactcatagaaaatactggtctttgtgaagatccagatcaacgagcttgcatcaagtctcgggtctttattaatgaagcttatttggctaaaaagaatcttgttctttaggtactttgtccgtatttagacgtcggccgtcatcatatctacaatttcgtgaaataggtctggatccc

SEQ ID NO: 14579 - DNA, 447 bp, Diabrotica virgifera
aaattttaaaaaattgtttgatgtaaacaaacctgaaacaactttaaatttagaagttaatgtttttaacaacaagaatgattaccagaaatataatgaattagctggtatcgacaaggatgatacttatggtgcaacttatggtaaaacgataatagtatacaaatttgccggtatggactttgttctaggtcatgagctgggccatgtgttccaaaatgagctattaacaagtatgatgaattcattagactccgaattagttggaaatttgattgggagccaagtagaagaagaaaataaaaaagagatagatagtggacggacagaagaatataaagctgaagaatatgaaaatccagctcataacgaggttagaaaaagcgatgaagatgataaaaaaacaaatatagtggagaaagaggaaacagaagaagataaactata

SEQ ID NO: 14580 - DNA, 441 bp, Diabrotica virgifera
agaatttcagcgtcaaaaaacttattaaagacgctatgtcttccaataatattagttatcaagacgcaaacaaacagttccccagaaactcctatgcaaaagtaacatccataaatacggaacaaactacaaacctctcatgcctcaaaactttccctccattaaatcccaataattatacacccacccaattcccatcaaatccaattaacaaaatgtcaactaataatatattctacaataataattcaaatagtacaaattctcgaacattcaaaagacagagaccaaatagtccagatccaacattaattttgcataatgaaattatatcttcccctagatctcaattacctactggaggaatattaggaagtattaactatagggaaatattaataataacccagttgcatctcattcagacttgagcatgataaa

SEQ ID NO: 14581 - DNA, 448 bp, Diabrotica virgifera
tggaacgtgtggacaggtgtggaatagttttaataagtgtgtagtatatattcttttgttacgataacaaaaatgatgacttgaactgtttatctacataagggagtacgtttatgtattcgttttggattaatttcgtttttaacaaatgcaaaaagtttatgatacacaagaagcataaaaggcgcagatttttttgtggttttacttttttaataatttatttgagatatcaaattgacaatggtcgcattctggagacgaaaaagtgagggagcagttcccgatggagcggtaacagttgtgtttcatcttgtgaatgctctgttccctaaattcgtgacagcctatcactttctgttatatgtgaggttatatacttgcctctgcacaataaattgtttgttacttcataatcatggtcacagaccatggattgtttactgtc

SEQ ID NO: 14582 - DNA, 437 bp, Diabrotica virgifera
ttcaattattcgtatgggcattgttagtattgcaatttttccatttaagtaaaaccaaatggaaggattgttaaaatgcatagaattacaatatcctcaatgcaacatatatataacatacatagaattttcactttttatattataagtatttactgtgtcaaaagtgaaacaacatataaactaataaatcatttattaacaaattaaacatttaagtcacaatgtaataacaaacttaagtttaaaccatttaagttatataatatatataattattataattataccacacactttaaaggtacgattccaacaacgactgcagatgacagttacagttgtcaccatgacagacgtcattattttgcactaataatttgcataattattagcaactgatgttctgccagacagcagctgcagtcagatgtcgg

SEQ ID NO: 14583 - DNA, 447 bp, Diabrotica virgifera
  SmartBlast Evalue=5E-48; Info=Importin alpha re-exporter n=2 Tax=Culicini RepID=B0WXZ4_CULQU
tgctagggcttccattggtaaatgctgaatcatactttgaatcaaaaagaaaccctcatgatcatgagtttttgaagcaatcaatttctggaatactcctaggaatccgctcactttatcctgcgctacaatttgtggggctgcttgtagagcgaaagcgcataataatcttactagtggactaatattagcaggtctatcccatagcacaggagccaataagaatggcaaaagctgcatgtagggctccagattattaccttgaggtgtactctccatcaatagagaaagaatttgaaatacataaggaataaattcttgaatatcctgctgtagaattccttggaaaatgggaaacaatatatcttcaaatgctgtaacagcagtgggatttgccttacatacgattcttatggctaatgaaaatgtttcaaaaagataatggtt

SEQ ID NO: 14584 - DNA, 447 bp, Diabrotica virgifera
gttgttggtaaaatatatttcaacaacaaaatgagtctgtcatcgaccttgttagtattaacaatttgcgtcatagtatacgctcaagattgtccacctggtccttcattttcgtgtccaggggacgctgactgtaaactggtcagatgcggtgcccttccaacctgtggagatggagaaatattgggtactcttcctggcgcttgctgtcctaggtgtgttcctaaagactgtgagctaaattgtgatgcggtcagatgcgcttacccggtttgtaagaaaggtaccgtacccaagcaggtgtattgtaagtgttgtctacagtgtgtgcctgcttgttcagcttaaaaatgatattactaattacaaaaagatcgtattataacgtaacatcacaaattataccttgttttgtttgtttattgtaataaagaaatgattacattg

SEQ ID NO: 14585 - DNA, 442 bp, Diabrotica virgifera
taaaactacactataaaactaattttgtaatgtgaggctcaaaggtggctagaatttttgttattgacttttattgctatctattactaagcggatctactgagctttgtcacactaatcaatcaccctgtatattgaatttaaaattttttgtcattattgttcgtcttaaaataattttaaattcgatatatttacctgtacacgtgtgctgcgcggtaatgacgcaacctgtatcagtagccaggtggccggtacggtgttcgaggaggcatatggaatagtatattgaagaaccagttgtcttaaaatacttgtttttccgacgttgctagctcttggtccattagataacatactaacgatgtaagcattataaagtttaaaatgctaaggattggggaaaactgtctgattagtggaaagctgaatcctggcttgg

SEQ ID NO: 14586 - DNA, 448 bp, Diabrotica virgifera
  SmartBlast Evalue=2E-17; Info=Pao retrotransposon peptidase family protein n=1 Tax=Brugia malayi RepID=A8PYI1_BRUMA
gcgcctggtatgtattccacctgctttgttggttgctagttaattctttatcccaactggttttttgctcccataattcctgtatgaacattttcgcctgaattactacaggtgctatccatcctagtgggtcgtatagttttgctacttctgacagtacgtgtcttttcattattttctttgctgtcgttatccctattttgaatgtgattatatcttctttaggggaccagtgtattcctaacgttttccgtacttcttcttgcttgaatgcctttggagtctacgttcctcatttcttccggtacgttctccattattttttcttcgttgctcaaccattttctgagaatgaaacctccttttctgaacagttgtattaattccttttgggctatttctgcttcctgcactgtctccgctcctcctagtatatcgtctacataca

SEQ ID NO: 14587 - DNA, 444 bp, Diabrotica virgifera
gcctttatctacctaataaaaatgttatgtataatatttgagagataatgtgtatttgtgtaatttgaactatgtatacgatagtaaaaatgactcatgtcacacggcggcggaggcagagcgacggtcattgtctcggatttatcggaaaccacaggcacctgttatttctttatttatttcaaactgtcttagcattgtttaaaaaaagactaaaagactatttaaaaaattcttttttaaacaatggtcttagttttcactgttcataacatcgttccgattgtgactgtattgtgtgtagtacttacagtcttgtattgtttgcttccgtttgcttaagtttgtgtttgcgtgtttttaataatttagatgtgtaggtactgtgcatatacagggtgagttcccagtgcgggaccggtcgacaactccattacggcataa

SEQ ID NO: 14588 - DNA, 447 bp, Diabrotica virgifera
gtgtctattattaaataaaaaaagtgtacattcctaaggtacctctgttttgcaaacatttttcaagaaaggttgagttttcatatattgggctgtattttgtaaaataatgaaaaataaataagaagaccaatttttaaagcaaagtgccaataataattgtcaaaaaaattgtgtttttaattattttacgaaatacaagaaatacataagtcaactcttttcgcaacatttttgtaaaatggaggtcctttggtattgttctttttttcgataaaacattttcaacttatatattcttttagaaatgtataataaactttcattcttgatttatttttttggcaaacttttgtgctcattgaccgggctatttggcaaaataatttacacacaaatatgaaattacataagctgaaattatatgtatgtgtaattataatattt

SEQ ID NO: 14589 - DNA, 444 bp, Diabrotica virgifera
tgacttatcgacagtctttgagcggaggtgcgatatctgttttgtgtttttcgatgtttatctatggaaatatgtacaataattaacgatttgatcccaattaacctaacataacctaaataacttttaagcctgagcaatctcttttatgagttttattttgtatttccacatgagtcatgtgagttattggactaacttctcacatttgaggtgagaaaaaccttaacaattccttaaatagatgtattttggtttttttgggtaaattttgactctctttaaatgtgtaaaagtgatatttttggtaaaattgtttgtaaacttccaataccagttatttgcttctagatagttttgtatgtatatagagtaaatattatgtattttgcaatttttattgttaatattattataaatgttatacaagaaccacactggtgg

SEQ ID NO: 14590 - DNA, 446 bp, Diabrotica virgifera
  SmartBlast Evalue=3E-59; Info=Histone H3c n=3 Tax=Culex quinquefasciatus RepID=B0WZ74_CULQU
cacggaaataatggcacgtacaaagcaaacagcccgaaaatccactggtggtaaagcaccacgtaaacagttagcaaccaaagctgctcgtaagagtgcacctgcaactggaggagttaaaaaacctcatcgttacaggccaggtacagtagctcttcgtgaaattagacgttaccagaaaagtactgagctacttatcagaaaactaccttttcaacgtcttgtccgtgaaatcgcacaagattttaaaacagatttacgttttcagagttcggcagtgatggctttacaagaagcaagtgaagcatatttggtaggtttattgaagataccaatttatgcgctattcacgctaaaagagtcactatcatgcctaaggacatccagctggctagaagaatcagaggagaaagggcataaagaaatagaagacattaaaaaacggt

SEQ ID NO: 14591 - DNA, 441 bp, Diabrotica virgifera
gccccgcaattcaaaatgaaattattagaaactaaaaaactccgtttgagcgattattttggatacaattcgagacatggccattgattaataacctacacagtttttacccactacctgggtagtttttaatcaatgacatggcgaaatctgacaactttctgtagtttttggaaaagggccccgccacaaacactgacaggggcccctgtggggctaggctacgccactgtgtataggcgtgaagagatgtaacaatagaacaaaggcgtttgcagtgtattggcgtatctgcgtatcagatttttttcggagaatatgtaaattatttagcgactttatttttttataattaaaaggcccctgggcgcccgcccaaatcgctcagtggataaagcggtactgataaaacataagtaaataaatttgggaattacacag

SEQ ID NO: 14592 - DNA, 445 bp, Diabrotica virgifera
agatcaatgctttgattggttttcctctctttggaacaaacttgtgcacaaatgacctacgcacacctttacaagaaaaaacaatgatacaatcttaaacctagcacacacagtatgtgaatatttttatgtacaaatagtacacatgaaataaaaacacaccgaaagtatatcatataaaaaaacagtaattaagcaaacataatatatgtagcgtttttctacatttttctaaatctatcgaataacgatcacttttgctttggataaagtaaagttttgtagtggctggggagttaccgagccctgaatatgtgccacccgacgaaacaaatcatggcagtaaacaggggagcggataccggccctggtattagtcttgataggattccttgacgtgagtaactcttcgtccgatccatcttcacttgattgctcattatca

SEQ ID NO: 14593 - DNA, 447 bp, Diabrotica virgifera
cttatatgacgcagacaatgaaatttgcactaccaggcccgtacaatgtccaggagaaagaaagttgaaatgcgaaatggaaggtactttcttacatcccacaaactgtagtcgatattacgattgtatttgggattggttagaagataaataccatatacggcaacacttatgtccgcctggttctagtattgacttgaatacattaagatgtgttgcttcctcttgtggccaaacatcagtaactactgtacgtcctactgaaagcacaacaacccaaaacgacggttttaaatgtgtctcctctggtatctatcctgatccggtaagctgcagttcttatcatgtttgcgtttccctagtcaacgagacaatagatatacctatggactgtccggtagactcctaattttgattcaaataacaaactttgtacgagagaacctg

SEQ ID NO: 14594 - DNA, 438 bp, Diabrotica virgifera
acttgattttccttcattctacttactatgttttcttcttcgttactgacgatttgatcctgatctgtcttttctgccactacaatatctactggcatatcgccaatgtcgaaattgtagcaaattgagtcctcgactataatttcagtcatattggtttttccaaaatttgctgaccatgcagatctccataatccagcatctgttcttggtttacctcataacgtcttcattttcttgcacattgttctctgcaggtatgtattctgcttcttcagcagttctgttggtcgtaatagatctacgacccctcgtatttttggtccaacttgtgtttttggtccacctcgtggttttggtccacatcgtgtttttagtccacctcgtggttttattacaccatagttcggttcacctttattgtgattttctagttgc

SEQ ID NO: 14595 - DNA, 439 bp, Diabrotica virgifera
atgtaatgagaggttccaaatataggttgccacaaaatattatgcaattgatattaagtgcattgacagacatgaataaaattaagatagacatgacggtattccccattccacgaatatacgaccccattggatcatcgcgacaacgaacattttactgtgcaaaatatgacgaacaaaagtaaattgcaaattatattgttgtttattggagtaattattagagcaaaatactttcgtacttcttatgttgcacaccaaaatattcgttgtcgcgacaatccaaaacagtcgtatactcgtggaatacaccatatattataggctattgattatgtatttcagaaaggaactacaacgttaacagggttttattatttcacatggtcaatggaactctaaatatgaaaacatcgtggagtgctatcatttaaaccgg

SEQ ID NO: 14596 - DNA, 441 bp, Diabrotica virgifera
gtttaactaaattcacaaatataattttacttatttactctacatttttttgttttattattgtaattattaaaactaacaattataattttatttgctgttttattcctaatttataaatcttaaagtaaacaccaaatcttataaaatacctaagtacgtaatcaatgttaaagggtaacatgtaagcgtaaagacggaatccaacggtgtgcggtgtggcacgcttcaccagtttaccaatttaaacgtcgacaaagagaaacgggaaatacatgatagtgaaaataaaagagagcacgcttggcaccctacgttactcagaagttaaggaaaattgacttgaaaaatgataaaatcggtctgaccatcatttttccaagagtaaagttacaccacttgtgttggtaatagatattttagtaggttggttaattcaca

SEQ ID NO: 14597 - DNA, 442 bp, Diabrotica virgifera
  SmartBlast Evalue=3E-21; Info=Transposase n=2 Tax=Meloidogyne javanica RepID=E1A4A3_MELJA
aacattctgcaatttaaagcgaattgtggatcagcattatactctctcgtatatcccatagcagccacttgtttcttcatattttgtgccaaatggaaaaaacatccattgatgtcgacgcctggaaaacaatcttccattgccttaaatgccgcctgttcgaaatcgcaatggattgctctgggttgcaaatttggtacaatttgtctgatcaattcaaacatacgggtatatgtggatcttgttttattcggcagcatggcataaaatattggatggactccattatattttgtggccataactgtgtatacttgtaaaaatagagatggtgctatacaaatgtaccgtcaccataccacacatctgaggtctgtagatgttgcagccacgattctctcccgaaaatcaaaattctttgcaatccttctccatcatctgc

SEQ ID NO: 14598 - DNA, 446 bp, Diabrotica virgifera
atgaatacttaaataaggcatataggaacaaaacaatcaacaataaattgtcacttgtcacaataaatttatgggtattatatgacttcttcatagggagaagaaagccaaggtgcaatatgtgaagttttcacactgagaatgagaatataagtttgcttgtagaaaagaacccttgatattatcgaatataaatcatataaaaacagttggtggatacactttggccagacaagaaactttaacccttaaaataattaaaaaatacataaggttgcgagcttttttgcacctttccggtagagaattgaattttttaataagtattattgaatgttgatatgttctatatttttgtgatacgagaatattttttcaaaggcttttgatcaaatctaatgacaaaaatcgaatgtaattgtagtgtttaagaggcccgaagcagt

SEQ ID NO: 14599 - DNA, 446 bp, Diabrotica virgifera
atccaattttaatttgagttaaaatgatgttgagttaattttcaaatcgcgcgcggcgatgacgtactaccaagcctttctcctcctttaaatactatcacgtgaccacggtacgcgactaacatagtttgtttcgaaaactaaattaatctatttatcaaatatgtaatagatacgtttcgataggattatttttttatattattctggtattgaaatagatttttagtaagaccaattaattaatagaagaaatttaaaaacaaaaagaaaatacgtaatactaatttaaagtaagtagaatagtttaactgtaatttaaacataatcgatgatcataccctctaatatcagcttctcacatttctcacaacaaaaagtgaaacgtgaaaagctttattttcctcgtttattttaggcgggtttatttataataatgtctttcg

SEQ ID NO: 14600 - DNA, 446 bp, Diabrotica virgifera
  SmartBlast Evalue=0.000000003; Info="CG8008, isoform A n=1 Tax= Drosophila melanogaster RepID=Q7K0G5_DROME"
ataaattcccatattgacaaaatagaaaaaaccactgtttgtgttaatggtagcattatatatttgcggataaacgctcgaagacagtagttgcgctacactgtctatagcagaagaagtagcgtaaacttttcctaattcgtgtgatagtaccataaatgatatcaaagttcgaaccattgatgtgcatagtgttccaaaacaccggattgtataggctgcatatatgtagatgtcactagttgctaatccattaagaatacacgtaacaatagatattacgagtgacaaaacaacaagctgaagttctttcattttaagcttcttatataatattgtagttccaaatattgttcctataatcactacagcttcaccataaacttgggcattagtaatttgggacaatgtccagtgaactttttgtcgcaagaagagggttctta

SEQ ID NO: 14601 - DNA, 446 bp, Diabrotica virgifera
  SmartBlast Evalue=2E-31; Info=Golgi apparatus protein 1 n=1 Tax= Harpegnathos saltator RepID=E2C6H1_9HYME
gagacaatttatttttctaccgtttccctgttctatatctttacagtgggtcaaaaggtccaatgcgcaagctctttgtaatagaggatcggcctggatgtcggcttcagaaccttcgattaaagctgccacttccacctgacattcccgagttgaaatactttttgatataaaagcattcttcagacattcgactgtagagccagaatcgtcttcgtcaagtttgcaaatactttctatctcatttttacacatcagccccaataagggatccaagttaacattcaaagctctctctctaagaatttccgccatctcctgctcacaattattagacaatttagacatcttaaattgattcttcaaacattttattaccaaatcttcgggtttttttgtcgttcctgggcccgagcaattcctttttacaaaacttattgatatcc

SEQ ID NO: 14602 - DNA, 446 bp, Diabrotica virgifera
tttataagcaaatgaagtttttagctttatcagagtaataatttgtctttatctgatttctttttaactacaacttagtcaacaaatatagcttatagggagagtagaaattaaaattttgtaaagtatagttaggtatcctaaacattgtttacaaatgtttaggatatctagagtgcaaagaagcattatcaccaattcattgagtttgacagagggcgaattattgtgatatagaagctctataaactctattactggatgtacggatttctacgaaaagcaaaaatagacgaagatagttgtccatttttttgtcttttcaattacaatatatttcacattaaagcaaaagtaagttaagcttattaaagagtctatttgtaggcgtttataaggctgttcaataaattttgcggcttgataagagagggcgttgcgactag

SEQ ID NO: 14603 - DNA, 444 bp, Diabrotica virgifera
ttataaagttgggaaactcgctccgcgaacttgtattaatttcttcttaagaacaacataacgaaactgttccttctaatacgcggaactagagacaaaacatactatcgtggtattcactgtaaccagcatttgttttctcaccaagaaaacagactaaatagattggagttcactccatctggtaactcaacttgtcttacagacaataaaccaaaactgtctcgcggactagaccaaatcggtccgcgactctacactgtcgtagctagatattgactcctttctctcgtacactcgtaccaattcaagacaagattcctggtctcaaacacagaaattacctcccattctggcaatcaccagatagttatccaattaaaagaaaccaaatattcttctaccaataaaataagccaggatatgttactaagtcacagccca

SEQ ID NO: 14604 - DNA, 440 bp, Diabrotica virgifera
caaaaattttcctccgtaaatgagtcgttgttgagaatacgggtattctgtaaatatattttcaagttttaatttgatgctttctattgtttctgtggggtctacctctatgacttcttctgctgctgctacaggttttattcttagtttcattgatttttttacttttttgttaattactagaatttagattcggaatttcggttttatagaaattttaatttgacactgaatttttatagtgccatagatttttatcaacatttaagtaagaagcgacgttttttattaatttcaatactgtctcaaataaacaataatagttatttatgatatcaagtgttaaaagtacacgtttaaggcacgcatgtgaaagtttgcagagttctgcaattcacatgagtgccttaaaaatgtactttttaacaagcatatcatac

SEQ ID NO: 14605 - DNA, 444 bp, Diabrotica virgifera
gttgtcatatgagtgcaaaaagacgtggtcttaaaaaaagtaccattgcgctgttactatttgtggggttacgaactgtcgccttacgaggtgccatggaaccttataacaatatcgaaagtgtttattgatgtaaaaaatcgtgcttgggacacaaagtttatcctctcaaaagaaaatccgctttgtatgtatatttaatgtaatatttgttaaaaaaaagttggtatgcgtttttggcagttctacatgtagaaaaatactttagtgttgccgggagctgacctaatcacgataattttgaacataaagcatctgctttggtatgtcttttttaaattaaccttcacatctaagcttttaaaataattttattttctactatttatcacaggttgttctttatttttatgtatattttgatttgggcaggtataggtgaga

SEQ ID NO: 14606 - DNA, 446 bp, Diabrotica virgifera
  SmartBlast Evalue=4E-20; Info=Histone-lysine N- methyltransferase SETMAR (Fragment) n=12 Tax=Harpegnathos saltator RepID=E2C6C7_9HYME
cgatgactgtcctatcggctggaaaggtgatggccgccagtttctgggatccacaagatgtgatctatatcaacttcctggaacaaatcggtcacatggctttactctggggcattattgggacgatgcgaggctgaattgcagaaaaaaggtcccaattggggcagaaaaaagtattcttcgaaaacgcaccggctcacatatccgccgtcgccatggccaaattggtcgaattggactacggctgtgcaatccaccgtactcttcatatttgtacgacttctttttgtttccaaacttgaaaacatcacctggcagaaatttaagtcgaatgaggagttcatcaccaccacggaagcctactttgcagacctcaagaaatcgtattttttagacgggttaaagaaggtaaagcatcgctgggtcaagtgtatcgagctaaaagg

SEQ ID NO: 14607 - DNA, 432 bp, Diabrotica virgifera
aaaaaaaaaatatttttctcaaatttatggatacccaacatcgtttttaatcattacaaatatcataactcgtttattattcattttacgaaaaaaagttattcttcactaaaaaactttgcatggtctaaaatctaagacacaaccatgatatatcaacttttattaattttatacgaggtgtatcaaaaaatatgaaattcgctcaatattatagcacctttatatctcacagtatttcaattagaaggatgtaattgcatattgacacatagtttttaattctaaacaactttttttaataaccgttttcaatattgtgaaaaataaaggtactttactcttgagtgaaattcgtatttttgacataactcgtataaaattgataaaatgtgatatctgatggttgcgtcttcggtcttgggacatgca

SEQ ID NO: 14608 - DNA, 445 bp, Diabrotica virgifera
aaaaatgacgatgtcgtccctcgtgtacccagagttttcaaacttttgtaaaatttccgccatagcccaaatatcccacagttcccatactccacaaaacttcgactttttttccaacccctacggtaagggtgagggtggctactaaaatgaggtcaactttttgagttcaggccacagtagcacccttacggcgaaacgtatcaaatctcgctgggacatcaaaatttgcgcatcgacgagacgaaaaatataagttttttgaaattttcaatttttgatgggaaatgtacaaaaaaaaattaaaaataaaaaaaataaaaaaaaacaaaaaaagtgacatagctccgcccccatagctgcgattttggtcaaacttttattgttgtaaatggtttgatgtggcggattcgaaaaaacaagtttcaatcagtggcgcattcat

SEQ ID NO: 14609 - DNA, 444 bp, Diabrotica virgifera
atagccaaaaacatatttgtcataaaattattatttcgtcataaatcttaaacattttccttaagagataaaagatatgaaattgatatttttaaattacaaaaagtacttagaacaagacagctctagattacacaatttataaggctattaaaggtatatacagactgtacagttttacattagatatacacgctataaatggcaacatcgtcgagtccgaatcgaccgtcgtacaaccgtcgcgtacgaacgagcctgtccccgcttcccaccaagatgataacagtgtatgtttttaattcgctccgaatcattcagtcattcgtcattctataatacaatgatggcaatgttgccgattttagcgctttcttcagtggggtatatcgtatatccaatccaaaactaaacagtcggtagatagcaagcaatttatcttta

SEQ ID NO: 14610 - DNA, 439 bp, Diabrotica virgifera
tttgaaatatcagaagcatgcgcatttgtttgatgcgttcaagcacacaaattactagtttgaaactactagtcgggcgttctaacgacagtaaattttgatttggaaactggcttcaaacggtcaaaagagtttgcggattttgtccggattttaagtttgtgcgttgcgcagtggaattatttgtttgacgtttacaaattgtaaatgaaagtaataggttttgactatgttacttaacattatttacgtttataataataattttaatattcagcataaatcttgaaaatttggatacttataaaaaaaaatgaatttctaatctaacctcaaaattgtaaataaaaaccaacaatttgacgttggtattttactccgataaaaaagcgttctagcaaaaaaacagtttgttaacagtttgtggatggaacatgcg

SEQ ID NO: 14611 - DNA, 444 bp, Diabrotica virgifera
agagagagtttgaatgctgttgaaacttagtacattcaaaaaagatatgatcaagatcaccctgttttccgcaatgtttacaattatcatcttcaatcacatttattttatataaatgacttggatagcaagcatgcccaaaacgtagtcgatttatagttgttatatatttacgtggagctttaaaactcttaaaccaagaactttgtggaatcactggttgtaaagtggtgtatcttgtggggtttgttaagcagtaaagattccattgatctttccatatcaatagttggtttcttttaaaaatagtaataacatctgatacacataaagaatatgacaataaagtgcctgatgttatactggatttgctaagtagtctacataattcattatctttgagtccaatatgtgccttaacccaaataaattttatattgaagt

SEQ ID NO: 14612 - DNA, 443 bp, Diabrotica virgifera
  SmartBlast Evalue=0.000000009; Info=RNA-directed DNA polymerase from mobile element jockey n=1 Tax=Camponotus floridanus RepID= E2AVN7_9HYME
tttttacagaagaacactttgatatagctcttatttcggaaacttggtacaaacctaagtatgaaatgtccttacagggatttaatattgttagaaaagatagacgtaataaacgaggtggaggtgttagcataattatctctaataatattaaatacaataatatagtattcaaccaaacatttaataaaaatattgaagtttgtggcattgatattgatgtcaatggcaccaaaatatctgtggttagtatttatcgtccaggtagcattgcagtcacagtgaacgactatgtttctctttttcaacaaattccgcataattttattattggtggcgactttaacgcccatcatggagcctggggctctataaacaatgatcatagcggtaacatactcatggaagctttagaatacttcgacaactttatcattgcaaat

SEQ ID NO: 14613 - DNA, 442 bp, Diabrotica virgifera
ggctgtttcattgtttttgaaagataagttttataaaatcaatggaaaaatcccaatagttggctgtataccatagtttaaaaaaacctatacagaagtaaaaacttcaaattgtattttggtataaaactcgtttatttaaaacttctaaaagtcatccacatggattgcaaaacgttttcgttctgaacagaacatcttcagtgcctggaatgaagtatttccacgttagattaaggcaaaaaggtcaaaattgcgactgttaatgagaaaaatatgtggagaatacttacattccgcaaagtagttgtaactagcacaccaatgaaggtggtaacttcataatatatggcttacattataacttttgataaaatattgtgactacaagtcgatgttacaagattaaattatgtatgtgcctaaagagcaacatgcttcc

SEQ ID NO: 14614 - DNA, 446 bp, Diabrotica virgifera
  SmartBlast Evalue=2E-32; Info=Small heat shock protein 21 n=1 Tax=Gastrophysa atrocyanea RepID=Q3LGX2_GASAT
gacaaagtgtctataaacagaaccatgttcgtcctctttttcttcgtgtttgccttcgatggtaacctcccggtctcctgttactttcacagtaatttcttcgggtttgaactgctggacatctagattggctgagaactggtctttaccgaaatttactgtggaaccatcatcgtttcttgacgctacagacctccagtttctcatgtaaccagcaggacatctgaggaaatttctggacaccggttcaaacagatcttccggttccaaaaccattccaaaatgttgatcgaaaagccttgatggtctgttgtagggtccatcgccaaacaaatatggtagaagagacatttttacactcaactgttttttacaaaacaacttttacaacttttttcaatcaaaattcacttcgctgctttcgcgtttttaaatttctcgctgag

SEQ ID NO: 14615 - DNA, 447 bp, Diabrotica virgifera
gcctgttgaagtcattgatatgctcagtagaagacgacaacagagatgaacaaggttgcacttctttagacagtcacaccagctgtcaaccaacacaattatgggggttgaaaatgtcgcataattaaaaatattttaatttttgacgtttcgtgtcctcaaaaatagtgatgacatttatttttctcaaaatgactaatacaaccctatggagagacaagatttgtgacaggtgaagagagtcagacagaggtgtaaccaggatgatcctaagggggggggggttacaactacttgatggtctctgcggggtatggaatagtaatggtgttaagcgtatagagctcaaagtacatccaaatggaggggggttataacacccaacccctggttacgcctatgagtcagaatgagataacttggacatcagggcgaatacccgaagac

SEQ ID NO: 14616 - DNA, 446 bp, Diabrotica virgifera
gttttttataagtaaaattgtgatttgtaataaattttagtccaacttactaagtgcaataaaatgtccagttcagaagaacaacgtcaagatgacattacaactgatgctttgccaaatcctagatatggtcagaaagataagaaaataatagaggaggaaattacttataaagtagatctagaggaagataatcctgaatttcaagaagttcgtaaaagtaatttaactagttttaatacaagaacgaagagaaacaatggaggaaaaaaatttagtccatctacagcttcagccactgtaataaacatatcacactcgaaagacatacatgtaggaaacaaaaacacatacaatttcagtggaaatgaaaaaaataaaaaggctgacatccctgagacttctgccattagatctttgaaggctagtacacaatctttatcaag

SEQ ID NO: 14617 - DNA, 446 bp, Diabrotica virgifera
  misc_feature (388)..(389): n is a, c, g, or t
agactcacatccttagtaaaagtgatgcaggactgtcttctaaatttgcgccgcgtcgcgatggcccataccttatccttaaccaactttctcccacctcgtacgagttagcaactctaacgcacccagatgtatcgatcggaaaataccacgtgtctgctctccatccttttgtggaagatgattccgattcgcctgtaactcctctacatgagttgcgtagtagaggccgaccttcaaccacgttgcagaaagatgtcgcagccaaaagcagaggggctatccctaaacgacatcctaagacaacgcagcaatctacaggttctggtgtacctgtaaccacaaccagcgactccagtagtacctcgttgcctacgcagattgattnntccatacagagacccagacgttccaagcgccctcctaagcgctatcaagatgctcat

SEQ ID NO: 14618 - DNA, 444 bp, Diabrotica virgifera
ataaaatcggctttggatcgaaacagaagtatatttcattttcaataattaaatcttgttttgttagtagtaatgacaaaaaagtataaaaataaggagaaagtccacatcggtttcaactctggtttaaatctgcaaaaatatacctgagctttgaatataacaaaattcactaataattatcaataagaattgtagctcacgaaatgtttgtttaaaaaaatccacgaggaaaataaattcctgtagctggctgtataccataaatcacaaacgatagtatgttcctttgtaaaaactatatttaaacaatccctaaaaagggttacagaacattttcggaatactaattccatcatcagtgtacaattccagcactgcacatgcctgagacaccaaaacgtctgggcaaaaacccctcaaatgtcgtaaagatcaaatttg

SEQ ID NO: 14619 - DNA, 447 bp, Diabrotica virgifera
  SmartBlast Evalue=2E-38; Info=DNA-directed RNA polymerase II 16 kDa polypeptide n=2 Tax=Culicini RepID=B0WK75_CULQU
ataacttaacctaaaagtaggtgcattttgttaaccatcgtttttgtgtattgtttaaagttttcagttgcaaagtgtagatctcataaatataacactctattttgaaaatggcaaacacaaacacagacttaacggaagaagacgcagcagacctacagtttccaaaagaatttgaaaatgcagaaactttattaatatcggaggttcacatgttattagaacatagaaaggatcaaaatgaatctgcggaggacgagcaagaattttcggatgtatttatgaaaacattaacgtatacagatcgatttaggaaatttaaaacaaagaaaccatatcagctgtaagaaatttactaatgcagaccaaaaagcttcataaatttgagttggctgctatcgcaaacttgtgtccagaaaccacagaggaggcgaaatctctaatccc

SEQ ID NO: 14620 - DNA, 446 bp, Diabrotica virgifera
tagggtggaggagtagggggggggagggggctacataaggaaggttgtgtagtgttgtagacaatatgtcgatttgctgaatttatgcaactggcacagtgcaagatacaggattggaaagtgtaaactggaaatatttaaaataatttctaaaaaagataaagggctgttcgacttcgtttttgagaaataagctgaagaaggtgtaggcaatgttctaaccatactatttttgtttatcaaaacttccaggtccatttacactctaaatgttttgagacttctcacaaaaaataaaattgtgtatttcaatttttatatctcatttccgccaaaggttcgaaaacgaaccattttgttgttgtgacacctgccattatcaaagtgtaaaacaatttttttacgaatgtttaagtttattttactctagttaatcaaatatatta

SEQ ID NO: 14621 - DNA, 446 bp, Diabrotica virgifera
gcgctagattaatggattaattatattataaaatgttaagaaaccaaatttcagtattttaaacgtatgtatatttaaggtaaaaatatatgctacagctctggccaactaatattttttcctattaatgtttttaatttcaatgctttaaattcatccttttgacatttatgtcaaatttccaaccgaagttcaccgacttatcactactggcgctcacgaacttttaaatatcccctctaccttagagctcacagcaaatatagacctcgatttttgacccttcgcttcgttatcgatcatgcgctatccgtacactaaacagatacgaagcaaatacgttcgataacgaagcgacgggtcacaaatcgaggtcatggtttttttttactacaagaatcaggctacatcagttatcgttaaaattttcataacatcaaccttca

SEQ ID NO: 14622 - DNA, 441 bp, Diabrotica virgifera
  SmartBlast Evalue=3E-10; Info=Transposable element Tc3 transposase (Fragment) n=2 Tax=Camponotus floridanus RepID= E2AKN2_9HYME
aacgaataatgtttaaattgtttttatttttttgtattttgtggtagtcattgttatcacctctagtccttatgcaagcttcagtttgcgtgagcacgctcctaatcaaattatcaacattttgttgtggtaggttggtccatcctttaaaagcagattgtactagccgtgcggtgttttgtggattatcccggcgagctctaattttcttttaagcatatcccacaaatactttataggattaagctcgggtgagcaagcaggccactccaaacaagggataccttctgcttcagtgatgtctgtagtcactctaatggtatgaagaggtccattatcataaaataaaattaaattttctcctgtttcacatctccaggccctgactacaggttatcaacatacctgtgagcagttaaagttgattggatgaaaattaaa

SEQ ID NO: 14623 - DNA, 436 bp, Diabrotica virgifera
  SmartBlast Evalue=4E-20; Info=Aldehyde dehydrogenase n=1 Tax= Culex quinquefasciatus RepID=B0W918_CULQU
aagccataagacacctgcaccggttttcgccgtcagatgcagctaatcaacaggcaagcgcaaaccaaagtaaactgataggtacaattgatatcaactttaatgggcggcagctcattttcaaatttagtcttcaggttaacgtttaaacccattcccaacatggcttcgaaaaaggttgaagtaaaatatacaaaactattcattaacaaccaatttgttgattccgtcagcaagaaaacattcgaagttctaaacccaagcaccggaaaacccataaccaatgttgcggaaggggacaaagaagacatcgacaaagctgtacgtgccgcaaaagctgcatttgcaagaggcgcgccatggagatccatggatgcttctagtaggggagccatcattaacaagtttgcagatcttgtagaacaacatctagatg

SEQ ID NO: 14624 - DNA, 441 bp, Diabrotica virgifera
ctgcgccggcctaccaaaaaactaataaaatttctaaactaaaacattctaactaaaatagtaaattagtgtgacaaaggattaatttgtaaaattaaaataataatttttacactttgtaaagatttttttgttggcactgtgtggctaaatcattccataatatttttaatctttagtgagtaaaacgcataaataattctaattttacaagtattaatactttttgttatatcaatttattattttaattgggaataagccacaaaattagcttatttccaactaaaatagtgaatagatattataacaaaggattatttttgtaaaattaaaatttttatttatgcgtttgataaataatgcgatattagaccgcatactctagtagcaccgaaaattcttaaaaatgagagttgaacatttcaagatgtttcactt

SEQ ID NO: 14625 - DNA, 442 bp, Diabrotica virgifera
tgcagttaccgttctgtctgaaacgcataaagtgttacaaaacaaagttttgcacacccgaatttgttcagattttacatttaggaagtattgatgggaaacagatcttcggctactgcagcttttcttttctgtctcttacacgagctgtgggtagtgacaataccctagatgacacataaagtcgtttctctggccattttaatttccaaaagtttttaaatatttcttctcggtcttcgttacttactttaaagcactggatttttgtgttgatttttgagcatttacatctatcttttaaagttttctttggcctttttatgttaaattctttaccttttctcctgtatattccaaaccatattcacgttttctttttgctgtattgtacttccatttttgtggatcgctaaattttcttttgcttcgttttcgatat

SEQ ID NO: 14626 - DNA, 435 bp, Diabrotica virgifera
ttttcgaaatctaagttttattttgcaatttccgaagcaacaaacaatcgtacgaaaattcaaaaactgccatttcaaacctttgttcatctactaaaaatgaatactccatctgatataagatatttaattactcacttctacctgcagcgatttaaacgaaaaactgccatccctgacccttacctgctaataaccaaaattatcgtccgaaccgtaacggacattctcgtatttacaatgtaataggtatatagtgtccaaaaaatccatttgcaacctggccggtcaagtgttccgaacgtatatttttgattatttccctggagtacaatgtgtctccggttatccatttgttttctctttttttttcatccctataatttcgtttgcagtttttgcataatgtccttgaagttcttccatatttcttcc

SEQ ID NO: 14627 - DNA, 445 bp, Diabrotica virgifera
  SmartBlast Evalue=1E-39; Info="CG2747, isoform A n=7 Tax= melanogaster subgroup RepID=Q9VHW9_DROME"
tagaatctgaactctcgaagccctgcctgaagtggttgatacaaggatactgaatattgggtacggtaactactttatagggagcgttcaatacaaaaactgctatcgctaacatcattgtgacttcatctaatttattatcatcacttcttgtctttgctaggtcgattattttcgctagagcactctgaagtaatttttgccaattgttagcagtttctggattattacaatagttatctgtggctaatatttttaaacatttcaaagccgcttgaatacacgaattatttgctaaaactgtactatcggctacgtgctttgttgccatttcttttataactcctgttaccagatacaaaattgtaggcagaatagacaaagcaccttttggggaacacaaataatgaagtttttctaaacatctaattgaggctgctattaa

SEQ ID NO: 14628 - DNA, 437 bp, Diabrotica virgifera
taacctcagatagatatgtagaagacctaattttaagcaacaaatgttgtacaaagtttttcaaaacccaatacttttcaagttattggcaattgaaaattcggaattttctcacgattttcaacagttttttgcaaatatctccaaaaatatgcattttaacgataatattataatgaacaaaattgtagcaggtaaaaaaatgaacaaattcttttttaaagagtgttctaagtgcaatattaagcgagatattgaagatcaaagccgttttttattttgtgtgaaatttaatcgatgtattcaatgccatctagcgaaagcgaataaattttatgcatgctaatgagaaaggattttatagtgcttaaaataagctttaaaatgaatactgttaaaagtcttttgtacgtaaaatgagtgagctgtaatgaaaa

SEQ ID NO: 14629 - DNA, 443 bp, Diabrotica virgifera
tgaactccatgatcgctgtcctactcgtcgccaccttggcttgcgcccatgcctcagtcttaggacttggagccgctgctctcgtaggaccaggtaacccaggagctcttttggtcggacctgctgcaagatctgccgccgttggacccgacggtagtgtcatcactgctgccgctcaagctggtgccgtagctgctgccccaattcccggaggtgttgtcaccgctgctgtagctcccggagcagtcatccccggagctggtctcctcggtgctccaggattgatcgctcctggtgtcggaatcggtattggtccactaggtctcggtttgggacatggtgttggattgggactaggattgagacactggtaaatgacgattttaatataataggactgctcttgtgatcttttgatttatgtttgtaatatagtaaatatt

SEQ ID NO: 14630 - DNA, 445 bp, Diabrotica virgifera
ggtgtatatggaggaagagaaatttgtcttttttgatgggaattttctaaatctgaattactagtgcttggaatctgagaagaagtgtcagttcttcgccttttaattgtttttgattctaatgcggttgaatttgattttggtttatttaaaggagcataataaattgttttgtttgctggtgctaaatcgggaaaattttcaagattatttaatatatcaaacctattgttggtattaattttggcataagctggattgttaatcgataattcggcatccttaaaacttttattttcgaaagccattactttttttatgtcgtgttgttttttgtacattgggcaatctcttgaaattgaaggatgatcagaagatttacagtgaacgcacatttgcaactcggaattacattcagcggaagaatgctcatttgcacatcgag

SEQ ID NO: 14631 - DNA, 445 bp, Diabrotica virgifera
  SmartBlast Evalue=8E-29; Info="Adenylate cyclase type, putative n=1 Tax=Pediculus humanus corporis RepID=E0VW82_PEDHC"
gcagcaaattttagacgagaaggaatttttaacgttaatgaatgcttatatactgaagttcgacgtgctcactaacagagaacaatatcataatatagaaaaaataaaaattgccaaatggacttacatggtcgcatgtgggctgtttgatagacacacgccagatgctgaacgacaccaaactagctccagcatgcatacgctgctctgttttgcgtctgatatgttcaagaagctaaacgatgttaataggcaatatatgcagaattcacgattgaggattggtataagccacggaccaattgcagcaggcgtggtcggtagcaaaaaacccttgtatgatatttggggcgacccagttaacatggcatccagaatggacagcactggtattccagaccgtattcaagtgttggagcagactgcagaagtcatacagaagctt

SEQ ID NO: 14632 - DNA, 438 bp, Diabrotica virgifera
caacgaaatgaatatttattaaaaacgactttagcagaaaagcaataaatactttcaactattaactaatgcaaaactaattcgattctatcttgcttatgaaaccgcactgcagacaactaaatgttttcagtaatgtcggagttcatagtttcgttcgtaaatagggcttttcattcacagtcacttgtttcgagcgtccgtcatgtgtcacataaattactatatctacgtcatacgctattggcatataccaatgataaaaaccaaagacgtatgacggatatatatcaatattatgtgacacatgacaggagctcgaaacaaatgacagtcgatgaaaagccctactgacgttaccaaatgagtgaatcaggttcatgaaattttgtaagacgaataagaacttgattttgctcaaattcgctcagttagaat

SEQ ID NO: 14633 - DNA, 443 bp, Diabrotica virgifera
cgccttcatctattagtttcattgcctttgacattatttttaaagttggtgctgtatttgcttcatcctttgagctagcaacagtagtatgtgtatgtaaatgatcatctttctgattgcgctttggagaggcactgacatcttctgtatttggttctcttgctttcagcagaattgtgggttgtttctttggagtatcattacttgaacctaattttaatgacccctcagtcttggatcccgaaaaacttcttccatcagttccagttattgtttcttttactatattgaaatttttttttcttggagtctaactttttacgaggtccgtaatctgacattttccttgtagcaaaatcttcaaaaccgttgttagtatattatattttgtaaaatatcatttctggtttactgtaaattgcattgatttttgatttaatatt

SEQ ID NO: 14634 - DNA, 444 bp, Diabrotica virgifera
  SmartBlast Evalue=9E-39; Info=Tripartite motif-containing protein 37 n=1 Tax=Harpegnathos saltator RepID=E2BKN5_9HYME
ttacttcttcaacccatctgcagttcacgagttcatgcaagtgtagagaagctctgcaatgaggacattgagatctttgttctgttaaccatctgcggatacaaacatagcaacacagtttcgaacaatgtgggcacagatgagcatctctaagtttttccatacaaataaaacatctgaaaacctcagcaagtgtttccacgctatgttcgtcatgttttgttcctactttgtttctagtagccatttgacagaagctaacttcttagatacctaaaatagcttgtatcgccaaatctgctgcgaacgaatccattattcgttatcttaacactaatacacaatcatcgtcaatattttcaaaacaaaaaccacctgtttcacatctctgttaaattttcacgagttttaaaagttttcatgttctcctttaacacgtttttt

SEQ ID NO: 14635 - DNA, 443 bp, Diabrotica virgifera
  SmartBlast Evalue=1E-15; Info=Transposase n=1 Tax=Agrilus planipennis RepID=D2WLV0_AGRPL
ttaaaactaaagcaggaactgagtaagaaaggttctcatatgcagaataatattggctattgataattttacctttttcaaggtagtgaattaaaattatgcctttacaatccaaaagtacagtggccaagaacccattgatcgactcttggccgcttcagagcagttttgcttgcttcagtccactgccgtgtgttcattttgttgtctggtgtgtagtagtggatccaggtttcatcatcggttaccaatcaacgccaaaagttcggattgcgctttataaggtgcaaatacagctgagaagcgatacgattatttttttgacgcatagtcaacaaacctggcacctaccggcaggatatttttttcatattcaaaactttgtttaaaatatgactagtgcgctctttactagttaattattgtactaatccttgttctag

SEQ ID NO: 14636 - DNA, 442 bp, Diabrotica virgifera
tgctaaagttagtggccttcccaacaaatatagtaaatttgactatgtattaaacggattagtaaatttcttaatattgttcgttatattcctgggattacaatttaaaaaaattgatgtagcatcatacattgttgatcatctgttccaatttctgattggttttatttcgttgggaatcataacatcagtttttacgtatgttaggagcttttatgtaccgatcagtgctcttaataaatttgctgtaggaaagagcaggatgtatggattttcattggcagagaattgaatccaagattgttttctgtggtcgatttgaagctgctgttctttagggcatctcttatagctacaatattcatcgatttggcatttctctcgaaaacgttggaacctacatttaaaattgaaaatttagataatacatttacaattgcgc

SEQ ID NO: 14637 - DNA, 440 bp, Diabrotica virgifera
actgacttagtgtccacatgattaaaaaaactctcaaaatagacacaaattaaatgctgttttcactgtttggtaataatttttattgatgttttaaatctgtaaattattcttaatagcaaatctaagataatacactaagcatcaaaatcaacgcaccacctcaaaaatgggacattttgatgtctcacatttcccaaacctgccgtccgattttagagattctccagtacattacagctttatgcttcaagaatatcgatgtaataatattactgctaaagaggtaactgccattgtataccgggtgtaacaatgctagtatgttttcacctcaaagcttggaaaaccctgtggaatatggaatattctagcgtatataaaacattgcaattaaaactgaactgcagcgttaggctttcttaacacttttgcttttt

SEQ ID NO: 14638 - DNA, 443 bp, Diabrotica virgifera
aaaaccataaagatcaactaaataattttatatttgctgaagttatattaaaacaatatgaaacctgctctcgtagccgacgaaatgttcccagagggtgctggaccgtacatggatttagaagaggctggaggttcttctggtttgttaatggatctaactgctaacgaaaaagcagttcatgccgatttctttaatgattttgaagatctttatgacgacgaagatctacaataagcacctttacatagaaattggttaaaaagaaataagtcatttgccaaattatttttttattcaacggaacattttacaatttgtaattaccaagtactgtcaaagtctttaccaaaagttatgtttgtagtaaatcacagtttaaaagatgtaattttgtaaaaatttagttgtactacattttgttgttatagttaatgtatatt

SEQ ID NO: 14639 - DNA, 431 bp, Diabrotica virgifera
ttttgtaccatcagttctttttgtaacatacaaattcacaatgaagtttctcgtactttttgccttagtactatactgctcttcggaagttttaggaggaccttgtgatagtgtacagtgcactcctccaaactgtggacttggtgctcgtccagtagtgaaaccaggtgattgttgcaccacttgccaaggattcggtaacccaaaatgtgaaggtatacaatgcgatgtaccactctgccctcctggatctatattgaagctcaaagataatgcttgttgtccctcatgtgagccattcggtaatccactgtcacattaaggatagagattgttgtgcaacctaccaaccagttgataagtaataataaatcaaggaatattggaactatcagaactatggaaactgaaaaattaccaataaattaata

SEQ ID NO: 14640 - DNA, 442 bp, Diabrotica virgifera
ctcgtataaaaaggagtcgagtattttgttttgtggttttatattcctattgcccaatatctgtgattaaaaaaaatattccaaacaagatgaaaacagtttcagttataacattttttgtgtgtattggtcttgcgctatcagcaacacttttcaactcagaaaacattccaacaccagatagagatgagccaagctgtgaagtttgccttctggttgtgaattttgtcaaaggttacaagaatagaggctttagcaagaacgacataaaacaagaaaaagaccatgtatgtaatctcttcttacccgatctgaaagaaatttgcttgcaatcttatgaggacgatgttgattttgtttatgctgaagatgatgataaaacggtcgcagaaatgtgcttagatatgaaacagtgtacttctaagaaaaactaataattaaa

SEQ ID NO: 14641 - DNA, 442 bp, Diabrotica virgifera
  SmartBlast Evalue=2E-29; Info=Karyopherin (Importin) alpha 2 n= 5 Tax=Xenopus RepID=Q28FD3_XENTR
ggtgtttctttgttcaacaggttttatattttatttctattcctatattgtccaccacatttaaacaagggaaaatggcagacgaaaacagaattagatctttcaagaacaaaggcaaggatacagaggaaatgagaagaaggcgtatagggcaaactgttgaactcaggaaagccaggaaagatgatcaactgcttaagagaaggaatatatccaccagtgaagaacctacatctccactccaagagaacaattcagtgtcttcccctactatgtctgcagaagaaattatgtatggtatgatgaactcagatgaagctattcaatatagggctacattggcatgcagaaagattttgagcagagaaaaaacaccaccaattgatcacatgatccgcctaggagtagtacctagatgtgtggaatttctgacaaaagcgca

SEQ ID NO: 14642 - DNA, 435 bp, Diabrotica virgifera
  SmartBlast Evalue=3E-17; Info=Endonuclease-reverse transcriptase n=1 Tax=Bombyx mori RepID=D5LB38_BOMMO
ggaggcctttgaaatgtggctgcacagacgtacactgaaaataccatggacggctatgctgacaaatgtggcagtccttaagaagagcaaatgctgcccacgagctgcttgataacatcaaatatagaaagatggtctattttggacacgcagtaaggggagaccgatataatatccttcaacttattatgatgggtaaaatcgaaggacgcagaggaattggtagaaagcaggcctcttggttgaagaatatccgggagtggacatgaataaagaaagcagaacaactatttagaatagctcgagaccgagacagtttcgccatgttaatcgccaacgtcaaggggacttgatagggcacgttaataagaagaaggactaaaagcacacggttgaataagtagaatgtgtatttttcggtattagtgtgtataa

SEQ ID NO: 14643 - DNA, 443 bp, Diabrotica virgifera
  SmartBlast Evalue=6E-11; Info="NAD(P) transhydrogenase, putative n=1 Tax=Ixodes scapularis RepID=B7PCD1_IXOSC"
atcttcttcaatattcacagtaaatcctttcttggttaacgtgtgtgccacagccggtgtaattgacactcttttctcattcttccacacctcttttggtactccgatgcttaacttgttgtatggaattcccttaacctctgacgcttccttatttgaccgtttcccagtagaaaaataccgtttaccagcatgttctgtatatgatttaaccttttgaactttctgccaatttgttagtaggtaggtaacgttgttgatttgctttctggaataatggagactcaaaatgcctttcgccatggtttgttcttacgctgtccacatttgccgataccgaagaacgaatttttgcttctttatgttcacgttcactgaatttttttgttccggcgaccggcgaaatatggacaacgattgtacgtatacggcagattgctggt

SEQ ID NO: 14644 - DNA, 443 bp, Diabrotica virgifera
  SmartBlast Evalue=5E-26; Info=Tep3 n=1 Tax=Aedes aegypti RepID= Q16YC2_AEDAE
acttatgaaggaaaggcttctattaggaggaagttaccggatactttgaccacttggtcagtgacaggtttttcgttggatcccttgcatggactgggattaactactacagaaaagaaaatcaaggttaccaaatccatggtggtgatgttagacttgccatattcagtccaaaggggagaaatcttaagtattccagtcgtagttcaaaataatgtcaacgaagatatcacagttgatgtcacattgcacaattctgaacataagtttgattatatagcttctactgaagataatactgttaaaagggtggaattatatcgcagaaaaagactgcaagtagcgaagaatagcgcagctgcagtatcgttcataatcgtggcaagcactagtggttttataccgatcaaagtgacagccagcagtcccaaaaatcaagacgt

SEQ ID NO: 14645 - DNA, 440 bp, Diabrotica virgifera
  SmartBlast Evalue=7E-36; Info=Furin-like protease 2 n=1 Tax= Harpegnathos saltator RepID=E2BLN8_9HYME
gagtggactacagttacaaagcggagaatgtttaacgacctgtgctgctggttactacagcgacaaaggtatgtgtttgaggtgctacatgagctgcaagacgtgcagtggtccaggaactgatcagtgtgtaagctgtcctaatggctggcagttgctatctggggaatgccgacccgattgtccagagggatactataagacggagtatggctgccaaaagtgccattactcttgcagaaattgtccaggttgcaaaatgcaagagggcaagagaaaaataaatgtagaagctcttcttctatccgcccaaccagtttctactttacagatagtgaacccgttcaattttattacaggaatagcaataatagcatgcctgtgtgtcattatactttttatcaccatattcatcatactgcagaagagcaccatccagg

SEQ ID NO: 14646 - DNA, 442 bp, Diabrotica virgifera
cttacaatgcactattgcctctttaaaagtcattttaagtgacatttgaagttttcagtgacgtttgacaagtcctcattaactttctcagcaatatttttagtgacgtttgacattttaggatactaatcgttcaccagcgtctccagcgatgtttttggtaaaatttgacatttatgcagaacttatggtacactgttgcctctggaagtcattttaaatgacatttcaagtttttaatagtctgcactaggcgatatttgatatttatgcacaacttaatctacttcagtgcctatagcgggcatttcaaagtaaaatttgatactttgagatgacttactgtccactagtgatgtttttggtgtcatttgacacttatgtatgtctcttactgcattggtagaagtttttctccatatggcgttttaggtgacatttg

SEQ ID NO: 14647 - DNA, 438 bp, Diabrotica virgifera
tttaacagcagtgtaagatacctggaagtttggtccattccaacttctggcgcccataattcagtctattttatttatcttctatattcttctatttttattatattattatatttatctaatttattttctgaacatatatttttatcttaagatttcccttttctagtcatcatctctctttaggttgagctactgttcttcgacaggcatgcaaatgagccgtacccatccttgagtgtcaagctgttctcttgcatctcttgctagccaattctatttagtttgcctctgtctccccatacttctattatcagttcctcacccacttactcatttcacctttagcatcctagttctacaaatactactgcaaagtagtatttttgttacatcggcagcccaacttgggccaacctttataggttctaagacagt

SEQ ID NO: 14648 - DNA, 442 bp, Diabrotica virgifera
  SmartBlast Evalue=8E-13; Info=CG7603 n=5 Tax=melanogaster subgroup RepID=Q9VVH3_DROME
tgtcagtgtcaggaaaaaaaattaataaaatgatcaagtttgcaattaaagccggacttgctgccacagctgtttactacataaaggaacaaggagtgtggaaacaaagcgacgaaagcataaaagcctatgaaaaaattaaagaagctgcatgtccctatgtcaaagagataacatctcaaattccttatgagatcccaaaactgccagaaagtgatgtagcctcctcaatagttaaagaaagctggaataaaggtgttttagttactttcaaattcctatctgatctgcctgacaccacaagagagttaacagccaaaggtattgacgcaataaaacaaaatgaagaggttaaaaaacttttaaattcaacttcatcttcgtgatttgaaagaaatcatagttattgtgttagataatttattaataaacaatttctctt

SEQ ID NO: 14649 - DNA, 442 bp, Diabrotica virgifera
gaaatatgttgtgcgagagaaagagaaacaccaaatctaagtagaaaagttgtagaaaatttacttttacaatttcaaatatcgtcacaaaccaaaactgccgcaaccacatcacaaccgcgtcatttttattattctaaccagaaaatcattattaaataataaattgaaaaaattaaggttatatatttatttatataccgcaggcccgttaattataaacccaaagccccactagcggtataataaatattattatttaattatttattagttaggtatattatttatttatttattcgaaatcttttaaatgctgttaatcttttgtataccttaggaagaaaattggatattcgaattattttaatgatacccctatctgatacagtagataatcacacacaaggagatttagagatttttgttggcactgatcatt

SEQ ID NO: 14650 - DNA, 442 bp, Diabrotica virgifera
cttatatgtagcacgtatattctaaaaagagatagtaatttaaccataatttcttgctaaacaatcattttcaacaatgaaatttatagcggtatttcttttagttgctgtattggcccaaaattcattgcaagaagaagaagatgcacttattccattcccgaagtgccatggagagaatgagcaggcacaaccaggatgtgcaccatgttgtcctgagcaagaagtgagctgtcaaaacaaagtgcccagggcttgccccagcccaatatgtccatatagttgtgaactgaaatgttattgtactgaaggatatctccgggacaatgtgtctggaaaatgtgtcaaaaactgttaaaccctatttaaaaattacttacttgtaaatgaatattgcgttttatcttatgttaataatttagttattaaatttttttcatct

SEQ ID NO: 14651 - DNA, 442 bp, Diabrotica virgifera
aattattgtgggaataaataagtttgaattgggaaaacttgaatgacttaggtaagtgtcattattgggagtccgttcgttttataaatattggtacttttagttaggttaaatattggtatgtcaatgatgttaaaagttggcgatacattttcctcatttgccgatgcaaaaaagccttctcggaacttggagaaagtacatttaccacgctttggaaagagatgcacgtaatattgcaagcagtaaaattaagaggccgatagaaagctctttaatctattatcaacttatttaagcatgtaatcatggtggaaggaatttcaagagcggtgggaactaagagcgtacacttagtttagaactaattcaaaaattagtctatgctaagacagacgatgattacaaaaaatatttgaaaggactagaagatagtgtacct

SEQ ID NO: 14652 - DNA, 442 bp, Diabrotica virgifera
  SmartBlast Evalue=4E-23; Info=GPI ethanolamine phosphate transferase 1 (EC 2.-.-.-) (Phosphatidylinositol-glycan biosynthesis class N protein) (PIG-N) (MCD4 homolog). n=3 Tax= Gallus gallus RepID=UPI0000ECCDC4
aataaaatgcgataaactagtgccgatatctaaccaagaaccaacattcgttatcaaatataaaaactgcagaaccattagatccgaaaaaattaatataatacaaaatatattcatgacattctgttttcccacttcgtttatggccctaaaaatactacaagtaaagataaatggcacaataaatttgagaagaatcaaacccatcattttaaacgggctgaacacggtaaggaaagctctgacccacattggatcaaatgagttcatacttgctatatttcctgtaccaaagaatcctacaaagataaataccacaaatagaaaagctcgtctaaagtcatctgtattgacgaaactctcgcttttgtaatgttcaaacctcataaaataaataagtttatgagacgactcatacttaaacgtcttgctttctatcaaa

SEQ ID NO: 14653 - DNA, 441 bp, Diabrotica virgifera
  SmartBlast Evalue=2E-51; Info=Carbamoyl-phosphate synthetase (Fragment) n=1 Tax=Torymus sp. CD042 RepID=A0FII2_9HYME
aggaccgttgctgagaaaaagtccatcataatcttcaatatttagttggtggttccaaggtactacatctacacgagctcctcgcttaagaagacatcttatttgattatatttcagtccacaatcaacggcgcatattcttggagttccatttatattatatgtaacaggtttctctatggatacttcagcaactaaattccttaaattaggatccagaatagatacttcggcaggcaaaggcaagcgataaacgatctttcctaacatagtaccatgctctcgaattttcttggtgagttgtctggtgtcgattccttggatacccggcacgttttcttgggccatccaagctgacaatgttctagtgctgcgccaatggctggggtattgcagtgttctccaaccaccaacgccgaggcccatattcgattagattcg

SEQ ID NO: 14654 - DNA, 438 bp, Diabrotica virgifera
  SmartBlast Evalue=4E-26; Info=XTP3-transactivated gene B protein-like protein n=1 Tax=Harpegnathos saltator RepID=E2BLR9_ 9HYME
taacaccaaattcaaacgtatggataatataaaaaactagaatcatgaaaagaccctttgtgatttttacccttatttggcaaattgctgttcaaaatgatatcaaaggatttgatgataccattatctacaacataaattttcctggagaattacttgaagaggaagaactaacaggagaagctattatagttacttctgcacataaggaaaaatataagtgtattttgcccacaactgcagaggaagaggctgagctggaagaaaagtatgatggccctacagctcttgaattactttcaccattgttttcaccaaacacaccatgttcttttagactagagtcctactggacatatcaggtctgtcatggcaggaagatcagacaatatcatgaagacagagaaggaaaatcaatagaagttaacaagagtattt

SEQ ID NO: 14655 - DNA, 442 bp, Diabrotica virgifera
aaattaccattgttgcttgtgtttttgtccacgccttcatcatgctgaaatttgttgttatcgctgtgctcattgcatgcgccgttggagctccatctccatctccaaatccatctgcatcaaggtgggataacggtttcaactcaatccttggtggcctaggatcttctaggggtcttggttatggcagatatggccggtatggcagatatggtggctatccctatggttacaatagattctacaggtaccgctctccatttaactacggtggatacggcggatacgatggatacggtggatacggtggatacggcggatacgatggatacggtggatacggcggaaacggtggatacggcggatacggtggaatatacgatgattttaatggatatgatggatattattaatctactaaaaaatttcacaagtaatcgcc

SEQ ID NO: 14656 - DNA, 439 bp, Diabrotica virgifera
  SmartBlast Evalue=2E-39; Info="Parafibromin, putative n=1 Tax= Pediculus humanus corporis RepID=E0VPB3_PEDHC"
aggtcttcttacgacaggtatggtctctgcagctgtttgtcgtacatagacaggatggcttaatgtaatattttttaagaagaacaatagacattctaatgtgtaatattccttcggtgttccatcttttcctgacccctaaataagatagttggttttaacattttttggccaagaaaactctccaaagatgatttgtccatctctttcgataatttcctttttatttacgttatattgacgcaacaaactaagcggatcggccattgtcctttatatttaacactaataacaatactttattgaattagttaacggatttctcctataaatttatatacgtcttttgcttagtgtattttaatttaaacactactgcatagcatatgcaaaaattgttcaaacgccattttcataactttcctttgaagcgcaattg

SEQ ID NO: 14657 - DNA, 441 bp, Diabrotica virgifera
caatgaattttgcgaattggcaaacctataacgaagtacatgacggtggttagtttacattttactgagaacgattacttttattacatttaaacgtgtaaatgattcatattcatcgttttacggcttcgagatcaaatgacaaatgaattgattttccgaagttatcgtccatctttgaaatcatgagcgccctctgtcggaaatggctattgcgaatatagaaaatggagacaatatcagatgtatttgtactgttaacttcaaatcaatatacatatctaaattccgttgtgattaaacaacattcactaaacataatcacagaaaaagaagtaatcgaatggttggcaccttcgattttttaacattggctagcggccatggtgttagatcattaagacaaaatatatttttatgccccaaacacagatgaataat

SEQ ID NO: 14658 - DNA, 439 bp, Diabrotica virgifera
atttaccatcttattgtagtggtaactccagtttccagtgaacgttgttattaaaaagaaaagctagtatctacggggtggccagaaactccctttacactaattaattgtttttgttatactgcacagggaagaaataacagatttgtttgtgagttatttattaattatttatttattcaaaacaacggtgtgcatacctctattgtcgcaatacagcttgatacgacgccatgttcgtatgttcatgcgtctcatgatcggagtaacagatgtaaaagtttggcgaactccgtttgcatgccctcattcgaaacatctctgcgttttctaacctcccttctaatgaaaccccatagtgcattttcaggcatagtcaaatctggacttcttagatctgtagagctggtcatcatcatcatcatcattctctttgcct

SEQ ID NO: 14659 - DNA, 436 bp, Diabrotica virgifera
  SmartBlast Evalue=3E-13; Info="Polyprotein, putative n=1 Tax= Solanum demissum RepID=Q6L4B3_SOLDE"
ttgccccttaaagtttgccatacttatttgaatgcatcctgtgttgatggaaaacatggctggttgtgaaagtgcttaatttttttatggttcaacatacgcgaatgaataaaagggcggagtgttgagaagacatgaggttatagttgagttttaatttcagtattttataatcatcattctctttgccttatccctatgcggggtcggcttccctaattgcatttctccacacaattctatcttgggtcatatcaatgttaatcccctttaccaacatgtcctgccctatcgtctccccccaggtcttctttggtcttcctctcctactccttccaggaatctgcacttcagctattcttcgtattgggtggttaacgtctcgacgttgaacatgaccaaaccatcttaacctatgctctctcattttggcatc

SEQ ID NO: 14660 - DNA, 434 bp, Diabrotica virgifera
aatgattgactttaatgatcctttgagcagtatttattactttcaactgttttgcatatggtgcttaatattgtagcctttttgtgttgtacaggatatagatttctaccaatttgcctttacctttctttgtcccgagctgatttcatccattgtttgtctgacactgttcttatgtcgtctacccatctcttttgacatctgcctgtgaatcatctctagaattctccgcagtcaccagttatcttcttcttctttcggcatcataatcctggatggttatttgcctgtctggctatgtcttccattcagatctctcttgtgcccttcttcctccattgtcttatatttatagttttcaggtcgtcttccagtcatccaaccatctcgttctagagcttcccattttcgctttgctatcgaaattattgatg

SEQ ID NO: 14661 - DNA, 432 bp, Diabrotica virgifera
ggatatcttcgctagcatagtaatcacaaatgtttttttatcaagctttctagtgtttttagtattcagaaacttaatggtgtaactcggccagaggcaacgttatctgcttttccttgctttgggagtacaatgtattcattccagattttgggaattaaattcccattttgccttatgctgttaaaatttttttaagaatgatttttattcttctcttcctaattttgaagatatgatttaaatttgttgttgatttcgtcctgtaatcatagaataacgagttaatgcacttttatttatgttgtgtgtgacatggcaaagactggcacgaatatttggacatatttataactccttgtcgtgattaagctttgaacaatttcttcaaattgggagaatatctacagtatactctctcatatctgcaag

SEQ ID NO: 14662 - DNA, 441 bp, Diabrotica virgifera
aagtatttcaataaaatatttcaaacaatgaagctcctattcttcgtggtatttgtctgtattctatgcgagtattgcatccatggatttaccgatgtggaaattgaagaaataaataatatctgtgctgacgaaataaataaacatcgaggacaaaaaggcgatcgaggttttacaggcagtccaggccgtccaggcctgccactagatggaccaccaggcccaccagggagatatatacctggtcctccgggtatgccaggtttgccaggtatgaaaggtagcaagggtacaccaggcctagcggggctggaaggtgttaaaggtgatcctgcgccttgtgcatattaaactaagagagaacaataattaattagttaaaagattttctatactttcttgtactttaaatagtctatctaaaataaaataaaacagctc

SEQ ID NO: 14663 - DNA, 437 bp, Diabrotica virgifera
caattaattagcgaccaattagcggcaaattctcattctattcccattcttctacgaacgctcgaaagtcatttttttggagttgtgctttgctaaccttatatcaatttagcagagcacctaaaaaaataaaaaaaaataaataaacgacaaaatcggtattcttacaacttattcacgactaattagcggcaaatttttttctatttccattcttttacgataaccctaaaatgatttttcggaggtgtgcttgccaactttgtatcaagttaacaaagcaacccgaaaaaacaaaaaaaattaatttagaaaattaatttgttcacaaataattagcgactaattagcggcaaattctgatcctatttccatgctttttcataaaaacccaaatcattttatggatgcatgctttgcgaactttatatcaagtc

SEQ ID NO: 14664 - DNA, 440 bp, Diabrotica virgifera
  SmartBlast Evalue=1E-48; Info=Putative mitochondrial complex I intermediate-associated protein 30 n=1 Tax=Glossina morsitans morsitans RepID=D3TNI1_GLOMM
tgatacatatcattccatgtaagatcataatatcctttacaatgaatatttaacaaatatgaccttccatctcctcttactttcatcactaacatattataagccgtccagtccaaatgtccatctcgtttaaatgatttccttgctctatgagtcttcatactgcaataccctgaacgtttaactctaccatctttaggtactctcatagagagatttccagaaaataatgctttaccctgttctgtaagagtaagtgaagctttgctgaatccttccttattatcactatcacttgttatattccagttcttcagtgattcctcatttccgaacctccatttaacatctacctctcctggtctgaatatgaggataggatcatcttcaaatctttctttaacttcttgggtccagagcttaatttcattctttaattc

SEQ ID NO: 14665 - DNA, 431 bp, Diabrotica virgifera
  SmartBlast Evalue=8E-27; Info=Endonuclease-reverse transcriptase n=1 Tax=Bombyx mori RepID=D7F170_BOMMO
taaacagtgatgatgaagatcagggagaggacgaagacagaacagaggtgcagatataagaatagccgaaccaaccaaagacgaagtgcaaagagttgtaagcaaattgaaaaacaataaaagtccaggtccaaatgaaataagtgcagaaatgctgaaagcagggggaagaaaactactggaaaaggtgtatgaactgatagaacttacatggaaagaagaaaagatgcctgaagagtgggccagagcctggataatcccattacataaaaaaggggatgcaacgatggtgcagaattacaggggtattgctttgctggacgtgtgctataagatatttgctaggattgtaagagaaagattagaggtatacgcagagaaactaataggagaataccaagcaggatttagaaacaatagatcgacgacag

SEQ ID NO: 14666 - DNA, 442 bp, Diabrotica virgifera
tttaagacatgtaattttcaatacaccggcaattgtggctcggtcccagaatgtgggaatgtatggtgcttctcagaggcttttttcagtgcgtcacgggtgacagaagaaagggatgcgtccgttattgtacacatttgcaacatttgttctagttgttgatggatggcgctataatcggaaaaaattattacctattacatatctatacggctaaaatctaaaattcttctcagtctttcagtatgtcattaattttgacgtcatatatgattttaagaatgtagagaatcattgcttggaaatttagttacagctgacagttgtcagaatagtagtcagccaaatatgagaaggttattgcagtataacccttttatatatttttattatagcgccatctaccaacaactagaataaatgttataaatgagtataatca

SEQ ID NO: 14667 - DNA, 427 bp, Diabrotica virgifera
gaacggccacacctacaatagtgaaattaggagggaggaaataaacggatgcaagctttcaaccagtcatgacaggtgacgtaattatgacagatgactttatgtacagcgccactgtaacagaccattttaaacgggacccatggcaagcgacacctcgcctggaagatattgaaaataccatccagtgataccaattttgtctgagtttaagctaattttgatgaatacatgaaataaatataaaagtgtagtttcgcatttaattaattaataaaaaattcaaaactccgcatatgattacttgacaaaaaggttgacgtagagaattgaaaaacgtcaactttttcgacaaaaacaccataggcggacatttgaatctttattaattaaatgcgaaactacaatacatattatatttatttaa

SEQ ID NO: 14668 - DNA, 441 bp, Diabrotica virgifera
tatcaacaaaagattgaggttactttgtggcgtcctctaagcggctatatgcaggactaaaaagacaaacctcgtagcatgatcgtgataatagtggcgattgcgtatatgcttctttcaacataataagcgtacttttgaacgacttttgtctcttatttgcaacaaacgacggtagtaccttgtaaatttaaagcacaaaactggtcttagatgaaccttacaattttagctcaagtgaagtaggctttcacaaatcaatctaatttgttgttttcaaatttgaatgattcgataagtttgttgtaaatatgcataaaatattatgtctaaggattacacaagcagctacacaaagaaaataactaaactaatgacaagaaaacggtccatccaactgttttcttaatttgatgctattgaattttttctataaaccac

SEQ ID NO: 14669 - DNA, 441 bp, Diabrotica virgifera
aactttctagcaaaataagcacgtccgttatcgtgcattagcaccaatatgtcctatccaatttgtctgtcaattgacaaacatgatcttctaaaatattgttaatatacatggtagttggcattcgccttatcacctccgcacgttcggtacctatgttctattaaagcaataccgctccatagcactatactgccaccaccaaaactaacgctctgtatgaggttacaactgacatatgaccgttcaccaactcttctgtagacgaaatattgtgaatctcgcttccatatggtgaaagggttgatagatgtaacctcatacgttaagtttgagagtgttaattttgatagtggcggcattctgctgaagaagtggtatttcttggacaggatatactgaacttgttgaggagattggataaatcacagctgatatgta

SEQ ID NO: 14670 - DNA, 437 bp, Diabrotica virgifera
tcatgaagatctcatcataaattgtcatacaatatatagctactttatagtctttaaactaacgttttacaattactaacacgaagtcctatatcacaaacataggtgcagacttgacaagtttagaatgggtatgtatcttaatgttcgtttgagtaaaatttcacattcactggcataattcaatattttgaggtgattttagctatgttaaattaatcttttactgatctacatacctaaggatttgcctattttaatagtcacaactgtgtaacatttgttctctatattgtaggtatttcaagtaacagctattccggctgtttatctgtttaaacaagttgcatttaatcaccttaaaatatcaattcttcatttttataccacacttatattgaattgtgacaaagtgctgacatatcatctcatatcaa

SEQ ID NO: 14671 - DNA, 439 bp, Diabrotica virgifera
agttctcatcctccttgattcaattttttgactgggatgagtagatggaactagccggcactgatctgttggagcgagcttacctggatcagagatgggtccagaatgaactagtgggcaggtactggaattattggtagctgaatctgattttgagcctatcgtaatctgagtcttttggctcccctgcatcagtctttcaggccgagatctttgcgatcctggtatgtgctcaggagataacagacagacagtgcttgctcagacaggaccatctctatctgttctgacagtcaatcagccgtaagagctctggaagcacacaaagtcggctctaagctggttcttgggtataagagacacaggctgatgttgagataactaatagggttaacttagtatgggtgtcgggacacagatgtcgaaggaaacgaacagg

SEQ ID NO: 14672 - DNA, 440 bp, Diabrotica virgifera
gtggacgattggcgaaaagaactagggatggtcaatgctcaactaggactgtagcaccactgatgatgacaataatactctccctggtaagacaggaacaagaactagaaagaaaagtctagaaacatgtacttatcaaactgaaatgtccactatacgacacctgaacgattttggccagcttcattgttaaacaatgaaactttttgatatttttcgatttgttgtagaatttctatatagattttttcttcgcaaatcaaggccagattcggaacacgctgagtcaattgacaatatttttgtgtaaatttgcaacatgacaattttatcgataattaattttaatatgatgttatgtttttaattttacaacagattgtacgacgtaggtaccataaattctcagtctaagtgtatattctaatttgtattgcgct

SEQ ID NO: 14673 - DNA, 438 bp, Diabrotica virgifera
ctccagaagaatacgccagtctggagctggagtagattcagtgcagttgttataattttttttacctacattaaggatgtaccttttttacatttattcttttctttgatcttcgttatcgttcatatccttttagcatttaatctctcattctacagacgctgtggatacaaaacgaaatatttgaacttaattgttatatttgtaaagaaaacattgtattataatgaattgatttgtacatatttgtaatttatctatagattattaggtaagagattgccaataaaaagtttagtatttagttctttttggagtattttagataggatcgagttgggaatgcttatcatactatgacaccaccattttactaaactattttttctatgaagaaaacacggtcagctttattaaataattgcatgttacagccag

SEQ ID NO: 14674 - DNA, 440 bp, Diabrotica virgifera
gatgaaatgaaaaatgatttctgaaagttgttccgatctattcacattgccaacacatcttaccaatttttttaacaagctttacaactgttttccatgaatacacgagaatttttgtgatttgtgacataaatagtgcgattttatccgaaaaaaattcggaattcaaattgtccaaaaaggcaaaatcaagggctcttatcatagatgtaataactgaatgtctttcaatacatatataatcagaaatgaaatttgaaatacatattttctcttttacaacttttcttttagcgtgtagatatagtggtagaaatatttaccagtcgtaaatgctcacaaacacctactggtagcaatatttaccaccccgaaaaaataaatttaaagataatttccgttttttctatcaggtaactcattaccttctatttaattta

SEQ ID NO: 14675 - DNA, 436 bp, Diabrotica virgifera
tgacaagattttgtgcaataaaaatgtttatatttatcaaggatgtattatttcggtatggccacatatacggctggtatatcgtcggtgatgtgacaatatgtacctcctatctgcttcttcatgaattttgtaggagacgaaaaaccatttttggggtcatcccctgtttttacatgtaaattttgacatgtttcgtagtaaatagatagttgaatttactacagaacatgtcaaaaatatcatatgaaaatagtaggtgactgtaaaaaagtttttagtctctcttacaaaactcatgaaaaaacaaatcggaggtattatgtcacatcagcgactatatccagggaatatataaaaatatactgtgaatgtccaaagaacattcgtagatattcatggaatcttccaacaagacattcaaggaatgtttcaa

SEQ ID NO: 14676 - DNA, 440 bp, Diabrotica virgifera
gcacttactttatatataactaaatgagtctgggtttttgctgccaaataattgtattcctgatcagctctcagttttttcaaatatattttaagaataaaacacaaattgaaaaataaaatctttttttatcttcagtatccaggtcgaaaaagcttttgttaaaattatacattttatttacttattttccaatagtttccgatctgaaaccgaaaagttaataataaaaaccccctgtataaaaatgtttctgtataatttttctagtcagcttgaaactggaatgccgccattggtcctataatgacagtgtgtcggctcatgtttgtattgattttgtttgagatgtgaatcgtatgtccctttgtcattgtttgtgatatttttatgaacgccctgtatatttatacacataactagtataataaccgaatctc

SEQ ID NO: 14677 - DNA, 438 bp, Diabrotica virgifera
  SmartBlast Evalue=4E-21; Info=Endonuclease-reverse transcriptase n=1 Tax=Bombyx mori RepID=D5LB38_BOMMO
actttttgcgcttaacatcctttacaaaaatgccgtgaccaaagaaaagatgtatttgcatgtttcgtgaacttcgaaaaggcatgcgataaagtccagcatgtaaaattaatgcaaatactgaaaatatcggaatagatgacaaggatattcgtgtcattaaaaatttgtactggaatcaaactgctatcgtaaaaattggagataactacaccgatgaaatctccatacaacgaggagtcagacaaggttgcattttgtctccaacattgttcaatgtttactcggaccagttatttaaaaaggcactcgagagacagccatatggaataaaaatcaacggagaactacttaatgcgattagatatgcagacgatacagtatgtataggtatgtgattagatacaaatgggcattaaaataaactgaaacaaaacc

SEQ ID NO: 14678 - DNA, 439 bp, Diabrotica virgifera
agtagatttgttttcccgtttgtttgttgatagctctggtaacagcacatctatagacatctttcagatcaagctctagtatagctaaggatccagttgagtcagtatgaggtcgacaagcaggatcaggatagtctctcagaccttggatatataccgacattgtggtagaggagattggtacttctaccctcatttgcgttggagtacattttacttttggagatactttagcagtagtggctgcaataagagcggctacaattatgaaacacttatacatcattattgttggaacaaaataaacaaaagcactaaacgaccgcctgtttagaaagtgaaatgaatgtaagtaaaactaagtaacaattttaattgtcatatctctatctcctcttagacaacgcggtgtgcggtggacatacactctatacacggc

SEQ ID NO: 14679 - DNA, 439 bp, Diabrotica virgifera
ctggttgctggataattgtcaaggctatagcccaaaaaaattataagaagaaaaagtaagatttaggttatgttattaaacggtaaacaattgtatgtagtaaataaaattaattattaaaatgcagtactacaagcaaaatacaattatttaatagttatttatgtaccaatccagtaaagttactctttatcgaacgagtctgatattatgagcagagcgagtgtagcgagcgaggtgaataacagacgagttcgataaagagtatttactgacgtggtacatacaaaattttatcgccaacaatttgatattggttttaacacttatttgcaatttacaatttaagaactttttaaattttagacgtcataataatttcatgacagtgaagacagatgaattttgcgctttcgatttttaattgatagttatcata

SEQ ID NO: 14680 - DNA, 440 bp, Diabrotica virgifera
aatcattgttttaaaaagtattaagcatgaagattgtttttgttgttactcttttggttctcgtatcgttgtcggtaggagaagagactgaaaaatgtcctccaaatgaagctatctactgcaacagtgcctgccataccgtaccaacctgtcagaacaggcatccacgacctccacctttttcttgtggaggcctctgctctcccacatgcgaatgtgacatagacaatggttttataaggaacacagtggataataaatgcgtaaaagagaaagattgtcccaaaaattaatattagccactgtgaccttcctacactacagctataacagatttagtacagctacaaaacatcacatcccaaaacacatatatatttttaataattaatatgttattataatgtatacagttcattaaattattgttattaatactc

SEQ ID NO: 14681 - DNA, 431 bp, Diabrotica virgifera
gtcgggatctgacggttttaggcacaaaacaaacataatgacatctgacaaattgcacagactatctaaaaacatagatagttgaaaatatgtaaaaagtggagttagcggatattggaattatacgactcatatcgtcggtgaggcgacaacacctcctatctgctctttcatggatttttgtaggagagacgaaaaatcattttcagggtcatctcctgttttcatatgtaagttttgacatgttttgtagtaaatagatagttgaagatactacaaaacaagtcaaaaatatatgaaaacaggaggtgaccctaaaaaaagtttttagtctctcctacaaaactcatgaaaaatcagataggaggcactgtcacatcaccgacgatatatcatccaaagcgatagagtggaagaaagctggggaaaaa

SEQ ID NO: 14682 - DNA, 441 bp, Diabrotica virgifera
gtgtaaataaaaacaaaagtatttttattcatttctttcattgtttattactattactttataaaaataatttattcattttaaaagtatttagatttattatattttgtatcaaataaatctggtttaaaccaaataaaactggtttaaacgaaaaaacctgttttttttttgttttttggatgccaaccctgctttcagtttcaattattggtcacttcattatatcacattccttgatattctgaatgaagctgttttacatgacatttctaatatgggtatctttaaaaggatattagattttcagtagtatctgatttttccttctgttcatacttccagtagttgtagtcttttaagattggcctaccatatgagttatgaagttcgcggaaggttatggttattttgaagatgagatgatgctcattgttgtct

SEQ ID NO: 14683 - DNA, 438 bp, Diabrotica virgifera
  SmartBlast Evalue=3E-11; Info=Endonuclease-reverse transcriptase n=1 Tax=Bombyx mori RepID=D5LB38_BOMMO
gcgtcattgcattcgttttatattactaggtttcaatgtaaagttgttcaacaaatgatacaaaaagaaaaaaatgtaatgcagagatagctcagtttcaacgtacttttaggtatcgtaaaccaatcttcttaacggtatatctatacatgtacagttattttattgactttcaaaaggcatttgatcgtgttaagaacttaatattgaccgaagttctaagagacattagcttggatgacagagacgaaagcataattgcaaatttgtattgggatgaaacaagatcagttttagtagacggtttgaaattactggctcttaatattaaaagaggagtatggcagggatgtccattggcgcccctgctttttaacgtttactaaatagaactacaaaaacatgtaaaggatataaatatctcggatctgtaatatc

SEQ ID NO: 14684 - DNA, 438 bp, Diabrotica virgifera
  SmartBlast Evalue=8E-13; Info=RNA-binding protein Nova-1 n=2 Tax=Formicidae RepID=E2ABZ7_9HYME
ggtaccatctcccccttgaacgtatttttcctcatcagatcctccatctgaactaaagtgggagcgcttagtgtctccgttctcggcatccccatccagaggtctttttctggaatcggcgatctcaggcgaggggcatgtatccattcccgaatcggcagccattttgcttgtggagttaaaatcgaaatgtcattcggcgcaaacagagagcggacagaatttctcactgaacacagtttcaaaacagagtggcacacacacgcgttcgtaagaaaataacgactaatcggttttgttgggttttgtcggacgatatgcgcactcgcttgtcaattgtacgttatatgcgcgcgacactccaataactacttgctgctgactgctcgttttgcaatttgtattattctattcgttcagcaggactgcaggagaagg

SEQ ID NO: 14685 - DNA, 432 bp, Diabrotica virgifera
gtgacgtcacaactgcagtttgttcaaattaataaaaatctagtggtcacactatcagtttagtttgatcaaattttgtattgagagttgtggtagtatgtacatatatcaaaacccacaagcattccaacactttaacgaataataagccccaaactccctctctattgtagaagagagacagtaactaaccaaaaagaaatcaagtcctgattaggaaaaatctagaaaacaaacaagagtaactattggctacaaaagctgctgtacaaaaatcagtgtgcacgctgaagaaagcaaagcagggaatgatcaacgaaacaattttaatgtgtagctaggccacgactgataaacatatacaggggctcacagcttaaatgatgcagtcgcttctcaataaagctagcttgtgtcagcgctcaatattta

SEQ ID NO: 14686 - DNA, 439 bp, Diabrotica virgifera
  SmartBlast Evalue=2E-19; Info=Copper chaperone n=1 Tax=Bombyx mori RepID=Q0PVE3_BOMMO
tagagttatagttttatattcataaaatatagatttttataattgtaaataatatgtcaataagacttaacataaatcgttcacataagtatataaaattagctgcaaatcgtaaagttcacaaaaagatctccactaagacgaagatagcaaggtagtttcttttcctgttttcttaataacttctaaaatgtcatttgcaggtagagacgattttacggtcaccttttgagtctccaagttaatagtaaagtcttcgactcctttgtcctttaatttatttaaaactctttctactgcaccagaacagccatcacaggtcatttttacattaaattcgtgaactttagacatgattactggagaattttacgtggtatttgtagctatttatgattcatatacaaataattatccaagaatttaaaaaatgttgatg

SEQ ID NO: 14687 - DNA, 433 bp, Diabrotica virgifera
ggaggcaaaggaggaaagggtaaagctggtgtaaacgtaataattgttgatggggattatgaacgaagtagttcttctgttgaggacgaagcaatgcctacggctgtctccacagttgtcgaaccagttcccccagttaaggaagttagaaagagtccccccgtacctcctagtcgtccttcttcgcccgaagaacccatccaagaaccaaatagtttatccaagactgatagtaaagagaaacctcaactttgggttaaaattgatctacaaaaattgaacattagtcgtatacctattcttcagaagcatttagaatctacaaagccttggttactggaacctaaaccagaggaaaaggcgaaagaaaaacaaagtgataatgaagaagtagtggtaaagcagaagccttcagttaaagaggttaaagaaa

SEQ ID NO: 14688 - DNA, 439 bp, Diabrotica virgifera
acaattacttttatattttcacaaatactgcaaagtcttatgtaattatcaaatttatttttttaacatcagatgttttaaaaacaatatgaagataactctactaacgaaaatacagaaacttggacaataatataataacttaagtgaaacatgacctagatataaaaataataaagtacatatattaaaaatagttcaaattattctttataacacagcttttaaatcgaaaaaatgtagataagactaaaactatttgaagatgaccaacttatactcttaaaaatttacttagtaaaatttatgaaactggtaatgtgctcgtgactgactggttgtagtcttcattcttctttgtaaaaaagacagcaaagcaccagcaaatattccgattatagaatcataatagtataaaccacatattttaaatcattct

SEQ ID NO: 14689 - DNA, 438 bp, Diabrotica virgifera
  SmartBlast Evalue=8E-32; Info=Leucyl-tRNA synthetase n=1 Tax= Aedes aegypti RepID=Q0IF77_AEDAE
ttttaacctcgaagttttcaacaacatacggcctcctgatagtaattgttgcttactatcaaaagtaccgtatggttttaaaataaaacagctttatctttatttcatgtcctatttcgttactttttcacataaaaatggcaaacattgaaagaaaagggacgtttaaagtacaatacctgcaaaaactagaaaaggaggttcaagaacgttggaaaaatgaaaagatcttcgaaattgatgcaccagaaacgccaagaaaatctgaggatgaaaagttcttttgcaattttccatacccttacatgaatggaaggctacatcttgggcatacgtttagtttatcgaaatgtgaatttgctgtacgatacaaccgtctaaaagggaaaagtccaattccatttggtttcactgtacggaatgccaattaaggcatgt

SEQ ID NO: 14690 - DNA, 438 bp, Diabrotica virgifera
  SmartBlast Evalue=1E-12; Info=Endonuclease-reverse transcriptase n=1 Tax=Bombyx mori RepID=D5LB38_BOMMO
tagaggtataaactggttaactactacactaaccatgcaattaaaattttacaaaaactaatgaatcttctgcttcttcttttatgtgccgtatccatattctgacgttcggcgtcaccatgttcacaagttactgaaatctttctctatggatagctgcgggaaacaattcttctactgtagaactacaccattatctaatattacgcaaccatgaaagtttctttcgaccaatccatctctttccctccactttccttgtattataaggcgaagtagatggtatttaggttttctaattatattgccgaagtattatgtttctctcctctttatgatgtttatgagcagacatgaacatgtttattggaaggggtgaacccacaatatatttaggattcgtcgatagcaccacaattcgaatgcttttaatttatt

SEQ ID NO: 14691 - DNA, 436 bp, Diabrotica virgifera
ttgctttctttccttgggatctaatgtaactagctatagaatcaaattcatatatgtggccacatttcttacttttatatggattttttactttcgttttactgataggatccaaaggtggaacaaacacattggaacaaagtagggattcatcaatagtatcatattgtgtatcttgaagttttttgctcttcttatgaacttcccttacgtcagcattacctttaaagattgtctgccaaacacgacttttttgatggtttattgatgaccctgttgttacattatccacgcaatcctgatacaaactttctatatcttctatcttttctgaagagtttaatttctcatccaagttctgaaaagccttactggttgtattaaagttatgttccaactcactatattcttttacatgagtttctaaaatgttcaa

SEQ ID NO: 14692 - DNA, 438 bp, Diabrotica virgifera
gttgccgattgttcgataggaatttattttgctagtctgtagacgtataccgatgtgtgaagatatatgttgttgccacggaacctcgatgtttatcgacgaaatagtgtataatacgagcctctgaggagtcttgcactatttattggatgaacactccaacgcgacgtctccgctctttttaatatattattatatattatattaatatgtattattatataagtatataacacacggatccactttatatcaatacacactgccttgttgcacagtactacaaccactgatctattaaacatatttcatctgatgcgacacgcgtcaaaaacgctaagctttttgttgccaatcgatatgcgacgaaaacgcgtgcataaaaccggtcttggtgggcattcattcaatgttaaccggtcaattgctcgaaatcag

SEQ ID NO: 14693 - DNA, 430 bp, Diabrotica virgifera
aaagaacagaacagaatgatatgtgtctctcattctacgctaagcacagcgctgtaactgtggcttgtctagccgtagtggacgagaatttccgggaactttttggggctaggttaggctacatttttttgcgccttcggcaatggttgtcccgagctgcatctcgggatagccaattgtatgttttaggatcctgactacaaatactgaaaaaactaaagtgcgaattttgtcatgaaatttggtacgtggggttacaataatattggaacaactttttcaaataactttttccgatatctctaacgcgaagcaaaatatcgaaaattcgccctgtttgtagattcgcagtagatagcgtttgaaatttaaatttgagttgactatgactatcttaaaaaaatgtaaaccatcacactcgcttgactgc

SEQ ID NO: 14694 - DNA, 438 bp, Diabrotica virgifera
  SmartBlast Evalue=3E-46; Info=Transmembrane protein 147 n=2 Tax= Formicidae RepID=E2AWH0_9HYME
taaaaattcagtaattcagaaattattttatttattatattattatcccaatatcttttttctgaataattactaattttttcacacaactatattctaattatgactttgtaccattttggaaactgtgtggcccttatatacgtaccttattactatacctataaacactctggcctatcagaatatggagccttttggaagtgtatccaagcaggattgatttatatgataacacagctggcaaaaatgttaattcttgcaacttttttcccagaaaatgtttctgatctcggaaatgatgtggttggagaattcctaaaatctacagtggatctagcagaccttgccggtttatacttagtcctctcaggaataccaggtaaaggacacagcaaggtactaactgcaggaatcggttgggcaacagctgaagtt

SEQ ID NO: 14695 - DNA, 438 bp, Diabrotica virgifera
tcctaaacccagcccagatactccctacgttacagtaactgatgtagagcaaccggttctttcctatggtgcaaatgagcctctacctgaaggccctccaccatacgtggtaaccgatatcttcaaaacaacaaacccgggatatgtgccattcacccctatggagcccgctaacaaaaatacgggatacgtagtagctggagatttgacgtcactgcctgctccagaaatccaaaaagagttcatggtagctgatccacaggtggcgctgaaacccactacagtatggcaagagccattattagactcatcgcttcctaagacaggctacgtgagtgtgggagatgctcttcctcccataactgcccaaaccaaaggatacgttccccatagacagttcgaaaagacattaaaagaagaataggtctcacgttattg

SEQ ID NO: 14696 - DNA, 435 bp, Diabrotica virgifera
  SmartBlast Evalue=1E-28; Info="Mitochondrial ribosomal protein, S24, putative n=2 Tax=Aedes aegypti RepID=Q16KP2_AEDAE"
gtcgtgatattatgcctgctattctaataatgttgtgctgtcttttgattataacttcactaccaaagagtccttgccacgttcctaccataaactttcttataatacatcttctacagctgtttctgaaggtctgagtccaccatcaacatttgaagtattccacgagttccaagattttctgtgagctatttgccaggggggattagccatttcatacgttagcggaaaatctcttctcggtgtgatcttgtattttcctgactgcgttttgtggcaaactacactggtctgtatacctcgagatacattttgttgaagttttaaattttgtaacaacacgtttcttattaaactcatttcttttattcttttaataactaaagaagttattcaaaaaatattaaatcaataggttatgtaaatctgtcactg

SEQ ID NO: 14697 - DNA, 438 bp, Diabrotica virgifera
  SmartBlast Evalue=2E-48; Info=Cysteine-rich with EGF-like domain protein 2 n=1 Tax=Harpegnathos saltator RepID=E2BBL3_ 9HYME
ctctggcacaatttatacacatatctggaccatttccagtacatccaccacaagatttatcacagtccacacaggtataacttccttccatgttaacacaaaattgtagaggagtacatggacttttctctgcagcacattcatttatatctctacaagtcttttctgagtcttgcgtccaaccagacctgcatgagttacaaccattaggcccctcttttgtgcatcctcctgcacaagatatatgacatggagcacataaaactttcttttcatcttggtagacaatataatgagttacattgcatgtgttacagttactcccagcataaccttcttcacattgacattgaccatttcccttcctggttccagatcctttgcattttccattattactgcatacattatcagggaatccaggacaaggctggcagt

SEQ ID NO: 14698 - DNA, 436 bp, Diabrotica virgifera
  SmartBlast Evalue=1E-21; Info=Endonuclease-reverse transcriptase n=1 Tax=Schistosoma japonicum RepID=C7C207_SCHJA
ttttctttcctcgataagattccaagtttcatctgatatccattcctttctatctttctcttttttacccagtttgtcttcagctatttctgtcagaacatttgccaaatcttcccagctatttacttcacgttctcttgtttttacttgaagctcctccctaaacatgtgttttcctggaagagtttttaatttgttcaggttatatgtgggtctgttggtgtttcttgtgattttgttttgttttttgccatcttgattttaatggtaccaattaacagatggtggtcacttgcgatgtctgctcctcttttatttcgtacatcaagaagagatgatctccatctttttgatatggcgatgtgatctatttggttttctctggtatgaccaggggcagtccatgttaccttgtgaatatttttattgtgggaag

SEQ ID NO: 14699 - DNA, 424 bp, Diabrotica virgifera
tttgacgctattaacctgttctgaagctcatccaatacgtatttcgaattacgttgacaaatgattagcagttatattttatacattgcatcgttttcccgttatttaagcttgaatacttagatttgagtactcgtcgaaaaaaatacacattcaattgccaataactcactttgaactaaaatcagtttagttctttaagtgaggaatgtattcagttttttattatcatcaatttcagtaataacaactattttgcaaaagcttatagtttttgagttatacgtgaaaaaccgatttaaaacttttatttttttaataattgatggattcgaccgttacttgatggaagttcatttttaatctaacaataaaaaaactgaaaacgcccgtcttctatacttccacaaaatttattatatct

SEQ ID NO: 14700 - DNA, 438 bp, Diabrotica virgifera
gcattaaaataccgttttacattttcctccattcccaaaatacatcatattcgatttggctgaaaatttgcccacagatagccaaaccataggtctttaagtggttaaaaggatttgaataattttacaatacaaaaaaagttacatgcaataatatcagactcaaaagtatattagtccaatcgggatagcatattaccttgcatgccgagctgcccaaaattttatttttctaatctttaggggagtcaatggtagtctaaatttaaaacattttgagaaaaaaaaaaagaaaaagacaattcgaccttaaatatcctattttacattccgcagacgctatacaccaattttcagacaaatcggagatccaaaggtttttttgatcaaaaaattgaatgatttgaaatggaatcacccttcaactatgcgtatgaa

SEQ ID NO: 14701 - DNA, 436 bp, Diabrotica virgifera
tgctgttgtttcgctccaggttgttgctgtgaaacttgcggtttaccccaagcttgaggttcctgtggtggagtttgttgtctaccccatgcagcttgttgttgagatgtaggagctggttgttgagaactttgtgttacaggatctcctttatgttttgcagcttgttgttcaggttgtttttgtttcttctttttacctccttgttggggctgggggtcttgtggaataggttgaggctgaatctcagtggattgagctgttgagttgatcctgcttgtgaatctgatggtgaactggaagaagcttgcgatccttcctcttgcttctttccttttccttttttctttcccatgttgcacaaagataataattatttcaatcacaattatttcaatcaattttcttgttgatctgtcaatgacatttgttgaag

SEQ ID NO: 14702 - DNA, 436 bp, Diabrotica virgifera
  SmartBlast Evalue=8E-29; Info=Nitrilase-like protein 2 n=1 Tax= Camponotus floridanus RepID=E2A7Y5_9HYME
tgttggggtaacagtcacactagttatgataacaaatcaaatttgaagttcatctacaaaaagttcttttttgtgctaaagagagaaagtacaagaaattatgaaaaaaattatccgtacagccctgattcagatgcaggtaggaacagaactaattaaaaatttagaaaatgcttcgaaacatattgccaacgccaaagcagggggagcagaattggtagcattaccagaatgttttaattctccgtatggtaccaatttctttaaacaatatgcatctgaagtcccaaaaggttcaacatgtgagatgctctcgaaagcagctaaagaaaattccatttatttggtggggggtacatttcccgaaatagaaaatgataaaatttataatacttgtacagtttggaatcccgaaggagagctaatagcaaaattt

SEQ ID NO: 14703 - DNA, 433 bp, Diabrotica virgifera
ttcggaaaactgctgaaaaaggtattctcgatcgaaatatataaaacaaaaatttctgtagttgtccttacagatagaaatgaaaattatttcgtttgatatattatgtggagcgttttataagtcacttcttctgttcagttgtatttagtaaagtgtataaattataattaatttcattatttagttacgttaggttaagtttatcaagtattttttcatgttcaaaagttaccaatattccaaactaatataccataacgttaaaaattgtaataatcaaaaactattatttatcacagttttgtgttacatcacaaagtgagttggataattgacaatattttcgctttttacacttcatagaatagggttaacttgatctttcagagatattttacattttgaacgaatctcttacttttcggtttat

SEQ ID NO: 14704 - DNA, 435 bp, Diabrotica virgifera
ataccagaatcatctaagaatggatttaaacatattattttacttgaattcaaaacctcttttgattttttcagagcttgcaagtcttcataaaaactctgtttctgcgataatattattagtcgtctcaaagctgttttttgttcgtcatttgagagaattttacttaaaaccctttgtttcctttttaatttggatttttttaaatctaaatatccaacctgttacattctttattcgtttaagtctagaatatttatcgaatatgtcctgtactaaaattgaagaaaataccaattttggctttctaatttctgggcagctcctctactttaacacctgattctgttttagaccacatttcttcgtgcagtcttaaaaaattaggaccatcccaccacaattaatatccttgaattgctctggttctattcc

SEQ ID NO: 14705 - DNA, 432 bp, Diabrotica virgifera
atcggtcacagtggctctgtaacgtcatatgtcacgattatgtcacctgtcatgactagttaagaagctacgtccgtttatttcctccctctaaatctcactattataggtacaaccgctcaaaagacacgaggggaggggtacggactcttgactagcaccgtatataatttagtatacctgataatatagccttgcaaacattatttacgacaacgttctcgatgagccagatgtttaaaatgccttccggcacgaagaaaatcttgagtccgcgattccgtaatgtcagacggtggatcggtatgcttacgcatcaggtgcgttaggtctggtgagtggcggtctcccaaaaaatgatcgagctgtattcgaagagactcccaggccatgtagcatgtgcctcgtcttgttgaaaccgttgttaatttt

SEQ ID NO: 14706 - DNA, 437 bp, Diabrotica virgifera
gtgccataaagttaagaaatgaaatataaaatgtacctactttaccctttaagcttaacaacaagtaaagcttttgtttacaaccaagtaaagtacctgaagaacgtcaaagacgacaattagtaattcatacctacttgtgttggcgttagcttttagtcatttatcattagattgtgaatcgtgagttgatgctggtgaattttatttattcgcttcggattaatttttagttctagtgtttgtgagtgctaattaatattgtttaaatacattttaaaacaacttggaacagttagtaccattcttcaaaaacctggtctggatctaaacactggcacacttctactacaaggactacacagtagtatacaaaaacaccgtgaaaattttgaatactttgaagaaaaatcaaaaagttgagtttatacgttaaa

SEQ ID NO: 14707 - DNA, 434 bp, Diabrotica virgifera
aaaacttgcggagggtaaagtgtggaatttgttctaagcagtttgctaaaaaagaaatctttaactttacacatgaaagatcacactgaggagaagcttacaaatgtaacatttgttttaagctttttacgctagcaggtaatttaaaagcacatttgagaatacacacgggagtaaaacctcacaagtgtgaaacgtgtttaaagcagttttatacaacaagagatttgaaaagacatttgagagtgcacactggagaaaaaattataagtgtgaaatttgtttaagttatttagtgatgcaggtcgtttgaaaatgcatttgagaatacatactggagaaaaacctcataagtgtgaagtatgtttgaagcagtttattacagcaactcatttgaaaagacattcgatagtgcacactggggaaaaaactca

SEQ ID NO: 14708 - DNA, 437 bp, Diabrotica virgifera
ctctggaataacaaatcagaaaattataaaaaaaacagtgtattgagagagaaggcaataaagaccccttttatcgggattaaatattgcggaactttcggaaaatgacaataaaaattaaaaataaaaagtattcgaacaagatctatatggcagaactaccaacaacaatgtaattgtatcatccacattgttcaaccgaattgaatgaagaataaattgaagcgtgtatatgtatgcctttcaatttggttgaacaatgtaattgaatcatccacattgttcaaccgaattaaatggtgtatttccgccttaatagagatgggcgaaccagatgtgatcttgtcagtcggatgttaaagatttgaatctacaacattaaatattaacttgaaaaccacgtggggtattgattgaaaacatctaatacaaaatgt

SEQ ID NO: 14709 - DNA, 430 bp, Diabrotica virgifera
ctttgatgtactggaacaggggaagttttaattttggaacgtcagattacgaaagcgccccacgtattttgtcggacagggcttccaattgatttgttggcgtttcattgggctctcatgcaaaagttagactgctatttatcaccgatataattcctgtcatttgacatgttcttcgtgttccactcattaaaatacccagttggtgataaacatcagtctgatttttgcatgagagtttaatgaaatgataacaagtcaattggaagttctgtccgacaaaatgcatggaacgctttcgtagtcggacgttccaaatttttaacctgttccacaattaaacgtcccctgttccagtgttcccatacatcaaagtttgcccgactagacaccgttgagctattggcaaattttcagcgtgctattgatc

SEQ ID NO: 14710 - DNA, 437 bp, Diabrotica virgifera
aattacgctattcttacctgtagtgatttaagggtataggcgcaaaacttcgcgccaatgtcttttaaaagaattcatttttttcgaattctgagaaaacctgtaagtatccccgaaaaaatcaaacgcagaatgaaatattacactattactgcgggccgaaagtcccctagaataaccaaaaagttccctttgaatgagatacgtgaaattaaaatcacactaaatattctcgttattttaaccatgtaacttattaaaacaaacattatagaagtattcagggacattcggccctcggtaataatgcaatctttcacacagcgtccaaactcttcaaaaataccattagttctctcaggcctcgaaaaaaatacatgtaatacacattggcgcgaacctttggacctacgcccttaaaggaaaaattgccattt

SEQ ID NO: 14711 - DNA, 432 bp, Diabrotica virgifera
ccaggcttcattgttttatttatcttctgttgctttctcctctttcttctctgtccttgcttcattgccaaattcatttccacctgtttgttttttgtcaaaattatcctttttccgtttctcatgttccttgtccatttccagaatgtcctgtcctttcttttgcttgttttgtttcctgttgattgttatctattttttgttgtgtttccttcatcgctcgttttgtttcttcctgattttcttgcattttatccattttatccatcttctttgatgtttcttcctgatttttatcccttttatttaatatttcatcccattttgtaactggagttccatcagttgtattactttatctattcctgataattcctgttgttctgatgccatgattgttgtttcaaaaatgtcttcttgttctatatgttc

SEQ ID NO: 14712 - DNA, 435 bp, Diabrotica virgifera
cagcggaaccgagacgatgtaaactggttgtaaataacaaaataatagaataagtgatgaaaacagcatacttgggaataaaactgtcaagctacggaaaagtggaagaagtacaaaaacaagtaaacatggcgaaaagagcagcaggatgtctcaacgacacaatctgcagaatcaacaacacaaatacctcacaacggaaactaaaaccaggatatataaatcaacaataagaccgataatgacgttcacagcggaaacaagagcagatacggcgaaaacacaaagactgctggaaacagcaaaaagtcttacgaaaaatagcaaaacaaactctaaaagacagagtaagaagtgaggaaatacgagcgagatgtggtatagaagaaataaacatgtgcaccaaaagaagaaaaatagaatggaatcaacaca

SEQ ID NO: 14713 - DNA, 436 bp, Diabrotica virgifera
  SmartBlast Evalue=1E-21; Info=Transport protein SEC61 n=3 Tax= Endopterygota RepID=Q1HPU6_BOMMO
gatttggggagaacttggaattcttttactgtcgacgtagctttgaagcacagttatagtactgtattctaacataaatcaaaacaactatggaccaaattgcaaaattcgttgagcctggaaaacagtttgccaaagactcaattagattagttaaaaggtgtacaaaaccagacagacgagagttccaaaagattgcaattgccactgccatcggtttttgtatcatgggcttcataggatttttcgtaaaactaatccacatccccatcaacaacattatagtgggatcataaatatattttcatatttatgtcagttcatacaatcatcattttccattttcttagttaaataggaataccataaattatatttttacttttcatatatttatcattcaatgttttttgcatagaataaaacgttgttttgt

SEQ ID NO: 14714 - DNA, 433 bp, Diabrotica virgifera
  SmartBlast Evalue=4E-53; Info="Peptidyl-prolyl cis-trans isomerase E, putative n=1 Tax=Pediculus humanus corporis RepID= E0VLT4_PEDHC"
caaaatacaaataaacaaaaatatgtaaaatgagttctaacaataaaaggacagtatatgtaggcggtttagctgaagaagtcgatgaacaggtacttaatgcagcatttattcctttcggcgatatcatagatgttcaaatacctttggattatgaatctgaaaagcatagaggttttgcttttatcgaatttgaaagtgccgaagatgcaggagctgctatcgataatatgaatgactcggaactgtttggcagaacgatacgagtaaatctagccaaaccgcaaaggattaaagagggttcgactagacctgtgtggtccgaagatacatggctacaacaacatgcaggtgaaaccgataggaaaaaaattaggaactggagaaaaaacgaacaagaagaagaaacaagcgaagctacatcaaatgaatc

SEQ ID NO: 14715 - DNA, 437 bp, Diabrotica virgifera
actgtagtcatcgttttatgaatatattaacaatgaaactatttgtcgcagtatttcttttaacagcttgcgtatgtgtcgcaatggctggtgaagatgattgtcctccagaaaaccctccttgcaatccattattgtgcccaattcctggttgttcacccgattccgttctgaagaaaagaaatccctgtgattgttgcgaaagttgttatactcctaaaaaacaaggtgaaccttgcggagacccacgatttgcttgtattgatggacttcggtgtaaaaatgacgtttgtgtctaaaaagtgtctttattaaaacttcacaatgctgtgtactagatagctaaataacaaagataattatagaatttttttttcaaactctgtatagcatttaaaaatattgttattaatcaacaaataaatatcgaaaattcc

SEQ ID NO: 14716 - DNA, 434 bp, Diabrotica virgifera
  SmartBlast Evalue=0.000000005; Info=Endonuclease-reverse transcriptase n=1 Tax=Bombyx mori RepID=D7F169_BOMMO
ttacaatgtacgccgcaccaattaaatataacagccagaaaatttaacatggtaatttcaccaaaaatacaaaatgcatggttataacagcaaattcaataaggtgtaaattggagctggatggtcagataatacaacaagtcatggagtttaaatatctaggcatcacactatctagctacggaaagctcgaaaccaaagtggaagatcaggtgaataaagcaaacaaagcctcaggcttcctgaataacacaatatggagaaataaaaatatcggaaaagaaatgaaaggtagaatttacaaaacagtcatcagaccaataatgacatacgcggcaaaaacacgacctgacacagagaggacaaaaagattgctctaaacagcggagatgaaaacccttcgaaaaattgatggtaagacacgatgggatagt

SEQ ID NO: 14717 - DNA, 435 bp, Diabrotica virgifera
  SmartBlast Evalue=0.000000007; Info=Myb-like DNA-binding domain containing protein n=1 Tax=Tetrahymena thermophila SB210 RepID= Q24DR4_TETTH
gtcctgaataatcatcaatttcaaagttgtgtagtgaccagggcgaatattcaagttggcacaaagatttatttcattctcggacaaaaggtttcccatggggtggtatcgcaatgtggatgcatctacgggagacagatctacgttggaactggaagaacacccattcgtttctgtttctccggatatgatatccatcggaatatcttgctcgtcgctatttccattttgatgaaattccagttgcaccatgctgctggtaccaggttcgctgttctgcctctgtaccacatgttgttcgtactggttaatttcttcctgagttcgaagaccgagactacggtaccttgagagttccgataaccgatgacgaagattctttttcttttctaggctggatgttattcgttcgtaatcggccggccgcatgaattg

SEQ ID NO: 14718 - DNA, 435 bp, Diabrotica virgifera
aataaaactttagttttaatattcccctaaatatttttaatgtaacattgttgtcaaattatgtaaataataatcaaaatatatgttatacatttggtactgcttttagtattaaattatcttctacttttaagtccccatgacgtcctgtgttggtaaagattttaaccaatcctagaatcactgtaatattgaatagataaagaacggacaatataaccagcatcacaatatgaaacatggccctttcccatttttcaaccatataaagttcagttactagaaggtatctaaagtaccaatagttaataaaatttttaactgcttggatcattatttaataattattctgccttctgccgtgtaacagttaaacaccccactcccttatctttgcagttttaaaataaaaaataaaacccaactgcgaactgc

SEQ ID NO: 14719 - DNA, 434 bp, Diabrotica virgifera
ccaatatgtttttccatattatgaaaacgttttgtttgttagtagtattaattgcccttacaccacaatctagggcagacgattacgaattttgtccaactaccaacataaaacaccagttagtttacaacaaaattgttaatggaacatatattaatcttcgtatcccggaaacaggtttctttcaaagtacaatcagctgcattgaagttatggatttaagagcttcttcgtgtgtaccgaaaattacagtaggaggatttggaaatacatttatgcatctaattcttgcagatcctgtaggaacagagttagaatacgaaattcaagtatatcaaaaagaatgagggagaaatagtttttaaaatttcttgtagattgtttaaactttgtaatattataaaactttgattcaaaactaaataaataaattg

SEQ ID NO: 14720 - DNA, 435 bp, Diabrotica virgifera
  SmartBlast Evalue=2E-37; Info=Exportin-7 n=2 Tax=Aculeata RepID= E2BNH0_9HYME
gtgttgtgtgagtgaggtgattgggataaattccggcttctttactgtagaggtctagccttaaaatcacaaatttgtattcctgtagaaacaaatgaacttagcgggaaatggctgacgaacaggagataagacaattggaactcctttgcaaacaattgtatgaatcccaagacactagtgtaagagctgaagctgaaaaaactttggtagtatttcaatcgggccctgatgcacttactaaatgccaagttcttctggatagaggggactcttgttatgcacagttactggctgctaccaccttgacaaaactagtgtcccggagtgcacaaggcttaagtttacagcagagagtggatattaggaactatgttttgaattatttagcaactaggccgaaacttcctaattttgttcttcaggcattagtta

SEQ ID NO: 14721 - DNA, 435 bp, Diabrotica virgifera
  SmartBlast Evalue=2E-21; Info=Endonuclease-reverse transcriptase n=1 Tax=Bombyx mori RepID=D5LB38_BOMMO
tgtttgaaatgcgttgaactcaagatattctgagcattctacgatataaccacatctcgaaggtttctaatttgttcatcatgttaaccttcatgatccaggtttcacatccatatagtaatacaggatacacataacattttacgaacttaaatcttagttgtaaattcagctgagaattgctcagaatagatctaagtttcataaatgcccctcttgcaatttctatacgagttttaatttcttcatccgtatttagtgtctcgtttatccaacattttaggtatttaaaatagttaacttttgttattagttcattactgacaatggttacattgtttataactcgataacgatcaacttgagaggaaaattacaaaagcccttttttgtttcgaatgatttaaaaaatctaaagtaatatctgcccgggac

SEQ ID NO: 14722 - DNA, 429 bp, Diabrotica virgifera
gttaatttggtgtttggggtgtttagacaaatgattaattttttttagtattttcccacttctttcctgaggcatcagttgttgtttagattcaggaatatttcctggataattctatgtatgcgagaacgcatgaatctacagttttattcaaaattggttgctcgttctcgttcatattttttttctatcatttattatggtgtcatagaacttgtaagttcaccatttagattttattattacaattggtacgttatcagctatagctatagctagtgaacaacagcacggaccaattttagttagtcaacgacttacttgagtcgatggacctaatttagtttatttagtattagtgagaattggtacacaaatcttcctgatcgttcttctttggatatgctcctataaatctggtgtccattg

SEQ ID NO: 14723 - DNA, 435 bp, Diabrotica virgifera
gtgcggtattttttggcgaaaaaaatgcctaaacttctatagatcattaattttttgaagctcctacctataaaattgttgtccataagattattgtgagatttttcacgatctcccgattattcataaattagttataaacgacttagttttgttttgtacactatatataattatatatttttaagtactaatttgtaaataataaatcattaaaaagaaaaaaaacaatcagaagcgttttaaggcagcgaataatgtgagcaataataatctgcgccattttaactttttactatccattttgagaaaaatatagatataataataaaatgtgtaaaaatatccttattggctattaaaatattcagccttttcttttgacgtgacagttttgctgatataacattgtttatgctctataaacagctatgg

SEQ ID NO: 14724 - DNA, 434 bp, Diabrotica virgifera
  SmartBlast Evalue=0.000000001; Info=Cubilin n=1 Tax=Camponotus floridanus RepID=E2AK37_9HYME
gctcgtgaatattctaacttgaaaccttttccttttggtgttttatctttgctaaccagtgatacagtaacggaccgtccggatgtatagtaatcgaaaggtttttcgtcttttccacagaatagatgccgtcccttaacatcagtgtacatcagatttgtatgtgtattagcgccattatacacgacatttgaacccaaaccagtgttaacgccaagatttggatcttcgtaaatttgaatatagtctccaatacagtccctggtttcttcagttacaactatctcatcggtaatatcaaactcgtcgaagtgaaggacgattttgtcatatacagttcccgtggatatggcgtagctgcatttaatgtaagatggataatggcctgtatcatatcctggtgacgttagggttttcaccttcagtagtggctg

SEQ ID NO: 14725 - DNA, 435 bp, Diabrotica virgifera
ggtccctccggtgagtaccgatcccacaaggacagaaactattttcatttattaatttataataaatgaaaaaattcctgaccctgatgtaattctgtacttactgatattaattatcgattacaatccaattacttctttacgttgtaaatattccacgacaagaattaaagtttgaaacaactattatttgcttttctactgtcctctaaaattccggccgaaataggaagactagtcaaccgttagatggcgataccagccataccagcgaaactcacagaggataggcaacacttttttcttccagataaatttccggtgaaagttatactagtaatactgtaggtaggtggcgataccagcgaagctcggagcgtatattccacagcgaagctcggagcgtatattccaagaaaaattgaactgattaac

SEQ ID NO: 14726 - DNA, 433 bp, Diabrotica virgifera
  SmartBlast Evalue=2E-33; Info=Hsp70 binding protein n=2 Tax= Aedes aegypti RepID=Q17K40_AEDAE
tcaagaactactgtttgacaatatggattgttttgacaaagaactgccaatagttcacatcctgctgctcgaattttgctatctttggacttcatgcagggataaatggttgtgaatccaccaattttgtgaaaatcatttgcaatatcaatattatcaacatattccaaaatagtttcgatagcttctaaataattcgtattgcattctgaaggatctacagattcaactccttttaagaaagctatctgcctttgcatgatttggacaacatctactgacattgagttcagagcttcttcaaggaatttctttctctcttcgtccataggcgcgaattcactattagaaggcgcatcttctgcccttgtagcttccatagaaaatctaagtaatccttgtaaactcatgggttgtcttggttgattttctg

SEQ ID NO: 14727 - DNA, 440 bp, Diabrotica virgifera
  SmartBlast Evalue=4E-35; Info=Ribosomal protein L37 n=6 Tax= Endopterygota RepID=A2IAA1_9NEOP
aggtaaggttatacagactacaacacattttcgttaataaataaataacttaccacaaagccattcggtccttggggtaatttaaagactcaaaattcgataaaaaataggtaggtcaaaatgaccaaaggtacctcaagttttggtaaacgtcgcaataagacccacaccctatgcaggaggtgcggtagatcttcataccacatccaaaagtcacaatgcgctcagtgtggctacccatctgcaaaactacgttcctacaactggtccatcaaagccaagaggaggaagaccaccggaactggccgtctccgtcatcttaaaattgtacgcaggcgtttccgtaatggattccgtgaaggtactaaaccagttaagaaatcaacgtagatttattaatttttttttgtataagaacaaataaaaaaactgtttagttt

SEQ ID NO: 14728 - DNA, 429 bp, Diabrotica virgifera
accttggctcatttacaaaaagaagtatattacaaataagacattcaatcaccccgctttccacctgtagcgatccaaacgaaaaaactgccatttttcacccttatttgtcaataactaagtttctcgtccgaactgtgacgggaattcccgctacaatgtattaggtcatatagctacccaaaaaatccatttgcaacctggcttgcaacctggatattcttatagtaggtatatcggatataacaaagtaatcccaataagaaaaccatatggttttcatattttagaattgatagctgaagaatcagatgatagaaaaagtgattgagtttaaatatctaggcatcacagtgtgtagctacggaaagctcgaaacagaagtggaagatcaactgaatagagcaaacagagccgcatgctgcaaac

SEQ ID NO: 14729 - DNA, 432 bp, Diabrotica virgifera
gccctcttgtattttctgtgttatcttcatcatacaattacttcatctaaaaattttctgcgaaaaataaaccaaaagtttaaccaccttcacaccgcagaatcaagttacacaaattttcaaacacctcacctgacacagcgtctcaagtacgattgcgcgaattggtaaatataactccgcacgaccacgcaactcgaaacacaagcacgcaaacacggctgcgcgaaacgcggctcgcaatcgtgaaactcacgagacccgctcgacctgtagattcctgtctaagaatcagtaacaaattctccttcttggatccttttcaaaacactattcagcacactcaaacagatgattactgcaacaaagcttctcacagggtggtcaaaatatgagattgttccattaacaattcaagctgtaacaacctac

SEQ ID NO: 14730 - DNA, 434 bp, Diabrotica virgifera
gtacatattgatgacaaggttataaatataaatgtctattgtctgtgttagaaattatctatttagatatgcaatagtttttgctgatttacattttattgacaatagaaaaaatttaaatatttaaaaaggacatttcaaggctatcatatatcaacattctggaaaaagctgtgactggtgtaaattacatgtaacaatttactattgaggacgatattgatatataactattttctatagaccattcagtggccattatatttttatgaaaaaattctagtcacataatgttttgctattaacgattaaccgaaataatcatttaaggcaacgaaactttggtattttggagtcaaaaatatgaactagaaggtttggtgggatttagtaccaaataaaatattacttgcaatttttctacctaatttata

SEQ ID NO: 14731 - DNA, 431 bp, Diabrotica virgifera
ttgtacaattcctgtatattttttaagcacttatctatgttggttgatagtttggatgttatcaaaatatgattaatcaaacccaggttttttttgttatcactgacataagtagatattttgtctatctctagagcgattttctccgatttccttgcattatcttcattaattttgtgtaaatcttcccattggtcttggaaatgggttaaaatttctgcgccagcattaacatttattaatttcttcttaggtaactgtatttcatcaccagtatgaaatagggacacattcaggattttttcctttaaactggataacattttattgtcgttttaaaatatataatagtgccatatataccgattatacatttcttgtaaagtatacgacttacattatttcgattgtgttaaaaaacatacaaaaac

SEQ ID NO: 14732 - DNA, 432 bp, Diabrotica virgifera
aaaattcagttaaatcatttttaaactacaatttacattgctatttttctgacagtatgttcatgacctctttttcggttgtgtttaatatttgtgactcctattatcagttgttttgctaattctatcaacctctgctctcgttacatgtttgttcacgtttcttctttgatacgtaacaatgtcagttgtagaaaagacagttttcccaatttcacttatgttcatgcttttattgcaccatgtcaacattgtacagaaataaatacaaaatcgatgagattagctcagtagctatggataaaataagaaatatcaagtactttgtttggctgtatgtggcataatcagccaattaaaaatatgcacgatgttttgagtctgccaaacacagcttatcccatatacctattttgaattgaaccaatcaat

SEQ ID NO: 14733 - DNA, 434 bp, Diabrotica virgifera
atttgtccaatcatgaagggaacaattttttgtgtggtcctaattgcttgcgttctaacaactgctgctgataaatatagtcacttaggtgaagccgtgaaagaatgtggtgctgaacatggcgggccaaacgaaatcaagggaccgatggatctacaaaaacatggagcgacagccttctgtatattgaataagggtgaaataataaccgaaaacggagatatcattgaaaatactgtaagagaaatatatcgaaatatttatgccactgaaacagaagtagatgcagtaattcacaaatgtggaactaaaaatggaaaaactcgcgaagaggttgcttttaatttgtttgcttgtttcgagcatcttcctccagaaacaaaaaaaaacgtgagaaagttgtaaaagttttgttataaataaaattatatttt

SEQ ID NO: 14734 - DNA, 433 bp, Diabrotica virgifera
  SmartBlast Evalue=9E-22; Info=Endonuclease-reverse transcriptase n=1 Tax=Bombyx mori RepID=D5LB38_BOMMO
ttattctacacatactacataaagcctttcttcttcttcttaaagtgccctctcatcaatggaggtttgctactacaatcgcaaactcttgtctgtcttcagctgttcttattagctgtttaaaatgtagccctgtccattgtcggatatttcttagtctcgatcgttcctttcactattagttgagcatattggtacttattatttctcagaatgtggtctaggtatgatgtttttctaactttcactgtgttgaaaagttttcgttctttgcctattctatgcagcacttcttcgtttgaggtatgtgatatccatgaaattatgatgattctccggtagacccacatttcaaaagcctccaatttatttacggttgatgttttaagggttcacttttcaactgcatagagaatatataacataaagcccg

SEQ ID NO: 14735 - DNA, 433 bp, Diabrotica virgifera
cccccttaagaatagaaaaatagaatcttgtttgggtagctcggcatgcaagatcaaatgctaacccgactatactatataattttgactctttattgcatgtaacttttcttgtattgtaaaaccacacaaattcctttaaccattaaagtcccgtgtcttggatatctgtgggcaaattttcagccaaacagaagaacatgtattctgagaatggatgaaatggaaaaacagtattttaccgttttctacgctctacgttttaaaacaacttgtttcaaaacaaaaaatttgctacaatgccttataatcacattctggataacccttccattaaaacacattttttcaattgataatttacgataaaaaatgcaaacttgttcaaatagattccaaaccactgtaaaatcgcttaaaatgatattttgag

SEQ ID NO: 14736 - DNA, 432 bp, Diabrotica virgifera
acaatattgtgaaagagggatatgtagattctttgttgttcccaggatctggttgaaaagaagacattgatttcattactaaggcacccaggagaagggcatggccctaaccctcaaatatgagtattatagaaaattaacagttacccaggcaaccatccaatgagaatcgtaggaaaattaacagttccacagacaatcatccagtgaccacattgtctctttttggacataccatctgacgctttctgaagatcttggggtgtaaataacccaggacagcaccggaagaagccgtcagaccacaggctaaattccttattaaaatctatagcttgcctataaacagagacacactatttttatataaaataacttcattagttctaaaatgtagatcttgaactgtgaccataataaaatgagaaaata

SEQ ID NO: 14737 - DNA, 432 bp, Diabrotica virgifera
gtttaattttttcattgtgtttgtctatttttgtggacgaattatctatatatggattaatttcttgaaaagtgttcaacagaaatatggctggtcaaggatttttattcaaaacattcaatgttttcaatagcagaattatatctgcaaataggttaaatgtggcaaatttccaaacccccaccaggaccataaaaacagagactaaggaaagactcaaatccttaaatattcctgaaaagccgaagaaacctttaacgccctatttacagtatgttaatcaaaagcgaagtactatagttaaggaaaatcccaatatacttcccaaagatgtattaagaaaactctcagaagaatggaaacaagtgactgaagaagaaaaggagaaactgaaggaaaagtatcaaaaagaagcagagatatatgataaag

SEQ ID NO: 14738 - DNA, 432 bp, Diabrotica virgifera
atgtcagcaaatgcttcgtttcggagatacggaatgttgaaattttttctgacaaactgatgatttgtttagtgctctaaaactggttgagatatgcaattgaaatttggtatgttttaagatgtagttattgcgaacttgcaaattttatttgcatatcgcaaccggttttacagcgataaataaatcgttagtgtgtaggaaaaatttcaacaacccgtatcttggaaacgaagcatttacgtttataaagcaaactgtcatttctttttcatgttggattaccgtttaaagtttgccgcacatcctgtattgatgaaaaacatggctagttgttaaaagtgccgaacttttattgtccaacttaagcgattgaataagaaaacagaatgttaagaaggtctgaggctgtagttgagttttaatttcagt

SEQ ID NO: 14739 - DNA, 433 bp, Diabrotica virgifera
  SmartBlast Evalue=3E-35; Info=Epithelial membrane protein n=2 Tax=Stegomyia RepID=D2K2F5_AEDAL
tcccatctttctctgtatacatatggacccaattcgttgacgataggtttcgatccattattaaggaattcatcagcgttggtaacgttgtagatataaagccttatcttgggctctactggaggtttggcccaccaactgaacgtttgtgtaccatttactaatttaatttgtgaatttattattaaattaacccagctactgaagaaaacagcgattattattccaaaaagtacacatcctagtgatatcgctacgacgaaccaccatttccttaggaaagcacttgatagtttagcacataacttttcccttcctttcattttgtttacctaaattgtctttaactacgtaaaactattgagattcacaaaacactattagaggtaggtaaccgtatataagttattggctccgcttcattacacgatcg

SEQ ID NO: 14740 - DNA, 429 bp, Diabrotica virgifera
tttactacatacaatgtttaccttttaataacataacctcaatcttacttttcttcttattcttttttgtgctttggccttggcaactatccagtaaccaggattaatataattggccaatataattaaagtgctaaaacgttgctgatgctacgacactaggtgtcgctcttccgaacttgcacggtaccaataggaataggagtggggataagatgtacccctgccagacaactcttttgatctccacacaatttttgctcttgctgtttgaccccagtataggtttgccacaatccgaaatatccttgtcgtcaatacctttcaaccaaatctataaaaaatagaagaagtattgatataagtgtgtgaaataggtctagttgaaataacatactgcgttatttcagactgatgatcaatatatca

SEQ ID NO: 14741 - DNA, 429 bp, Diabrotica virgifera
  SmartBlast Evalue=6E-21; Info=Endonuclease-reverse transcriptase n=1 Tax=Bombyx mori RepID=D5LB38_BOMMO
tagaagaatcctgaagatatcatggaccgagcatgtaacaaacaacgaagttgtgagaagagtcaacaaaagaatggaaatattggataccatcaagagacgaaagctgcaatacctggggcatgttatgtgtaatgagagatacaacatacttcaattaactacacaagggaaaattcagggcaagagaagtgtaggaaggagaagaatcccatggttgcgtaacttgagggaatggtacggatgcacatcaatcgaactattcagagcagcagcatctaggatcagaatagccatgatgattgccaacctccgtcgcagagacggcacgtaaagaagattctaatacgcccatcacacagtccacggttggtaaaattgagcagacatttaaaaaactggacacgtgaaacatgttgcagatgttgg

SEQ ID NO: 14742 - DNA, 432 bp, Diabrotica virgifera
  SmartBlast Evalue=3E-37; Info=Uncharacterized conserved protein n=1 Tax=Glossina morsitans morsitans RepID=D3TQ35_GLOMM
gtaatgttttggtgcttaatttaatcttaatgataataagattaatagttgggagatatgtattctttggttataattattgaattttaagtaaatttcaatgagtgctgcgaatattgtacagtacgttatagtacgaggtgatctcctcaaagccctagaatggcctgtcggagcagtgatagcacaagcttgtcatgccgttacagctgttacacatctcttttacgaagatgaatacacccagcaatatcttaaagatttagataatatgcacaaagttgttttggaagccctagatgagaaaagtttagttaatcttaaagagaaactggaagaaaatagtgttaagcacaagatgtggatagagcaaccagagaatatacccacatgtttagttgttaaaccttatcccaaggaggaaattcagaa

SEQ ID NO: 14743 - DNA, 433 bp, Diabrotica virgifera
gatttatttttctttatttggaaagtttagttttctttattttgagttaaatatccgtatagtatacggatatatatatggttgcattctcaattcaataaatatgtagtctacatttggattgtaatatgggaactggaaatttccaataactttccatcctccttccaccggatggctgtcgttaaacaacttggaaaatgtttctaaaaactctggactaacaagatttggatgaagtgccttagcttctttgaatgctttcagggcatttatctcgtagattggatcgggaacttttcgatcttgtatgtaaacttcatcttcaccactgcttgtcgatgcaggtgtcggtggtgttggtgtttcaggagcatacgtggatatccattcaccaggatagccagctacaagtgccaagcaaattagactg

SEQ ID NO: 14744 - DNA, 431 bp, Diabrotica virgifera
caaagttgaagattatgtctaactcacaaatacttccaaaatatttatcaaggagctctacataacggtgtataatttccagggttaggagttcattgtcacattgttcaattgcacagcaaaaatacaaacttgcatatcttttgtaaacaatttttaagtctctccactccagaaaactacacattttaggttttctagctaaaatagttgtgattaattctcttgtaatttttttcttgagcttgtctggatgagccacataccatttttgtaaccttagtttaccttgtctactgaataataacatgaattgcatcatcctgaaaactaggtatatggtatatttatttttttaataacttttttcatccaacttatctaaaataacataatagaataaacctataaattggttttggtcatttatg

SEQ ID NO: 14745 - DNA, 429 bp, Diabrotica virgifera
acatttgtccgtttagttatctgaaacgaattttagttcctttcatagctatgttgataaaatttgatatttgtgaaattagatattgcaaagcagtcagtaaaaatacatgtggtatactacacgatagcgcatgcgctcttctacaaaaattgtgatgattattaaatacaaaagtgatcatttgttaacgttacactgcccaacacaattgcaaaattttggggctcggagaaggttatccacatctatacaagctttaaatatcgagtgattgatttctattacacagtaaatcaaaataatgcaactataagagcaacaattaggttagaaaacatcacagtaaaaaacttcttattggtaggtacaattcaattaaaaaatcttacaaaatccaaatggatcacataaatgtgctcagaacgt

SEQ ID NO: 14746 - DNA, 429 bp, Diabrotica virgifera
gaaggcagagttactaatgtatctgaagtaacatctagaggagctagagtaaaggtcaaagtattgacggtaacaggtcagaaggtgtcattatctatgaaagatgtctgtcagattactggtaaagaccttaacccacattcccatgctccgactgaaagagaagatagagatagaaatcctgacaggcctgtaaacagcagtacgtctgtattgagactgccagtaaacatagatgaaggagaagaagactcccggaaacgagtaacaaggatttcaagtcccgagagatgggaaataaaacagatgatttcatcaggatgtattgctaaaagtgagttgcctgattttgatgaagaaactggattgttacccaaggatgaagatggagaggctgatattgaaattgaattggtcgaagatgaagct

SEQ ID NO: 14747 - DNA, 427 bp, Diabrotica virgifera
tacctatttaagcatcaaacaacattaggtattttttaaatttcattaaaaaaatcaaatttaacacaatttttcaacatgtctttttatccctcattcgccacatctatgtctcgtaattacaatcatactgtattacctgagtgcgaaaataaactagcagaagacaaagagaatcattctatctcattggcgtaatcgagcgagggctccaataggtacatataatttttttttgacatctaacaaaaatagattcttttttttttcgtaaattttcaaactacgtaaagggattttgacagtttcgagtccccccttctatacattgaaaaacgccaatgaactaacccaatttaataaatataatgactaaaataaaaatcagtaaaacgacattgtagttactgctggatgagagattgca

SEQ ID NO: 14748 - DNA, 430 bp, Diabrotica virgifera
gtattacacaacgattttagttataatttaaaaatattctcgtttatgttgtacatactattaatatgaaagtatgaatattggcagaaaactctaaaccacgccagtaatgaacccgataaaaaatagaaagaatgcgaaataaagtgcgaaaattaacggcttagtaccattcaagcgataatacgccattcttagtgctttatacaccttgaaaccctagaatatattactaaatggtaataaaaggtatatctgcatgaaaaagctgagttttaaacaaagtattgatcgataatacggaaaaaatggtcgctagggaataagagaacgaaaagatactagtgcagtgagtagcgtagtactttccggggtctcaggagaccgagaccccggaaaggacgtcgaaagctcggcacagtactatcga

SEQ ID NO: 14749 - DNA, 431 bp, Diabrotica virgifera
agaatcaagaatctgtataatgttttgattttaatattattattagatatgagacaagaccacatttagcaaaatttagagcgaggttttatttagtggataatatttaatgttaaattatttctataacttaaaccatgtcttttcatagaggtaatagcaatcctgattttcctttggaggctttaaaagttcatgggccaaattacctaaaacacgccctaactagctgtactgatcctctgaaagctattgaagaatttcagctaacaaatggaatactcttaccatcattgaggcctatgcttccattgctagatctgcatggagttagaagactggattttcacatgtctgtagtagaggaactaagggaaaactgataaaccatattaatgagattggcaagcaagaaggtaaagaacgtgatc

SEQ ID NO: 14750 - DNA, 419 bp, Diabrotica virgifera
tgtcccatttgaaggagcgaagttacagtcagcttccggtataaccggaagtggcaaagagaccaaagtattttcattaaatagctcacacgtcaaaacccctgtataacaattttcatgattttcttacctttggttctcgagatgtttctgatgggccctttatctgcctcaccctgtataccattttaaatattttatttgatttatatgagttcaaatccgctagggaaataattatgcctctaaaaaagtcgattacaaaattattttttctattctcatactataatatatcaattatgatttcactacttgtatcataatgaacgtcattatgatacagattttcagtacgatacagatttttaaccaatataatcgcgatatggcattcgcgatgaaggtggcacacgcgc

SEQ ID NO: 14751 - DNA, 431 bp, Diabrotica virgifera
cccccttaacgaactcccctgtattaagagccaatatatcgtaggggtacatttacagggtacaaggtgtctcccacgtaattttctgactcgctcgagtaactgcaaaaatcctcgcttcggcttctctaccatcgagatttccttcagattctagtaaagttattttttcattgtcaagttaccaactgatcttatcatgctaatgactaaacaagccacaattaataaatttgtctattggggaataaccctattcctccaggttagaagatcttcaccttgaagttcttctttggtaatttttttgttctgtgctaaaagctcggcaaactgggaaacgacgggatccattccgcaagaacttgccgctaccactacatcgtcttttaagtagaacgctacaaatttgtactgggatacatcaccat

SEQ ID NO: 14752 - DNA, 430 bp, Diabrotica virgifera
gtcgaggtcctgatgttaaaatcgactaactattcattcccacactaaccaaaaccgtttcctttattcccctcttcatgcttaaatccgaaactattaaaattctactgcaataaacttacttatgtcttaaagattcaaagttaaaaatagttctcaccggctaccgtagtaatcccaatccgttccacccatctgggccgacgtaggtccatatgtgtgagattcttattccgtgctcgtaataataattaagaaaaattatatacaggagaatttaaaatattacttactttttttttacttagtcctaagcctttctacctttaggtgtaaggctggtggagttgagagtttgacattgtagtctccatgctttccgatattgcgttaggtttcttgcacttcgtaatgtcgatcccttcttctc

SEQ ID NO: 14753 - DNA, 432 bp, Diabrotica virgifera
cggcagcactggcgagtagttattaactgctgtggaagtgtggaagaaggtgaaggtggtattatttcttgtcttgaacaatcgaaagttagagggagaaaaatggcgggtggtgaagtaagtaaaacaacaaaaccccaactaagaggtctcctagctggacaaattaaatggaatattatcattgctgccactatggctgctgcagctgccatagcccagaaagtgtttgtcaatgatcagagaaagaaggattatgctgcattttacaggacatatgatattgagaagtccttcaaccaaatccgaaacaagggtttatttgactcctgtgaacccgataactaagaagtcataaatcattagaacatattagattttttttttttagttataatgatgtaatgtttgccaatataatttaaaccacaa

SEQ ID NO: 14754 - DNA, 422 bp, Diabrotica virgifera
atagtccgtctgctataacttttcccatgcggcacgattcattctcaatcaaatcaagtcaaaacataaattgaaacgaacgtcgatgtgtatatacattttgtatactgtatactatatactacacacatcggcgtacgtttcacttcctgttttgacttaattcgattgaaaatgaatcgtaccgcaggggaaaagttataaagctgctaaaaaagacaatctaaattaaggctgtgtatgtcaattatttgcccagttgttacatatggaagcgaaacatggactttacattagcgggaaataaatgaggtgctggtatttgaaagaaaggttctcagaatgatatttggcccattaaagagatgaattaacagaagaatggataagccgtcgcaaggctgaatgggagactgtatcgt
